United States Patent Application Publication US 2020/0109395 A1 - sequence listing, part 8

SEQ ID NO: 34278 - protein, 1132 aa, Mycobacterium kansasii 824; identical to SEQ ID NO: 33212

SEQ ID NO: 34279 - protein, 386 aa, Mycobacterium kansasii 824; identical to SEQ ID NO: 30960

SEQ ID NO: 34280 - protein, 484 aa, Thauera sp. SWB20; identical to SEQ ID NO: 30670

SEQ ID NO: 34281 - protein, 227 aa, Thauera sp. SWB20; identical to SEQ ID NO: 30671

SEQ ID NO: 34282 - protein, 1140 aa, Thauera sp. SWB20; identical to SEQ ID NO: 30672

SEQ ID NO: 34283 - protein, 441 aa, Thauera sp. SWB20
MSWSTAQDLRAQVMRLWERGELLREGLPQDSGAPPCACLPEEESEGSGAQPCELPADAAAYTAVGPPAGHSRFPLRLTLKTPTSDDITRHFDAVRAWVAAISATPHVRLEWQETRHRVQGSQRLPASAWVDRLDDALAWIGKRAEDARFRALHAETAARQPLLLPWLHKRPLRALELAAEWSRLLDVVAWLQAHPRPDVYLRQVDLPGIHTKFIESQRGVLAELLELALPAAAIDPSRTGAQQFAARYGFLDKPVRLRLRVLDPALGLLPGAPCPDLALDADSFARLRLDVARVFITENETNFLAFPRVDKAIVIFGAGYGWEALARATWLQRCPIHYWGDIDTNGFAILAQLRARFAHVESLLMDRATLLAHEALWGREDSPRPADISRLTTEERSLYEDLRDHRIRPSLRLEQEHIGFGWLEKWLKIVHLMDDFQPYGG

SEQ ID NO: 34284 - protein, 490 aa, Corynebacterium singulare
MSVEARALSLRRLMHDSAAIRLLAADNAPVILALIAEYFPRGTRARPAAEVYELMVTDFEVIASEFPMPRTPQNYCNDWVKAGWLVRKSGRSTRGETLEPSEEALSALEAIERWEQPVTTVTASRVESISSALQRLARDTNEDIASRVASLEAERARIDHEIEKAQLGQFERLTAAETEERVQDVLNMAMAVPSDFARVRHDLEALNHQLRRQLLDPEGYRGDVLEEIFNGVDHIAESDAGRSFQGFYSLLMDRERSAWLDQWIEQVLDSDAGKDITPERRQQLRRLFRDMEETSFEVNQTMTGLARSLRHYVSSEQFAEDRRMIELLREARGMAIDAAQTSELKAFHRMDTPLQRIGMSIHSVSRIRLANPGREVVEEAPVAYQPGEDDAHALYELVRESEIDFEELHEAIRQTVSDSGPCTIAQVLQAHPATQGLASVVGLVHIADQHPLPAVREVSEKVTWTEEDGSLRAAQIPTMYFDHTTVEELQ

SEQ ID NO: 34285 - protein, 216 aa, Corynebacterium singulare
MTTANSPRVDSAHEPPLWEHDKGTLTYHSRRALVQLLQGPLIRAQKEPVLWSAIISDEENLRARLHEVFLELVIDETEGFAFTRMVEEDSLSIPQVLRTDKLKHIDTAILLNLRQELGLALPGERVIVDVEDLRESIGYVRAVDNRDEAGFTKRFNAAIKRIQNDYSLLSATETEGRLEVSPVLRQLFDASTVTAIRDEYARLARAEDTEEDTSDD

SEQ ID NO: 34286 - protein, 1122 aa, Corynebacterium singulare
MTKHTDLYPGQFRISRIQLINWGTFHGYFSIPVARKGFLITGGSGSGKSTLLDAMSAVLVPQNHVKFNAASQQDLGRHNGRNLVSYVRGAWRQQENTQTGEITPEYLREGATNSVVALTYDNGQGKQHTLIAIFRLNGGENSVGQVKKLYGLVPGDEDVDKLSPLLTRSLDSRKIRALYKGPGASFTPTYATFADRFRKRLGIKNVEGQLLLHRTQSAKSLSSLDQLFRDYMLDVPDTFTRADEAVEQFEDLRQAYLRVEDVKAQIDTLAPLPQLHSQRSSAEADKEKAEAMSEALPAVRTRLVAEELDYLIRAFTAQLAEAQSQAEALNAEVAHLDDAERLAAVAVTQLSAGELDALSAKMETADKEIEHRTKEFQRLAAAAGAWTDDYEFSPHGFAELQANAKLRIADFEVDFAKLTNEQQEAGVAARDAATACAALDSELRSFSSRRTNIDKALVELRSQLARDTGYAESELPFAGELIDISPQQADWEPVIQKLLHGFAATLLVPEAARDTINQWVNSRNVGTRLEYRTIPEFASPPASARSPRQLIHKLEFQDHAMAHWVRQHISRRFNYECVDSVAELDKVTTTPAVTRDGLESRPKDKDGSTRFIKDDRKRFSGTAWYRVGSTNTAKIELLRAQLTEAKATARATAKQVQNLNRKMDILRSQRDKAQQVLETSFQDIDTASAEARRRDLQEQYDSLASSPEAQALAAAHEQAKAKLKDARARQNAAQKHLGNIENELEHSTKRRRIIGTVPDIEDQDIAKAVEEALHKGKRKLTIDDIDARRDEVQASLQSTARTATRSIEDANAKIVSVLHTYLAQWPAEAADLEPQASFAGEGIEKLRFLRADRLADFRSQFLELLNGSTVRNLSHLTTDLRRARSDIEMRMEFINKSLERSPFNGERTLRIDVKDARGQVVQDFQRDLDAATSHSLGEISEDDTEAALARYHALDKILSRLGSSQPEDIRWRNVVLDTRKHVSFVGRECYPDGTTANTYQDSASLSGGQAQKLVFFCLAAALRFRLAEPDQDVPTYGSIILDEAFDRADPTFTRTAMSVFTSFGFHMILATPFKLIQTLSPYVDGTIVVKYDEPTINGRPQARTGYSLIDASTYQDPDHAQP

SEQ ID NO: 34287 - protein, 379 aa, Corynebacterium singulare
MRSPKDLQDHAAKYLRNHFAEALADPDSLCVDWPLHPPTAAAAARDIDAAQNFVRAWQRWPHQEEVIYASRNWSRAGLGTNTIPTRITITGAERIADAAGLNAEYVRARERAHSIAAIFPGSPDFAHTVHRSYNQWKDLSAYDLRCLAPCLTWLRANPDSGEWERAVPVEGVDGKWIGTHRRLLLTLLAPFGITDLGLRRSDTRIRLRYLNHAPALNDVEIPLAHAAHLFTTTPPRVLIVENKQTFLALPMLSEASPPTIALLGAGTAAHQLHALGWLNHTDITYWGDLDAAGFAILNAVRAHFPHTTSLLMDTATVTEFQHLAVPDPGDGSATLTHLTTEEQRAYRQLFTAGRVRIEQERIPFIYTSEIIERKFKASK

SEQ ID NO: 34288 - protein, 489 aa, Stenotrophomonas maltophilia
MKHRERITRYRHLREQPQWKLLAADHAPEIIGLLQGLLMDGERTLAAPVLHERLQRALDQLNGEELSRELPRTAQAYVAHWLAQGWLERRLPEGADQEQYELSTQALQAIRFADSLEQSRVAATESRLALVINQLSQLAAQTEADPDARLSALRDERDRIDAEIARVGEGRVAALDGKRALERARQIIGLADELTEDFRRVRDDFERLNREFRERIIDDEGERGDVLSKLFEGVDVIGESEAGRSFQAFWRLLNDAEQSAQLDAALESVLARGFARRLDRNERAFLRGFTGTMLERGGQVHDVLQHFARSLRGFVQSRGYLEQRRLNQLLKQAQGEALALRDDFPAQRSIGRDLQLTTSRLRSWSQWKLHDPRSAQVDGSVQRNDAAAISLESVGDLVASSEIDFRTLRRDLHDLLGMQPKLSISQALSQREAPQGLGSVIGYLSLGTRFGTVVEGEQELAHWRGGDGQWRRARIPLVWFTQEKRHELE

SEQ ID NO: 34289 - protein, 233 aa, Stenotrophomonas maltophilia
MSWNEDPIESSRLGEGEDAFDAEPVVVTPLPRRNNDVLYLGDTGRLPQDARRALCQLLIGPSIDQQRHAKLWPALLRNEAAIRTSLSDLFLELVLDRESGVAFTRQADTEDLDSPVLLRTSPLTFIDSVLLLYLRQQLGEADARGNRAVVADAEMAEALAVYEKNLSTDRAGFNRRVASAVQKMKDNHILTRLAGQEDRHEVSPALKLLFSAEDVSALSAVYRQLRETPAAEA

SEQ ID NO: 34290 - protein, 1128 aa, Stenotrophomonas maltophilia
MAISKHTPALFTEGLPDPRTQQFRMRRLQVHNWGTFNGLTEVPIAERGFLFVGRSGSGKSTLLDAMSALLVPPAIVDFNAAAREAERSGRDRNLVSYVRGAWADQQDRGTGEIATQYLRKGATWTALVLEYRAGDGRVVSLVRLFWIAGNGATAGDVRKHYLVAERPFDIAKDLGGFDLDLRKLKQKLADVHHFDSFAGYAERFRHLLGIDNEMALRLLHKTQSAKNLGDLNVFLRDFMLDTPKTFDAAERLVNDFAELDGAHQAVVTARRQVETLLPAREHYSELKQIKRRRSDDEVLKLGIDSFRESRRQQLIDARLRELDTRDRGLLGEESQRRAALDNHTAKLGELELQRRQQGGERIEELEREQGRAEAERDRRQAKQAQARDAAGQLQQALPEDAHGFAALVEQASTELLDRKRASSALDDAISERLGGRRDDERRFGDVRAELDAMQRNTSSIPAPLQKLRARLVEETGLPEAALPFVGELIQVREDDLPWQGAIERVLFGFAQSLLVDDKHYNEVADWVNRTHLGMRFTYYRVRRNDEAFARDPSPRSLLHKLELRDHVFEGWLRRELGKRFDYECVDARQLRNVDRGITREGQVKHPGDRFEKDDRSAVTDRRRWLLGFNNRDKLAVYEKEAQELAKRIAGCDEDVARLRAQRDLDNERRLACHQLAGIRWDEIDVATPQQRLVDIEATLRGLREGNADLEKLARQIDAARSDIEQARRTYEDTRVERGQLVKERDRLDRARQQSRALVLPTLGATQEAGLQERLEALGALSLETLEAHMRQVSNALNESLSSSQQDVNRVENQLLGCFRRFVQGWPEESGDFTVSVASADDFLARLERLERDGLPQHEERFFDLLQNQSKNNLLALQRHSAEARKSIGQRLDEVNASLEQVPFNRGTLLTIELSDRRLPEVLEFHQHLRDVLSQQQTEQRELAEAQFAVLRQLVTRLGSAEGEDKRWRELVLDVRMHVEFIGVELDAATRQQVEIYRSGAGKSGGQRQKLATTCLAAALRYQLGGADGQLPSYAAVVLDEAFDKADNEFTALAMNIFDNFGFQMVVATPLKSVMTLEPFIGGACFVEISGRHDSGVLLIEYDEEGKRLKLPERSRQQANEPEPEQADA

SEQ ID NO: 34291 - protein, 489 aa, Xanthomonas campestris; identical to SEQ ID NO: 30399

SEQ ID NO: 34292 - protein, 235 aa, Xanthomonas campestris
MNWSEQAALDTHDDDDADAHASALRLAASDAASAAQGGALFLGDTGTLPFDARRALCQLLAGPSIDAQRHGGLWPALLRNEVAVRQVLCELFLELVLDREGGVAFTRQADTAELESPTLLRSAPLTFIESVLLLFLRQQLAEADTRGERAVVDEAQLVEALSVYEKNVSTDRAGFTRRVMTAIGKMRENQLLSRLRGSEERYEVSPVLKLLFSAEDVQALVVAYRELREGEVAAD

SEQ ID NO: 34293 - protein, 1338 aa, Xanthomonas campestris
MNSQSNLSPASPGASLFAETLAEQRAQQFRMRRLQVHNWGTFNGLTEVPIAEKGFLFVGRSGSGKSTLLDAMSALLTPPSIVDFNAAAREAERSGRDRSLVSYVRGAWADQQDSASGEIATQYLRKGATWTALVLEYRNAQGEAVSLVRLFWIAGSGNAAADVRRHYMVVPRAFDVASELEGFDLDLRKLKARLGEDVAHFDGFAGYAERFRHALGIGNDMALRLLHKTQSAKNLGDLNAFLRGFMLDEPRTFEAADRLVEDFAELDGAHHAVVTARRQVETLSPAREHHAALMALRRSVGDLRELQLGVDSYREQQRLALLEARLQEVDSQDRGLAGEEGQRRESLDNHEQKLAGLEREQRAAGGEQIEELERERVRVERERDERLRRRAQIEQACRQLGTALAAGASGFAAQVAHAQGVLDGGKQHASALDEAIAERMGERRDDERRFAEIRAELDVLKKAPSSMPAPMQALRARLCDDTGIAESALPFVGELLQVREDQVAWRGAIERVLHGFAQSLLVDERHYAQVSEWVNRTHIGTRLVYFRVRRNDELHSRRVDPNALPGKLQLREHAFTDWLRNELTRRFDYACVDNAAALRNADRAITREGQVKHPGDRYEKDDRHAVNDRKRWLLGHDNRDKLKVFEREAQALAQRIASCDADVAALRKQREQDQEKQLAAHTLVERDWDEIDVGPKLQRLSDIDEQLQQLREGDSGLRALGQAIDTARTLRDQAKRTYEDVRLERAQLARERVRLEQQQAACAGRAGTAALTPTQLQGLQERLAALAPLSLDTLEAHFRVVERGLAEQLAESQGRDSRLSAQLLECFRRYCQQWPEDSGDFTVSLASADDFLARLDRLESDGLPRHEHRFFDLLQTQSKNNLLALQRHTAEAHKGIKQRMDEVNASLEQVPFNRDTILTIEVSDRRLAEVQEFQQQLRAVLSHQQTEDRALAEAQFATLRTLVARLGAQEPEARRWREQVLDVRLHVEFIGVELDAQTRAQVEIYRSGAGKSGGQRQKLATTCLAAALRYQLGGEDGELPRYCAVVLDEAFDKADNEFTALAMNIFENFGFQMVVATPLKSVMTLEPFIGGACFVEISGRHNSGVLLIEYDEQAQRLKLPERSRGEEVAAPPAEQGGAVAPGDRAQRAPVIAVESGHAASVHVAETTAVPAQGDAVTDGQSRGSKRTRAAATALTAAPVPAPAGKRSTAAAATSATAAPATRAADASNAQRKQAATPATPPKPTKPASTRTASSGTPAAKRTTTVKAAAVPKASKATPAVAAKRTGKAPKDVSKPASAQKVAKPVSKSKPTAKPATAASAKSRVASTRGSAPKVRSKR

SEQ ID NO: 34294 - protein, 481 aa, Xanthomonas campestris
MLSTAGTSLLLFKLLPGELFRPLASPNREHHWILLCRLFDEFFGPDAPMPPSVGLPRREITAAIERYLLADDLWEAEEGDIPDAPLPARAQTLYERLRGAGWLRQERVGAREMVSMPPLVAQFLSTLIDFSEHGPTFVSAKVRSIELQLHQVVEGRAGADALDEAADQARKLLVSLSSMSLQVRDLMPELSKAETTAQFARQWFERYVGQFFIGDYADLHRADHPLARRSSILAMVRQIESTELGERLQAWYVEHLSGHDPERASHRLQRSLRRLHELDRIDEYLGRLDDDIRQANRRALAFIDYRLRAPDKLDLLLQRACQGALSAPGQALRMPVGPGGLMRAERLRAPRQKPQPIARSANSSQQPTSEQLARLNLLRRIKRARLVTAEDMARYLGPYLERQPKVDSADLSIDSIEEFRAYQTLLTLALRSHRHGGLRRDDPLGRLLRGFRVELVEGAGQLETTYLRVSLFVIHRIQKAV

SEQ ID NO: 34295 - protein, 212 aa, Xanthomonas campestris
MKRSWNTLSQASNGVYTVQDFERAAYRLVTEQVLYASDRSARVAYNLIEAHLEDFKSALEPLGIALERNAHYRYVVAMPQHSEGTPVSLEETILLLILRHRYDQAMRQGQIEELGEVVVDLPALQEAYPAFSGRQMPEVGALRGLARALKRWGVCRLVDTEGDDPQPFHLLVRPAIVEVVGEQWLQRLDQHNRDEQDEPAQDPLAEDDDAAA

SEQ ID NO: 34296 - protein, 1141 aa, Xanthomonas campestris
MQLLERVHLVQFFLFEAQTLQLDATSAIIAPNGAGKSALLDALQIVLLGADRSRIRFNAQAGGSSRARSIRDYCLGVYRSGEDGRKRRTATTYISLVFRDEETGVPLTAGIALGASADEPDHRVHGLYLLPGVALELDDHLEHAGGKVLPLIWSAFRELGSKHCRQEGTKHELHTTSERFLKDLLLRLRASPTLHPDLVAYRKAFSNALNLQKHEDIDLFVRTLVAEDRPTEIARFRALLETFRQIKDKIEQVSHRIEVAEQVEDQYGKIAALAERAASSRALEAEYRRDLLCEQVEQADQSLTLFGEQLAGASRALQEARAGRGRVRQAYEQAQQRVQGTPGFADQASFDAIAGRDRDQVLQRKKELVRQITYVRDQWLRVGKLKLEAVEPARLAEALAPWQRWLDELTGLAHESAIPVSAEALHALAKSALQQSAPILSAVARHARASHAAWEDACARRDSARRNQARVTAGQSELRSDVVRLMNYLQDEGIDVRPVCDLVRIIDVAWQPAIEAYLRSHVEALLVPAEHEARATRLVRSLDGPRAVYGVKLALSSHARAGKADPPPGDSVASLIAGDGADAVAYLRRQLGELRQVDSDQEVVRTRQGLTRDGLIAKGGGLERRRLPSASELKIGATDSRARLKSLREELETAEQDVRRLEPAHRQAESSQQTLSRLADADEVASALHDGLLQHQEAQARYQMTRESQAARTDPDLVELTEQVRQLQERAGLFDLQIEQLAGQEAVAKGQCDAAEAMLKALRSQEEAYLRSAVAAFKAPDVNPNRVERQREELDEKFPSLEDRVKRCEDRAREADRQLNGLIPTAWSALAQYGKDHGATFDFDAGDWRPAQSFLQKELEHLRGTELAQYREQAADAYATAVDTFRTNVASTLYDNFSKLKHQINTLNRTLRSSPAFSNNERYQFHYEVIAEYQELHRFIQRAADLHGEDGLFGSAGEVPAAFRDLIEDSTQAKAVASPLDDYRRFFKFEVQIRQDDRVIGTLSERMRSGSGGEHRAPLYVIAGAALAAAYGKSDAHPGGMGLILLDEFGDKIDAQNARATTNYLRSLGLQLILAAPDTAQGTLSGVMDSYIELFRDGDLLQVERIEVKAAARELLLSDQFDLHPELLAAETARIQAERGA

SEQ ID NO: 34297 - protein, 402 aa, Xanthomonas campestris
MTEARATLEKLLRRGESARLRGACETVSLSLGSQAHAAEYTGLRSLDAIERFHAEIALAERDAAINVQRDRLAGDGTRIVRISIANLELLARHLSIKLTGETAAAAAQVLAPWADDFPIIQEILETWRSGRKVRGYGGEAATDVADAASFFAMRVKETHAEGILRRESVRHFGDSKRLERLTPWLDALISGQLAPSGLGKEEIWAAVGVRREPQPFLIAGKGSVRIEGAPTRLPLVEPYLGLPPQAVAEFMFESRYLLSIENLATFHDALPALAGSGGVLVYSGGMPSPAWRRAYAKALNGLAANVPVFHWGDIDQGGFRIAAVIAETAAAVGRKCHPWLMSPRDIPQYLKALAPRATAGALSAMKLSAERAGWNTVSADLTSEPILLEQEALDAAMPSLRL

SEQ ID NO: 34298 - protein, 490 aa, Rathayibacter toxicus
MIHSRAEAAYLRALAAFRTPTLDLLHGRHAPFVVTALSIVFSVDRPAVAVSDAHAEVAEILDELRANGYDDGERALPTGSARDICRSWSRGGWLIRQFEGEVEVYRLSAHAVSALEITGRTGGGRSRVSKSRVRTLLDAVEQLAADVETDPDARLRRLVAERERLDAEIARLSVSDAQDPVDDEQLLEEAENVLHLARELPADFARVAESIKAMQRDVVSDLRRDVRPTGEVLREYLDRGRHVMHSTPEGRAFAGALRLLGDPDRIDSLTQQLHTVLVQPFSRLLDAEQRAELSAIGRRVEVGVQEVLTAQRRASHVITGQVRAHDPARDRQVDLLLRDVMAGLQSWTSASAPDAVVEPLRHLPVAEIRHLRQSLGDVRTEGVPEPLSDGTDVEFVSDDSRAWGGPRYAELEAYVSGLGDEFDLGVAFEGAEEATRRPGDLLGLLEIVHRGGMREEESVSIVEARRPDGRTRRFAFQAVTARRVKENTDV

SEQ ID NO: 34299 - protein, 233 aa, Rathayibacter toxicus
MHPETEPFLAPVAMEEDSDELFVGDRGVLDLEVRRVLVQVLHRRFLLADRHREQWTVLLEHQQLIESRLNEMFVRLVVDHERGVAYKQQVRSDEFDVPILLRDLPYSRPETLVLVHLRTVYQRETATGELAAHVDSEDVEQTVLSYFSDGDRDTAKRQRMIRKALERLGRDGIVDEESAGRFRISPLVEIVLSAEKLRELRDWLQRQSVSTVVAAGDDGEDSDSDDDLLEVQR

SEQ ID NO: 34300 - protein, 1115 aa, Rathayibacter toxicus
MTMLDTLFGLIPAASRGQQWLAEDLQLVNWGGYDGAHRVRFSPGATLLCGGSGSGKSTLMDAYIALMMPHTTPFNGASNGGVTGRPRGEEQRNILSYSRGKLDESRTDEGTRMRVLRGDGRDTWTAVAMTWSDHDGSRFTAVRAWYVPADARVLEDAVRVRATVDDGFELGTLEEAATRRFTDASVRAVGLDPLATDREFSARLHAVLGIGAAGAGAKAISLLARIQAGQQITTVDDLYKRLVLEESETMATADAIVAHFDELESTRTRMMTARQQVSALRPLRELGTKIAASAERARLIDAIGSCDDPESAAALWRAERRLGLLREVETELRDRKRATDALLRDKRTLAQATEAERDGLAEILRLTGGDRLETAQRELREVERRLATTQQNRSRLDEDLRVLGASATTRDEFEAVLAQARETVGAQSKRAARTRWSDAVAALHEAADEVRELEAEQRSVLGRHDSIPRALHEARERVAQAAGFSSQELLFVGELVEVRTEFEPWREAFTLALGGFATTLMIDVAQLAQFRAAVDAVRLPVRLRYEGVHTGLPERPQSDVRTLPGRLDYRSTPFTGWLQQRLDDRFGFVCVDSPAELAQHRMALTLTGQISQGSRGAHGGHGVQNVLGFSPAHRLREISAQLERARARHASAESAAALAEEALDTLDDRLSCYARIDQIAWEQVDVAAVLAEQERWRGVQREVSATHPEIARLQKSSAKLRVRSERLREEIARAGLEREQSQAQWAAITDEVDASQAILDAAEAEGRVLDSDQRSFLDDRFILSVAAGTAPEALARFDAALASAAQRLAEDLRTAIEALHDQRESMRRIMVGFLDRWPNPTMIADPDAAASDFERLLEALETHGLHELEEQWRDSLLTLSGNDLTNLDSTLSRSLREIRQRIEPINLIMQDLPFYDDQHRLQITLRENQSEVRRRFRRELREVRGLIEAASTEEEREQVYRRTARMMERMRRNAPDFADLIDVRNHVRVSAERIEARSKQHVAVYDHIGEKSGGESQELIAFIVGAALRYQLGDAGAARPRYAPVLLDEALIKADAHFTQRAIGAWRGLGFQLIIGAPNDKYSAIEPHVEVEYDILKDTRGRSWAKLKVALPETA

SEQ ID NO: 34301 - protein, 480 aa, Arthrobacter sp. SPG23
MDYYAINALRENHAGWSLLRAQNAPLAIAFFMAAFTEPNQRDIGRQDLIDTLDDVLFGLRETYGDDKFPRQASEYLDDWAAPERAWLRKYYVSGQDEPRYDLTATAEDVVRWVESLRGRDFVATQSRLTSIFAVLKQLVQQSETDPEVRLAELQRQRDGIDAEMQRIRDGHVKVMSGPEALDHFQQLTALAKDLLADFREVEQNFRKLDRQVREQIATWDGTQGELLESIFANQQDISGSLQGRTFQGFWDYLMSPQLRTELRDLLQRATQIDALAKLDNLHAVANLHQDWLPAVEQTQATVRQLSQQMRRLLDDKVFLENKRIMQLVRSIEAGALATRSEAPPGVFMDIAAQSVDVALPFERPLYEPSRRIMVDDVVVAANDAEVDAAALFSQFHVDTERLKSNIDAVLAGAEQATLGDVTEAYPLSQGLAEIVAYYQLATESDWASISPERTQQLSWQLPDGSTREATVEQIIFVRPA

SEQ ID NO: 34302 - protein, 213 aa, Arthrobacter sp. SPG23
MNHTDTPATNAPEELPGVVTKLFKGVVYAESDEKVWQSLLGLSSHVRDYVAVLGLDLILDESEGYAFLKSREDPDGTLPRLIPRRPLTFNVSLLLALLRGRMLEFDTNSSELRLIMTEQDIADMVAVFLPESSNEARILDQLGTNIKKVVELGFLRKLRNQPGTYEVARILKAYVDAQWLEEFDARLADYRASLTGAGTGTASGPDTTEGNLP

SEQ ID NO: 34303 - protein, 1124 aa, Arthrobacter sp. SPG23
MLFSLDEKADDAGTPPGFRLHRLELLNWGTFHREVRTFRLDGSNSLLTGDIGSGKSTVVDAITTLLLPANRIEYNKAAGAQKKERTLMSYVRGFHKSTRSTGGEYSKPVALRGTGKLSVVLGVFHNAVLGKSITLAISLWATQEAGQPSRFYSLMEGEQSIAGDFANFGQDPAKLKKQLRAAGASIHDTFEPYAAAFKRQFGISGNQAMELFHRTVSMKQVENITNFVRTNMLEEDDVQARIGNLIHHFDDLKKAHDAVLRAKDQIALLTPITQGAAQHTSLSAEDEFARRQRDQLHPWFTDRKLQLSLEHQAELHSTGVRLQEDSGKLATEITQLRLDLAAVKEDIRSNGGGRLAAIEAEAARLGEESRAQRARFDKYAEAAADLGLQAPADRVLFDANRARLAEVEIELAAKADELQDSRTELTMTRTVLTSRAIDIAAELTSLQSRPNLLPRPQLELRRRLCDGTGIRESELPYAGELLRVRDGEAAWEGAAERTLRGFALSLLVPSEHYAAVSGWVDGNNLRGRLVYLKIGESYAPKPAEAGTLAAKIAIKQGTPFRDFLLDELSSRFDYFCCDTLEDFRRRSKALTANGQLKGGRGRHEKDDRQDLSDRRNYVLGWDNHDKISRFRAEQDDLQGQLSVVAGQLSRVNVSLGAVGRQNQQLGTIGSVSDFAEVSWQLTARRIEDLKAEKTQLESTSDVLRELTAKETEISGTLDRLQTRADDVQRRIGSNEGAAKDIAEAIADCRDVLRETPLTGDGAVLAAVARLAGAELAGKTLTYKNTGTVESAVRSGLTDSIDALSKQIARAAEKTVRLMAEFRNTYPNETVEIDAALEAAGDFAKLLEQLVSNDLPRFEAHFKESLNQNTIHEVVAFNAFLDSRRQDIVNRIGEINLSLAGIEYNSGRHIQLEHQNSTDLDVRQFGMDLRACSEGTIGDDDQYSEQKYLQVARLIERFRGRDGYTTLDERWTAKVTDVRNWFTFSASEKWTETGEEFEHFTDSGGKSGGQKEKLAYTILAAALAFQFGLASGKGAGKNAGSGRSFRFVVIDEAFGRGSDESARYGLELFQRMKLQLLIVTPLQKIHVIEPFVSHVGFVANVNGDDSQLRNMTIQEYRDERDRRAD

SEQ ID NO: 34304 - protein, 408 aa, Arthrobacter sp. SPG23
MLRALSLKAWDSGALLRELLEPTGAYPRRRPLKRPTAAGLRTDYAAAHAWASELFVAAGRYTLETADVGRTTIGSNRLPAAAVFESVDDEIAFVGKTRNAARFRELADELSALDPALRQWAWKRPLQLLALEEAALTAGRVALWLLSTPAPGIYVRQLSLPGVHTKFLETHRRVVDEMAAALQAIMPSEPTAEEQTDAVLGNAEPGDAVLGNAAARTPAGRFAERHGFIHPPELVRFRMLDPEIPLLGDARDVTVTADAFRTLRLPVRTVVVTENLVNFLALPERPGALALFGAGYGFSALRDAAWLQDCEVLYWGDLDTHGFRILDQLRAAHPHVGSVLMDRATLLEHRDAWGSEPTPATAALTRLTAEESELYQSLADGEFGSAVRLEQELIGWDWALARLLPRGN

SEQ ID NO: 34305 - protein, 482 aa, Arthrobacter sp. SPG23
MSRSAPSSADAISARLRDLELLTKGPAWALTRSAPWVIAVLQASFTRTRPQLPLEEFHADVDAFLEQLRRQDPGLGGIANGKSFGDEWTRKNFLTRRNQSGQIVYEITEPAARVLAFLDSLSSERSTLNGSRLGTLLGDVEKLANETNPDQSARLESLEDEIEERQQLIQDISSGDFDGLLDDDEAVEAAGNILDLAASLPADYKKMRDRIEELVGELRNQIIEESLSKGATMAQVLEADKRLRQSPEGRTFRSFTAFLEDPQQQLRFRSAIGEVLSRQFADDLSHDDRETLKNLVAELRTQHSQIQRIYGKLSESLNTYVQSDDFRQSVRLRKVLREAEQAIRSLPYERERPGLVPGPVLFNAGFESLSMVKLFDPDEFAAPPKLADPIAFSDSDRVRSPRTGKAKPAAIRAALAGAATLPEAWEQLPPEERHINSIRALLSHALHDGAGFDRAGWDAIDFEQIDGTTRKAFLPVVTLTKD

SEQ ID NO: 34306 - protein, 275 aa, Arthrobacter sp. SPG23
MPVVEPEVPVVEPVETPEAPSAPGHIHAEPFTVTPRDTFVDGAALFPGDTGVLPMKVRQALVKLLKGPYVDGGRDEKLWTTLLDNQLILRSRLSELFLTLQLDHERKVAVLRPVDPEAIGGSTRSSILRQQRALSRVETIVLLRLRLLLDRHVTAQTDPTITKEEIAELVAHYQPSGQQDALRDSDVVNRAITKLLARQLLITTGLEDVYTISNALPLALPFENIGDIPAHIEALVAATADPAGTEALIELDANPVVEPVETDDDDTDDDAEDSK

SEQ ID NO: 34307 - protein, 1159 aa, Arthrobacter sp. SPG23
MSIATMLPMGELTNPGQMRLALVQVVNWGTFHGAHTMHVDRNGTLLTGNSGVGKSTLFDAMLRVFDARPRSNEAAAQRSGAVEDKRTTFTYMRGKVGDKAVGEGSASAFQRPGATWSAVALTFDNAAGTKVTVSALFDLPKNGTESSVGRYYLIDNKPLDLAAIEGIAEKRFTKAALDTIFPDAQVFDVHKAFAERFRRLLGINSDQALPLLRVIQAGKGLGGSVNTFFRDQVLDAPATLAAADDVVEEFSNLMSIRQRLEDVRQQRDQLAPVPGLNREYAQSLLDANRLRELAGEEFDAFKQQLAVAVHEKTLARYKDLAQAKARELAAERAVRDGLAKDLRQLEADYNNQGGNAISAIEQSLENARVGLKLRQQVEQAARQALADAGLDLEWTAEGWEQAHTHAADRSAELQDDSEALKELRFEAFDGHATKKRELAAAQQELVSLKTRKSLLPPSSIENRAAIAAATGVPEEQMPFGGELIDLADGQEQWRPAAERALRNLATTLLVPGEHFAAVTRYLNDNSVRGALRAVDVSKPLAGGALAVEDVADGDLLSKLDILTAGPAADAGQWIRERIAADFAYPCVEDPDQLAALDKGLSLGGVVKRNRHTVEKDDRFTSRQDYVLGFDNASKLELVAAQVEDLQQELAKAAELAQSREESHQGMTRQLEALRRIAEDHRPWEQVSAAVAEDELGKIEQRLKDALAAQADLEPLRANIEAARQKHQSSTEAAAVLQSEYKALDQQLTAADSLLEAARTRLRQAPPSDATVAALEQYCADFGGVGDVTEMHELDNLANQVRTRLLAELHAAESRGQATSERLTRIFEGFVREWGTAISADHGTSIGAAGEFEARYHAIVSDGLPAQEAEFRQFFNQRTHESFSTLLHLLDEERRSITSRILPLNGILSEVNFHEGSFLELDIKQTLPPTAKQFKDAIQNALRIRHVRPSRAAGAPASGSEADDDAELTNRYKSLETLVKRLGSQTPEDRRWRAEVLDVRGHLFIQCKEHREVAGTPSNGKGRGKRTDVFMHADTGSMSGGERQRFTAFIMAAALSYQLGIAEQGFTTYGTVMMDEAFVLASEEFAGAGIKALHEFGFQLLLAAPENVIDLSRHLGSVTEILRDKRTNRSGVLTAPVIGPRPGAEGQWRSEANPVDIVLR

SEQ ID NO: 34308 - protein, 489 aa, Stenotrophomonas maltophilia WJ66; identical to SEQ ID NO: 30775

SEQ ID NO: 34309 - protein, 233 aa, Stenotrophomonas maltophilia WJ66; identical to SEQ ID NO: 30657

SEQ ID NO: 34310 - protein, 1126 aa, Stenotrophomonas maltophilia WJ66; identical to SEQ ID NO: 31993

SEQ ID NO: 34311 - protein, 487 aa, Micrococcus luteus; identical to SEQ ID NO: 30704

SEQ ID NO: 34312 - protein, 226 aa, Micrococcus luteus; identical to SEQ ID NO: 30705

SEQ ID NO: 34313 - protein, 1118 aa, Micrococcus luteus; identical to SEQ ID NO: 30706

SEQ ID NO: 34314 - protein, 426 aa, Micrococcus luteus; identical to SEQ ID NO: 30707

SEQ ID NO: 34315 - protein, 492 aa, Mycobacterium llatzerense
MRVQENAALSAAELLELNRDVQGSRAVRLLATNNLGVYATLMERHLSDGTVAETELVVRLERDLAALGETDDQLGQSGLALIKLWASQGWLHRVAENRAGAERNVCYLTQDARRALDFVRGMRRGDSIATGGSISGIASRMRQIATRAGNDPDRIRAGIEADIAALHRELDELEAGLRPEPDVTDMYDEARAIALQMERLITDIGLYGTMIEQATQALDDPIDTNIEYRDRQRQMYADYQAAWDSAGRDSHRAFLRMINDPDQRAEFETDIATVASALPELDPALRKVMAGFFELIGHQIDEVERIQQRCAQRVKRFTAVGTMESSRGVARQLNEAIGAARTLLKSSLTDSRLDIEVPLARHAISSIGALSFKIGDLSAPRQAEAAQGDVDLSSFAALTTQVDAPAMSEMLNSAVARRPVSLAEAVALLDSAYLGHVIVLWSWALKQPSAPGDPSDNTMSVRFRSLDGRDREIEVPYLMFTEPVAVAGALHD

SEQ ID NO: 34316 - protein, 222 aa, Mycobacterium llatzerense
MTDSPIDFASLPEVDGASRVAQQRRPRFDGDVSAMPDRACWALQHLLTRRYISSESDRDIYSWILEYRNELSVRLSELDLQLRISEGVDIAFIEQARYESAKGIKVLRREPLGTYDSILALHLAQMMRAGGDQSFLISRDEMHGMFTGVLNETDRDAVTFTARIDAAIARLTGLDILRRSRDDEDSYTVSPVITAVMTASVITELQQQFEQLTGTGGSDTDV

SEQ ID NO: 34317 - protein, 1113 aa, Mycobacterium llatzerense
MSEQFHLSRLQIINWGVFDGYHTIPFSAGGSLVAGASGSGKSSLLDAISLGFLPFNRRNFNASGDNTAAGSSAGRRTVDKYVRGAWGQRSDAGTSQVMYLRGDGTTWSAVAVSYTSNTGRTITGLVLKWLTGESRSDSSSRFVIGDGDLDIEDVCNRWAAGRFDTGVFKENGWRFTTKVESQYLAQLYASIGIRASDAAQQLLGKAKSLKSVGGLEQFVREFMLDEPDSLARLPEALKQIDPLVEARELLAVAQRKRKILGDIEAIQVRYASESTDLGIIDLVDLPMVRAYTDHVRLRHCPAEIETLDATIDQLEHENADLTRQLNLAKAEGDSLNAQINGASANVAPLQSQVTAAEAQADDVARRRAGYEEMVAALGVEVPDSADEFWNLREELTRQATEMLGKLEWGRDTSTDAEYAQKSARILRDNAAKELKRVEHVGSALPESAVTMRDQICAGVGIDPTELPYVAELFDLQPEHTRWRLAVEKVLRSVGLRLLVPDQHYAKVLRFVNETNMRGRLALHHVRAGSSGREAEPNTLAGKLFLVKPKHACAAEAVDVIAAAGDHICVDTPDVFVRFRRAVTDTGLYKDSDRLAIKDDRRPIKPSEYIYQGDISAKLEALHTELTEAEEAFSAARRAADEIAAQRQRWRDRAAACKAVYEQFPQWSQIDTDTAEGHADRLREQYDLLLADHPDIEALSARAEECWVDIQTLMTRRGAIQTRRDDLDGRRTKLMDLQDRLSPADVSEHATDLLRRYAADVPVPLELLNPEPHREALFAAIRRERDQLTESRRRSYEELSRIVATFDTSFPDAIPNDSDDFDERIYDYVAVCRHIDERELPDAYDRMMRLITEQAPDAILTLHRVAEQETRRISEQIDRVNTGLGAVEFNRGTRLTLRANPRSMVAVSELTDIVKAISRRIAEVGLGDKKAILDQYADILRLRNRLAGNNPEDRAWTRDALDVRNRFTFDCAEWDVANDELIRTHSNAGDNSGGEQEKLMAFCLAGALSFNLANPESGDNKPVFAQLMLDEAFSKSDPQFASQALQAFRKFGFQLVIVATVQNATTIQPYIDGVVMVSKSEATGRNARPVANVATKTITDFTALRRELKVPEPV

SEQ ID NO: 34318 - protein, 486 aa, Mycobacterium immunogenum
MNDLTVDELFAHNDDVQKSRAVRLLAAKNLAPYITLMERHLDRSAKVSEPQLVAKLDRDLAAVGLGEQSGLALIKSWASDGWLHRASDGAGPDAENVCSLTEDARSALAFVRRLRRADTVATGGSIAGIAAGLKRVATQLDGDPARLRADIEAQIAELQTQLHAIDDGYRPEPDIVDLEDETRAIAYQMEQVITDIVRYGSMQNEITAGLIDAAEDSDSGFRDRARRMFADYDALFDSRERASYAAFTRTIQDPDQRAALRGDIACVAEGLPDLDPGLREVMRNFFKLVSQQIAEVSRIEQRCAQRIRRFFAAGTTEQARGRARQLNDALAAGHALLKVSTADSPIGAELPIGRSAAAAIGALSFTIKDTAPPVLAQDAPSGPLDLSGFSALATQVDMAALAETVNSAVASGPVSLPDMISHVDAPYLGDVIVLWSLALKQDNTADRESVNVKFRSLDGQDRVMEVPQLMFREPVLATLDEEGATL

SEQ ID NO: 34319 - protein, 246 aa, Mycobacterium immunogenum
MTTTPLGNINFDDLPGVEPDASAPRTAKGPRFDGDTSELPDKACWALQNLVARRYLSKDGQPELWASMIEHRKVLASRLSELDLRLRVFDDLEVAYAEPAPLENPSAYGARVLRREPLGTYASIVALHLAKIARTAHDEHVLVSRDDIHELFANVTHDVDRDEAMLRDRVDEAIKRLSKAEILQRTRDDEHSYTISPVINALMSAQMIEALQRQYEQLQRGGGAPEDGTDAADSTDEEDGETDDDE

SEQ ID NO: 34320 - protein, 1115 aa, Mycobacterium immunogenum
MTMSDAATQQFWLSRLQVINWGVFDGYHSIEFSRRGTLITGSSGSGKSSLLDAISLAFLSSNRRNFNASSDTTAAGSSMGKRTVDKYVRGLWGELKNPGERPKQMFLRGKGGAWSAIAVTYSGTDGRVITGLVLKWLAPGSDSDSSSRYYLIDADADIRDLCNAWASKGYAGSVFEGAGWRGHKSERWYLEQLYAAVGIQGSSAAQQLLGKAKSLKSVGGLEQFVREYMLDEPESMAAISEALGQITPLVDARAALAVAQRQRQTLGDIEQIQQTYASDAAQLATVDVVDHHTVRDYVDQQRLALAGPEIDLLDTEITRLGGECDEIQSRQDILTGERDKLLGRIAAADSNLAPLKSELAHARARAEEVSRRRTAYDSALWDLGHDEDIESAEEFEAMRVESLRAVTRINAELEAGHDAYVMAAGALSTARDQLRAASTEFKRVEHLGTPVPPDEDRMRGEIAAALGLTAKDLPYVCELMDLRPGQERWRKSVEKVLRSTGLCLLVPDQHHRQVLRYVNENPMRGYLQMERVIPSGAPRRAEPGTLADCLRVTNPNHECAGAAMNLVAGVGDYVLVDSPDEFSKHRRAVTDQGLRKDGDRRAVKDDRRELRASQYIYQGNAGDKRAALSDDVVEAQQAVSDAEKFIGEMDTKREELRSEVVRWSKLHSQYEYWSQIDTDSAEAAVGRLQDQYDAMLDANPDLTGLQQQADSYLDEIKKLSERIGALRKQESEHDSRRTRLLDLMDNLSPREVGGHTRSGIEAYVPQLSSSLDVLEPDAYRVELWRQIEKDQSVLRESVTRSRNELNRILNAYDRDFPDSIPNDSENFDEKIHDYVALCRRIDERDLPAAYERMLRLITEQAPTAVLRLHQLAEEEAHRITDQIDRVNSGLGSVEFNRGTRLTLRAEPKALEAVGELNERARRISGRAVAVSMGDEKAIHDQYQDILQLRNLLAAETPEARQWTRDALDVRNRFVLYCEERDATTGEPIRTYSNAGANSGGEQEKLMAFCLAGALSFNLANPETGDNRPVFAQLMLDEAFSKSDPQFAQQALSAFRKFGFQLVIVATVQNTTTIQPYIDSVVMVSKPDGPGVRPVASTRTVPIGELGDVRKAVNAR

SEQ ID NO: 34321 - protein, 472 aa, Burkholderia pseudomallei
MFFDAERQRFFRPLNSSRRELVAACLRALYDRLHGPAADYAHHLTRDVLRELLLPVVRQYQTTLADDGSDDEFSAVDASDPQLLVAMVIRALVADGWLEQFADRTGLVAAFRFSRPGKLFSEALWALDRPSRSRQRNMRGCRNALEAALSERGDAHDLVDAYEYAEKVIEDLADGIDYFQELVRHLMQAASAHTQWNEFVDFLDRFQRDYSKQLTADNATLNRQAIRQKLEKLRAVPEAKFNRMDAQLRDIAHWMAKEYTGSSLYDWLLGRIEDIVDAACESKQPGFLKAMETYLKRVNGLALQSMMLRSGQTRHAYLAAVQKVAESPKLEQDRLLKLVGQFLAPAEVRVLDPASFKLKTATQRRKAVTVSIRPRPTREERLAAAMARAEAEVFSIPNEDVAQGLRADLRLFQHPIRVSAMPTASARDVIRAMQAVEAARSAIGGDLIVKKLPTRLENEFYGANDYEIDLKK

SEQ ID NO: 34322 - protein, 223 aa, Burkholderia pseudomallei; identical to SEQ ID NO: 30855

SEQ ID NO: 34323 - protein, 1210 aa, Burkholderia pseudomallei; identical to SEQ ID NO: 33056

SEQ ID NO: 34324 - protein, 230 aa, Burkholderia pseudomallei; identical to SEQ ID NO: 33057

SEQ ID NO: 34325 - protein, 486 aa, Rhodocyclaceae bacterium PG1-Ca6
MKADKAIATYRRMRAQPLWRLLASTTGPTVIGLLQSHLYESERSLPASIFHERIARDLEELRAQGEDFPQTAQAYVASWLADGYLERRFPAGASEEEYELSTAAVEAIRFVSGLAQPHSAATESRLTLVIEALARLAEDTDTDKFRRIDRLMAEQARIDKEIDAIQKGQMRVLPQTTALERTREIITLADDLAGDFRRVRDQFDQLNRDLRERIMDNDGNRGDVLDSLFAGIDLISESDAGRTFSAFWRLLTDPEQAATLDQALDSVMSREFVGQLEAKERRFLLRLTRTLLEQGGMVHEVLQTFARSLKHFVQSREYLEQRRLNHLLKDAQRAALALKDEVRATETLQYTLELTSSRLRSLSQWVLHDPSLQALPGQMAEGDAPPIDLESVSELVAQSEIDFRTLKANVLAVLEQRSQASIADVLEQFPAAQGLGSVVGLLALGSRHGFKADHSETVGWVGGDDERRSARIPKIFFLRERANELV

SEQ ID NO: 34326 - protein, 235 aa, Rhodocyclaceae bacterium PG1-Ca6
MNWSENNESAMPVEAQAPDDAQAPANTLFLGDSGELALDTRRALVQLLAGPSLDGRRHPKLWPILVRDEAVIRRRLAELFLELVIDRDVQVAFTRQADTGELEVPLLLRRAQLTFIDSILLLHLRQRLTQADSQGDRAVVSTDEITEFLSLYERAANTDRAGFVKRVHASIEKIKKHSILQKIRSSEDRFEISPTLKLLFSAEEIQALTHLYQRMAAGETPAQLVQTEADEEADQ

SEQ ID NO: 34327 - protein, 1124 aa, Rhodocyclaceae bacterium PG1-Ca6
MISEPQTASLFAREQFRMTRLQVYNWGTFSGLHDVPISERGFLFVGRSGAGKSTLLDAFSALLTPPRWIDFNAAAREADRSGRDRNLVTYIRGAWAEQKDGESGEIATRYLRAGTTWSALALTYQNALGQSVVLVQVFWLRGNANGSTDVKRHYLVMERAFDLRELEDFGQFNFDIRKLKQSFPEAFARDEFRPYCERFCRLLGIESEMALRLLHKTQSAKNLGDLNTFLRDFMLDKPETFEVADRLVSEFGELNAAHQAVVTAREQVQTLAPAREQHQRRDSLMLLRNGLDELRLGVDGYRETRRIELLKEHVASLEVQANGSEGEVGRRQSTLENHAAILRDLERQHREAGGDQIEQWEAEKSGLEGQRTDRLRKRGQAEDACKKLGWSLPDSPQAFAELLGNARQEVENWEQRSNDSRAEQFRLDREKKDAETAFSQALKEVQALQRQPSNIPADMLEMRREIAAAIGISESALPFVGELVEVKPDEAEWQGAIERVLHGFALSLLVDERQYSALANHINTTHLGQRLVYYRTGRPETWQAKPIGGNSLVLKLNVKEGAYADWLQAELRQRFDYACVDSIQSFRSADRAITREGQVKHSKTRHEKDDRRSVGDRRNWVLGFDNREKLGLFQAQAQELADTISRLGGEIDKLSDQDKNRAARAMQCQTLVNLQWQEIDVLPLLDRISSIERQIREAREGNATLLQISEQIGEQKKLVEDADKELRQATRAHDSILDQIKTSTQKLESLLQDASIVPLTPHQVSGLDERFAKQSDAVRLDNLDKVTTSVERALNAEIEEVNRGIGACEKEIEARFADFKRQWPMDAGDMDTSLASAPDFFAKLVRLETDGLPAYEQRFFELLQNQSHQNLAALSTYLNDARKAILERMDLVNDSLGQVPFNQSANQRTYLHIDASDRQLVDVKEFKQEIQQALSHAWTEDREFAEARFLALRRLVDRLASQDPEQKRWRETVLDVRQHVEFIGREIDESGVEVEIYRSGAGKSGGQRQKLATTCLAAALRYQLGGNDHGVPMYAPVVLDEAFDKADNEFTALAMNIFTNFGFQMVVATPLKSVMTLEPFIGGACFVDISDRRVSGVLLIEYDGDRQRLKLPEHAREEASVEAS

SEQ ID NO: 34328 - protein, 387 aa, Rhodocyclaceae bacterium PG1-Ca6
MKLPEDVRQFLARRFQSKHREWLIGDAGEDQWPLEVPLGIPTEQAALRQVDGVRAWVSAWQGWQGVGSLSWCERRWKALGVQLLPEKLALGGPEHVAMWIGESARWERAQSRYRTLTARWPVLAQPLPRYFDVLADYGDADFHRLAEMLDWIANHPQSDLYPRQLPVSGLDSKWLDGRKGLLTDLVAAIQEDSSSDLDFYQRCGLKAPPLLVRMRVLDQALRARVGGVGDITAPVEDLASLNLPVSHVFIVENLQTGLAMSDMPGAVVFMRLGYNVDVLARLPWLARAKCIYWGDLDTHGFAILHRARSYIPALQSVLMDEGTLLQHKALWVDESAQHPSTELTLLTEQEQQLYRDLKQQRWGQNVRLEQERIDWVAAWGALQRTLA

SEQ ID NO: 34329 - protein, 486 aa, Pseudomonas sp. 10-1B
MKADKVIATYRRMRAQPLWRLLASNTGPTVIGLLQVHLYESKRSLPASIFHERIARDLEDLRAQGEDFPQTAQAYVASWLADGYLERRFPAGALEEEYELSTAAVEAVRFVSGLEQPHSAATESRLALVIEALTQLAADTDTDKYRRIDRLMIEQARIDKEIDAIQKGQMRVLPHTAALERTREIITLADDLAGDFRRVRDQFDQLNRELRERIMDNDGNRGDVLNSLFAGIDLISESDAGRTFSAFWRLLTDPEQAATLDQALDSVMSREFVGQLEAKERRFLLRLTRTLLEQGGMVHEVLQTFARSLKHFVQSREYLEQRRLNHLLKDAQRAALALKNEVRATETLQYTLELTSSRLRSLSQWVLYDPSLQALPGQMAEGDAPPIDLESVSELVAQSEIDFRTLKANVLAVLEQRSQASIADVLEQFPAAQGLGSVVGLLALGSRHGFKADHSETVGWVGGDDERRSARIPKIFFLRERANELV

SEQ ID NO: 34330 - protein, 235 aa, Pseudomonas sp. 10-1B
MNWSENNEAIMPAEAQTPDAAQTPANTLFTGDSGELVLDTRRALVQLLAGPSLDGRRHPKLWPIVVRDEAVIRRRLAELFLELVIDRDVQVAFTRQADTGDLEVPLLLRRAQLTFIDSILLLHLRQRLTQADSQGDRAVVSTDEIMEFLTLYERASNTDHAGFVKRVHASIEKIKKHSILQKIRSSEDRFEISPTMKLLFSAEEIQALTHLYQRMAGNETPAQLAQTEPDEEGDQ

SEQ ID NO: 34331 - protein, 1124 aa, Pseudomonas sp. 10-1B
MISDPQTASLFAREQFRMTRLQVYNWGTFSGLHDIPISERGFLFVGRSGAGKSTLLDAFSALLVPPRWIDFNAAAREADRSGRDRSLVTYLRGAWAEQKDGESGEIATRYLRSGTTWSALALTYQNAQGQSVVLVQVFWLRGNANGNTDVKRHYLVLERAFDLRELEGFGQSNFDIRKLKQSFSEAFTRDEFRPYCERFCRLLGIESEMALRLLHKTQSAKNLGDLNTFLRDFMLDKPETFEVADRLVSEFGELNAAHQSVVTAREQVQTLVPAREQYQRRDSLMLQYNKLDELRLGVDSYREARRIELLKQHVASLEVQANASEGETSRRQSILDNHTITLRDLERQHREAGGDQIEQWETEKAGLESLRMDRLRKRGQAEDACKKLGWSLPDSPQSFAELLGNARQEVENWEQRSNENREEQFHLAGQKRDAETAFSQAVKEIQALQRQPSNIPADMLEMRRDIAAAIGISESALPFVGELIEVKPDEADWQGAIERVLHGFALSLLVDERQYSALANHINNTHLGQRLVYYRTGRPETWQTKPIGANSLVLKLNVKEGTYIDWLHAELRQRFDYACVDSIQSFRSADRAITREGQVKHSKNRHEKDDRRSVGDRRNWVLGFDNREKLALFQAQAQALAATITRLGGEIETLADQDKNRATRAMQCQILVNLQWQEIDVIPLLDRIATIEQQIREAREGNIALQQISERIDKQNSLVNQADKDLREAKVTHDSILKQINDSTQKLESLLQDTSRVPLTPHQMQGLDERFSKQSDAIRLESLDKAATAVERGLNTEIGEVKDEIGDCEKKIEAHFADFKRQWPMDAGDMDTSLASAPDFFAKLVRLETDGLPAYEQRFFELLQNQSHQNLAALSTYLNDARKAILERMDLVNDSLGQVPFNQSANQRTYLHIDASDRQLVDVKAFKQEIQQALSHAWTEDREFAEARFLALRRLVDRLASQAPEQKRWRETVLDVRQHVEFIGREIDEGGVEVEIYRSGAGKSGGQRQKLATTCLAAALRYQLGGNDHGVPMYAPVVLDEAFDKADNEFTALAMNIFTNFGFQMVVATPLKSVMTLEPFIGGACFVDISDRRVSGLLLIEYDGDRQRLKLPEHAREEASIEAS

SEQ ID NO: 34332 - protein, 387 aa, Pseudomonas sp. 10-1B
MKLPDDVRQFLARRFQSKHREWLIGDTGESPWPLEVPLGIPTEQAALRQVDGVRAWVSAWQRWQGIGILSWCERRWKALGVQRLPEKLALRSPEDVAMWIGESRRWERAQSRYQTLIARWPVLAQQLPRHFDILADYSDTNFRRLTEMLDWINLNSKSNLYPRQIPVAGADSKWLESRKGLISDLVATLQNDPTGDRDFFRRCGLRPQPQLLRMRVLAPELRARLDGLGDISAPFEEVASIGIRPTNVFIVENLQTGLAFDDLPGSVVIMRLGYAVDILGQLPWLQQAQCIYWGDIDTHGFAILNRARTYITALKTVLMDESTLMNHRDLWVEEKDQHLSIELPLLTSTEQKLYQLLKSNTCGQQVRLEQERVRWDVAWAAIQASIR

SEQ ID NO: 34333 - protein, 484 aa, Pseudomonas aeruginosa; identical to SEQ ID NO: 32845

SEQ ID NO: 34334 - protein, 251 aa, Pseudomonas aeruginosa; identical to SEQ ID NO: 32846

SEQ ID NO: 34335 - protein, 1128 aa, Pseudomonas aeruginosa; identical to SEQ ID NO: 32941

SEQ ID NO: 34336 - protein, 397 aa, Pseudomonas aeruginosa; identical to SEQ ID NO: 32942

SEQ ID NO: 34337 - protein, 479 aa, Pseudomonas sp. 12M76_air
MFFTDQRLQFFKPLTSKYREQIVECLRLLHERLYSASADYGESLKREQVLDIFCEALERAPLLDGDDDEQGRFRTNREQAGWVLTNLIDYGWLERQVDQATFQSTYPFSRLGRLFTQSLTEAAGHSVRTRHRNTRNTLNALTAFAEHAEVYDLLDAYEYSERIIADFTDIIAELEERKRQLVREVEAQQLVQQASDQFFDFMERRFQPDVSVRLSADSVEKHRDRIHEVLRRIRHKPREWKAQAERELRRLAPDLIVDDRASVLWQLLDTIDNRLRNASEIMLPALRRTLQSFTKRADILIRQLSYLQSQQHNDMVGLCRDLSQLDAAAYEQRLSAAGEAMARIRLELIDPAQVRLRERQQRQPVHSQMEDPGQPDDQTLRSLAVTQLLERAFHINASGMRDYLRSALGDGRRIDSRDLPIRDASDLLAVSHVIALGSADQAAAGFRVKIEPTGQPVTDDTYFNRRDGFIIELEQDSHA

SEQ ID NO: 34338 - protein, 226 aa, Pseudomonas sp. 12M76_air
MRDALENQLQQYGVSADDFSDLMIRLLDRGVLCRDESKRETELYDRFLQVQPLVEDYLWVLRIRLLHETRFNMVRIFPPGAEVPGLADSDESFNSGLRERLSQQEVSLVLVLRAEYDKALRDGQVDELGQVMLSLEALSLSHRNLLGRPLPEQASEREALLRRMRQLRLIRSPGEGTLEDGEGWLIIRPGIISLVTDAALSQLAGGVAMDKADPLDEPVDHLEGGH

SEQ ID NO: 34339 - protein, 1209 aa, Pseudomonas sp. 12M76_air
MYLKRSITANWGNLPVEEMEYGPINLFSGGNGSGKTTAADALQTLMTAAHDNLFNYNPGQDETTQRGRGGKQVRTLASYVLGCDDGAFARPWTTDGYIAGVFHPTLGETAEPFTAVIGVRAHLDTAGSSRQARQDELLLMIVPGEMLSLSDFVRDAEDGRHVIPLTELPALLRKQFGTQGVETYDRKSAYLARLYGALRGKGEAVSVREAKNAARTFANFMAYKPVRSIDQFVAGEVLEAREFGDTIKRIRDLLRTVHGMEQEAARVRGAVGLLEQARQLTEDYQNSWLERTGLDYAAAAQNWQQNRKQYVVAKNQQQELQARIEDLSAEQQLNDERTQQAHRDLVQLEARRQGIPALQGKDELESRQRQLGTRLRQGVAPLLEQAHQRDVNLEAVRTIQHLVATGVGGEIPELTTHNWKTLANEVLAAEQQPVAELHQLLSNDWIDLSPLHKGLDNVRQQQQSHNRLATLLAQPGTDGISLTQRVDRLNQERANARANLERQITASERQISALQQSRVTYPAYVEEALAAIRQQCPEADPRVLCDHVEVTDPEWQMSIEGYLGGSRYGILVEPDHEAEAIRIVRQLSARDRNRARVIQGNKARQDAERISLPPDSVVHVLRFSHRVAEHYVRASYANLVRVDSAEGLRQTRRGITREGMGSGNYSMFRCDIDDSQLVFGAAARERSLRAQQKQLDELLAQRHAQRQLGENLQHLAAAFQRIKPLDYVNQASQLLEHRQQLHDIEQQLASLDLSAFQDVEQELHRVTERHADWVTRQSELQNELGGLNVQLNQINQRIRTLSDQGDTLQDQRDEAEQFLLNAAARVSGLDPQQRLTQIDEMLTRASDDFDFAADAKSLTDSLYQLAVALDRSIKEYNQQAQPADNLLHDTGAAVHSLDFFTHICSLRLQLDNLHNRLRNNVLLEKQEQLIKLRDSFNTTFISDLCHEIHQAINDGGRTLDGLNSELQHHRFGADRESFQFEWSWVPEYKEYWEFFREVTQMPNLGDGASLFDATLSGKGAAIRDQLLGLLLDGDEQQALRELERISDYRRYRRYDILKHPEGKAPIRLSEYGTGSGGQLETPAYIIRAAAVTSAFRFNEGDSHLRMVIVDEAFMHMDETRSREVINYLTETLGLQLIFIMPTSKAGPFLELISNQFVFSKVPSARPVGELNTRVLLDRQQLNRERITELWANHRRVIRQQGALDFMEMV

SEQ ID NO: 34340 - protein, 481 aa, Gynuella sunshinyii YC6258
MFFEQPRAQFFKPLTSKYREQVVECLRELYLRLYSASHADYGQALQRDNLIEIFQEALERAPVLADDSDESTGEQRFRNSREQAGWILNSLLEYGWLERQVDEATLQSTYAFSRFGRQFTEPFIASERSARTRHRNTRGTYNSLSAFLSNGEVYDLLDAFEYSERIIADFTDVITELDDRRRELVKDMETQMLVQKASDEFFDFMEKRFQPDLSIRLSADSVEKFRDRIEALIQKIRKKDRAFKTRTEQRLRELLPDQIVAGQSLLWSLLDGIEYRIRAASDVMVPQLRRALQSFTKRADIIIRQMSYLSSQQHNDLVSICKRLSELPAQEQGQALLHAGEIMAVPRLGYVDPQQVRLAAPRRRLVLAMDIDSSESFDVEARKDIYIQQLLDQAFFISDQTIRDYLYRNLLAGHKVDTRQLPVETARDLLSVSHAIEVGAASNLSTEFRFQVTPVENETHENEYFARQDVFEICLVTNNQE

SEQ ID NO: 34341 - protein, 246 aa, Gynuella sunshinyii YC6258
MLNALENQLEKQGLQLRDFTELMIRLMDYGVICRDESQVEQVLYDRFVRLEGLVEDYLTVLSIRMQHDRKFQFVRLFPPGAEVPGMDAEEDTPFNGGFRVRLNQHEVALVLVLRSLYDKALREGQVDEHGNVLASLENINIAMKNLLKRTLPENVTERKALFRRTRQLRLISLNPEASFEDVELWLRIRPMIMSYVSGDVLASLVEGMDQDVTGGVEPIAEPDSGEEEEELIVNQHASVFDQDEAE

SEQ ID NO: 34342 - protein, 1214 aa, Gynuella sunshinyii YC6258
MYLKKFIYVNWGNIPALEFDFGPINLLSGGNGSGKTTAADAIQTIMTAAHDTLFMFNPGQDEATQRGRNKQVRTLASYVLGCDDGSYARPEGAVGYLGAVFYPTEGETASPFTALIGVSASLDRAGTQAVARQNDMQFFISPAEELALDDLVKTDASGGKQVVSMDVLTKQVRKRFGADAIEKYDTKRQYLRRLYGALRGRRDGVSEAEALNAARAFSRFMAYKPVKSINGFVAHEILEPKNLGEAIRSISELMKTIYAMESEATRLKETAGILENTRAKSDAYIEQWIEHHVLEYLAARSRYLKEQKAYLDTKEQQKNIREAIEQSKKDRELAARRREQLHEQLVNIEAQRKGIGALQAKDDYEKLIRNNTDKLHELVPKLLEQANNLEGAAQANRSIQQLLSQSSLSADIPELGQRSLLTQAKAVIAKSEQEQIDFPRLLGKDLAGLAALEDHLDSALASQKQLNQWRDTWFSSEQSRSGMSLRDQVARLVEQRDQKLQAIRRQIAMKQVDIDSLSTLQVNYPGYTRAAIEAIRRECPQADPRVLCDYIEVIDPDWQSALEGYIGGARFSIIVEPEFEAEAIQIVRNMPGRDNRARVVQGSKARSDAERMKVPANSIIHLMEFNHAVVKGYITATYGSVEQVRDAQTLTQTRRGVTATGMGSGGYSMFRCDLPDSELVFGKGARERALAAKKAELNQLAVQANEADQSIGEARNLLNAVNQLPHLVYADYMQAMLECHRSIQTSEQALDMLDLSDFESLEIEFNRLRQQQQELDQSISSLDKETGEQENRLKTVSKRCEDLADQQDETLTVVETREEDLRNIKTVWPEFDADARLASADEEAKDVTQEFVDNQVMAIAAELNSKAHEIERNILEHNQRCTPGDAIVYQPDYALGHNQTFFKGICMVRREADQVHNRLKNNILVDKLDKLVGLKEDFNNAFVTNLCHSIYQSINDGKRILENLNKELEHHRFGADRESYRFGWEWVPEYKEYWSFFKEIINDPSLGESNTLFSSSLSDKSKKIRDQLMSMLLDEDEQKAMRELERISDYRNYRNYEIYKQPEGKEPIALSQYGTGSGGQLETPAYIIRSAAITSAFRFSEGDSHLRMVLVDEAFSKMDETRSKEVINYLTETLGLQLLFIMPTSKSGPFMDLISNQFVFTKVPLPAGQKTGELATRVLVDRQKCNQDRIKELWANHRRVVMHQGELDFMEEFA

SEQ ID NO: 34343 - protein, 391 aa, Gynuella sunshinyii YC6258
MALPLPRLSKPLEAAFFCLFKAVVSKHLKGNKRLYIKFSERNCARIRDLKYLGNDQLGLFFEYLNDLDHHHQLFINWSPQREEDIEKEDMSDCFVEFRPDSIEQIRQWFPELDQLYERHSWSDRVLQSEFSGNKDVLARRPLEITGYDSQEVITRLSRIPELLQQNAMTTTELSAVLFDGHAKHLTHRDWLCRLFPEYEERILPRKIIMNVWLPDDLDYVLLIENQDAFFKLVDLNPPCALVFSAGYKGASQRLWEPSLCQFFFAGQLEQRNRFISSWFEQCMTLYFWGDLDFAGLDMLALMNQKYRAKVNAWQPGYQLLRDQIEAGKGIAADVYQQITGKAQNRKISATGDPWADEQLLQYLQSHQSFVQQETVLSLLNLSHFDKTGEGR

SEQ ID NO: 34344 - protein, 490 aa, Xanthomonas oryzae pv. oryzicola; identical to SEQ ID NO: 31050

SEQ ID NO: 34345 - protein, 232 aa, Xanthomonas oryzae pv. oryzicola; identical to SEQ ID NO: 31051

SEQ ID NO: 34346 - protein, 1143 aa, Xanthomonas oryzae pv. oryzicola
MKSSSSSLFADDLPDPRVQQFRMRRLQVHNWGTFNGLTDVPIAAKGFLFVGRSGSGKSTLLDAMSALLTPPNLVDFNAAAREAERTGRDRNLVSYVRGAWADQQDSASGEIATQYLRKGSTWTALVLEYRNGEGRVISLIRLFWIAGSGAAAADVRKHYMVAERSFDIASELVGFDLDLRKLKARLGDDIAHFDNFSGYAERLRHQLGIANEMALRLLHKTQSAKNLGDLNVFLRGFMLEAPKTFDASERLVGDFAELDGAHRAVVTARRQVETLLPARAHYDDLQSVQRQRGRLQELKLGLDPYREQRRLALLDARLHALDVNDQGLAGEEGQRRAAVDNHQQRLSDLEAQRRSQGGERIDALEREQLQVQGELARRSDKRAKAEQACRQLDQTLADNAHGFAEQSAQARAALEDGQRLAAEQDEAIVERIAGKREDSQRFAQVRAEIEALTRNPSNIAAPMQALRARLSEETGIPEAALPFVGELIQVREEDAAWRGAIERVLHGFAQSLLVDERHYAELAEWVNRTHLGSRLVYYRVRNNEQAFAGREPGSASLLHKLQLREHPFAGWLRRELGKRFDYDCLESAKALRTAERAITREGQIKHPGERYEKDDRHAVGDRRRWLLGFDNRDKLALYEREAIELAQRIAACDADVAELRARRERDASRRLAQHTLANLAWEEIDVAAQLQRRDDIANALRQLREGDANLRALGEAIERTRGDLEQAKRTFDGVREERIALGVERTRLEKQRLHCADADARVVTPLQREGLEERLANLGALSLDNLEAHFRQIGNAIAEQTSASDSEHNRLEQLLLGCFRRYSQQWPEDSGDFIISLAGAEDFLARLQRLERDGLPQHEARFFELLQSQSKNNLLALQRHTAEARKSIAQRLDEVNASLEQVPFNHGTLLTIELSDRRLPEVIDFHQRLRDVLGHHQTEQRDVAEQQFAVLRELVRKLGSADGEDKRWRELVLDVRLHVEFVGVELDAATRQQVEIYRSGAGKSGGQRQKLATTCLAAALRYQLGGEDGELPRYAAVVLDEAFDKADNEFTALAMNIFENFGFQMVVATPLKSVMTLEPFIGGACFVEISGRHDSGVLLIEYDEQARRLKLPERSRSAAAAGAARATEPSADAVGGASVDELH

SEQ ID NO: 34347 - protein, 393 aa, Xanthomonas oryzae pv. oryzicola
MAAAAPMMLPAAALLALRGQWQRARGQWLIGEGAPQAIGLRAPTQAQAIARFDAFGAWLQEWSRTGLPGRVEYRAVSWTQLGPQRLPQTWVLDDAGQAAGALGEGERWARARQRSAALQARWPQAVALAARLRRQFDLLADWPEAEFARLVAVVEWLHQHRDSGLFLRQLPIAGIDSKWIEPHRGVIADWLAGLRGIAEPRSFASLSGLRNAPDRVRLRLLDPALRHHLGGLEDITAPIAQIAALRLPARRVLIVENRETGLACESLPGTLVLMARGYAVEYVSNIAWLRELPLYYWGDIDTHGLAILHRLRTHAPHTTAVLMNEATLQATPRALWGHERRPHRAQRLAALSIQEQRLYADLRGGRFGPSPRLEQERIAWDYAWPRIQAALAD

SEQ ID NO: 34348 - protein, 441 aa, Halomonas meridiana
MLGRYAEQDEYAIDPDNTRQQAGRELREWIRRGLVTERGQRLYATDALSSAIQFVDSLDNRIMTSTASRLSVVQREIESLEVSLNPNPESRKAAIRRKIQQLEGELADAEAGHVPVLSEQQAIENIREVFHLATGLRADFRRVEDSWREADRQLRQSIMSEKYHRGDIVDRLLDGQEALLDTPEGRVFDSFLQQLRQTAALDMMRQQLRTILVHPAAEKALGRLQRQDLKQLGMRLVLESQSVLQARARSEKDVKGFLKTGLAAEHHRVGQLLNDIFHTAQALDWQRQKVRRSEMSALPPLGFALGNLSVIERLRFKVLENEQEETLDLAQQTSDLSDVETEFWDSLDGLDRDALVQETLALLAAEGRPLTLLELAERLPPSHDLETLALWLGMAREAGVEITGQDVQDVVITDDEQCDWLFKVPLVSLSEQALQGIEWEF

SEQ ID NO: 34349 - protein, 252 aa, Halomonas meridiana
MAGVFDQIVGRQQADEVSEEQSPPEGKDSSHSMAEEGLAGTDGENSARTDVKLREVAQELLRMGLLEESLRPHLYRTALASMERLNATLEPLDLIARADEIRGLVFLAVRHEDGDVFQDEWSHPLVRKQRLNMEQTLLVAILRQHFIAYEQDAGTGAGDAMVAVDELIPHMQVYLGESGSEARERTRMLQLLDQLKGHGLVSAPDSHERVVIRPMIAHLANPENLTALLYELKARVAAESSDRQDSDKEGMP

SEQ ID NO: 34350 - protein, 1103 aa, Halomonas meridiana
MDEEQATAWQLAPTYILQTLELFNWGGFGGMHKADIDAQGSAIIGPTGSGKTTLVDALMTLLTANPKYNLASTGGHESDRDLVSYVRGVSGPGDGSEGQSHIARPGKTVTGLVATLSNGESLVRIGALLWFDSTSMSPSDMKKLWLFSTAPEHTLHRWLTLQQEGGMRALRQQDKTDTGIWTYPSKKGFLARLRDFFEVRDNAFNLLNRAAGLKQLNSIDEIFRELVLDDNAQFQRAREVADSFDDLTAIHEELEIARRQQRSLEPIKTGWDKYLHNQTLLDDQETLSRVLPVWFGEQAHRLWKAEAERLQQQTQQAEAELAAAEESCTHQQRTCERLNEAYLRLGGSDIETLEALVKAKQANLERCQRHAADYQRLARSLSFDDALNREAVATNQMLAAEQLREVQQALDAAKQAAFEQGSQCYRMEHECTELHKELAEAKARPGSNIPGRFQQFRSLLAEALALGEDDLPFVAELVQVKADEQAWRGAIERAMGSHRLRILVPPEASHQALDWINSRHNALHVRLLEVKPPASQPRFFEDGFTRKLDYKDHPYREAVKELLAGLDRHCVGSPERLRETPHAMTAEGLMSGKARFFDKQDQKRLSDDWQTGFDNRDRLAALSAQISEAEARLQSARAEEEQAKASLAALEQQVVLLTRLAALDYEEINAPQAEREWQQQRDKLAALTAPDSDAATAKRQLEQARDELATLEQQKTQCIRQCAQLNNRLETAQKEQQQAFRKSEAGLKEAERTLADGHFSPLDQRQLANVDELERQATTQLQQQLTTLRTTQSRVEKELVKAMSDAQREDRGALSEVGRELDDVPDYLARLKVLTEEALPDKQQRFQQYLTDSSDQGVSQLLATIEGEVERIEERLEDLNNTLRRVDFQRGRYLQLVANKVVHESLRTFTRANTALASSRFVEDGGESQYKALQYIIALLRDACERQRTLGARALLDPRFRLEFKVAMIDRADGRVIETRSGSQGGSGGEKEIIASYVLTASLSYALCPDGSPRPLFGTIVLDEAFSRSSNAVAGRIIAALNEFHLHALFITPNKEMRLLRKHTRSAVVVHRRGNASSLTPISWQALDAVREKRREARNEVPE

SEQ ID NO: 34351 - protein, 381 aa, Halomonas meridiana
MKSPSEIAARLAKQWQQAFWRVERLLSSESWPLVIPIGKPSGRQFADQTGLVQAHVQRWRQITVGEVVFQDINFRAAAEPVSLPVQWVLHTPSEWAAATADGDVQQEFALLETLVGSVNQRYWEVLVRERALWRNKSVSEITAAAALADSLSPGMAEGRPLRLLNGLRVDTKFIERNTVLLTRLLDERYDGMASQQGLNGFLDAPDDKDHWLLVVPLEKGLLPFKRQRITARELADTCLPGSRVVVVENEQCEHLLPGMPGTVAILGAGLDVHWLSGEALKTKAVAYWGDMDTWGLLMLARARQVLPTITPLMMSEAHFKAFCRDCAVPEPVQAELPSSGLTEHEVAFFHLLKAQPQGRLEQEYLPSQDVQRELLGWLGRC

SEQ ID NO: 34352 - protein, 480 aa, Desulfitobacterium hafniense; identical to SEQ ID NO: 30431

SEQ ID NO: 34353 - protein, 202 aa, Desulfitobacterium hafniense; identical to SEQ ID NO: 30679

SEQ ID NO: 34354 - protein, 1159 aa, Desulfitobacterium hafniense; identical to SEQ ID NO: 30680

SEQ ID NO: 34355 - protein, 417 aa, Desulfitobacterium hafniense; identical to SEQ ID NO: 30434

SEQ ID NO: 34356 - protein, 479 aa, Pseudomonas sp. 12M76_air; identical to SEQ ID NO: 34337

SEQ ID NO: 34357 - protein, 226 aa, Pseudomonas sp. 12M76_air; identical to SEQ ID NO: 34338

SEQ ID NO: 34358 - protein, 1209 aa, Pseudomonas sp. 12M76_air; identical to SEQ ID NO: 34339

SEQ ID NO: 34359 - protein, 490 aa, Xanthomonas oryzae pv. oryzae PXO86; identical to SEQ ID NO: 30427

SEQ ID NO: 34360 - protein, 232 aa, Xanthomonas oryzae pv. oryzae PXO86; identical to SEQ ID NO: 30428

SEQ ID NO: 34361 - protein, 1143 aa, Xanthomonas oryzae pv. oryzae PXO86; identical to SEQ ID NO: 30429

SEQ ID NO: 34362 - protein, 394 aa, Xanthomonas oryzae pv. oryzae PXO86
MMAPAAPMMLPAAALLALRGQWQRARGQWLIGEGAPQAIGLRAPTQAQAIARFDAFGAWLQEWSRTGLPGRVEYRAVSWTQLGPQRLPQTWVLDDAGQAAGALGEGERWARARQRSAALQARWPQAVALAARLRRQFDLLADWPEVEFARLVAVVEWLHQHRDSGLFLRQLPIAGIDSKWIEPHRGVIADWLAGLRGIAEPRSFASLSGLRNAPDRVRLRLLDPALRHHIGGLEDITAPIAQIAALRLPVRRVLIVENRETGLACESLPGTLVLMARGYAVEYVSNIGWLRELPLYYWGDIDTHGLAILHRLRTHAPHTTAVLMNEATLQATPRALWGHERRPHRAQRLAALSIQEQRLYADLRGGRFGPSPRLEQERIAWDYAWPRIQAALAD

SEQ ID NO: 34363 - protein, 206 aa, Thalassomonas viridans
MTDPNEIKTNLTAKQQQEKSAVQIKLLKGPVYRAKHKDLWLWLERDLFQIREYFQQIGLSLLLDDAEGYAFLKQQSLDEANEGEQDIPRLITRRSLSFSQTLLMVLLRKRLAEHDSEDSSPRLIVERHDMHQWLTGFYPVVSNEVKQKKEFDALIKKIAEMGFLSQLPNHQDEFEVQRILKAVINAEQISELIDMLASQHNQEEQA

SEQ ID NO: 34364 - protein, 1131 aa, Thalassomonas viridans
MSALAESHFNNEDHGLHGFRLQNLSVLNWGTFDHKVWELSPECQNSLLTGNIGSGKSTMVDGLTSLLVPTRKLAFNKAAGAEDKERSLESYFHGYYTSQQDEFGKARSIGLRKDKHYSVVLAQFRSGALKQSITLAQVFWLKPGEKKVKRLFVVAQTALTITEHFSNFGSQINQLKKQLRKNEQLELFDTFPPYAQCFSKLLGLGADGKALELFNQTISMKSVGSVTDFVRQNMLEQPDVEAQLQELERNYDDLKRLHDAVVDARQKVELLTPVDDYGKQALLAANDKTHIEQCRELTEPYMAKLAIDLYQTRLHKRRQALQKLNIKLAAFEHEKTQLDENLNQLREDIRSNGGGRLQQLEKDIRQLADNRESSRKLCNNYQKLVGELGLPAQLSSDAFVHNINAAKDQVEEFQQQREAIDEQQFTLKQEQAEQQSRQKELTELLTSLKQRKSNISLKQIHIREHLCEHLGVSEDRLPFVGELIQVKASAALWQGAIERVLHNFALSLMVPDDLYQDVCDFVENTHLGTRLVYYRIRQPQNYYPAASESHSLLAKIEIKPDSEHYDWLDQELHKRFDYACCDDMAEFRRSVKAITPKGQIKSGQFRHEKDDRNKLQDKSRYVLGWSNKDKIQLLAAQYNQLEQKIAQLQAQLNQVKSRQQQVDNKARQALNLADFNFSFEQINWSRYSEQIAQLQQEKQQLEQTSDVLKDLQVKLAAQVAAQAAIENKLKQSYVERGQHQSDIEKDESALTQAQKEYQSAAPAFVNKCFPTLDEFYQKYLGDSQVRINMLANVTSQLRTKLNERVQHLEERRRKKQGQMINAMSSFAHDFPNDVTELDRSPEALPEYQQMLKQLQEEDLPRHEQRFKEMLNRDTIRAMALFRSYLDKQEEEIDGRIRLINQSLHGLDYQNGTYIEIDSINSADVEIRDFKQRLKSCVEFSTDDSLYSEEKFQRVKDLIEQMRNEPKWTQKVVDVRYWHLFNVIERYREDNKEKECYSDSGGKSGGQKEKLAYSILAAAILLQYGLVNNEQQPEIKAKRRFNLVVIDEAFARGSKDSTRFGLELFKKLGLQLLLVTPLQKLDVIEHYVKHVHFVDQKNNRSMLLNMTIDQYRERLAQHKSISKYENMVKQVS

SEQ ID NO: 34365 - protein, 399 aa, Thalassomonas viridans
MTKLTTSATIKAKLQNQWSQFKFHKQWANKQLKFPLILKLAKPTDKQLLHEYSQVQVWLDDLQKLSLIKGVALRKQQINYSKMGKQLMPVAIEIADMEALARYLNKWQQWQKFTQLFAHICQQLPRIADWLAQNPAQIEKYQSSWPQLINVCLYFIKHPSPNCYIRQLDIPNVDTKFIEQHKAILKQLLDQLLDLNGIDQQYNKLTEHGFEKRFGLLHEQPQIRFRVLDPQLSQELLGINDLTIPIEQFNRLNLMVDRVFITENKVNGLAFPAINNAIVIFGLGYGIQILKQTDWLKKCRIHYWGDIDTHGFAILSQLRSYFPKTQSLLMDQQTLLACKTFWGCEVKHQCHKAEQLPHLTDEEQTLYQQLKQGKWAEQLRLEQEIIPISILLEGLSKFK

SEQ ID NO: 34366 - protein, 509 aa, Rhodococcus sp. AD45
MTDRDRANAPAHNHSRRDRNVLNYDEVASLRRLNPAWRLLCADNAPLILSFLGKVFIDENVREISATDLLNRLDDELYALNQRLGEGTFRSAKAYLDGWSTSGTQWLRRYYIDGSDEPHYDATQAVERAVAWVSALREREFVGTESRLNTVFELLRQIVYGSDTDPQVRLAELKRRRAEIDDQIAATERGDFDVMDSLGRSDRYQQFAETSRALLSDFREVEANLRGLDRQMREKIATWQGTKGELLDEFVGTRSGIGNSDQGRSLQAFYNLLLSSDRLTELTELIAGAERLDDSGVIDERLSRIHYDWLTAAKRAQDIVGQLSQQLRRFLDDQVWLENRRVMDLLHGIESSAVALRDDRAEDFSSSIDAAAPAISLPTERPLYRKPVAAQIDSSGVEYGQAEDIGDALYEQRQLDIASLIANVRTRLRRTGQATLADVLSTRPLDRGLEELVAYLHLSEGDFDTVVDDSRTDTATWTGPDGKQRTARMARVIYVHTGSGAHDDSGDLP

SEQ ID NO: 34367 - protein, 225 aa, Rhodococcus sp. AD45
MTRTVPRDQLNLSIPVTALLKGVLYRDTNEIAWQHLQGLIAQVGDYVATIGLDVVVDDNEGYAFLRSLPDEELAELGISRLIPRRRLSKNTSVMLALLRKRLIEFDSTDSTDAGSRLILGIEQIRRMMQPFMPTGDNEAQTTDKIDTILAKVVELGFARRIPKQHNQFEVRRVISAFVSADWLADFDDNLRQYVDHGGSNHAAQTPLPGSSSVVDSAELSLKESS

SEQ ID NO: 34368 - protein, 1134 aa, Rhodococcus sp. AD45
MTDLLAQAEQPATDNLAGFRLQRLEVLNWGTFDQRVWTLELDGRNGLLTGDIGSGKSTLVDALTTLLLPSNRISYNKAAGAETRERDLRSYVLGHYKSERNEATGTSRPVPLRGASSYSVILGVFANIGTDQQVTLAQVFWPPPDGGQPERFFTVTERPLSITADFTDFGTDPRSLRKRLRSAGSRPHDHFPEYGRDYRRALDIRSEQAMELFHQTVSMKAVANLNDFVREHMLEPADATDWVTNLIAHFEALTAAHDAVVLARTQIAELEPILTDCDRYADHHAEATAARARRDALRYFFAQRRCELLAKELSANEHNRAAATQKLREAEEELTELRRTLSELELRQAGLGGNEIAALTQRIDDLQNRRNERREQFDQFQRLLADAGLAPVTDHGQYSFRRHEIDESRDQLEVRDAELENTLNELRLTQHELGQDSRRVAGEIASLRGRTSNIPRHNLEIRERICAGAGLDTKELPFAGELIAVREDQVRWEGAAERVLRGFGLSLLVSFEHYGRVSQWINDNHLRGRVVYFKVPARSMAGASAASPGSDALAYKLDVKESPFANWLDNELRRRARHICAETMDRFRTEEWAVTTTGQVRAGNRHEKDDTRNVDDRRNYVLGWTNEQKITALLEEAAALQPRLNEVDEQIAYADKQRRAVTDRRRALDKLTVFDDFERIDWMATAAALDKLIERRTELEQSTAELAKVTEAIAATEKEIVAADRSRVGALNQISRLQQNAERDHRDLDRAETVLAEDAAAEARAHFAAIAPTVSATTLDECAEQEKSLTQTLTQAAEKSDQNASRIAARAAGRMAEFNRSHPAHTTDMDADIASADEYRQLHQRLTEDDLPRFEHDFKEYLRSETINDIALFAATLGQEENQIRQKIDTINASLADIEYNPGRYIHLEVHPSPNNEIREFRADLRRCSDGSLDADTGGKYAEEKFLLVKSLVERFRGRDGYTEIDRKWTRLVTDVRNWVTFAASERRLDDDVEHENYTDSDGKSGGQKEKLAYTILAASLAYQFDLKWGAKTSRDFRFVVIDEAFGRGSDDSARYALSLFRRLDLQLLIVTPLTKIATIEPFVSSVGYIENKTGRYSQLQCLTIEEFREQRALRALRDSPANISISDESAESA

SEQ ID NO: 34369 - protein, 392 aa, Rhodococcus sp. AD45
MSDWATPEDLRNRLRKRWDRGLYLSALARGDQFEAVDVKITGPKVADLNSRRAGVSDWVQQWHRQAQTAGTEVVYRTVGGRGLVGQNRLPDRLRIGTLADLEHFLGTATQTRRYREILTRTVDHPSVRDWVTQRPMRSLEHYDHLEPLLAALAWIDANAGSGRRLREIDAAGVDTKFIERHQRILLELGRLVVDEDLIDPKAPTIAGRFGFATPGRRVRLRRLDDAMAWPMPGFDDIEVHAEDLAAMPLAVDRVFVIENLATYLSFPAAELAVAVFGGGYAATTLGAIGWLRRVDVVYWGDLDTHGFAILDRLRVALPQARSILMDRDTLLGHHRQWGTEPTQVDRDLPNLTPEETRCYRELIDGAHGPAIRLEQERIPLSALAQIVPPQKP

SEQ ID NO: 34370 - protein, 484 aa, Chroococcales cyanobacterium CENA595
MDYEQIKYELESSPIFKLFRSRSAALILSFLHKQFKATQHISVAQLELEAKLSDALELLQEVYPDLYHPRSPKEYLSEWCDDGLLRKIFDSSDEPRFTLTPAAEKAIAWLEDLQQKHEFVGTESRFLQIFSLLKEIRDRSTTDVEERIAQLEQDRDRLQQEIDQIRRTGEVALYNQTQLQERFFLANQVTRQLIADFKDIEQNFRNLTRTIKEAQLQQDACKGAVVSRVLDADGELKESDQGRSFYAFWNFLMSPSKRQELRSLIQDVYKLEEIQPLIRENGLLRRIERNLIDAGEYIVQSNHRLTEKLRQMLDERNLMENRRVAELITDVQRIALQVADRASAESDFWQLECEPAVNLIMERPLHPLEESETPTFSLDFSNLPEDTLEEEIAELYQQFYVNEDELAQRIDALLAHHSAVSLTQLLQLYPVSQGLPEIVAYLAIASQGDRRHSINTSTIDEIAISSLESDKQLHLKLPQIVFRR

SEQ ID NO: 34371 - protein, 192 aa, Chroococcales cyanobacterium CENA595
MQPQPPQPYAPVIIKLLQGAIYNDDPHWERLQSYLTPIKEYFGKIGLQVQNYDTEGFAYLEQPDPEPEERTEPLPRLTVRRQLSFTVTVFCVLLRDQLRQFDASDAIGKLILSIEQIRDLLQPYLPEENNEDRFRREVEGLIKQTSEFGFLKRLSGQDENYEVRPILKAKIDADTLELLKQKLETYANPTVS

SEQ ID NO: 34372 - protein, 386 aa, Chroococcales cyanobacterium CENA595
MINPAQILQKANSCYSLFLRSFLTQENFFPLELSIGSLPKDYLVLRTELTQLIDNSKQNLCYGYNLELKSRKTHKHGQQSLPKRISIETEEDYLKLIQKEQEFIKFKADVDLIRVAVPELNWWLCQNPLEVIKHSDWHDLLKVCQYFQSNPKINLYIRELPIQVHTKFIEQNKDILRRLLEAILPIEQLISVEGERECVFEKRFSLRYREPTIRFRVLDRTIKARYSLPFFDISTPISEFRQLCLESHRFFITENLMNFLTFPGQNNGLAIFGGGYAIQALKSVTWLSQCPIFYWGDLDVDGFKILSQLRSHFPQTISIMMDIKTFETFQEFAVPDSSGGTVTLPHLTGEEQSLYAYLSLYGKRLEQEHISQDYANYYLQNLVQLI

SEQ ID NO: 34373 - protein, 457 aa, Acholeplasma oculi
MHLFDQIPDNLFNVLSSPNKNIYVDCLFIIYDATNSIEDSFQGERSFVIGKLVDYFDDLKETFEIDDEENSTSRQKAVSVINVLKQSGWLGEEELGDYKTSLNLFDYSIKIIDLLKRIQVGEQTEYTGEIYTVYSLLSSFEIQDGLTIIEQSYKKIEDVLRKLKTLKANIYRYYFDLVKRESKDNLQHVLERLLVDYKTNFFDSAYYQLKTTDSLPRYKRSILESISKIYMHDTYLDTLANQALVARRKLEFNEAFSYVEDKVRFIKDSIDSIEYLIEAIDTKNELYINAAASKIMFLTNTSEDLEGLLNRLFKIILKEKTFNYSEIFNLTRMRNLDDNSLQTIRRPRIDPIVEEVNYQQEISDEVKERKMASLLKANIFSKQEINKYVSYILGDLQSIKASDIELETNEDFVKLILIFLFSKSVGMIYDVRLLNYDARIQDIKFTEFEIFKKGYKK

SEQ ID NO: 34374 - protein, 212 aa, Acholeplasma oculi
MMNKNQALKKLNDEFIQLKEAEKLVFSRIVNKLFQVNYITRKKIADANDYRFILAYKDIFDAYLALSDFELTIERHEEVVYIKNISNFNHFRLKKDESIVLLIIRMIYQAKMSLVTLDENVEVYLSDIHEELAKIGYLDNKRMTKEKLKPALQLLRNYNIIDFMDRKLNDDARIKIYPTILFVVKVDSIKEVLDHLDQYLQGGSDLEETDED

SEQ ID NO: 34375 - protein, 1088 aa, Acholeplasma oculi
MKKLTKIKLVNWHLFSDQTIKIDGNTLISGENGSGKSTLLDALQYLLVGGKSGAKFNIAATDEAKRTLEGYIRGRIGAENKEFIRPNDVVTHVALEFYDEQSDEFGIIGSLLELPKLGTLKERFYILNNVNIHDGIFMEKNLPRDYRSMKAYLKSLQIEFNPFNSQKEYRDALAKYFGIDAKKYSKILPKALAFRPIDLQTFVFEFLLDDEPIDIQSLKNNVTQLKRVEGQIRLDREKLERLDKITTLGESLNQNLEQITINKLIDQMAFIEKRENFLNNSEDLLDKVNAKYEVLKRKKEELDHQIETNDEAILELESSKMGDDVTRTLSNLQEQLKKKGDQYEEQKQIVLDLQESLNRELDLFKDFVQLNPNTNISGFIKYYGSHEENSNVLELSSYLEGATSALSGYQQALSIERSNLEKDRSEILNNLRIAEARLNALKKNVKTYPRNVQQLIEAINSDLSNYYKKEVRVRPFSDLIEVKDESWRNALEGYLNNQRFDLIVDPLYFNDALEVYDRVKTELSIYGVGLVNTSKIGEYNSHLPNSLASKITTDHPYAKNYANMIMGHVVTVENLNELKNYSRAITKSCMTYSNHTARQINPRTYDTPYIGQQATQIQVEMDMNLVKDLTKDLQRITDLLEKNQKSFRILQQSKLQHIQSSNQIRYFETIKQTRKEFIDLENKVHNLAKNPKITELDAQLQDEKNKKRQLRLDYERLSDQMADCRSEKTRILETIDEARNVLSEYIEEQKDWSKKYPTLLPVASIQFKALKEKYSDNYDLISRDLAQSSVTIQSQNARAENEVINLMRQYIMQYHFGAAPDLSELIEFEKEAVLIRDNNLLKYEQEAIDLRRSSEIGFREEFVGKLRASIEAAQIQIEELNLALTGKKFGTDSYQLITRPAENPEFKTYYDIIMSSEAVYNHTLFTENLTKKHEVVLMELFNKIASFEPENDKFALQFLDYRYYMSYDIEVTSENGNKSYFSKVSREKSGGETQVPFYIVIAASFQQLLTKNKRIDSGCMVLFDEAFNNMDESRIDAMMKFYNSLSIQLFIAVPPQRVSNIINYVTTSLAIVKDNDFAIVESFKREVM

SEQ ID NO: 34376 - protein, 486 aa, Pseudomonas pseudoalcaligenes; identical to SEQ ID NO: 32016

SEQ ID NO: 34377 - protein, 235 aa, Pseudomonas pseudoalcaligenes; identical to SEQ ID NO: 32017

SEQ ID NO: 34378 - protein, 1124 aa, Pseudomonas pseudoalcaligenes; identical to SEQ ID NO: 32018

SEQ ID NO: 34379 - protein, 387 aa, Pseudomonas pseudoalcaligenes; identical to SEQ ID NO: 32019

SEQ ID NO: 34380 - protein, 462 aa, Clostridium sp. FS41
MILMNEIPDRFWSLFRSINRSTYIEALLKINEEYEYSNYFLSREMCIQLLSEYFSRKKYVLWQDETEDDWDTLEPPATRVLNWLLRNGWLRKVDDYANMTVNIVIPDYAAVMIEAFARLARDEEDETEIYIQNVYAILFSLKNDPRSSITLLNTALVNTKKLNKSLQDMLHNMDKFFGSLLEQKNYESLLKEHLDRYVEEIVNRKYHILKTSDNFYLYKTDIKRWITAMRQDEEWIGQMCARPAGFFVRKPSNVTEAEVMEKLDQLERGFDDIEHRIANMDKEHTRYVRATVTRLNYLLNQEDNMKGLVVQLLNHLSEYDCPQEDVSSIGARMNLSQVSILSERSLYKKRRTKTDFKEQLKDEALSRELSMEEVLNLNKVKNRYSRKEIEGFIETHMENGIMAVDKDTVSNDEEFEKLILAYDYSTRLKSAYEVENQEPEMIHNGRYTYPGFVFARRKNNAI

SEQ ID NO: 34381 - protein, 255 aa, Clostridium sp. FS41
MPFDIPYYDGLMQEEQAQVTGSIRLLLHQTFILERKFDRRTGRFQYNQEFRACNKHLEFIRNYFAVSGVEVQENSQLGLIYIQGENLIGDKLPKLATLYLLVLKLIYDEQMESVSTSVNIYTTLREIHEKLGSYRLFKKQPSPTDIRRTVTLLKKYQILEPLDLLEDLNSDSRMIIYPCINVVLMGDDARQLLASFDERQEDEGVQGKADLPLEEPDVTEESELEENELEENEPEENEPEEKNIEEKGASDNGID

SEQ ID NO: 34382 - protein, 1140 aa, Clostridium sp. FS41; identical to SEQ ID NO: 31494

SEQ ID NO: 34383 - protein, 476 aa, Burkholderiaceae bacterium 16
MVDSDYPQFFRPLTLKRRRLIAACIRAFYARLYGSHADYRSILGREDLRDLFVQTMQSATLPADPAGEDGEDGFAAGDLADDQKLASAIVRLLVADGWLETAEDRVRLVTAYRFTRAGKIFAQALTLADRPRERTRQRNMRSCKNALGAFIERRDVEDLLDAYEYADRVVTDLSEDIELFYDLARKILLDAHVQGNWDGFIEFVERRFRDEFSPRLVYDNAERHRLDIGALIERLNELSAAEMQAIDDDLANHAAWAAQAAPDGAILRWMLDRIDEMVTAACRTKQPELFRAMESYVRRHVVLLSQSLFMGASGSGAALSTLIRRLGEMPEREQGAWLERQGAALAPVSVALYDPAAVQPRKAAERNRAQAVSIVPEITREERLRQFVRQAEERAFSLSHHDVVDYLLGSMRGTGVLRLSELPVDDAIQALSLLRAVEAARDHDGLEVERLDAEPLDNAIMSGTDYAIRRRHIGHG

SEQ ID NO: 34384 - protein, 228 aa, Burkholderiaceae bacterium 16
MDEITIGQLVEAELKAGGVRPEAFRQILGRLFGLSILHREDSAIERQLYDDAVRIEGLLNAYFDVGGFRLLHERHQSYFRLYPPGARVPGLPAEDDAIVVDAVRAKLSADFVACCLVLRFLYNESLRQGSINERNEALVTVEYLNATLTAQARRSLPAKTAREKLFADLKRARLIDYRADSEVEDADALVAIRGTILQFVADSAIDALLAETRTPVSAVTSPEPDDEA

SEQ ID NO: 34385 - protein, 1223 aa, Burkholderiaceae bacterium 16
MKLEKLILVNWGFVVSREYPFGDTTLLSGSTGVGKSSFQDAIQLVMTGGKQHINVFNSAQDESGASRAGGKVRRTLASYAVGMRDNLCVRPYGSHTYVVAVFAPDAGESAEPFTAVVAVEAAVSGTREQGRSVDVARKLYFVLPGSRAMEADFIESRKGNSITAVKVEDIYHRLRQRYPRVLPFENSIEDYLCKLYAEFRGGGKTLVGPREAEAAARAFVQSIARKTVGSVDELIREQVLAEPDFSDQIGHIASLMQNVQRLRKIATELLACRERLGVLKAHADAFLAAFEEAMEAELGEALRRQQDVEEEIQRLEACRRLALADVEKQQALADRHAQALKRATELHGTAKGRLNGNPVAQDRERLSREIAAATEGRSRIALDVLAALTGLRGVLDELAALAKQPAGPASAYAPHVERLVVDAAAIDAADGQAAARELAAMLTGAQIDPASLRRDRFARLDAALAPIAQRLHGADGLYGAVVQEQARESDRAAALQGEIDDLQRRRQGLEDGHFDLPAHVEAAVRYLEAQMPGASPRVLCNLVQPRQGSRWQNAIEGLLGGNRFVILVDAQYEASAIRALRHELPATRQGREASVVQGELAKRRAENQALSPDAVLQELVIADETARAYLVASYGRYVKVADAQALRGAPQALTVDGMASGGFKMFSSWVEDGELAFGAEARRKRVVRLARQIDEKTRERDAHRASAAELAAWGARLLGLELVPVAPMLDKLGETQRGLSSLAAQLASLDDSDLIVLERRVARAEQLLDGHHRLSNTASRSAGEAAGRARGFETNIADAETKLVGCQDGVRQVNARVAEVIRLNPHFDPLRLGQRAREAAKEQTSASFDGRRRQQAGLYRQEREAFERKLEAHNLLSSSLDERVDFQPCQSTQGEYEWQAYGGVPAARRQISAMLERLDQVRILNNTSELRGAEKSFNNTFSTHFALAVRTAVEQGIDPLKRLNEKLKRLAFGEDRFEIEYGQMVKEYKKYFDLFQELNRLAETQTPVDLFSAAEGVLSADSVVALDDIKLLLLDTNRDHALRRLKDIADYRNYRQYDIRKYSEDGREASLARMATFSGGELMTPAYLVRAAVLAQAFRQFEKTPSLKLMMIDEAFDKMDEGRTAAVMRYLNENLGLQLVVAMPSRASGPLLELFSFEHRFSLMKVEGLAGELDKITEVDSSLLKADRLHALWTERREAVRREATWQFDLQEARKQLVSDMGT

SEQ ID NO: 34386 - protein, 387 aa, Burkholderiaceae bacterium 16
MSADGIPGRRPAALTALLNALVDRIEAKPFAERRRDISFPLSAGTWPEFFAIALHGERMFVWRALEALQAQPGLALVLDQRRGQRDLDIWERSPKLVIAAQAEAFLRDETGRQASAVVAWMAQWRQAVPARFGSAALCERLLSRPILILPRSPEQVLERLAGIPALAGENLMLHEVASRQFWGLSKILNGQQETIALLLDTDVCPFPDRPVQLLVAARTADPAAPLLFVENAATFESMAAGRLSAAEGFLLIYASGYRASARRLRQPGGSSVYFAPGVFERNAALARSFLAWLHGTDVMRPVHFWGDLDFAGMDILKELRVVFPGAQAWQAGYEALLARLLAEESHAPDEARKSGQTDPGLTGCRYADEVLLPALRRLGRFVDQESL

SEQ ID NO: 34387 - protein, 482 aa, Microbacterium oxydans
MEAAFSRAVTAFSTPTLDLLHGRFAPFVVASLSLLFTADRASIPIADAQAELAEILDELRDAGDDDDDRRVPAGTGRDVARNWVRLGWLVQQIDEDVEVYRLSAHAVEALEIAGRTGGGRTRVSNSRVRTLLEAVEHLADSAEADPVRRLARLREERAALDAEIDRIEESGRADPLDDEELFEEAENVLHLARELPADFTRVAESLKLMQRDVVAHLRRDERPTGEVLREYLQRAQDVMNSTPEGRAFAGALKLIGDPERIDALTDQLHGLLRQPFARMLDSSQRAELDAIGRRVELGVEEVLAAQRRASHVITGQVKTHDPLRDRQIDDLLRDVIAALHVWDGAGASDAPVRSLPLADLGHLRQTVSSIRPPAVPAPLTDAGDVEFADVDSRAWGGPRYAELEEYVAGLGPEFDLAAAFAEGDDDTRRPVDLVGLLEIAHRNGMTESDTVSVVEALRPDGSTRRFAFGAVTARNPKEDAHA

SEQ ID NO: 34388 - protein, 220 aa, Microbacterium oxydans
MPEESPATEATIEDPFIAPVPMEDDIEEHFAGDRGTLDPEIRRLLAHILQRRFIAAERNRKEWTLLLDHQQVIESRLNDLYLRLVVDHARGFAYKQQLRSDEIDMPVLLKDSPYTRAETLVLVHLRTVYQRESAAGESSVRIDIEDLEQTVLSYFTDVDGGTARQQKAIRNAMDRLDREGIVQEETSGRYRITALVEVVLSAETLKELRDWLRSQEAVQR

SEQ ID NO: 34389 - protein, 1119 aa, Microbacterium oxydans
MTMVDTLFGLIPAGSRGQQWIADELQLINWGGYDGGPHRVRFSPNATLLCGGSGSGKSTLMDAYIALMMPHTTPFNGASNGGVTGRPRGEEQRNILSYGRGKIDESRTEDGTKLRVLRGDGEDTWSAIATTWLDHDGSRFTAVRAWYIPADARVLEDTTRVRATVNGAFDLARLEKAATQRLSDASVRAAGLETLATDREFSARLQAVLGIGAAGSGAKAISLLARIQAGQQITTVDDLYKKLVLEEPETMATADAVVAHFDELESTRTRMLTAKQQVSALEPIRGIKERIAASAERVRVIDEVGVFTDPSSLAALWNAQRRLDLLREVEVELGDRSRALSLAVREKRALVDAADVEREGLLDVLRQSGGDRLETAQRELRVAERRLDDVRRERAKFDIIVRELGAEVENPAQFEAFVAGTRGSSPQAGMREARAAFADAETARRTAELEITRLREERERTGRVRGSIPAHLDESRVLLAEAAGLDPSELPFVGELIEVRTEFEPWREAFNLALGGFARTLLVDAEKLEQFRSAINAVRTPERLTYEGVPTGLLEVRSADPKTLPGRLDYLPSPFAGWLQQRLQDRFGYVCVDSSSQLDAHQKALTINGQVSQGSRGAHGGQGRANVLGFTNDRRLREIDEQLQTLTSRYEGHASAAQEAESALDRIEARSTAFAKIEDLTWEQIDVAAVEAERERWLAVEAEVTTASPEIAQLKRQAEDLRSRASTLRDEEARLSNELAQTQEHWGQVTDDVDACQTVIDSAAASDVSLGETHASFLDGRFLHAETGATLTASERLAHLDTALRTAAQRLHEDRREAAEAHEQQRESMRRLMTGFLERWDNLTILPDPDESVREFESILEALQTNGLHELETEWRDSLLKLSGNDLTSLDSTLSRSLREIKDRIDPINRIMAELPFYDDDHRLQITPRENQSEARKRFRRELREVRGLIDAAETDGEREAVYRKMSRLIGRMRRTAPDYAELIDVRNHVRVSAERVTAETREHVALYDHIGEKSGGESQELVAFIVGAALRYQLGDAGATRPRYAPVFMDEALIKADAHFTKRAIGAWRGLGFQLVIGAPNDKYSAIEPHVDVEYDILKDTRGRSWAKAKVGLPDAAV

SEQ ID NO: 34390 - protein, 490 aa, Microbacterium trichothecenolyticum
MGNTRAEAAYLRALAAFRTPTLDLLHGRYAPFVVAALSIVFTVDRPSVEISDAHAEVAEILDELRAAGYDEGDRTLPVGTAREICRYWVRVGWLVPQIDGDAEVYRLTAHAVGALEITGRTAGARTRVSNSRVRTLLEAVERLSDHAETDPAVRMARLIQERDALDAEIARLELGQSEPIDDEQLLEEAENVLHLARELPADFTRVAESIKAMQRDVVADLRRDVRPTGEVLREYLQRGQHVMQSTAEGRAFAGALRLIGDPERIDNLTEQLHTLLAQPFTRLMDGEQRKELDAIGRRVELGVEEVLTAQRRASRVITGQVRTHDPIRDRQVDDLLRDVMSGLQTWTRSSSSDAPVEPLRSLPMADVGHLRQSVSDIRPPGAPAPLPTSDEDAVFTDADTRAWGGPRYAELEAYVAGLGDEFDLGDAFQGADDDARRPVDLVGLLEIAHRNGMSEPGGVSVVEALRPDGTTRRFAFGSVTARTAKEHDDD

SEQ ID NO: 34391 - protein, 259 aa, Microbacterium trichothecenolyticum
MTETATQSDLDATDAAVEDAAAGEAFIAPAAMENDLDELFPGDRGVLDPAVRRLFVHVLQRRFLMADRNREEWTVLLDNQQLIESRLNDLFVRLVVDHDRGVAYKQQVRSDEFEMPILLRDAAYTRSETLVLVHLRTVYQRESAAGEPAARVDIEDVEQTVMSYFVDADGDTARRQRSIRKAMDRLARDGIVDEETTGRFRISPLVEIVLSAEKLRELRDWLRTQSDPAVAGGAASVASVDVFDEAEDDDEDDLEEAAL

SEQ ID NO: 34392 - protein, 1117 aa, Microbacterium trichothecenolyticum
MTMLDTLFGLIPAASRGQQWLAEDLQLVNWGGYDGAHRVRFSPEATLLCGGSGSGKSTLMDAYIALMMPHTTPFNGASNGGVTGRPRGDEQRNILSYGRGKLDESRTEEGTKMRVLRGDGEDTWTAVAMTWIDHDGSRFTAVRAWYIPAGARVLEDTVRVRATTDRAFDLSSLQQAAALRLSDLSLRNAGLDPVSTDREFSARLHAVLGIGAAGAGGKAMSLLARIQAGQQITTVDDLYKRLVLEEPETMTTADAVVAHFDGLESTRTRMLTARQQVSALEPIHELREKIAAAVERVRLIDEVGEFSDPASLATLWRADRRLGMLREVETELRDRKNAADTTLREKRALADAAEAERDGLVEVLRLSGGDRLETAQRELREVERRLTATQSRRAGFDADLRAIGEAAATQAEFTELMDRARASLADRDAKGSVRAEYAEAISAEKSAAREIAELEAEVRRATGLQGNIPRALHESRELVARAAGIEVEDLPFVGELVEVRTEFEPWREAFNLALGGFATTLLIDVDHLGRFRTAIDAVRTPVRLRYEGVHAGLDEADLRDTTTLPGRLDYQSTPFTGWLQERLADRFGFVCVDSATGLSQHRMALTITGQMSQGSRGAHGGHGRENVLGFSNDRRLADLARQLDDARPRLERAAENRKRADAALDAVDARFAVYAKVRDLTWEQVDVAAVTAERDRWLAVQDDVTAANPEIARVQGQIAAAKGKAARLREEIARTTVEREQIESQWSDVIDDVDADQTVIDAAEDAGRMLRPEQIAFLDERFSLTETSRQASASDALAGFVAALTTAAQRLTEDRRAAADSLEQQRDSVRRIMVSFLERWPNPNLLPDPDESVDDFERILEALRTSGLHELEAEWRDSLLKLSGNDLTNLDSTLSRSIREIRDRIEPINEIMQDLPFYDDDHRLQITTRENQSEARRRFRRELREVRALIEAASSDDEREQVYRRMSKLIGHMRRSAPDFGDLIDVRNHVRVSAERVDAATKQHVALYDHIGEKSGGESQELIAFIVGAALRYQLGDAGAARPRYAPVFMDEALIKADAHFTKRAIGAWRGLGFQLVIGAPNDKYSAIEPHVDVEYDILKDTRGRSWAKPKVGLQAR

SEQ ID NO: 34393 - protein, 498 aa, Microbacterium hydrocarbonoxydans
MTGTRAEAAYLRARAAFKIPTLDLLHGRYAPFVIAALSIMFTADRPTVAVADAHVEVGEMLAELRAAGYEENGRGLPSTTGREVCRYWVKVGWLGQQIEGDVEVYRCTAHAVRALEIADLTGGSTRVSHSRVRTLLDAVERLAGDADEDPARRLARLRAERAALDAQIAALENREADPITDDELLEEAENVLHLARSLPADFTRVAESIKAMQRDVIRDLRRDERPTGEVLREYLLRGQQVMQSTREGQAFAGALRVIGDPERIDALTEQLHELLGRPFARMLDAAQRSELDTIGRRMELGVQEVLTAQRRASHVIAAQVRTHDPARDRQVDELLRDVISGLQAWTQTNTPETPVEPLRRLPIASIGHLRQSLSDVRPPEPPAPLEDRAGDAVFVDADTRAWGGPRYAELETYVAGLGEDFDLGDAFLGADDETRRPVDLLGLLEIAHRNGMTEGEEVSVVEAVRPDGTTRRFAFGSVTARTRKDDAMAQAAKEQADD

SEQ ID NO: 34394 - protein, 231 aa, Microbacterium hydrocarbonoxydans
MTDHDLASDGGFIEPVSMEEDLPELFPGDRGVLDPEVRRTLALILHRRFLLAERNRQEWRTLLDNQTVIESRLNDLYIRLIVDHEHGLAYKQQIRVDELDIPILLRDTPYTRSETLVLVHLRTVYERENVAGESAPRIDIEDVEQTVLSYFTDADGDISRRQKAVRDAMRKLANDGIISEETTGRYRIGPLVEVVLSAQKLTELRDWLRESALGREADALTEQDAREGVLS

SEQ ID NO: 34395 - protein, 1114 aa, Microbacterium hydrocarbonoxydans
MTMIETLFGLIPQGSRGQQWVAEDLQLVNWGGYDGGPHRVRFSPAATLLCGGSGSGKSTLMDAYIALMMPHTTPFNGASNGGVTGRPRGDEQRNVLSYGRGKLDETRTEEGTKVQVLRGDGEDTWTAISMTWLDHDGARFTAVRAWYIPAGARILEDTVRVRATVHDAFDLASLERAATQRLTDASVRAAGLDPVGTDREFSARLHAVLGIGAAGAGSNAMSLLARIQAGQQITTVDDLYKRLVLEEPETMRTADAVVVHFDELESTRQRMLVARQQVAALEPIRDLRAKIATTAERMRLIDEIGVFADPSSLASLWRAERRMTLLRDVEEELRDRKLALDASIREKRVQADAADAEHDGLRDLLRESGGDRLETAQRELRGVERRLMEAEDARARLDQDLRMLGAEVTTKEQFDALISRARAALEDSDAKGRARDAWAQARSARDAASSDLTRLERELAASASFTGNIPADLYESRARLAAAAGLEPHELPFVGELIEVKTEFEPWREAFNLALGGFATTLLLDVAHLDRFRAAIDSVRTSRRVNYQGVHTGLRPGGGGAADTLPGRLDYSSTPFTGWLQLRLEERFGFVCVNSAAELAVHDQAVTITGQISRGEQGAHGGHGRANVLGFSNQSRLRELRASLDTARRELDQAEVRLDVAAADLDGIDAHRAAYARTVDVTWDRIDVASLHAERERWLSVESDVAESNPDIAALRGQIEKAKKTVTRLREEIAAATVERNQVETTWGDIIDDVDAGQKLMDEAAEAGRVFDEAQAAYLDDRFAAPTGSSASASALLSRFDGALSTAGQRLAEDHARAVDAHREQRESMRRLMQTFLERWDNPNLLADPDLYVDDFESILSALETSGLHELEGEWRDSLLNLSGNDLTNLDSTLARSLREIRERIDPINRIMQDLPFYDDDHRLQITTRESQSEARKRFRRDLREVRGLIENASTDAERENAYRRMSRLIGHLRRSAPDFSDLVDVRNHVRVSAERVTADTKQHVALYDHIGEKSGGESQELIAFIVGAALRYQLGDAGAERPRYAPVFMDEALIKADAHFTKRAIGAWRGLGFQLVIGAPNDKYSAIEPHVDVEYDILKDTQGRSWAKLKVGL

SEQ ID NO: 34396 - protein, 489 aa, Microbacterium azadirachtae
MTGSRAEGAYLRALAAFKTPTLDLLHGRFAPFVVAVLSQMFSADRPTVAVADAHVEVGEMLDQLRAAGYGRDDRRLPATTGREVCRYWIKVGWLGQQIEGESEVYRLTAHAVRALEIADLTGGGARVSNSRVRTLLEAVERLAGNADDDPARRLRRLRAERAALDAQITALESGAADPVPEDELLEEAENVLHLSRGLPADFTRVAESIKAMQRDVIRDLRRDERPTGEVLREYLLRGQQVMQSTREGQAFAGALRLIGDPERIDELTEQLHGLLARPFAQLLDGTQRTELDMIGRRMELGVQEVLTAQRRASHVIAGQVRTHDPARDRQVDELLRDVIAGMQAWTQTRTPETPVEPLRRLPVASIGHLRQSLGDIRPPGSPAALVTQGQDAEFVDADTRAWGGPHYAELEAHVSGLADEFDLGEAFQAITAESTRRPVDLLGLLEIAHRNGLAEADGVSIVETVRPDGTARRFAFGSVTAHARKEEER

SEQ ID NO: 34397 - protein, 242 aa, Microbacterium azadirachtae
MTSDVAETSDATETSGFIEPVAMEDDLAELFPGDRGVLDPEVRRTLALILHRRFLLADRNRTEWRALLDHQTVIESRLNDLYIRLIVDHAHGLAYKQQIRIDELDIPILLRDTPYTRSETLVLVHLRTVYERENVAGEAAPRIDIEDVEQTVLSYFTDADGDISRRQKAVRDAMRKLSNDGIISEETTGRYRIGPLVEVVLSAEKLTELRDWLRDTAAERRAAAGGVALDDAAEEALEDALS

SEQ ID NO: 34398 - protein, 1118 aa, Microbacterium azadirachtae
MTMVDTLFGLIPEASRGQQWVAEDLQLVNWGGYDGGPHRVRFSPAATLLCGGSGSGKSTLMDAYIALMMPHTTPFNGASNGGVTGRPRGDEQRNVLSYGRGKLDETRTEEGTKVQVLRGDGEDTWTAIAVTWRDHDDSRFTAVRAWYIPAGARVLEDTVRVRATANTAFDLATLERAAAQRLTDASVRAAGLEPVGTDREFSARLHSVLGIGAAGSGANAMSLLARIQAGQQITTVDDLYKRLVLEEPETMRTADAVVVHFDELESTKQRMLVARQQVAALEPIRDLRQRIDTAAGRMTLIDAVGVFEDPTSVASLWRAERRMDLLRTVEDELRDRTRVLDVLVREKRVQAEAAEVEHEGLRDLLRERGGDRLETAQRELRGVERRLEDARVLRARFDDDLRALGAEVHSRAEFDKLVGRARAVLGDADAKGSAREAWADARRTRDGLKTELAQRERAAEEATAFAGNIPGDLYRSREMLAEAAGLEPHQLPFVGELIEVRTEYEPWREAFNLALGGFATTVLLDIADLDRFRTAIDGMRTPRRLTYQGVHTGLSVSGGGAENRLPGRLEYADTPFAGWLQVRLAERFGFVCVNTAAELAAHEQALTITGQVSRGDQGAHGGHGRANVLGFSNRARLRELEAAVEELRPALERAEEAVTAAETALDRFDAERAAFARIVDVVWDQVDVDALVAVQERWRGVETEVAEKNPDIAGIAAQIEKAKGLAGRLREEIGAATAERQQVERRWGEITDDVDAGQALIDEATGSDRAVGTEQAQYLDDRFASPASAKAAPSVLLERFDGALQTAGNRLNEDRATAFEAHHEQRESMRRLMAGFLERWENPNLVADPDLYVDDFESILAALETSGLHQLESEWRDSLVHLSGNDLTNLDSTLGRALRDIRERIEPINRIMQDLPFYDDHHRLQITTRESQSEARKRFRRDLREVRGLIETASSDQEREQAYRRMSRLIGHLRRTAPDFADLIDVRNHVRVSAERVTADTKQHVALYDHIGEKSGGESQELIAFIVGAALRYQLGDAGAERPRYAPVFMDEALIKADAHFTKRAIGAWRGLGFQLVIGAPNDKYSAIEPHVDVEYDILKDTQGRSWAKLKVALPEAR

SEQ ID NO: 34399 - protein, 451 aa, Enterobacter aerogenes
MPLEEAIQSLTGILVEHVSQEQYDINQDNPSLQASRELREWIKRRLIVERDGRVFATDALEVAITFVESLDNRFMTSTASRLSTVQREIENLETRLNPNPANRVTTLRRRIAELERELQEAEAGHIEVLETHQAVEHIREVFNLASSLRADFRRVEDSWREADRALRQSIIGEQYHRGDIVERLLNDQDALLNTPEGRVFDSFQQQLRQSSELKAMSERLRVILSHPSASDALNRLQRHDLRWLVKRLVDESQTVLQARARSERDVRGFMKTGLAAEHHRVGHLLNEFLNQALKLDWQRQIVRKQEVPLPAVGVAVTGVPAIERLRFKEVDDEAEQTLDLSNHAADLTQIGDDFWDAFNGLDREALIQQTLQVLANENRPVSLAELAALLPPAHDLETFAIWIGMAREAGIAVIDSQREFAELSDGEGRRWRFNLPTTALESQALMDIDWE

SEQ ID NO: 34400 - protein, 208 aa, Enterobacter aerogenes
MRTLKKIREAAQELLKYGLLEEASKPNLYRVVLAHPEEVTRILEPLDLDIGIDEIRGLLYVKVRLDETPEQDEWSHPLVRRQRLNLEQSLLVAILRQHFVAWEQESGTGASQAQIAIDDLLPQLQIYLGDPGSESKERTRLLTLLDQLKGHGLVTSPDAHERIVIRPIIAHLADPMNLQALLAWLQDQVAQQTSPADSSEKESSGEEV

SEQ ID NO: 34401 - protein, 973 aa, Enterobacter aerogenes
MGALLWFDSTSSSVTDMKRLWLFSDNPEQTLEHWLNVYHDGGTRLLRQMEKEVTGIWTYPNKKQYLARLRDFFEVGENAFTLLNRAAGLKQLNSIDEIFRELVLDDHSAFDRATEVADSFDGLTEIHQELETARKQQQSLQPVALSWDKYQKQERQLAERKALESLLPIWFAQQASQLWREKVSHLEIEFGEAQIREEQIQSQLELQKKVVADCMQHYYQAGGANIDELNERINDWQKTLGRREALARQYQQLIHNLGLPLDLSQQQLEANQHEAEARCVQLADDIKLKQEEAYQKGALSHNITVELRERETERAEIARRPDSNLPAHYQAFRSELAKALNVGESELPFVAELIQVKPEEAQWRGAIERAVGSNRLRILVAPESAQEALRWVNQRNNRLHVRLLEVKLPHSPARFFDDGFTRKLLWKDHPWREAVKALLAESDRHCVDSPELLRDTPHAMTVQGLMSGKQRFYDKQDQKRLDEDWLTGFDNRDRLNFLAREVAALQEQTKTANAAFEVAKGEVALLQNQAISFQKIQQIDYDSIDVPGAKSQLEALKERLENLIHPDSDASVAKAKLDEAQTVESEFDKQLRAANKVTNGLDTELTSARAAERKAQQTAQQGMQDEERELCTLHFPAVTLEQLPDIRDLERHHERGIQQEIEGVKGELHRLSIELTKRMSEAKRVDTGALVEAGADLDDISVYLQRLQELTEEALPEKLNRFLDYLNRSSDDGVTQLLSHIEHEVLVIEERLNELNETMFRVDFQPDRYLRLDTKKVVHESLRTLEKAQRQLNTARFVDDNGESHYKALQVLVAQLRDACERNRTLGAKALLDPRFRLEFAVSVMDRQSGNVIESRTGSQGGSGGEKEIIASYVLTASLSYALCPAGSRYPLFGTIVLDEAFSRSSHAVAGRIIAALREFGLHAVFITPNKEMRLLRDHTRSAIVVHRRGQDSNMASLSWEELEQHFRRRENA

SEQ ID NO: 34402 - protein, 385 aa, Enterobacter aerogenes
MYSPDELREKLARQWDNAKLRAERLLPPGNWPLCLTIGKPSAKIFAEQPQRVLQHVQLWRQVAVGRVDWGEVSYRASDGPVSMPLRWILNGPSDWISAAADQAVSREFRLLEGIIEQVDPIFHPLLVSHRSLWRHKSPQDIISAARLACRLEPGCAKGLPLRLLSGQGVDTKFIENNISLLTRLLDVRFSGEASEQGLTTFLDAFDESSHWVLVVPLSPGLLPFKKCRVTTAELAETTLPASRVLVIENEQCLHQLPALSDTIAILGCGLDVQWLSSSVLDEKRVAYWGDMDSWGLLMLARARRCCPTLDVLLMNRELFEQYASHSAVPEPVKAQQAIPDGLLNEEADFYRYLTRSPRGRLEQEFLPAGIVEEALLRWAKSEVHI

SEQ ID NO: 34403 - protein, 470 aa, Mycobacterium neoaurum; identical to SEQ ID NO: 32141

SEQ ID NO: 34404 - protein, 223 aa, Mycobacterium neoaurum; identical to SEQ ID NO: 32142

SEQ ID NO: 34405 - protein, 1123 aa, Mycobacterium neoaurum; identical to SEQ ID NO: 32143

SEQ ID NO: 34406 - protein, 335 aa, Burkholderia pseudomallei 406e; identical to SEQ ID NO: 33027

SEQ ID NO: 34407 - protein, 223 aa, Burkholderia pseudomallei 406e; identical to SEQ ID NO: 30855

SEQ ID NO: 34408 - protein, 1210 aa, Burkholderia pseudomallei 406e; identical to SEQ ID NO: 30856

SEQ ID NO: 34409 - protein, 377 aa, Burkholderia pseudomallei 406e; identical to SEQ ID NO: 32792

SEQ ID NO: 34410 - protein, 335 aa, Burkholderia pseudomallei MSHR840; identical to SEQ ID NO: 32789

SEQ ID NO: 34411 - protein, 223 aa, Burkholderia pseudomallei MSHR840
MSLSNLIDEQLAIANVKRERFREILVRLMAYGVIVRDEDKTEQLLYDDARRVESLLDEYLDFAGFRLHHDRDNRFYRLYAAGAVVDGLPPDVYEPAPSLRARVSPDFVALALTLRFLYQNKLNAGDIQPQGEALVNFEEIAATMQTQLKRALPSSMGDKMALLAELRRHRLLRYAPEFSISDEDALLAIRPTILGVVSNDALTAALDADGMLEQQTTVEEKDA

SEQ ID NO: 34412 - protein, 1210 aa, Burkholderia pseudomallei MSHR840; identical to SEQ ID NO: 33056

SEQ ID NO: 34413 - protein, 377 aa, Burkholderia pseudomallei MSHR840; identical to SEQ ID NO: 33114

SEQ ID NO: 34414 - protein, 484 aa, Burkholderia sp. 2002721687
MPLDYSTLDTLRTHHPAWRLLRSDHAPLVASFLHRVFVVPNVRVMSAADLAEVLEDELYALRDRLGTDAYPKRALDYLNDWASPEKGWLRKFYRQGSDEPHFDLTPATEKAIVWLDALTERSFVGTESRLLTLFELLRQMSEGSESDPQKRMVELYRRRDEIDAEIARVNSGDLPLLDDTALKDRFQQFMQLARDLLTDFREVEQNFRMLDRRVRERIALWEGSKGALLEEIMGERDAIGDSDQGKSFRAFWDFLMSSTRQEELTERLTRVLALPVVANLKPDARTARVHYDWLEAGEHTQRTVAQLSQQLRRFLDDQAWLENRRIMDILRGIEARALAVRDTPPVGEIMNLAESSSDVELPMERPLHTPVQKPVITDVALEMGDVDLDDTALYSQVVVDRAQLAGHIRQALQDRSQVTLRELIESYPLQQGLAELVAYLQLGSAAFKTVVDEDTHEVIAWQTTGRDETPKARRARLPRVIFVR

SEQ ID NO: 34415 - protein, 207 aa, Burkholderia sp. 2002721687
MAGNADLSTLAITLLKGVIYREGDERLWGALLDLQARVRDYVSVLGLELVLDEAEGYAFLRSRPEPAEDGAAPKLPRLIARRPVSFPVSLLLALLRKKLAEFDAGGGDTRLVLSRDDIVELVRVFLPDSSNEAKLIDQIETHINKIVELGFLRRLKVASGSAASFEVRRILKAFVDAQWLSDFDTRLAAYQAQLTGTTAGPGGDVDE

SEQ ID NO: 34416 - protein, 1125 aa, Burkholderia sp. 2002721687
MNEPNEAIPQLLELDFLADDTLSGFRLTRLEVFNWGTFDGRVWTLQLDGKNGLLTGDIGSGKSTLVDAITTLMVPSQRIAYNKAAGADSKERTLRSYVLGHYKSERNEVTGAARPVSLRDRNSYSVILGVFHNAGYDQTISLAQVFWMKEAQSQPERFYVGTERNLSIATDFVHFGSDIAQLRKKLRGLGAQIEDTFPKYGAWFRRRFGIDNEQALELFHQTVSMKSVGNLTDFVRSHMLEPFDVAPRIAALISHFDDLNRAHEAVLKAKRQVELLKPLVVDCDQHGALAVELEASRVCRDALKPYFAELKLGLLDRRLQLLAEDHARLSTQRERRIEQCDQDRTQADRLKRAIAEQGGDRLEQLAVAIRDEERERNRRQQRAERHAQLLAAIGEAAVANEPDFIAQRQQVTDLRESVSQREADLQNQITEWGVSLREGKREHDVLGDEVASLKARRSNIPKEQVAMRAALCAALGFDEDSMPFAGELIQVREEAREWEGVIERVLHNFGLSLLVPDAHYSDVAAWVDRTHLAGRLVYFRVRAARDQDIAELHRDSLVRNVAIKPDSPFYGWLERALAQRFDYACCATQEQFRRESRALTRTGQVKAPGERHEKDDRHRLEDRSRYVLGWSNDAKIAALEGQLRALEMRLGGIASQIAEAQGDQTTLRRQLEVLAALNEFNDFRELDWQSCSATIARLRDEKARLEAACNALLELAAQLESVQAALKESERALSDVNRELGGIDARREAAEALREQTAAWLAGIAPDTRERLDVLRAQILGEHQLSVESCDNRERELRDALQAHMDAEAKRLDRLTERIIKSMSTFKETYKLDTADFDASLEATFEYRELLARLNTDDLPRFEARFKELLNINTINEIANFNGQLARERETIKERIARINESLAQIDYDPGRYIVLESQASPDADIRDFQAELRACTEGTLTGSDDTQYSEAKFLQVKAIIDRFRGREGLSDQDRRWTAKVTDVRNWFLFAASERWREDDTEYEHYSDSGGKSGGQKEKLAYTILAASLAYQFGLEWGAVRSRSFRFVVIDEAFGRGSDESAQYGLKLFRQLNLQLLIVTPLQKIHIIEPFVSSVGFVHNDEGRASKLRNLTIEEHLARKAEGST

SEQ ID NO: 34417 - protein, 415 aa, Burkholderia sp. 2002721687
MSWTTAGDLKAQVRRLWERGELLRSMVSDDADAVPNTVLAARGELKAGLRSGCAFPLRLVLKGPASAELTERFQAVREWIAELVTVAQIRIEWREFNHRVLGVQRVPQAVWIDDLDSALAMIGKRGDAAHFGRLLTLVGSRQPALLVWFRRRPLQALELADECERLLAVVGWIVRHPRPGIYLRQVDIADVHSKFIEKWRGVLSEWLDLVLPLEAVAVERNGGAHFAARYGFLEKPDRIRFRVLDAQLPMLPGPALPDITVDADSFAALAVPIRRVFITENETNFLAFPPLADAIVVFGAGYGWDALSKAAWLSRCSIHYWGDIDTHGFAILDQLRSRFDHVKSFLMDRATLIAHEAQWGKEHDQVLRDLPRLDDGEQALFNDLRDNRIRKNLRLEQERIGFQWVETALATTARQ

SEQ ID NO: 34418 - protein, 503 aa, Gordonia sihwensis; identical to SEQ ID NO: 32236

SEQ ID NO: 34419 - protein, 199 aa, Gordonia sihwensis; identical to SEQ ID NO: 32237

SEQ ID NO: 34420 - protein, 1134 aa, Gordonia sihwensis
MTGLFAPTELENADSARSGFRLQRFQVLNWGTFDQRVWTLVLDGQNGLLTGDIGSGKSTLVDALATLLLPAHRVAYNKAAGGESRERDLRSYVLGYYKSERNEVTGASRPVALRGMSNYSVILGVFHNEGHDETVTLAQVFSMRHDSGQPERFFTVTDRALDIATDFADFGSDLRALRKRLKDGDTRIHEHFPEYGRDYRRALAIRSEQAMELFHQTVSMKAVGNLNDFVRDHMLEPFDSSGWVDTMVSHFEDLTAAHDAVVLARTQLEELGPLLADDDRYRRHVEMAAELKARRGALRHYFAQQRHDLLAGELENHNRDLAATRAALEAVDRDLADLRIGLRELELRQAGLGGTDIAALEQQIVDAARQREERAAAHERYTRMIEDAGLAPVSDRGQFEQRRTEVADAVEALDAEAAEVDNALNEVRYSRRQLDGEGRRVAGEIASLRGRTSNIPERNLRIRELICQGVGLPHDELPFVGELIGVRADESRWEGAAERVLRGFGLSLLVAADLYDEVSAWIDANHLGGRVVYFKVSDHVSSKGAPTPPPTALAHKIDIKEGRFETWLERRLFERARHVCAETLEEFRAADYAVTVNGQVRSGGGRHEKDDSQRVDDRRNFVLGWSNEQKITALFTAGQRVQDDLNRVDQEIADLEDRRRALMDRRNALTGLDAYPSFDVIDWMSSAARIAEITERKTELEHSSTELAEVTDAVAATREQLSAADATRDGLRDKVSRLEMARDQGEKARNAAQAVLAEPEFAEAEAYFEAIAEAVQAYRAKVDGGADQVLTVAECAELEASLTEKLTDESEQHTSRAGTYETRVVNRMSEFNRNHPVLTTEFDADIASADEYRELHRRLAEDDLPRFESEFKNYLNTNAIRDIAIFAAKLNKEVHQIHSKIDTINESLAGIEYNPGRYIRLDVNPTAAQDIREFRADLRKCSDGSFDSGGDDQYAEEKFLLVKALVERFRGREGFTDLDRKWTEQVTDVRNWVTFAASERYLDGDGEYENYTDSDGKSGGQKEKLAYTILAASLAYQFDLKWGATRSRDFRFVVIDEAFGRGSDDSARYALSLFARLGLQLLIVTPLTKIYTIEPFVSAVGYVENRGGSYSQLQCLTIEQYREKRAVRELVHEA

SEQ ID NO: 34421 - protein, 507 aa, Nocardioides luteus
MSDTRVEAAYAGALAAFKNPMLDLLHGRFAPFVVAVLSVTFTSERASVPVVDAHAEIGDMLDRLRATGHAEGEGGEVMLPVGTARELCRQWVRAGWLLRQIEGEDEVYRLSAHAVGALEIAGRASGSRARVSESRVRTLLEAVERLAQDADPDVLTRVARLTEEIAERRAEIARLDRTGVVDTVEDDTLLEQAENILHLTRELPADFARVVESIRAMQRDVVTDLRQDVRPAGEVLREYLQRGKDVMASTPEGKAFAGALRMIGDPRRLDDLAANLRTVLRHRFTTAMGPAERAELAAVGRRIETGVAEVLAAQQTASHVITTQVRTHDPARDRQVDDLLRDVMVGFQAWMPTSRPAEAVEPLRRLPLADLGHLRQSVSELRPPEPPAPLADWGDVESAVEDTKAWGGPGYRAIEAHLDAYLAAHAGEGPVDVAEVFAAAPEEIRRPVDLLGLLEIAHRRGMAETGEISTIEAVRADGVRRRFAFGGVRMTDGDATGEGTGEGADVD

SEQ ID NO: 34422 - protein, 246 aa, Nocardioides luteus
MTETETEAVAYGSEPEGFIEPVSMEDDPTELFVGDRGVLDADVRRVLVQLLRRRFITAERSPRQWRTLLDHQAVIESRLHDLFVRLVVDHDRGIAYKRQVRSEELDVPVLLKDDAYSRAETLVLVHLRTVFQRERGAGESSARVDADELEQTVLTYFDVASGDAAPRREIRRAVERLAREGLIEEESEDRYRITPLVEIVLSVEKLTELKAWLKDPTGTSGVEVIGDDADDPDGPESDDEAEETER

SEQ ID NO: 34423 - protein, 389 aa, Nocardioides luteus
MNMIDSLFGLIPARSTGRQWVASELQLVNWGGYDGAHRIRFSPSATLLTGGSGSGKSTLMDAYIALIMPHTTPFNGASNGGVVGRPRGQDQRNILSYARGKIDEAKTAEGTKIRVLRGDGRDTWSAIAMTWADQTGARFTAVRAWYVPASAKNLDDVTKLRAVAEAGFDVRDLEPVAAHRFTRTAVSEIGLTPIDTDRDFTARIHSALGIGAAGDGEKAVNLLGRIQAGQQITTVDDLYKKMVLEEPETLATADGVVAHFDELSATRDRMVTAQQQVRALTPIREHRAAIEDAASRLEVIDGIGVFGDEATSAGLWRAGKRVDLLSELEADLSSRRGAAEKAVAEKQALIDAAESERDGLAVTVAASGGRRLEEATREIKSAESRADQV

SEQ ID NO: 34424 - protein, 489 aa, Xanthomonas citri subsp. citri; identical to SEQ ID NO: 30402

SEQ ID NO: 34425 - protein, 233 aa, Xanthomonas citri subsp. citri; identical to SEQ ID NO: 32320

SEQ ID NO: 34426 - protein, 1340 aa, Xanthomonas citri subsp. citri; identical to SEQ ID NO: 30404

SEQ ID NO: 34427 - protein, 489 aa, Xanthomonas citri subsp. citri UI6; identical to SEQ ID NO: 30402

SEQ ID NO: 34428 - protein, 233 aa, Xanthomonas citri subsp. citri UI6; identical to SEQ ID NO: 32320

SEQ ID NO: 34429 - protein, 1340 aa, Xanthomonas citri subsp. citri UI6; identical to SEQ ID NO: 30404

SEQ ID NO: 34430 - protein, 489 aa, Xanthomonas citri subsp. citri; identical to SEQ ID NO: 30402

SEQ ID NO: 34431 - protein, 233 aa, Xanthomonas citri subsp. citri; identical to SEQ ID NO: 32320

SEQ ID NO: 34432 - protein, 1340 aa, Xanthomonas citri subsp. citri; identical to SEQ ID NO: 30404

SEQ ID NO: 34433 - protein, 489 aa, Xanthomonas citri subsp. citri; identical to SEQ ID NO: 30402

SEQ ID NO: 34434 - protein, 233 aa, Xanthomonas citri subsp. citri; identical to SEQ ID NO: 32320

SEQ ID NO: 34435 - protein, 1340 aa, Xanthomonas citri subsp. citri; identical to SEQ ID NO: 30404

SEQ ID NO: 34436 - protein, 489 aa, Xanthomonas citri subsp. citri; identical to SEQ ID NO: 30402

SEQ ID NO: 34437 - protein, 233 aa, Xanthomonas citri subsp. citri; identical to SEQ ID NO: 32320

SEQ ID NO: 34438 - protein, 1340 aa, Xanthomonas citri subsp. citri; identical to SEQ ID NO: 30404

SEQ ID NO: 34439 - protein, 489 aa, Xanthomonas citri subsp. citri; identical to SEQ ID NO: 30402

SEQ ID NO: 34440 - protein, 233 aa, Xanthomonas citri subsp. citri; identical to SEQ ID NO: 32320

SEQ ID NO: 34441 - protein, 1340 aa, Xanthomonas citri subsp. citri; identical to SEQ ID NO: 30404

SEQ ID NO: 34442 - protein, 489 aa, Xanthomonas citri subsp. citri; identical to SEQ ID NO: 30402

SEQ ID NO: 34443 - protein, 233 aa, Xanthomonas citri subsp. citri; identical to SEQ ID NO: 32320

SEQ ID NO: 34444 - protein, 1340 aa, Xanthomonas citri subsp. citri; identical to SEQ ID NO: 30404

SEQ ID NO: 34445 - protein, 489 aa, Xanthomonas citri subsp. citri; identical to SEQ ID NO: 30402

SEQ ID NO: 34446 - protein, 233 aa, Xanthomonas citri subsp. citri; identical to SEQ ID NO: 32320

SEQ ID NO: 34447 - protein, 1340 aa, Xanthomonas citri subsp. citri; identical to SEQ ID NO: 30404

SEQ ID NO: 34448 - protein, 489 aa, Xanthomonas citri subsp. citri; identical to SEQ ID NO: 30402

SEQ ID NO: 34449 - protein, 233 aa, Xanthomonas citri subsp. citri; identical to SEQ ID NO: 32320

SEQ ID NO: 34450 - protein, 1340 aa, Xanthomonas citri subsp. citri; identical to SEQ ID NO: 30404

SEQ ID NO: 34451 - protein, 489 aa, Xanthomonas citri subsp. citri; identical to SEQ ID NO: 30402

SEQ ID NO: 34452 - protein, 233 aa, Xanthomonas citri subsp. citri; identical to SEQ ID NO: 32320

SEQ ID NO: 34453 - protein, 1340 aa, Xanthomonas citri subsp. citri; identical to SEQ ID NO: 30404

SEQ ID NO: 34454 - protein, 489 aa, Xanthomonas citri subsp. citri; identical to SEQ ID NO: 30402

SEQ ID NO: 34455 - protein, 233 aa, Xanthomonas citri subsp. citri; identical to SEQ ID NO: 32320

SEQ ID NO: 34456 - protein, 1340 aa, Xanthomonas citri subsp. citri; identical to SEQ ID NO: 30404

SEQ ID NO: 34457 - protein, 489 aa, Xanthomonas citri subsp. citri; identical to SEQ ID NO: 30402

SEQ ID NO: 34458 - protein, 233 aa, Xanthomonas citri subsp. citri; identical to SEQ ID NO: 32320

SEQ ID NO: 34459 - protein, 1340 aa, Xanthomonas citri subsp. citri; identical to SEQ ID NO: 30404

SEQ ID NO: 34460 - protein, 489 aa, Xanthomonas citri subsp. citri; identical to SEQ ID NO: 30402

SEQ ID NO: 34461 - protein, 233 aa, Xanthomonas citri subsp. citri; identical to SEQ ID NO: 32320

SEQ ID NO: 34462 - protein, 1340 aa, Xanthomonas citri subsp. citri; identical to SEQ ID NO: 30404

SEQ ID NO: 34463 - protein, 489 aa, Xanthomonas citri subsp. citri; identical to SEQ ID NO: 30402

SEQ ID NO: 34464 - protein, 233 aa, Xanthomonas citri subsp. citri; identical to SEQ ID NO: 32320

SEQ ID NO: 34465 - protein, 1340 aa, Xanthomonas citri subsp. citri; identical to SEQ ID NO: 30404

SEQ ID NO: 34466 - protein, 489 aa, Xanthomonas citri subsp. citri; identical to SEQ ID NO: 30402

SEQ ID NO: 34467 - protein, 233 aa, Xanthomonas citri subsp. citri; identical to SEQ ID NO: 32320

SEQ ID NO: 34468 - protein, 1340 aa, Xanthomonas citri subsp. citri; identical to SEQ ID NO: 30404

SEQ ID NO: 34469 - protein, 489 aa, Xanthomonas citri subsp. citri; identical to SEQ ID NO: 30402

SEQ ID NO: 34470 - protein, 233 aa, Xanthomonas citri subsp. citri; identical to SEQ ID NO: 32320

SEQ ID NO: 34471 - protein, 1340 aa, Xanthomonas citri subsp. citri; identical to SEQ ID NO: 30404

SEQ ID NO: 34472 - protein, 489 aa, Xanthomonas citri subsp. citri; identical to SEQ ID NO: 30402

SEQ ID NO: 34473 - protein, 233 aa, Xanthomonas citri subsp. citri; identical to SEQ ID NO: 32320

SEQ ID NO: 34474 - protein, 1340 aa, Xanthomonas citri subsp. citri; identical to SEQ ID NO: 30404

SEQ ID NO: 34475 - protein, 489 aa, Xanthomonas citri subsp. citri; identical to SEQ ID NO: 30402

SEQ ID NO: 34476 - protein, 233 aa, Xanthomonas citri subsp. citri; identical to SEQ ID NO: 32320

SEQ ID NO: 34477 - protein, 1340 aa, Xanthomonas citri subsp. citri; identical to SEQ ID NO: 30404

SEQ ID NO: 34478 - protein, 472 aa, Burkholderia pseudomallei; identical to SEQ ID NO: 34321

SEQ ID NO: 34479 - protein, 223 aa, Burkholderia pseudomallei; identical to SEQ ID NO: 30855

SEQ ID NO: 34480 - protein, 1210 aa, Burkholderia pseudomallei; identical to SEQ ID NO: 33056

SEQ ID NO: 34481 - protein, 230 aa, Burkholderia pseudomallei; identical to SEQ ID NO: 33057

SEQ ID NO: 34482 - protein, 468 aa, Peptococcaceae bacterium BRH_c4b
MQFFDLVPEKLFSVLTSKNKDIYLEALFVIHRYYHQELLMRKADLIAMFIHHLEDRMMDLSEEIGDEPIGGKNLSGRAHFLLRKLIGSGWLEKEYHPNSFEEYLVVPDYAADILSVLYGITDDSPGEYNSLVYSTYSCLNTADAERDDFMLEALLQSHGATVKLRENLRRLYNNMRRYYQRLQDKEEIREIMKEHFDNYQVLVLDRIYHPLKTFDSIPRYKTRILRILRNWLTDVRVIEKISALMVRKGYRAVPEEARADVVRILGEIIDIYENIENLLREIDKKNTSYTRASVERTRYLLNTDRDARGKLVEVLKGLPGLKQSLPAGTESLLQEGLNIFRQQFIDEYSLYRERQRKTAGEAQPLAVTPPGRRKEMESEFNRFEQRLRDSLTHKKIVQFISAYLQERETVTSEELQLEETEDFVKLIMAVLKNNEEDIPYQVRFLDGYVFVNGYRIPDMVFSVKGVVR

SEQ ID NO: 34483 - protein, 216 aa, Peptococcaceae bacterium BRH_c4b
MWYKDWALLTAEEREHFSRIINILLAKTFMLRDRLEHREKSLAADRDFRFIERQYHLFRDYLAVAGWELTLETDYGVAWVSNPAGFSRRQLDKVTTYFLYVLRLIYEEEREKLSIRKEVITTVMEVVQKLGYLGLIDRRITDTLLADSFAILKDFNIIDKLDGSWTDPEARILIYPTILFVISNERINFLYRNLCGENGAGNYAGNGNTQKGEQGD

SEQ ID NO: 34484 - protein, 1114 aa, Peptococcaceae bacterium BRH_c4b
MKLLKKLLLINWHYFRYQLVDFDRINFLTGVNASGKSTLIDALQLLMLGDTAGNFFNKAANEKSRRNLKGYLRGEVAENEEKGLVYIRSGNFTSYIVGEFEDTVKERRFCLGVVFDCNAAGDYNHRFFSLEHAMPDNHFLNHRTPFSTESLKAFLHENYGRQAVDFFDSNQRYREVLRGRMGNLNEKFFRLFRKAVPFSPIMDIKGFISEFVCDVGGRLDVEDMLENIRHYKQLEGELETIKKRINALEDINGCHLTYAGEKMRLTTQQYIIARAGLEQTGNEIKALYGEADKATQKINKADQELAGADTAINELEVKRSGFIDERNASDVTGLERRLKDEKDRLQLQVDMRLKNRERINRILVDMSAVWGSLVKQLEDAGADRPDLSALIPGLKFIRRAAGDAGLLAREELKAVSGAMRDFRRELADVFADAREELSRTVNRIKQIENEIRELERGIKPYTRQLNGLSAAIAAEIRKISGRDIMPRVFADLMEIRDEQWRNAIEGYLHTQKFYLLLDPDFFLPALDVYDRLKFQREFYDLGIVDVAKILSRNPVVLPGSLAEEIITTDGSARVYADFLLGRVIKCGTAEELRSYETAITPTGMLYQRFVVRQINPSRYRQPYIGRGAVAEHIRLKTEEAAALKRKLLHFQPRHDLYSRLREIQGLSDNDVNNLLEWAASLSDLQELQQRLQESINRYGSLDLDYLHRLDGEIEAIVLQIRDKNKLRDSLIREKGRAENRLESINGDLAPRLEEQCLQKQIEIDKMFHREWREENGEPDFTEALNRISGLGEIVDYYVGQLEETSRVAGLHRDELLRLRSNYNRDYKSSLDISREHNQDWENEAVRLKETRLTTYEHKIKKAREKAQLQFQEDFVSKLRENIETVERQLFELNIALKDVPFGHDRYRFSVVPNRQYQRYYDMVMSDLLIQGHNVFSGEFQSRYRDVVDELFRQLVDAENGELSPEKRVEMERNLEHFTDFRTYLDFDLIVSDGEGNESRLSRMISKKSGGETQTPFYISVLASFLQIYRLKQQGFNNTLRLIVFDEAYSKMDHQRIKESIRLIRDLDLQVIISAPTEKIADIAPLVDRNLCVTRVDGETFARAFDPRKLNEERA

SEQ ID NO: 34485 - protein, 498 aa, Desulfatitalea sp. BRH_c12
MDIQQLFFKDRTFHFFGPLTGRYREMAVSCIRNLYLRLNGPEADYSYHLTRGDVLDIFGASIRSAPALDDDVPGSAAAKMSLQDRTAWMLKKLTDAGWIEAYMDSGTMQTAYRFTPQGRQFAAPFAQRHSEIITNTQHTRSTLSHLQSFVTKMQSGVLSVGDLMIAAKLSGEIISDFNEIIEEIVEQRRALIASVNREILAAKQAGDNFFEFMEKRFIPDMCVRFSRDSVERYRNEILDLLDAIRGQTDDTKAAIEKELRNFYPHLLRAGRPSILIWVLDSIEQRLTAACDVKIPELRAQTENFIRRAQVLINHLASLAFGEIDTDSVFSLVKRLSGLDEADVRAILEDERSRPARVAIGLVNPAKVKLPGKRAMRHIHTALEKQAQVRPEEQRKAYIRQELALAFRIDTASIKDFVIQQLLGGHKIRASDFIIHDAASLLGAIHAPMIGSAGRSGQLFRITPIDETIENDYFTSNDFTIEYLGPIVGAENKDGKDVD

SEQ ID NO: 34486 - protein, 231 aa, Desulfatitalea sp. BRH_c12
MWTEHLAQELKNRNLSMAEFRAVLLRLLDKQVIYRHESQVEAELYDLFVRMQAVVETYLDILGITVFYNSQLNFVIAYPPGSDIPGVAIGDAGQTALQRRIHADEAGLMITLRLLYEEKIREGDIDEQGCVFVPLETVFTRYLSITKKEMPAAEAERRSLFNALKQLRIVTYSDLAGAEQWIGIREIIMHFTLNGIVEALSDREIRPTGVQDAEPIEPDRAGIQIPDQEDA

SEQ ID NO: 34487 - protein, 1205 aa, Desulfatitalea sp. BRH_c12
MKLNSMGLLNWANLPNRDYDFSQINMITGESGAGKTTLLDALQTILTGTTAGLFQYNPGQEEATQQSRVKEVRTLASYILGCDDASYARPQGAHGYLFANWVPEMGDKSQPFTALIGASAYLDSAGNKRTAKEEDLVLAVVRSATLCVKDLLLSPDQGEEQAGEQIIPVAMLANHLKTNHPGMQVEIARGKEDYLCLLYGGLRGLSSVSRVEARNAAKALSRFMVYKPLKDLDEFVRTEILDPHDITDAIRQVSAMMRSINGMEHEAAGIEKGIALLEAAEKGMALFTATAIDEQLARYEHLDRKAAQLQRQSETAKQERAELVEATRILTREKNTLTHDEKQMADQLSLLEAQRLGVPVLKLKDDLERELGRLAHELSERAHTLIQSNAVRKNNRDVTARLGQLLAHAQTSPSALPETLLEPMETVMSMDDLDQLPIGKLLSEQRFQELSEMTPRVERIDNAHRTLVERFASAAEILSRKHFQCQEQAERTLDRIKRLKEQIARLENANQVAYPQTVRRAISLIASQFPEAAPCVLCDHVELADPSWQLAMEGLVGHNRFLILVDAAYEDQVMALMAQHGLQKVAILQGRKAMADASRLTLPATSMVHLLRFTHHLAESYFKARYGSVRLLADTDDITMAARGLKQNGLACLSYRIFMASVSEADLVFGAEARGRALAAQQHQLTEMEQQFEVERTERHLSQAFYDAVRQLSPVDMAKNIVAILETASAHQQVNERLNALDLTECEALDSKIRGAKAALSEISDRREQTTLDIGSNTNAMEAIGRKIKEFEAGIEDKKRHMAACRNVLDRYAAQWPDFHLTEHIDRIQANRSAAQALNTLDADNFGARMNQGARDAEVALEDCTRMGLRGTGIDYHHFRAANMVRDAHTENLITCFSLACDLARQIRNGLNFLRNDILSRHKEKLTEMTGRFNNTFVFHICHTLHNAVRQGKDRLETFNRKLRNHFFGEEYYQFEYQWIPEFRAYYKFFEEAALIKPEVENSLFGNADLSAQSQKIFDEICAKLLDDDIERSVKDLRRIADYRNYRTYDIKKCLPDRAISLKTYGAGSGGQMETPSYVIRSAGLASALHFGEGASHLRTVMIDESFSKMDEARCKAVLDYLSGTLGLQVIFAVPTKSAGALHDHVDQVLQVTKFLQDAPRGELKTAVMVTPTVLKKNTVAELWQRQRVAIENRAHQMTFLELME

SEQ ID NO: 34488 - protein, 472 aa, Desulfobulbaceae bacterium BRH_c16a
MLRRTHPAWRLLRSDHAPLVASFLHRVFIEPNVRQMGQADLAEALEDELFALRDKYGPDVFPKRASEYLNDWADNDKGWLRKYYPTGSDEPHFDLTSASEKAIAWLAGLTDRAFVGTESRLLTLFELLRQMSEGSETDPEARISELVRRRNEIDAEIERVRDGDILLLNDTSLKDRFQQFLQLARDLLSDFREVEQNFRTLDRQVRERIALWDGAKGELLEEIMGQRDTIADSDQGKSFRAFWDFLMSQSRQEELSRLLEQVLALPPVVEMQPESRLRRVHYDWLEAGEHTQRTVARLSQQLRRFLDDQAWLENRRIMDILHNIESQALAVREDAPSDNFISLAEAVATIELPMERPLYRPPIKPQIVDLELLEGEEDADVAALFNQVVVDRAELSRFIRQALQERSQISLAELVAIHPLRQGLSELLTYLQLAGGRNDTVVDEETVDIIVWRLKDGSCRRVRLPRIIFARK

SEQ ID NO: 34489 - protein, 211 aa, Desulfobulbaceae bacterium BRH_c16a
MNMNELELQAAAAEKNNDLSVIVVSLLRGVLYQEEKVEVWNALLNLQAAVRDYVAVLGLELILDEAEGYAFLRSRPEEEENTVPAVPRLVRRQPLAFPVSLLLALLRKKLAEFDATGGETRLILSRNDIAELIRVFLPAGSNEAKVIDQVDTHLNKVVKLGFLRPLHGQKQMFEVRRILKAFVDAQWLTEFDQRLAAYRRELEKKEGESNG

SEQ ID NO: 34490 - protein, 1121 aa, Desulfobulbaceae bacterium BRH_c16a
MAEPLPLNFESDDRLAGFRLKRLEVLNWGTFDQRVWTLELDGKNSLLTGDIGSGKSTLVDAVTTLLVPAQRVAYNKAAGGDTRERTLRSYVLGHYKSERAEVGGSAKPVALRDYNSYSVILAVFHNSGFGKTVTLAQVFWLKDGQGQPTRFYVGCERQLSIKRDFGGFGRDIANLKKRLRGEEMKIFESFPPYGAWFRRRFGIENEQALELFHQTVSLKSVGNLTGFVRTHMLEPFEVASRIDALIGHFDDLNRAHEAVLKAKDQVERLEPLVADCDRYGELEQAVRQLRGCRDALRPWFAGLKLELLGQRLGRLEEELKRHNARIEGLVEERRLLQGRERELRRSIAENGGDRIERIGEEIRRCEAELQRKRRRFERYAELMEALAMYAADSVGAFLVQRKKCTAMLEEEAAGEARVQNELNEAGVEFRLKREEHDRLQTEIRGLKARRSNIDEKQVGIRRTLCRDLGFAENDMPFIGELIRVREEERDWEGAAERLLRSFGLSLLVPEKHYSQVAGWVDENNLKGRLVYYRVRPARMAELPQLHPDSMVHKLAVKPDSPFFAWLESEVYRRFDLACCSRPEQFRRETRAITRAGQIKARGERHEKDDRHRLDDRSRYVLGWSNEAKIAALADKARLLEAQLAGTGAEIAKLQDLQKTAKFRLEMLSKLDEYHDFTEMDWQPSAVKIARLEDEKDRLEAASDILKLLTDQLQATEEKLRKIEQQLELNRNVCAKTEQKITDVTTLQQQTREVVDTAQPEHTGHFILLGTLREEALGEQQLSVESCDNREREMRDWLQVRIDNEDRKIARLRDRIIDAMRTYSTIYDLETREVDVSVEAAADYRTMLLQLQADDLPRFEMRFKELLNENTIREVANFQSQLARERETIKERIGRINESLTRIDYNPGRYIVLEAAPVIDADVRVFREELLACTEGSLTGSDDAQYSEAKFLQVRRIIERFRGREGRSELDRRWTAKVTDVRNWFAFAASERWREDESEFEHYTDSGGKSGGQKEKLAYTVLAASLAYQFGLEWGAVRSRSFRFVVIDEAFGRGSDESAQYGLQLFAQLNLQLLIVTPLQKIHVIEPFVSGVGFVHNADGQASTLRNLTIEEYRQEKEAEQT

SEQ ID NO: 34491 - protein, 383 aa, Desulfobulbaceae bacterium BRH_c16a
MRKLWDQGAILASLAGGEECFPRRMTLKKPNSAEMAERFTEVRAWISRLDREAKHYRLVWREIRHRTLGANAVPAEIWVDSLEDCLTLLGKRQEADRFSALVQLTGRRYPQLIPWLVKRPLYGLSLSADWPRLLDIVSWLDDHRCPEIYLRQVDIPGVHSKFIESHRGVLTELFDLVLSPDRIEVTGRGANGFCRRYGFRSKPSRVRFRLLDRSLALLPGPADQDITVTGEMFAGLELPVQRIYITENEINYLAFPSIPQSMVVFGAGYGFETFAEAAWLHNCNIQYWGDIDTHGFAILDQLRTLFPAVSSFLMDRKTLLAHRLHWGEEPQPMRGELARLTPEEQMLYDDLRFDRLAVRLRLEQERIGFSWVENMVCQPDPLP

SEQ ID NO: 34492 - protein, 489 aa, Streptomyces rubellomurinus
MEFDDVTGLLDHPAWRLLRAENAPLVLGFCGTVFVDENVRGVPENVLVSRLDDQLYDLNERGMGSFPRPAAAYLTEWTNSGWLRKYYPPDEDEAHFDATSALEKAVAWVRGLPARSFIGTESRLSTIVALLRQMTFGTETDPQARIDKLRRERDRIDEQIAQLLAGEVDLLSPVALLDRYQQVENTAVELLRDFREVEANLRELDRRLRQDVATAEGSKGELLASFLMDREMIAESDQGRSFQAFFDHLLSPQRQEELRGLLEQVHQLPQLGGRANRNLLKIPFAWLEAAESTQDTVRQLTEQLRRFLADHGREEDRRVVALVRSVQRHVAALDGRSDLPGIELEVPQVELALPMERRLYMPVERVELDSTAVEAFDDSEVDVSELFAGVHVDHEALVAQVLELIQASPSGQANLPTVVEKYPLTLGLAELLAYFQLDQVGLDIVIDPSHTHDLVYERVHSPGHSMATVPQVTFVLNEGGVTAGEVEQA

SEQ ID NO: 34493 - protein, 195 aa, Streptomyces rubellomurinus
MNDALTVPIVNLLKAGVLYQSDVPAIWDQLTAHQAAIGDYLRVIGLDVVVDRAEGYAYTRQLDPDTRDDGAAVPRLVTRHRLSFPVSLMLALLRGRLAESDATSSDPRLLLTRDDLVEMVRSFLPPRSNEAHLVDQIDSNIKKLCELKVLRQTKQPGLFEVRRHIKALVDAQVLNDFNELLATYRSTIATPEDNE

SEQ ID NO: 34494 - protein, 1131 aa, Streptomyces rubellomurinus
MPKQSGPSDDTLGIGPGFRLTRLEVLNWGTFHRSIWSFTIDGRSALLTGGVGSGKSTLVDAMTTLLLPAHKIAYNKAAGAEAKERDLRSYVLGHYKNERVEATNSTRPVGLRNASSYSVILGVFSNYVLDTHVTLAQVFWVPDANTGQPDRFYVTADTPMSIDADFTGFGTDIADLRRRLKQRKATVYGHYPQYGKALRRSLGIPSDQALDLFHQTVSMKAVGSLDEFVRDRMLEPFDARAAVDKIVAHFDALTASHAEVVRAREMIDGLGPIVDACDRCDGIQRDITMLQQRREVLPVFFAQHRRRLLDLLSQDLKSRITELADQQTGRESELERLRDSADTLRRRIDGAGGEKLVELDARIKELGRDRERRRDQASKYDGWLGQASLAPVTDAVSFRERSDQIAQVRARIEQQEQQAREELDALAVQRDKNNTATQDLRREITSLQSQRSSIPSRLLSLRQDLAAALEVVADELPFAGELIQVRDDEAAWAGAAERVLRGFALSLLVPEVHYEKASAWVNGRHLGLRLVYYKVPAHTPAQELPNDRDLLLGKLELKDDCWAHDWLAMQLRNRADYLCAADLDTFTRSSRPAVTRQGLVKGGGGRHEKNDASRIDDRSSWVLGWSNQAKLEALLAEAASLTKESAAITTRTAELKEQQKGRERISSAVTLLANISEYVELDWQACVTELEQAETQKKALVAEAGLDRLTAELKDTNASISHYDKLVRTGLEALGGLRRDSEDVASQLKQAEGSIERADVEAVAKHESALRLFLPSPVADVQVHLDLLKTAETEAPAKLSRDLDGRSDALRRAASQATSKMTAFRSTYPQYTNDLDASLESAAGYRALHSQLVSDDLPRFEAQFLLYLRTNVIRDIASFQANLLKQEQEISERIELINTSLAGIDYNPGRYVRLNAAPTTNVEIRDFRQSLRECTSDVLATETDDAYTEEKFLQVKRLLDRFKGRPEHTRMDADWTARVTDVRRWFTFSASEHSRADGAEHEVYSDSGGKSGGQKEKLAYTILAASLAYQFRIDPQAKKPKTFHFVVIDEAFGRGDDASAHFALDLFHRLGLQLLVVTPLQKLHVIEPHVTRVGYVDRPDKIRSRLTTLTIEEFRAHKSSRQPAPHSEAQQ

SEQ ID NO: 34495 - protein, 390 aa, Streptomyces rubellomurinus
MTRTQWTTPDQVVEVLRRKWDGGRFLTEAAQGLPFEPIRIPLKGPAAADVISHFDKALAWAQSWAASRHPHLRIQTKTVRGRGNTPTNTIPDRAWIDTRENLWALLSVDTQVDLFHTLHSRAIDHDQDLAQWMATHPMKVLQAHAHWQRVVDTVCWIRDHVTNPIYLRQIDIPGVDTKFIETNKGLLSEILDVVLPASRINADAPRTDFAARYGFLSKPVYVRLRYLADQPGPFSELIVRADELTAQPSGVRRVFVLENEITYLSLPPVPNAIAILGSGYAATLLRHLPWLADVDLRYWGDIDTHGFAILSQVRRHFPHTRSLLMDRSTLLTHKSHWGEEKTQTIETPDHLTPDESELERDLRMGTYQPRLRLEQERIPISTVERALAGP

SEQ ID NO: 34496 - protein, 494 aa, Acetobacter orientalis 21F-2
MAQMKFDFATLNGMRQHNPAWRLLCSDHAPLILSFLHQVFVRPNVRNLEAESMAEALEDTLYAIRQHLDDTAFPRTAREYLEEWASPDKGWLRKFYQPGKDTALFDMTPTTEKALSWLEQLAERSFVGTESRLRTLFDLLRQMNEGTQSDPDQRLADLLQRRADIDAEIARIQNGDLALMDDTGIKERFAQFTRMARDLLADFREVEHNFRRLDRAVRERVALWDGTKGALLDEILTQHDLINESDQGRSFQAFWNFLMSNSRQEELSQQLEHILSLPVIAAMQPDPRLRRIHYDWLEAGDHTQRVVAQLSHRLRQFLDTQNRQETRRIMEILHNIETHAFALRPYLADSPPHEALIELDAMAATPDLVMERPLYAPPHPTVLSLEPMLEEIADDADPTALYEQIVVDKLRLTENIQQALTEAPQINLAALLRRHPLEQGLSELVAYLQLSSERFESLIDEKTNDHVSWDIMTADGSSITRHATLQRVIFVRSV

SEQ ID NO: 34497 - protein, 254 aa, Acetobacter orientalis 21F-2
MSQTVNTPESTQATAQTPASLSTLAITLLKGVIYREEDEGAWGHLLHLQNQVRDYVSVLGLVLIIDPTEGYAYLRSVPDTEEEDAAAPRMPRLIARRPLSFHVSLLLALLRQKLLQFDAIGGETHLILSRDEIAYMLQTFLPESSNEVRQLGQIETYIRRVAELGFLRLIPPTSPEAPNATPHYEVRRILKAYIDADWLATLDERLEAYLAHARSLEQAERPLLTPTTNLHDPAPQHDPDFFCDQADTGLTNRD

SEQ ID NO: 34498 - protein, 1130 aa, Acetobacter orientalis 21F-2
MTDTQQAPLDFAVDDRLAGFRLHRLEVLNWGTFDKRVWRFQLNGRNALLTGNIGSGKSTLVDAITTLLVPAQRIIYNKAAGADTRERSLRSYVTGHYKSERNDATGTTKSVSLRDTQSYTVILGVFKNEGYLQTVTLAQVFWIKKQQVQPARFFVCAEKELSIQEHFTGFDADILQLRKNLRALGAEVEDSFNRYAAWFRRRFGIENEQALDLFLQTVSMKSVDNITDFVRENMLAQFDPTERIHALISHFEDLDDSYQAVLKAQKQISLLTPLTEDFAAYKDSEAQSETLKACRQALPGYFASQKATLLDKQIAKEQEVCASNQQQLATQETTRTTSQHQLEEIKQAIYANGGDRLEQLAVAIQQAEKTHEERRKNASHYATLIEKLNSKPANSAEDFQEQVQHLKKQKTEWKKQDTWLAKDLTEQSILFHEEKNQHDEIVSELDGLKKRQSNIDERQIRMRTMLCDALGVSAEELPFAGELIRVRDDAREWEGAAERLLHGFALSLLVPEHLYTQVVDWVERTQLKGRLVYYHIQKNRTGSSAAHHHNTLAQKLEVHPDSSMRLWLENELAYRFSFTCCETQDDFRRSSKAITRAGQVKEPGGRHEKDDRHRIDDRSRYVLGWNNAIKIAALEERQKKQQALIQKHAEDIAQANNTRKMLLERFETLTRLERYPDYTELDWRSAAQTAAQLTAEREALTATSDVLRELKQQKDHAEQTLHQAEADYMLLYKKQALLEQSVTTLQANLEQCQTVLSTYTLTPQYEQELNRLQTAQNTAELASLDACVIAETQLRNTLDTQIDHQQRTLDSLRDSILRDMREFKTTYPVEAQDIDSTLRAGPEYCHLLAQLKKDDLPRFVSRFKSLLTVNTINEIANFNAHLAQEREIIKERIAVINTSLTQIDYNPDRYIRLEAHQTLDPEIRDFQAALRACTENTVSGDESEHYSEQRFSLVKTIIERFRGREGRAELDRRWTNKVTDVRNWFSFAASERWRADETEFDHYTDSGGKSGGQKEKLAYTILAASLAYQFGLEWGEVRSRSFRFVVIDEAFGRGSDDSTQYGLRLFQQLNMQLLIITPLQKIHIIEPFVSSVGFVDNKDGNYSRLRVLSIEEHFANKTALQEPGTEHERA

SEQ ID NO: 34499 - protein, 487 aa, Enterobacter cloacae; identical to SEQ ID NO: 33423

SEQ ID NO: 34500 - protein, 201 aa, Enterobacter cloacae; identical to SEQ ID NO: 33424

SEQ ID NO: 34501 - protein, 1126 aa, Enterobacter cloacae
MTNALELDFSSDESSAGFRLERLEIFNWGTFNNQVWTFNLEGKNALLTGDIGSGKSTLVDAITTLLVPSHRIAYNKAAGAENKERSLRSYVLGYYKSERLENSMGGKPVALRDHRNYSVILGVFRNEGFGQTVTLAQVFSLKEPAGKPVAFYVVTDNDLSIAQDFSGFGSDINNLRKKLRKNSAEIFDSFPPYGTWFRRRFGINNEQALELFHQTVSMKSVGNLTEFVRSHMLEPFDVAQRITHLIEHFDDLNRAHESILKARRQVDQLRPLVDECDRHALLIQETETMRACRDALAGWFASLKQTLLEKRLLNLKDELQRYQNTLAVTAEQLYEKRSQERQLRADIAANGGDRLEQLRLNISHREQEKNRRLKAADNYNELLGKVNLSAVKDHDEWLATRQLLQIHSDELTDREAELQQQKHELHFKFTRKREIHQQLSAEINNLRSRRSNIDARQITLRAAICEALGLNEEHLPFVGELIAIREEEKAWEGAAERLLHGFGLSILVSDEHYPQVSQWVENHHLNGRLSYFRVNAGMHHAALSPLPGAISEKLQIKPDTLWYDWLERRLLQFNHICCDTLEQFRRETKAITRSGQIKSPGDRHEKDDRHNINDRSRYILGWSNLEKIAVLEKQAGDLEQELAELGKEITSIDVNLKNLQQQRDIYNRLSEHNDYQAMDWQPLAQEIARLEIEKRELEATSDHLAVLSQQLNKILTEIQTLETTHADKIDLRGRTQEKIDRAEESLKEAQAVQITANEQNMPRYYPQLEHWRGEALPSRQINVESCDNCQQEMRNWLQDKIDNEDKKIGRSRDKIINSMTGYNHQYPLETQEIDANIESAHEYRQMLNALQADDLPRFEARFKQLLNENTINDIASFQSHLNRERETIKERIEKINDSLVPIDYNPGRYISLVAQLSADADIRDFQNELRVCTEGALTGSEDEQYSEDKFLQVKRIIERFRGREGLSDHDKRWTTKVTDVRNWFIFSASERWREDDTEHEHYSDSGGKSGGQKEKLAYTILAASLAYQFGLEWGEKRSRSFRFVVIDEAFGRGSDESAEYGLELFKRLNLQLLIVTPLQKIHIIEPYVANVGFVHNEAGKISRLRNISIDVYQQEKAEKKHELDNA

SEQ ID NO: 34502 - protein, 383 aa, Enterobacter cloacae; identical to SEQ ID NO: 33426

SEQ ID NO: 34503 - protein, 498 aa, Bifidobacterium angulatum
MERLRPVYETGVLRLLMRANSQLYVALLRSSFDPLTGELPREVLEERFTRALSQLVESGDYAFKDDQTLPDAAHRILVELSREGDGDYAWLANSLDVASHRYLYRLTARAHRAIEALSHLEDTTQALSGAQANSIIMEIEHARMQLTADPHKRIELLNREIEERQKEIEQLEQDGAVEQLSSKQVEDIINVVHNTLRGVPIDLRELALAERDNGDALRRRMQAGAMSVENILSAYHDEYRRSFRESDSGRRFEDAFQVIVTEEGRREIDDAVRDIAKNPYLDGEPGVLLNQVRAELERIYEGIEDVRRQMRASDEAVSRLVRQQTDTRYRTMLGKLNALFAKISGEAKANPNSASRPYHTDTGAVQLAVLPTRPAKPMIHAAPPSLQERESVPTVDSPDLKAMIEVGGPRLRHMMDVIRRSPRMLADGRVDLAASFNALPERERRESEIVGFLSALHAQSDAQYVQWHCVSLDGTPRVWRTKPIAASMQTLDEIVGDE

SEQ ID NO: 34504 - protein, 1165 aa, Bifidobacterium angulatum
MTDNDMHIIADRWMLESRQVINWGSYEGYHEFKPSMSDKMPVTLLAGASESGKSTLVDAQISLLYPTGTPYNKASNSGRSERNDYTYLRGMLGSSDSENGETPIYLRGRSEDNAPQAVWGAIVDTYLNRTTGAVLSCGKFLYLASGDGRGEVRRQYIAWNRKIDPRKMDRFRDTPFTATMLKKTYPECDSFPNAEGFHAYIWHEMGLSPEACRLLHKIQSADAPSRLDDIFKQGVLGVPEALELARTTVDDYERYDENFRSMEEKAKRIAKLRDIQNQYGEYTEALQARREFDAVNPDDEQGNATLGAWAYSRMAGEVRSGLPIAQRKCKEYERKLEAASRESSDLEIELNEVRDQISGIDDGSLARLEGDLERARRDAEETRKQRTSVQARFQQAGETMPNDEESWNAKRDAIAQALDSYDIDKAQRENQRDAMYDEVRDCRKERESLQADLNRQRNQKTRITQAMDEARAMLADAVGLDPKHLPYVAELMDVREDSEAWRVAMNVTYAPIAQTILVDKRYEQGFAKKVSGIDPRLMIRRTWQFVDTEASYDTASTKGWLSSKLRFKAGSPFTGWLREQVASERFDAKCVQTIDDDNRDERQVQTDGQLKSGAHGFHGIKNTHMIIGFVNERYLTELQRKLEKAVEQLAEATIRHERAKRQVDLLRDQKELANFISDMDWSKVDVVGAEHAVEDIKTRIEEIRSNPELAKLTARRDGLLAQVNQANMAKAQAQVDVNSALHIVQAEQDWLDAYGKAEFDDSRLPSVLSNQLTDIYEATYGISSNVNRAEIITANVVGGSGVFADRVLHNMANEIRKRITSLNDQAGVMRANVETRMADYLGSYALDDNMVTASVEEYRFYVEELKSLDMLSTRKATDEEYVNSLDKLRMSFMQIARAVDTDKKRIDEQLDRINAMLKGQQFGPRHGSLSISAEVHNPEHEFVGLMKNTIADLNDWKQSDQGNPAATRKQFERCRALVERLRQELGQVRDANGIKSYGAKNLDPRCRCSFYALVKHEDGPDERITSTGGRSGGALQELTSFIYGAALIYLLGGDVTGQPTYTTLFLDEALIKADGRYTQRALGVLPKLGFQVIVSAPESKTAEILEVATKAYVAYKDASNGRSYLQEITSDEITRLESEIAADMDGETGEGRTDGDAESGDGSDR

SEQ ID NO: 34505 - protein, 151 aa, Bifidobacterium angulatum
MIVENKDTYQEMPQIEDCICVFGCGRAANRMVSLLPWLADTPHVVYWGDMDADGLEILSGIRESGIDCDSILMNMDAYRRYRRFGTEYTEQGRRIEPRKVGAVPGLRAEERELYEALCTGEGVGYLRVEQERIPIVDAVAELCAAGFPIIV

SEQ ID NO: 34506 - protein, 461 aa, Marinomonas sp. S3726
MLFKHLPDEIFQALSGSNKQLVEAVLFDLSDVFYDYAEDPIKDKSTIIEAIEDSLHKVDILSWQEDQKESFESPKTIHDYALRIYHRLVNTGWLVEEQELYRVSVLMTPQISMLLKSLVEISRHGKRNYGATVLSILSNLESVALSPLERGVTLNQAAAAARDFSAHLNQILLGIRSLQRELFASRDPKAIVSGFFELFVEGILIADYKTLKTSNNPFRFRRQILELVQNFLADSDSLYAISQCYSEQQLISIEKAQALVEKDCRAILQTFNNIEQRLERIDEYRYRLEKRAADTARYMDSSRPGMATKIANIITNVARHESVPVLKQMLGVKVLGMESAATPSRRREPPAPRVVTPASVSENAIKIRDAQRRFHEARQVTVAKLQSYLQRQMTELAEKHITEFSINSVEDFVCFDHLRYVGSLGVNAKIIENEFEIKFSEQYLDVHQFVECREFVVVRRR

SEQ ID NO: 34507 - protein, 212 aa, Marinomonas sp. S3726
MLRELKKVVEESGKDAQEFQQAANYLLSHQFVSAYKHGQRKYFLLVEAYQNYFSNVFDALGMKLYVNENERLLGLLPVEREAFVRLKTDETLFLLILRQIYEEKIENFEVDNGFVATNTHAILERYVQLVKREIPTETRFKDILTLLSRHGVLIKGKAYEEDSKNLAVHVTPVVRLVVTEAYLRQLESFNGSDHEQDEDQDESIQLDATSEE

SEQ ID NO: 34508 - protein, 1137 aa, Marinomonas sp. S3726
MKKLSRIVLVNWYLLGAEEIEIRGNTAIIGPTGSGKSSLLDAIQTVLTGASKRHLNYNASANDGKASGRSIRSYILGMIDSGQQDAKVFGTSPRQDAVSYLGLVFTDSNTGNESTIGLSLSASLSSPEEDVLGRFVLSNYGVVKGDFIEELEGRSFKAKPWLDVREAMKKVCLDPFIKSGSASATQYINRYLEELSPSPDQLITLDGFLKNFKNALKFVPIASPTRFVQDFVLAEQPLQVSAYQKSLNEYRQLETKTQEVAKRIDDLNLIAVDCEKKRQQEKANINYQWVATEARFDELGSKQDEIQDKYEVHQERDDEIQLELGTQNDLSKQLQSQLVRLEQQYEHSDVGLKLQQLEQSRKLLDLHGQQDKKSLLQCKQMLTLLASLYDYEDLLSNEILGLSARAGDLYKKINDQGQLEVESHQFDKVLAELSNLLDREKTELFRQRSELNRTILNLKDDCKQLESDVSSLKGGSSPLSGNTKKLISLLKQTGIEATPLSHLAEVTDHKWQDAIEGYLGQQREALIVNPEDAEEAIRVFRAHRKQLMGCRVIDTTQTRLWLNRGDRSSLLQYIRCNNDHAQAYLNRRLGGIKPVDTERQLLREDSAMTYDGMLKLSGTISTIRFTPHMMVGINTDGMRQSRESQLQKLSGELMDLLQTDQRLEKADTLLSRVVANHHVDADALKQHSNALNKQQHDISLIDDEIHLLQQKDDTELQEKIDLLKERIATVELEQKKLDRERQQIAEQYGSLNTQKAQLSAALSTLDEDRTRLKNHQFYQAEFASERYELLESSMVNGAAIYKEAMSRAEKAQEKARNFDQKVRKEVADHYAKYHNADIDSDIQLDYLESRFEEFENYIQHQVKVLSETELARYAKRAELARKEAEETFRSDYVSKLKDSLDQVAHIIRELNHSLKRRPFNSEVYQFRYYANGDMKDILDLVERFSSQDQANVGGLFDPASAENSDHAKAIESIHELISNEDKQQDLADYRKFYNFEVDILDQEGNKKTTLSQRIQTGSGGEHQIPFYLAIAAALSTTYRLHETVEGDIVGGFSLAMFDEAFNKIDMAKTSTCMGFMKDIGLQVIAAAPDDKRAVMAANMDTIISVWREGGAVSLDVSYPKSKGRKLLTGQVENLEIS

SEQ ID NO: 34509 - protein, 468 aa, Marinomonas sp. S3726
MGFDTINTDLFKPISGETGRLMLALLVELDKFLDPVQLVDEPNPQQVRVFLRDFISNTALNLGVESGEDVAAGSAPEQYVYNRLKDTGWIREERESGFRYVVWMPQDARRILHFLGSMGAEHPSLGVVCLSVRSSLAEVVKDPASGSLIRKAADDMESFLNRLRALVGNIREIHHVISCGTSHSDNDFTFYFEEYLGELFLPNIEKLALKGNPNLHASVIRKLVSEIRFSPERLEECVKAYKRDEISHPSIDLVEADLERLSSSFDGIAPLFKKTQEYARRITRRMYEKIKYTVHTPSNMGQQIQTLLNRIGSNSDLDRFPSPIIGEELLCDCRMSQPKARAITPVKTERRQQKPLWEKRAYNQLKQEHIHFQKCNPNRLERFIESNLTNRDYITTDDLKINTPDDMMSALHLRLLAQRVSKTHILYELQSRYRVDFVEGEWTDLEQMAGRRLIIRKNTSMEKYSYGQ

SEQ ID NO: 34510 - protein, 222 aa, Marinomonas sp. S3726
MASEITLKELKDIESKTSADYVDSLRNTTAYLLQKQWVWKGKRGQKEHFTMCEENQTYFHKIFDALDMAWYYDRNFGFAGILPRGSGKQLDITSTLFLLILRKMYDTEASMGRTEYGRVKPPTAELLDQFERFKGDKPLVTDTNAALDNLRRKGIIELGEKDPDTKLHEIIVLPNITRVVSPDYIGTLNRFIDSYLYTQESITDEAVIEEADSIENAEVSDD

SEQ ID NO: 34511 - protein, 1134 aa, Marinomonas sp. S3726
MISGENGAGKTTIFDAIQFVLMGGDQRKVRYNAASDAKTSGRSARSYALGEFKENDKQSCQRENANTYIFLNWYDDLQNPYSFGLSIYASSQTANIETRGHFMKGRHISEADLLAGDDTFLPWREFVDRMKHIAKDQRGAVSYEMIDSARVIREKISEAMSANQTRSAKIEPDLLVKTLSNALQLRMDSPIDLFIRNFILPPYPIETDQLREDLIEHQRIEEEIARTESHKTARENLITEANNVTKHRTNAHHRLWVSQEAEAVRLDEELDRKKDAYEAVQKRFKKAERIIEQEEPRLTGLQQQSEKTLIAWQNSDAASLSIAVRNAETEVSLSETDLNKKIKSLQASVSEVIGRQFSNTLGIQNFELLATHWNALANILDQANVDSLSTSNPANTHKVICQLKDSKKHLGEITKRVEVVDKDLDQEIKQLKLEGNSLQSRIERLKQGLSDINSATSATIELLKQKGIPSTPVCDLCEVNDKDWQEAVESYLGQNREALVISAHDFDDALEVYETARKQDPRIGRARMINPDHALRANKLPTDHMVSTLVETDNPIARGFMNIVLDNTKKAATHNDLRRERKALMASGLTTGGGTVGGTARISGLLIGKYAQVEQRQRLENDLDRLAQRLASINTPAATLSKLNRKWAGISASILDRSEDVQAQSEQLEIHKKALSVAQESLKPLTSEDERLKNAKEQAQNAYEKCNQAVIEAGSERKQAELDIAALGKEIEDLSKLRGEAEKERSKTESLPLHDAIKADEAWQAYERKFESQQDQYSLIRNEAHNESQTAKEKAIHARGILREKVIEFTNIFAEDIANRLELLEAAKTDNSNEDAYTLITTDSSDWVTRILAVQLIEHRQAAQDAAKQMEKNFRGIIVGELQNRFEQMKYTFNQLKSLLKKIPFHDYIYSFDYKEVQSESLKIIYEYITTADKEETELVGTMFETESEHPAIDLLKEALINGDDLINEIRDYRSFFTYDMKMRNPDTGIERRVADMQSTGSGGEQQTPAYIALAASFMNVYKIQGRSPRGASLVLLDEAFNNMDGGNASAAVSFLKEIGLQLMIAAPPEVTLKIGKEMDQIYTICREGRDVVIDHTQLFDAGQSLIDQLNPEYHPELVTERAAILKSQAEVVT

SEQ ID NO: 34512 - protein, 510 aa, Oleispira antarctica RB-8
MFFEQERGQFFRPLTSKYRAQVLECLKELYQRLYSSSSADYGQALQRDIVIEIFQEALVRAPILADGDDADDLIKVSVKDGQKDSAKDSRFRNSREQAGWVLNQLIEFGWMEKQVDEATLQSTFAFSRYGRQFVDPFISESRASARTRHRNTRNTRNSLEAFLERGEVYDLLDAFEYSERIISDFTDVISELEERKRDLVREMEDQMLVQRASEEFFDFMEKRFQPDLAVRLSADNVEKHRDRINELLDQVRNKNKAYKAKAEARLRDLLPELIQPGASVLWTILDGIEQRIRNASEVMLPALRKALQGFTKRADIIIRQMSYLASQQHNDVLSVCKRLAELDPKDQNKQLMAAGRLMSVPEVALVDPAQVRLAPPRKRRIIEADLDEGNEAFDMDARKDIYVQQVLDQAFFINNNALRSYMQKHLLAGKVISTKDLPIESAKDFLAVANAIGLASTSSLSSDFEFVMTYKNTERDDVESVANGPHYFSQKDHFTVELINSDPSKQAGAQ

SEQ ID NO: 34513 - protein, 302 aa, Oleispira antarctica RB-8
MLHFIEQKLEKQGLDRRELSELLIRLLDYGVICRDESQVEQQLYDRYLRLEEIIADYLELIGVRVQHDKRFQFIRLYPPGAQIPGVQDEPNAIQSPGLRMRLNQNEVALILVLRAQYDKALREGQVDEQGCVMVSLESLSIAIKNLLKRTLPDNMTERKQLFRRLKQLRLIQIANEDRLDDGDMWMRIRPMIMSYVSEQVLADLIENEQASVDMADEESAEAESSDEASTDDETTEIKSSDDESSHAENSEIEDSEIEDSEIENVDITEEAQAEDKEVAEKAVADNQTKAEPKSKTTSLFAE

SEQ ID NO: 34514 - protein, 1213 aa, Oleispira antarctica RB-8
MFLKKFVYVNWGNIPALEFDFGPINLLSGGNGSGKTTAADAIQTVMTAAHDTLFHYNPGQDEATQRGRGKNVRTLASYVLGCDDGSYARPNGAVGYLAAIFHPTEGESGEAFTAVLGISASMEKSGNQTTARQNDLQFYIVAGEQLTLSDFLQEDGEGKRQVIALDKINNHLKSRMDANNIEKYDTKKQYLRRLYGALRGRHDAVSEREAMNAARTFSRFMAYKPVKSINGFVANEILEKKDLGDAIRSVSDLMKTIYSMESDAKRLQETINVLSSTKQTAKTYIDQWIDYNVLEYTAAKSRFLNDQQIYLKAKEKQQHLRDDLSTAEQDREQSQDRRSQLREQLIAMEAQRLGIDALQDKDQCEQKVESGKQQLQQQAMLLLEQDKASQFSLQATESLYKSLQKSTISVDLPSLGQRKLIDMAKNVAAIATDGAVDFPTLLGKDWVDLSPLEAHLETAQQNQQLMNQWRERWFSGELESSGIPLRDQLAKLVDRREQKVQQVQRQIAQKQNDIDSLEARELNYPHFVRIALETIRRECPQAEPCVLADYVEITDSDWQNAIEGYIGGARFSIIVESEYEAEAARIVRSIQGGSRARVVQGSKAKKDCDRMKLSDNSIINIMSFEHATARHYLQASYGSVEQVRDVTALRQTRRGVTKEGLGSGAYSIYRCDLNDAELVFGQGARERALAAKQSELGSLIDHANDAQINAKQAQDILFAVNSLRHVVFASSIKDMLETHYQIQQAEAALAKVDLSDFSALEEEFSVLKKKGDELDQQIQLLDGSTGRIEQQLKDSERLCKKLSDQQEETSYVADGKEDNLRKIVSVWPEFDAEARLKEADEEAANSPADSIENHRKSVYSEMNAKVHEIERNIADHNQTCQTIDAIVYDPNYREEHGVPFFKDVCGLQREVDRVHNRLRNNILVEKQDKLTGLKDSFNNAFVTNLCHSIYQSINDGKRVLEELNKELAHHKFGADKECYWFDWEWVPEYKEYFQFFDEVIKSPSLGDGATLFDAGLTKNSQRVRDQLMAMLLDEDEVKAMRELERISDYRNYRAYEIYKQPLNKDPIALSQYGTGSGGQLETPAYIIRSAAITSAFRFNEGDTHLRTVLVDEAFSKMDETRSKEVINYLTEALGLQLSFIMPTSKAGPFMDLISNQFVFSKVPLANGVKKGELQTKVLVDRQECNQDRIKELWANHRQSIRHQAGLDFMEEFS

SEQ ID NO: 34515 - protein, 462 aa, Acholeplasma palmae J233
MAHLFDTIPDTFFSVLSSPNKHIYVDCLFIIFDSIDTMEDAFQGDREFIIHKLQDYFEDKKEAFIVEGEQEIQTTSRQKSVSVINVFKKTGWLGEEELGDYRVSLNLFDYSIRIIEVLKSIKNNEQIEYTGEIYSVYSILKSFTIDEGHAILEQAYLKTNDILRRLKTLKANIYRFYHDITKNQEKNNLQRLLEKLLVDYKQNFFDSAYYNLKTKDSLPRYKRSILESLSKIYENDEHMEKLTESMMIISKQEDYNLAYLKVEARIRTIRDSFEGLDQLINEIDRKNEQYINAAASKILFLTNHSDDLEGILNRLFKIIIEDNNKIDYTQFFNLVSIRNLDDASMFNPRRQRVEAVAEEIFYDEDYITEELKREKIQNLTKHNIYSKVEINKYVLSLLQTDDSLEAIEAPLQTQQDFIRLILVFLYSKSIGVSYDIKLLTNNVTVNDITFQNFVIFKKGVSL

SEQ ID NO: 34516 - protein, 212 aa, Acholeplasma palmae J233
MIGKTQAAKRFNEQYLELKEAEKSTFSRVVNKMFQVNYITRKKIGDANDYRFILAYKDIFEAFFAISDFELTIERHDEVVFIKNESIYNHLRLKKEESLMLLVIRVLFQRKRDLVTLDENVEIYLEEIHEELRRIGYLDDKRITKDKLKPALMLLRNYNIIDYIERGLKDDSRIKIYPTILYVTNIHNIKEAIERIDQYMEGSESIEETYED

SEQ ID NO: 34517 - protein, 1090 aa, Acholeplasma palmae J233
MKKLTKIKLVNWHLFTNQTIEIKDNTLISGENGSGKSTLLDALQYLLVGGKSGVKFNIAATDEARRSLEGYIRGRIGAENKEYLRNNDVVTHVALEFYDEQSNESGIIGCVLELPKGGQLKERFYLLENTAIHENIFIENRFPRDYKSMKAYFKDLEIDFKPFDSQKHYRDAVARYFGLDAKKYARILPKALAFRPIDLQAFVFEFLLDDDPIDIQSLKNNVEQLKKVENQIRIDREKLDKLSKIIDLGSQLNLNLDQIEINQLIEKLSFIEKRETFLENSKDTLDQLNQKYEILKSEKEQLDELIETNDKEIVSLETARNNNDVSRSLANYKDALVKKGELYEQQKEIVMNLRNTVSNEVQLMKKFSETQSNPSIQAFVKYYLANEENLNVMQLQEHLSSVSKEVAGYINAYHLEQAKLEEERNEISDQISIVSLRLNQLKRNIKTYPRHVTELIEIINEELTNQYQKEVRVRPFCELIEVNEPLWRNALEGYLGGQRFDLIVDPAYFNDALEIYDRVKFERKIYGVGLVNTQKLQDYKTADDNSLASKLTTNHPYARLYANMLLSGVRCVENVQDLKKYHRAITPSCMTYGNYTARQINPRVYEVPYIGQEATDLQVRLDSEELEMLEKQIHSLYDLLEKTQMTLRILNNSKALQIVNQNQLRYFDIVKQTRKEYTLIEEQIAKLSYDADIAKLEEELESLKQTKRQYRLDFERLIGLMSDSRKERTDILEQIDISKAELENLYSEQRKLNEENTTKLNAAHAQFNAYKQKYDQNFDHIIRALNQSTISIQNQNARQEGDVVNLMRQYITNYHFGAAPDISELIEFEKEASLIRDNNLVHYEQEAIELRRNSEIGFKEEFVNKLRASIENAQQQISELNMALTGKTFGADSYKLTTRASDNPEYKQYYGIIMDNDAIETNSLFTESLTKRNEIILMELFEKIASTDPEFDKLSYNFLDYRNYMSYDIEVTNANGNISYFSKVSKEKSGGETQVPFYIVIAASFQQLLTRNKRMDSGCIVLFDEAFNNMDESRIDAMMKFYNSLSIQLFIAVPPQRVSNIVSYVNTSLAIVKDNDYAVIETFKDERVNR

SEQ ID NO: 34518 - protein, 498 aa, Xenorhabdus doucetiae
MEERIKQRTESYISARNQHPAWLLLATRRAPLVLSCLKTLFEESNDGIPLEEAIVQLTNILMDHANQEQYEINQDNFPLQASRELREWIKRRLIVERDGRLFATDALEISIAFVETLDNRFMTSTASRLSTVQREIENLETHLNPNPANRVSVLRRRIADLERELQEAEAGHIEVLEPHQAIEHIREVFNLATSLRADFRRVEDSWREADRVLRQSIIGEQYHRGEIVDRLLNDQEALLNTPEGRVFDSFQQQLRQSAELTAMSERLRVILSHPAASDALSRLQRHDLRWLVKRLVDESQTVLQARARSERDVRGFMKTGLAAEHHRVGHLLNEFFNLALNLDWQRQAVRKKEVPLPAVGVAVGGLPIIERLRFKEVDDEAEQTLDLSHHAADLAQIGDDFWDAFNGLDREALLRQTLQVLAKENRPVSLAELAILLPPVHDLETFAFWIGMAKEAGIDVRDDQREYVELRDDEDHLWRFDLPTTGLESKALKDIDWE

SEQ ID NO: 34519 - protein, 253 aa, Xenorhabdus doucetiae
MAGIFDRLIKQRNAAGSDSDSTLQSDDLTEHDLTDNREENITGSETRTQKKIREAAQELLKFGLLEEANKPNLYRAVLTHPEEVTRILEPLDLDIGIDEIRGVLYVKVRLDDVQEQDEWSHPLVRRQRLNLEQSLLVAILRQHFIAWEQESGTGANQAQIAIDDLLPQLQLYLGDPGSESKERTRLINLLDQLKGHGLVTSPDAHERITIRPVIAHLADPVNLQALLVWLREQVAHRIPPDDTSKNDNSEEEA

SEQ ID NO: 34520 - protein, 1100 aa, Xenorhabdus doucetiae
MNQEIHLMGDDSFILTRIELFNWGGFQGLHQATINQAGTAVIGPTGSGKTTLVDALMTLLCANPRYNLASTDGHESDRDLISYVRGVSGPGDGGEGQSHIARPGKTVTGIAATLERKGQTVRLGALLWFDTTSSSVTDMKRLWLFSDNPEQTLEYWLNVYHDGGMRLLRKMEKETTGIWAWPNKKQYLARLRDYFDVGENAFTLLNRAAGLKQLNSIDEIFRELVLDDHSAFDRAAEVANSFDDLTEIHQELETARKQQRSLQPIALSWEKHQDQQRQLADKRVLESLLPVWFAEQASHLWQQEVSRLETELDETKASTAHLRAQLESQKKVATDCLQRYLQVGGASIDELNNRIDDWQNTLNQRETLAHQYQQLTHNLELPSALTQSQLEANQHEAGARREQLSHEIKLKQDEVYQKGALKHNVAEQLRQLEAESAEIAQRPDSNLPAHYQAFRSELAKALDIDEAELPFVAELVQVKPEEASWRGAIERAIGSHRLRILVSPESAPAALNWVNQRHNRLHVRLMEVKLPSASVSFFDDGFTRKLLWKDHPWREAVKGLLAGIDRHCVDRPEQLRAIPHAMTSQGLMSGKQRFYDKQDQKRLDEDWLTGFDNRDRMTFLAKEIVRLQEQMTVATQELEPVKGEVNQLQLRDALFQRIQQLDFNNIDVPGAMKKLAELRERLENLIHPDSDVSVANMLLNEARQIEESIEKQLQEANKELGGLEKSLDRALGAERQAQRVAQQGMTDEERQLSGLHFPTVAMEQLSDIYDLERQHAGKLQREIEGLKGKLHDLNLELTRRMSIAKNADTGALAEVGTDLDDIPAYLQRLQELTEEALPEKLQRFLDYLNRSSDDGVTQLLSHIDQAVLMIEERLSELNATMFRVDFQPDRYLRLVTKKVIHESLRTLEKTRRQLNAARLIDDNGESHYKALQSLVALLRDACERNRTLGAKALLDPRFRLEFAVSVMDRHTGNVIESRTGSQGGSGGEKEIIASYVLTASLSYALCPKGSSHPLFGTIILDEAFSRSSHAVAGRIIAALKEFGLHAVFITPNKEMRLLRHHTRSAIVVHRRGQNSNMVSLSWEELENHYQRRAQEQHELS

SEQ ID NO: 34521 - protein, 393 aa, Xenorhabdus doucetiae
MKITTNGERKSSMNSPDDIAKKLARQWDSAKRRAERLLPPGNWPLRLPIGKPTPREFTEHARQVLEHVKAWRSVQTGRVEWELVNYRASSEPVPMPVCWVLAGPSEWIDAAADRGVSREFRLLEEIIEQVDAVFHPLLIKSRSLWQHRNPQEVITAAGLANRLTPGCANGLPLRLLSGLGVDTKFIENNTSLLTRLLDERFAGEVSKQGLTTFLDALDENNHWVLVIPLSPGLLPFKKSKVTTVELADVKLPASHLLVVENEQCQHQLPALPDTIAILGAGLDLQWLSNPDLEGKSVAYWGDMDTWGLLMLARARKHHPTLSALLMHRELFDEHASDKAVPELVKAQDTIPDGLLNEEADFYHYLADRQRGRLEQEFLPTDVVTSVLTRWGMD

SEQ ID NO: 34522 - protein, 158 aa, Pseudomonas fluorescens
MDTWPQVFAPDALMSAARLAQPRKEVQRLAPSPLRKAVLSEHARAVGNLVRRAQERRRITPAKLRAYAKSALGEHEKVNSQDLSVDSIENLRAYQSFNSLATALKSKIATSGMQARKQIPGLDVVCDEDGSSDHPFLIAQSFEIRLRMPKSDHKRDEP

SEQ ID NO: 34523 - protein, 1148 aa, Pseudomonas fluorescens
MKRLESIKLVQFLLYESEEFLVEETTGIFGPNGSGKSSALDAVQIAMFGANKNHMAFNAQADSSGAKMSRSLRSYCLGQYGDEIVECARPNSTTYITLTWRNTEMNEPTTTGICIEASLESEEARVVGRYVVNGIELAMADHLQSIEGDFSPLPWKSFRSRLMERAKILGEDPFYDDPSSFTKQILFALRGKNGQPSYDAFIRAFRFALRMKFDKSVDYIVRNDVLESKPTNIKKFKAIVDTFKHLNLLIENVEKKIAQGRKVAGQYLAAQTKLRRAVSWRGLAATAQDEEAQLACESAEDVLEKAKQITSELKSASQRLSESLTASESELHHLSTRQQLHAAHKENAEAQLGQENARRQLARGGEALDEDLLRISTALETAAQSPYLEDLRDPTLSLAARFRLLVATPGLTSVETLRAPLEDMASIGQGVKASLGAVHQDLSDQASDLGDRVRGLEGSLARVQEGRAPLSDYAQILLEELRDEGLNPIPVCDQVKITDPRWQPAIEAYLAKNTEALLLPEDQEEQAFAIYRGLKGRRTAFGVKIVRSNQVKPAAMNLKGLVAELIEGSNPIAVGYLRGQLGNLKRAEETGDALKGERTLTTDGMYVSPRDFERLKLDNEKLRIGAGTRSQIDRLKAELSSATLNLRQIRDQLAAIKGTLDLTSGFGSEFASRLILSRATAYEQAVRQSELADQRVANIADAEYLDICERIGTLQLALKQLKADERSAYTAATKSESQIESLETAYASSKLRHEQCILLKQQCREHIDYDADFVSAEWSRLIERFESPQAMVAHCNRESQAAEQNGTKLASGAQIQLWAYLQEHRESLPQQDLEDWRIAKGWIESYVQKLEVTELPEYKVQAEDAYRASQETFRRDVAIALNTNLEFLRQTFARLNDALSSTPPFTNGERYQFMYKVRPQLKPLLDFIKKVADYGVDGGLFGEAGSIPPQFEELLKDKAAAGNSGEKSPLDDYREFYEFDIRIQQVAPDGTEKTIGHLSKRIGSGSGGEHRAPLYVIAGAGLWSAYRMDHGTNDGLRLIMLDEAFDKMDTSNIVATMKYLQELGLQVLLASPGENLGILNAFLDSYFEIQKDAVRHVVQVDRVKVTQAMRDQFREDLWEFHPELIEEEMLSMRAQSNGPSLSSDGAAL

SEQ ID NO: 34524 - protein, 388 aa, Pseudomonas fluorescens
MTNQIAQDLLLKLLKMGNKSEAGVRQHAPALTAAKLKAYGSLRNWHHKHQCEEVFLAARDAGAISFIRDKLNPEDGLIERIELIDTAVLARFLKQTTHSETMADARELLAPHLSGYDVLEEVIEKWARMSNVRGSGPADASSWIEAITVICQCLQVQDVTLSPVRETSARLLRNSKRIEQLTAQLDVLLQGSIEAAARAPAEVWQELGLFKEEQPVLMAGNVTIVRSRVTAVLDEPYTGLPASAVQSISGPVEVVLTIENLTTFHSEAKRHSNRPTLLIYTAGMPSPAWRAMYQRLLSGVAPGTPVFHWGDVDEGGFRIASVLAKASAAAGHSLRPHAMAPDNVPAEMRKSASKRTLTRMKHFAESAGWPSLGEELFEAGFIVEQEAL

SEQ ID NO: 34525 - protein, 487 aa, Methylomicrobium alcaliphilum 20Z
MSFLELNARFRRLHKEHAAWRLLRSDNAPLILAFVADLFEEADEIAFGRAKMALDTELEHWREQGVIEVEVNAATYLRQWIQAGWLRELDDQLSKTDACEVALRFCRQLDQRETNATASHLRIVQDAVRDLSVAISPDPAERIQLLESRKAEIQRELDELEAGIVHELSDTEQRERIIEIYQLAAVLTGDFRRVEDEIRQIDQTLRVQMIESGGSRGDVILNLLEQEQLLAASDAGRAFDGFFQLLCDQNRSTELREQLKAILSRPAANNLSEQQARFLGKLMRELSRESGRVFQVRRRTEENLRQFVESGAAGEMRAVDRLLGKLERLAVCFKEADISMRHETSLRLDSGHVKIQSPDAWCLKMPEEQLDTRDVQEHINNATPSETMLRQLHAVQVLAVAEKLRKTLRASRIPLSIAGLVARQPIQAGLEELIAFLRVARAVGATELQGRETVEIKDRNGQRLKAEIPHYLLSAEQFPEQLEELIL

SEQ ID NO: 34526 - protein, 258 aa, Methylomicrobium alcaliphilum 20Z
MSFFDKPLAGNSAEQPDLFDLLRGRIEPSEVSNAQQTDESLALDEQSEAGGETEADSGRLPSEARRALVGLLRHGVIMADNKRLQFEALCRYRAPIEAHLADMYLRLLLDEQAGLAILLQQEAEELDEDDEISSLIVRRTLTLYDTLLLLVLRKHYQERQNAGEQRVIIDIDRVDVALRPFLPLTNSSRSDRRQLSGALKIMKDRKILAAVRGDEERFEITPVIRYVVNAAFLEQMLEEYLKLATGASLSEEQEASDV

SEQ ID NO: 34527 - protein, 1119 aa, Methylomicrobium alcaliphilum 20Z
MSDGKSAQVRDLFACGAIRLRELSVYNWGSFHGLHTARIDPGGTLITGDNGAGKSTLVDGLMALLLPAGKATFNVAAAQGDRSDRSLMSYIRGSFGSAHDGGRTRILSKREGAVVTGLRAFYQADDGSQITLAALFWMSHAGNALGDLKRVYLVARRNVTLKELLDAFGDGDPRALKQFLRQDPMITACDDRFSEYQERYRRLLHMDNPNAPALLARALGLKKIDDLTSLIRDLVLEPSNVRDDARKAVDEFADLVGIHKQLLDARQQRDALADLPGVTEDLQRAEQDLQKLDAELDGLSAWFGEQCAGLWRLRIETIASALQQAKDHLERLEIQVNEAAERSEQCHADYLQAGGERIEFIKKDLQAAEAKLAEVNLKAARYQRVAGELQLDGRLEEAVFQDNQRQAQQAREAIANEKTQVQNYFAAEAAKLSNAQEQQRHLQDEIGEIEARPDSNIDAKFQILRDEMAEALGLDRGKLMFIGELLDVREDERAWQGAIERALGGLRTTLAVPESDFSLVTRWLNQRHTGLHVRVQVVRELDQAPEFKVDGYLRKLAWRDHPYRDWLKRHLARFDLHCVESTERLDRTPFSMTRQGLMHMDRGRFEKKDQQRIDDRRAWQLGFSNKNRLALLRQDVERLKQEILAFDEAVGKAREAMNAVERRDRQWNELSQFRWADIDVPYWQNRIVEHKNDIEQLERAGGDLAAAKARWEASKSALQDLQKRKESQIGRVSAIGKDHENAEKNRQQALKLAETGVADDLRAALLKKIGALKDAQLEDSAKIEERYRRDMEQQRGVVRARKDRASRSAVGIMTGFRAKWEIIAADWGGDLASLQDYLAHLAQLEQEGLPALVEKFRERLNRHATQSLAGIRTRIESEREDIDERIQTINRVLERTEFRAGSYLQLGMKNEQYEHVQHFNRLLSKVMEQLTSDDHEARFAGLQQVIAILDKASNPATANTQESLRLLDPRHQLSFYAEEIGAEDGKIRDVLMSSSGKSGGEKESFAGTIVAASLAYVLTPDGSDRPVYSTVFLDEAFSNTAEAVSRRVLRIFKELHIHVNLITPYKNLNLARESARSLLIAERDGAAHESSLCEVTWQEIDERLRQQAEAFDVVLTPEA

SEQ ID NO: 34528 - protein, 393 aa, Methylomicrobium alcaliphilum 20Z
MNRWGLLPDNVLEQLRTREWLNTENLRGRLSGDRPFPIRIALKAPTGAQALADLEHFLRFIESWKRWPNQSQVDWQIKKFQQLGEQTLPVAVQIESMSALIAVLGSKAEVRKQRWEQLMRPLLNLDARLSSVLIRQLSVLESMAPDDSALLAQLLPQLRRGMGQGAYLRALPLKGVDTKFVENYQGLIEALADRLHEGEVTEQGGLSNWLACIANPSGWLLVRPLCRQSRERLAGLPIMQMDTRTLQNHVLPAGRILVVENKQSGYALPKLDDTIAVFGGGRNTAWMDAEWLKQKSIAYWGDIDSWGLTILSDARRRQPHLQALMMDEDTLLEHRKRMVEEECPQGKLPEYLTEAERQLFERLQSRYYEKTRLEQERLAPDYIRTCLLGWHSL

SEQ ID NO: 34529 - protein, 489 aa, Xanthomonas fuscans subsp. fuscans; identical to SEQ ID NO: 33959

SEQ ID NO: 34530 - protein, 233 aa, Xanthomonas fuscans subsp. fuscans; identical to SEQ ID NO: 33812

SEQ ID NO: 34531 - protein, 1340 aa, Xanthomonas fuscans subsp. fuscans; identical to SEQ ID NO: 33813

SEQ ID NO: 34532 - protein, 486 aa, Mycobacterium chelonae
MTDLTIEELFAHNDDVQKSRAVRLLAAKNLAPYITLMERHLDRSAKVSEPQLVAKLDRDLQAVGLGEQSGLALIKSWASDGWLHRASDGAGPDAENVCSLTEDARSALAFVRRLRRADSVATGGSIAGIAAGLKRVATQLDGDPSRLRADIEAQIAELQTYLHAIDDGYRPEPDIVDLEDETRAIAYQMEQVITDIVRYGSMQNEITAGLIDAAEDSDSGFRDRARRMFADYDALFDSRERASYAAFTRTIQDPDQRAALRSDIACVAEGLPELDPGLRDVMKNFFKLVSQQIAEVSRIEQRCAQRIRRFFAAGTTEQARGRARQLNDALAAGHALLKVSTADSPIDAELPIGRSAAASIGALSFTIKDTAPPVLAQEAPSGPLDLSGFSALATQVDMAALAETVNSAIAKGPVSLPDMISHVDAPYLGDVIVLWSLALKQDNTLDRESVKVKFRSLDGQDRVMEVPQLMFREPVLATLDEEGAAL

SEQ ID NO: 34533 - protein, 241 aa, Mycobacterium chelonae
MTTTPLGNINFDDLPGVEPDASAPRTVKGPRFDGDTSDLTDKACWALQNLVARRYLSKDGQPELWASMMEHRKVLASRLSELDLRLRVFDDLEVAYAEPAPLENPSAYGARVLRREPLGTYASIVALHLAKIARTAHDEQVLVSRDDIHELFANVSHDIDRDEAMLRDRVDEAIKRLSKAEILQRTRDDEHSYTISPVINALMSAQMIEALQRQYEQLQRGGAAPEDSTDDEEDGDTDDDE

SEQ ID NO: 34534 - protein, 1103 aa, Mycobacterium chelonae
MSRLQVINWGVFDGYHTIEFSRRGTLITGSSGSGKSSLLDAISLAFLSSNRRNFNASSDTTAAGSSMGKRTVDKYVRGLWGELKNPGERPTQMFLRGKGAAWSAIAVTYSGTDGRVITGLVLKWLAPGSDSDSSSRYYLIDADADIRDLCNAWASKGYSAAVFDGAGWRGHKSERWYLEQLYAAVGIQGSSAAQQLLGKAKSLKSVGGLEQFVREYMLDEPESMAAISEALGQITPLVDARAALAVAQRQRQTLGDIEQIQQTYASDAAQLATVDVVDHHTVRDYVDQQRLALAGPEIDLLDTEITRLGGECDEIQSRQDILTGERDKLLGRIAAADSNLAPLKSELAHARARAEEVSRRRTAYDSALWDLGHDEDVESAEEFEAMRVESLRAVTRINAELEAGHDAYVMAAGALSTARDQLRAASSELKRVEHVGTSVPPDEDRMRGEIAAALGLTAKELPYVCELMDLRPGQERWRRSVEKVLRSTGLCLLVPDQHHRQVLRYVNENPMRGYLQMERVIPSGAPRRAEPGTLADCLRLTNPNHECASAAMNLVAGVGDYVLVDTPDEFSKHRRAVTDQGLRKDGDRRAVKDDRRELRASQYIYQGNAGDKRAALSDDVVEAQQAVGDAEKFIGEMDTKREELRSEVVRWSKLHSQYEYWSQIDTDSAEAAVARLQDQYDAMLEANPDLTGLQQQADSYLDEIKKLSERIGALRRQESEHDSRRTRLLDLLDNLNPREVGGHTRSGIEAYVPQLSSSLDVLEPDTYRLELWRQIEKDQSVLRESVTRSRNELNRILNAYDRDFPDSIPNDSENFDEKIHDYVALCRRIDERDLPAAYEQMLRLITEQAPTAVLRLHQLAEEEAHRITDQIDRVNSGLGSVEFNRGTRLTLRAEPKALEAVGELNERARRISGRAVAVSMGDEKAIHDQYQDILQLRNLLAAETPEARQWTRDALDVRNRFVLYCEERDAATGEAIRTYSNAGANSGGEQEKLMAFCLAGALSFNLANPESGDNRPVFAQLMLDEAFSKSDPQFAQQALSAFRKFGFQLVIVATVQNTTTIQPYIDSVVMVSKPDGPGVRPVASTRTVPIGELGDVRKAVNAR

SEQ ID NO: 34535 - protein, 489 aa, Xanthomonas campestris; identical to SEQ ID NO: 33214

SEQ ID NO: 34536 - protein, 233 aa, Xanthomonas campestris; identical to SEQ ID NO: 33498

SEQ ID NO: 34537 - protein, 1355 aa, Xanthomonas campestris
MNSQSNLSPAQPGASLFTDSLAEQRAQQFRMRRLQVHNWGTFNGLTEVPIAEKGFLFVGRSGSGKSTLLDAMSALLTPPSIVDFNAAAREAERSGRDRSLVSYVRGAWADQQDSASGEIATQYLRKGATWSALVLEYRNAHGETVSLIRLFWIAGSGNAAADVRRHYMVAPRSFDVASELDGFDLDLRRLKARLGEEVAHFDGFAGYAERFRHALGIGNEMALRLLHKTQSAKNLGDLNVFLRGFMLDEPRTFEAADRLVEDFAELDGAHHAVVTARRQVETLSPAREHHAALMALRHSVGELRELQLGVDSYREQQRLALLETRLHELHSQDRGLAGEEGQRRESLDNHEQKLAGLEREQRAAGGEQIEELERERARVERERDERLRRRVQIEQACRQLGTALAAGASGFAEQIAYAQTVLENGKHDASALDEAIAERMGVRRDDERRFAEIRAELDALKRAPSSMPAPMQALRARLCEDTGIAEAALPFVGELVQVREDQSAWRGAIERVLSGFAQSLLVDDRHYAQVSEWVNRTQLGTRLVYFRVRRNDALHARTPDARALPGKLQLREHAFTEWLRNELMRRFDYECVDNAAALRNADRAITREGQVKHPGDRYEKDDRHAVNDRKRWLLGHDNRDKLKVFEREAQTLAQRIASCDADVAALRKQREQDQERQLAAHTLVERDWDEIDVGPKLQRLSDIDEQLQQLREGNSGLRALGQAIETARTLRDQAKRTYEDVRLERAQLARERVRLEQQHAACASRAGTAALTPTQLQGLRERLAALAPLSLDNLEAHFRVVERGLAEQLAESQGRDSRLSAQLLDCFRKYCQQWPEDSGDFTVSLASADDFLARLDRLESDGLPRHEHRFFDLLQTQSKNNLLALQRHTAEAHKGIKQRMDEVNASLEQVPFNRGTLLTIEVSDRRLGEVQEFQQQLRAVLSHQQTEDRALAEAQFSTLRALVARLGAQEPDARRWREQVLDVRQHVEFIGVELDAQTRAQVEIYRSGAGKSGGQRQKLATTCLAAALRYQLGGEDGELPRYCAVVLDEAFDKADNEFTALAMNIFENFGFQMVVATPLKSVMTLEPFIGGACFVEISGRHNSGVLLIEYDEQAQRLQLPERSRGDEAAAAVTEQAVSAAQREDAPRSTQGETRMDSTGAVSGAEGAALQDVPAQDDVAAGASKRASKVAPASTPAVQAAPKPSKTAAASARAGSGKSAAAKAAAGKAASAKPAPAKPASARRASPAAGTARKSATPTKSAKPPANTGTASRRATASVKPTPQPNKAATTAAAPKKPAAKSALATRRATTSLGGATKATRATAARSAAKPVPTKTAAKARAASTRGSTGKPRGKR

SEQ ID NO: 34538 - protein, 456 aa, Methylobacterium sp. ME121; identical to SEQ ID NO: 30615

SEQ ID NO: 34539 - protein, 208 aa, Methylobacterium sp. ME121; identical to SEQ ID NO: 30616

SEQ ID NO: 34540 - protein, 1145 aa, Methylobacterium sp. ME121
MYVLTDIAISNWYLIRREQIRLRGAAALVGPTGAGKSTIFDAVGTVLAGNNASRLALNASASGRSARTVRDYCLGWISDPAEGGRPTRESCETVLVLVFENPDSGRVVSVGLALAARAVEPKETVLSRFIAVGHRFEVADYARTAPGGTYTAPWSEIAADLRARASSFTEYRTSGERFTADVLATLREGAPAPEPRHFLRSFANAVAFKPIFDTSAFVRAFVLDPEPLDVERVRHSIANWRRLLETIAELESRLGRLRRLRDRYEAWGEAVLAAATHELRAASAELRRRSLDLIAVRSRLREGADTLRIARERVTASRGYVREIDGEIAEKKALAAASAAEGRLAASTLGLSMLERDRKELIGRIGDLVGLVGQMAKLQPVAPLLRQSCPQAARLAEACARAGLRRESSPEEILRPEGPLAELADGLARLPDFDEALERAAEDAALKARAQESEAERTAPRTGGGPAARLSSDTVAFRGELERRGIDALPICELAEIVDPTWGPALEGLLGRAREALVVAPDRLSEALGVLQSGRDRFSRCILVKTTDTAKQRSRRYDDGPLTVIETSDPHAEAFLGVRLGGYDLARDDAELARLSRAVAPSGRTTAGMAYTVTRNVDLLMTRGHRGPTADSRRAHEIAVAEARRLRGEAAVLREAARTAAAIRARVARGLDDVEALRAELDGLEGRRRTLQTEREGIEKRDTAGLTAEIAALTTERVGYLRELSEELEPKLDRLLADEAALRARMGPVREAVRAALSARRAALRQLSGGDAARVRLARAEPFDLGAVAEARRSLAGLDAKAAGARVSAERGLARDSAEAARSHGRIAERELAEACAAWRVENPLASGDAPAIDGFAWVRREYEAVEGHELRRYRAQAERAEAEMRRLMTEDLLTRLADRFERVHARLAALNERLSARSFTGQTYAFEAAVDRRYAAVHALATETARSPEAAQALLAGEAEGPMAAALEEITALIAGEEDAARLADYRNYFVYEIGMRDRAGNRTTMSARALRGSGGEAQAPFYVAIAASLASAYYPGDRPGDENPGLGLCLLDEAFSKLDVRNSQALVDLYRAWGLQLLIAAPEDKRTTLTEVMDTIVTVYKSPDLTSVRIEAEHPLEAARRALHAINPDQIGIEGFRRSDAAE

SEQ ID NO: 34541 - protein, 473 aa, Mycobacterium obuense
MDDQLSAADLLERNRELQASPTVRLLSATNLSLYAALMDRHLSGGVVAETELVVRLERDLADLGDDQPGLALVKSWASQGWLHRIVDDRTDQNVCYLTQDARRALDFLRGMRRQDTIATGGSITGIAGRLKQVAIKVGNDPARIRKSIEAEIDALRRELDELEAGERPEPDVTDAYDEARAIALQMERLITDIGQYGTMIEQATAALDEPIDSNLAYRDRQRQMYADYQAAWDSQGRDSHRAFLRLINDPDQRAEFEADVAAVAGALPHLDPALRRVMAGFFELVGQQIDEVERIQQRCAQRVKRFTAFGTLEQSRGIARQLNEAIGAARTLLKTSLTDSRLDLELPLARHAISSVGALSFKIGDLSNPKPAKPAEGDVDLASFAALTTQVDAAAMAEMINDALPMSLPDAVAKLDNAYLGHVIVLWSWALKQPQETAGESTTVRFRSLDGRDREIAVPNATFTEPITVGAAP

SEQ ID NO: 34542 - protein, 226 aa, Mycobacterium obuense
MSTDADIDFSSLPQVDQTARPPHQRRPRFDGDVSELPDRACWALQHLLTRRYISAESDADIYAWVLEYRHQLSVRLSELDLLLRIVDGTDVAFVEQARYESAKGIKLLRREPLGTYDSILALHLAQMMRAAGGQSVLISREEMHGLFSGVLNDVDRDAVTFTGRIDAAIARLTGLEILRRSRDDEDSYTISPVITAVMTASVITELQQQFELLATGGTPDVEVTLD

SEQ ID NO: 34543 - protein, 1119 aa, Mycobacterium obuense
MTEQFHLSRLQVINWGVFDGYHSIPFSEGGALIAGASGSGKSSLLDAISLGFLPFNRRNFNASGDNTAAGSSAGRRTVDKYVRGAWGQRSDGGTSRVMYLRGDGTAWSAVAVTYASDSGRTVTGLVLKWLTGESRNDSSSRFVLGDGDLGIEDVCNRWAAGRFDTGVFKENGWRFTTKVESQYLAQLYATIGIRASDAAQQLLGKAKSLKSVGGLEQFVREFMLDEPDSLARLPEALKQIDPLVEARELLAVAQRKRKILGDIEKIQQRYASESTDLGIIDLVDLPMVRAYTDHVRLAQCPAQIAQLDTTIDQLENEYEDVTRSLNLAKAEADSLNAQISGTSANIGPLQSQVTAAETEAEQIERRRAAYEDMLAAQDLEVPDTADEFWNLREELLQQATELLAKVERNREASTDAEYAQKAARMTRDDAAKELKRVEHVGSALPEFALLMRDQICAAVGVDAAELPYVAELMDLRADQTRWRTAVEKVLRGVGLRLMVPDQHWTAVLQFVNETNMRGRLALHHVRAKMLGADPVEPESNTLAGKLFPVDPAHPCAAEAVDIVTAAGDHVCVDTPDVFARFRRAVTDTGLYKDSDRLAIKDDRRPLKQSEYLYQGDVTAKINALTVDLAAAEDAYQKARRTADDIAAQRQQWRDRAAACKAICEQFPQWSHIDTETADGHAERLREQYELLLADNPDIEALNARADECWSQIQKLMTRRGAIQTRRDDLDARRTRLLELEERLSPAFVSEPLTELLTRYSAQLPVSLELLDPEPFRDALFGAINKEREQLRESRRRSYDELARILNTFDTAFPDAIPNDSDNFDERVHDYVALCRHIDERELPEAYERMMRLVTEQAPDAILTLHRVAEQEARRIAEQIKRVNTGLGAVEFNRGTRLTLRATPRSLTAVSELTEIVRAISRRIAEVGLGDKQAILDQYADILRLRNRLASTAPEDKAWTRDALDVRNRFTFDCAEWDVASDELIRTHSNAGDNSGGEQEKLMAFCLAGALSFNLASPESHDNKPVFAQLMLDEAFSKSDPQFAQQALQAFRKFGFQLVIVATVQNATTIQPYIDSVVMVSKTEATGRNARPVATVATRSIAEFTELRHQMKQKVPALAH

SEQ ID NO: 34544 - protein, 489 aa, Stenotrophomonas maltophilia; identical to SEQ ID NO: 31973

SEQ ID NO: 34545 - protein, 233 aa, Stenotrophomonas maltophilia
MSWHEDPIDAPQADVAEDAYEAEPVAAVAQPRRGNDVYYLGDTGRLPLDARRALCQLLIGPSIDQLRHAKLWPALIRSEAAIRSSLADLFLELVLDRDSGVAFTRQADTEDVDAPVLLRTSPLTFIDSVLLLYLRQQLAEADARGNRAVVADAEMAEALAIYEKNLSTDRAGFNRRVASAVQKMKDNHILTRLSGQEDRHEVSPALKLLFSAEDVSQLSAVYRQLRDTPAAEA

SEQ ID NO: 34546 - protein, 1126 aa, Stenotrophomonas maltophilia; identical to SEQ ID NO: 33311

SEQ ID NO: 34547 - protein, 497 aa, Leucobacter sp. Ag1
MGHSRAEAAYQRAIGAFKNPTLDLLHGRYAPFVIAALSLVFTADRPTVAVSDAHVEVGEIVDELRAADHDGRERGLPAGSGREICRYWVRVGWLVPQIVDDAEVYRLSAQAVGALEIAGRAGGGRSRVSRSRVRTLLETIEQLAQDAEPDPEERRARLLADRAAIDAELARLDEHGAPEPADDELLLEEAENVLHLARELPADFSRVAESINAMQRDVVADLRRDVRPAGEVLREYLQRGQHVMQATPEGRAFAGALRLIGDPEHIDRLTDQLRNLLAQPFSRLMDAEQRGDLDAIAKRVEQGVQEVLTAQRRASHVITAQVRTHDPARDREVDELLRSVMSGLQNWTRDAKAGDRVEPLRGFPVAGVGHLRQTLSDIRPPAAPAPLSEAEGEAEFEEADTRAWGGPRYTELEAYVAGLGERFDLADAFAGAPDAERRPVDLLGLLEIAHRTGMSEGDEVSVVEALRPDGTSRRFAFGSVTAGIRTESAVPEEGADD

SEQ ID NO: 34548 - protein, 243 aa, Leucobacter sp. Ag1
MTETVEPFVAPVPMEADPGEYFPGDRGVLDPEVRRVLVRLLQRRFLLAARNRDDWKVLLENQSVIESRLHDLFVDLVVDSGRGVAYKQQIRSDELDVPILLRDEAYTRAETLVLVYLRTVYQRESTAGEASARVDIEEVEQTVLSYFAEVDGDQARRQKAVRAALARLRQEGIVEEESEGRYRISPLVEIVLGAEQLRELSVWLRERGERPATREPDAGTGSAPDPDPDPEPTDGIDREEHAL

SEQ ID NO: 34549 - protein, 443 aa, Leucobacter sp. Ag1
MTMLDTLFGLIPAASRGQQWIADELQLVNWGGYDGAHRVRFSPTATLLCGGSGSGKSTLMDAYIALMMPHTTPFNGASNGGVAGRPRGDEQRNILSYGRGKIDESRTEEGTKVRVLRGDGTDTWTAIAATWLDHDGSRFTAVRAWYIPATARTLDDTVRVRATVDGPFDLSALESAAGQRLSDASVRAAGLETVATDREFSARLHSVLGIGAAGAGSKAMSLLARIQAGQQITTVDELYKRMVLEEPETLTIADAVVSHFDELESTRGRMVTAQKQVRALRPIRDMRTRIEESAERLRLIDAVGRFSDPASLASLWRAGRRLELLRAVEGELQAQKRDADDAVRVQQTLADAAESERDGLLEVLRNAGGDRLETAERELRGIEQRLTAVRQERERFDGILAVLGAEAGTATEFAALAETARGALGDPNAKAAAREAYADARGG

SEQ ID NO: 34550 - protein, 450 aa, Pseudomonas aeruginosa; identical to SEQ ID NO: 32505

SEQ ID NO: 34551 - protein, 220 aa, Pseudomonas aeruginosa; identical to SEQ ID NO: 33036

SEQ ID NO: 34552 - protein, 979 aa, Pseudomonas aeruginosa; identical to SEQ ID NO: 34267

SEQ ID NO: 34553 - protein, 393 aa, Pseudomonas aeruginosa; identical to SEQ ID NO: 32927

SEQ ID NO: 34554 - protein, 493 aa, Rhodococcus aetherivorans
MSTADLHRLARLRQEHPAWALLRSDNAAAVLALLGRHFDRGTRRLPAPELFARLDADLQELRDEGFELPRTGQAYCADWVRAGYLLRRASADAREETLEPTEATFAALTFVAGLTTATSSVTESRLTTLSSQLQALARDSDPRSESRLAALRAERDELDRQIAAVESGDFPVLDGNRAVERSAEILALAGEIPGDFARVRAELEALNRELRTRILDDEGDRGGTLGEVFRGVDLIGSSDAGRSFAGFYDMIIDPERSSQLDDWIEAVLQRPFAQQLTTEQRNRFRTLLTEMEDAGGEVHATMTSLSRSLRHFVQSRHYEEHRRLQRLLRSAQQQALQVAQRRKPYDLLDLELVRVGMGIDSVAALRLHNPADDLVAEPVVTQPVGEVDLEELRRIVRESEIDMDELAGNVAATLRSRGSATIGDVLRDHPATQGLASAVGLLVLAAEHGHRVDGTEEIAWTSPSGATRVATVRRHLFDPTDTEFTARITEDAS

SEQ ID NO: 34555 - protein, 201 aa, Rhodococcus aetherivorans
MTESTTRTGMYPGDTGELDLDTRRALVQLLKGPLVTADKHPEVWRTVIRDERVLRSRLADVFLDLVVDEDDQLAFTRPADTGDHKAPTVLRTERLTFMDTVMLLALRHRLLRAQPGERVIVDFDEVAGQLEMYRAATSTDPAGFRKRVNASWEKLKKYTLLAATSTEGRMEVSPVLRQLFDADQVAAVEAEFRRIVEEDAP

SEQ ID NO: 34556 - protein, 1099 aa, Rhodococcus aetherivorans
MSAAPIHPGQFRLARVQVVNWGTLHGHHDIPVARKGFLITGASGSGKSTLIDAISTVLMPGGSVRFNAAAQESAAGSGRNFVSYIRGAWRREADADTDALTASYLRTGATWSAVALTYNAADGAAPVTLVKLMHLRRGANANNEISHLHLILDTDVELTDLEPFVTRGIDTRGIRKRWPDAVVNPSYAPFARAFRSKLGISSEAAQRLLHRTLSAKSLNSLDQLLRDYMLDEPPTFAMAERATTQFRELREAHRVVVDARRQVETLEPLVALADARRSGLQAQRDLQDETDHLDAVHARMTVDLLSDRLDETRAQTGLLQAAADKTADEADRAGERTVDLRVRAESAGDGRLATLRVHKETAETALERITQQRRRFDDALAHWEAETPATADDFAHLQAQLERELRELDATADTRRAELYEVAGALAERRKTIRELIADREVLARRRSNLDPDLLRARELVCSAAGLGEDALHFAGELIAVRAEHAEWTGPIERVLGGFGRTLLVPDELYPRVAAAVDAHHFGARLVYRRVRTGVGAPDAPTTADGSLVRKLEVRPGPLAAWLQHHLADRFDYACVDTADDLRRVPRGVTRAGQVKHGGDRHEKDDRRRIDDRSRWVLGFDNEAKLADLRRRIGDAETDVDALQRRQEALERAESAIQLRRQAAAVIRESAWSDVDVAAAGNAVDAIEERLREWMQGNTEYATLTADLARAESEERAARQAHTAALAKLEQHRDELTRVQARLDEAQAHAGTAVPDPIFARIRTRFAATVRRVTVDNIDRALSTVGRAINVEMRSAQHDTADAERRITAILTGYLAEWEARRAEMRAEAEYVDDALAVLARLRSDGLPAYEDEFFRLLREQSHRNIGELARAIRKAPGEIRSRIEPVNESLRRSPFDTDRILRIDVKDRRSPAASEFLAELLQITSGAWKEEDRAAAERRFEQMAAVLERLDSGEPADLRWKRLVLDTRLHVGFIGVEVDPEGNDANYHDSSSGLSGGQAQKLVFFCLAAALRYQLAAAGEELPRYGTVILDEAFDRADPAYTRRALDVFTQFGFHMVLATPLKLLQTLDDYIDGVAAVSIRDKCYSQIALLPIRGDGT

SEQ ID NO: 34557 - protein, 378 aa, Rhodococcus aetherivorans
MSALCVPPSAVAGKAQVAYRSRRARWITDPAAAESDSLSIGLHPPSERRVAQDPDAVVAWVRAWHRYPGAGRVEWETRRWPSFGTQEVPMRLLLSGATEIAAAAARAPEWRTLTELQARLLDGLGPGTATLATAIAATHARWLELDEPDFARLVAAVRWLAEHPSSGLFIRQLPVPGVDTKWVSRHRGLVETLLDGVRGDRDLGVRSLPRMCEVAVCDRALLAAAPRIFATSLDELAALPVKPVRTLILENKEGLHALPELPATVAVHGGGYAVHELADVPWLAASDVVYWGDLDTHGFAILDRLRGRLPHVRSLLMDRGTVERWRDLAVPEASPAPHTPAHLTGPERDALAVVRTEGLRLEQERIPWPYVVAHLEAL

SEQ ID NO: 34558 - protein, 485 aa, Halomonas sp. A3H3
MDYDYLASLRKYHPAWRLLLADHAPLIIAFVHRSFIEPNVRSLPEQELAARLEDYLFHLRQGLGEGHFPKPAREYLNDWASDERGWLRRYFPADSDEPHYDLIPAVEQAIQWLAGLEQRTFVGAESRLKLVFDLLRDISQNSETDPETRIAELSRRRAAIDAEIEEIRTGHMAFMDPTRLRERFLQATDTAQALLADFRQVEQNFRDLDRQVRERIATWEGGKAAILEEVLGQRNAITDSDQGRSFRAFWDFLMSADRQQELTELLESILSLEPVAELNPDPRLRRIHYDWLTAGEATQRTVARLSEQLRRYLDDQAWLENRRIMDLLHGLEQHALAVRENLPTTPFMTVEAPAPDVQLPMDRPLFSPPIKPHIEQAPLEEGAANIAADPLFEQVYVDKERLRARLRQALQTQRQISLESLLQRHPLEQGLAELVTWLSLATGEELGLIDETQEQVVYWTDDQGQQRRATLPAVIFVSGHQGARP

SEQ ID NO: 34559 - protein, 202 aa, Halomonas sp. A3H3
MSDTGTPPNEREPALSPVLILLFKGVLYRDDQAGAWQDLLRLQAQVRDHAGVFGLELILDEAEGYAYLRQRPTEEGEEELPRLVPRRQLSYPVSLLLALLRKKLAEQDATGGDPRLILSREQIADMMRLFLPETGDEVRLMNRMDSHIKRVVELGFLRRLRGQEERFEVRRILAAFVDAQWLAEFDQLLADYRQHLDNDDDG

SEQ ID NO: 34560 - protein, 1130 aa, Halomonas sp. A3H3
MTDNPQNALFDFASDDSHTGFRLQRLEVYNWGTFHQRVWHLTPNGETSLLTGDIGSGKSTLVDAITTLLVPAQRITYNKAAGAEQRERSLRSYVLGYYKTERSDGALAAKPVALRDFNSYSVILAQFYHAGYDQHVTLAQLFWLRDSQGQPARSYVVADRPLTITEDFANFGSDLNALRKRLRQLPQVELFDHFPPYGAAFRRRFGLDSEQALELFNQTVSMKSVGNLTEFVRGHMLAAFAVEERIDALIRHFEDLDRAHQAVLKAKAQIDALQPMVDNLDRYAEASDQAREFTACREALQPWFAGIKAQLLEQRREKLERELERLASRIEALVSEQQHNQAKRDELKQAIANNGGDRLEQLKRQIKDQGERADERRRRAEEYQALTQRLALDALGDEAVFVENRQRVEQALETLEDRKAEAQNAVTEAAVAFRDGREGVEEVERELDSLRQRRSNIPAAILALRERLCESTGLPVESLPFAGELIQVRDEERDWEGAIERVLHNFGLSLLVPDAHYQEVAEWVDRTHLRGRLVYYRVREPKGAGLPQLHPDSLVRKLAVRPDSDFYAWLEQELARRFDYACCRDLAQLRREQRAITRSGQIKAKGERHEKDDRHAINDRARYVLGWSNEAKIAALEQQQYQLQQRLQQLADTLSQAQETQKQLETLGTLLHRIDVYRHFQELDWHTPTLLIQRLEEERRSLEATSDTLRLLQQQLGDLEAELKEQDTRLTGLRDERATARLKYDQAGDAQAEAEALVERTAASVRESDFPRLDALRPEALPERRLTVESCDNAEREMRTWLQGRIDAEEKRLKRLGERIIDAMRSYHTEWPLETREVDVSIASGDEYRGMLKQLVGDDLPRFEADFRKLLKENTIREVAGFQAKLNQERELIRERIDTINRSLHGIDYNPNRYIRLQAEPTPDLEVREFRESLRACTEGALTGSETEEYSEAKFLQVKAIIERLRGREGQTELDKRWTRKVTDVRNWFVFSASERWREDDAEHEHYTDAGGKSGGQKEKLAYTVLAASLAYQFGLETGGQSSRSFRFVVIDEAFGRGSDESARYGLELFQRLNLQLLIITPLQKIHIIEPFVANVGYVHNDGGQHSMVRNLSIEEYRAERAARSMISAS

SEQ ID NO: 34561 - protein, 399 aa, Halomonas sp. A3H3
MSWSTPVTIRAQVEKAWGSGSLLAARVSGESPFPLEIRLRRPGARDITERFGAVMDWVNALREQSREKRGYGYDLRWLQVNNRVHGSNAIPVAAVIPDEGQALRLIGRQQDAQRFQALADTLLHHHPELRDWVARRPLSVLRHADDWPQLLAVLAWFLANPRPRLYLRQLDISGVDTKFIETRRNLLAELLDVVLPATAIQRDASGVKGFTRRYGLRTEAPQIRFRLLDPALSLQGLRDIAVPPEEFAGLSLPLQHVFITENRINGLAFPDTPASLVIFGLGYGLERLIEIPWLHDTAIWYWGDIDTHGFGILNRLRAGLPHARSLLMDRPTLINHQPLWGQEPKDKRYIGQPTRLTAMEQALLKELRTDRLGERVRLEQERIAFSAVERAVAATESVT

SEQ ID NO: 34562 - protein, 506 aa, Neorhizobium galegae bv. orientalis
MPLFRYLSDDAFLIFSRKHRYLYEASLLEIYDRFFSSGAVFPTPQELVHVIYDVIGQRPHLLLDADDLIDGLPEVVSKGRRRLKFAGNGGEIGDRALKAAQQVYQGLVRTGWLEEEEYGLKVTTDMPMGALLVVQRLSSLKSDVSQRFGGLVVHIKTSLDLVERLSVENPEKARSSAVHALREARVQADQFVKTLRAILSDLRRIRKSLLESEDLRQKMDTYFEEFIGELLLKDFQAILTFNHPYRFRDQIITTARRISYSADLLSVVADGYIEIGVAPDVQHARDEAVSDLLSIETTFDTIGDMFERIAQFRRALETRLRNTVKYAEQGERGLSARARGIVERLEGLLSANPERYMEPVVPVAVERIFLPWSAAQLASQRQAKLPIEAQPLAKRPYDPMYAFRKRMRADYLERISPSPERVRQFLVRILAPYHTVEARFVALQTIDDFLAFDAARRYALTGEIPGPVASQFELEYLPNGEPHDCEWLRCSNFSIRHLGDPSHREA

SEQ ID NO: 34563 - protein, 226 aa, Neorhizobium galegae bv. orientalis
MLSEFENVEATFGVDKAADLKKACRYLLRNQFAYSGDRGVATVYNTLTDNRFRRIADDFFDSIGYRVQRNADEQWVGILFEDDDASSVPKMRLDETIVVLVLGSHWQEEADVGNLIDRAIAVTTVNVLHDRYRDMLKSGTKPMIPAARFLDLLRDVAVRNLIWIGDFDHDAQDREVEIRPMIKFVSGADALARLETYVKSEEHRSHSRAAPVVNDIDVPPIEDNMA

SEQ ID NO: 34564 - protein, 1150 aa, Neorhizobium galegae bv. orientalis
MMELRQLTLVNWHLFDAEDIEVRGNFGILGENRSGKSTILDMVQAVLSGASRQYLRLNAVAGDGGKGRSMSKRTVLSYCLGTLGDGDVRRPESLTYVALGFEDTQNKRPPVTIGLAIEARRTDASETILGRFVCIGKLMTTADFTETRADGIYAAQWDDVKTRIIAFVGADHFINHRDRAVDFVREYMRRLVPSLPNAEQNASALLKAIVNAMTLNQGYSATEFVRRFILEDNPIKIGELRSSIETYRGVSATIVTLREKLEALKEIRVQVAAFEDSLHQRALAEWLARRARWLASRAENRAIKEQIAEARRFINAESEDRSIALEGINEAKSEIERLIKAIAAHAAKSGRDQWQETLKSITAENDRLVKDIDRRRKSATDLADLTVGFDDAGIIGTYCQLALRKADRNELRHAEQELRAKAPDILAKAEKRRREVAAQIVPLERDITDLRKAFEQSRESGPAAYLSPETKLLVRRLESRGMDARPLCDLLEVMNPGWAAAAEALLGRDREAIFVERQNIRDATALFREGRREFRGASLVSLNKLAEFRDNPQAGTFPALFRTDDADARAFLQRRYGNVRLALTLDEFNQPGRALMQDGLYDDGLVRSHRSINPRDHKIGKAAQTDHLRNLQEDFVQKGESLSVLQQEDRLLARALTALDLFSRQDVDWLADMLDSVDGCMMRTKDAQMRIDAIDAAGDDGLRNRLLGQKGFQERKEAELRAIDARVSKYLVDAQSGERSLKSGDGTEGSDLNLKLARSLYRSQRMLYNYPEGCAAYREKLVSSRSPRSEASAIAGQLERDEAAAHRKLGQRSEDAAKRAAERNRVAELQTRSALHVYFNNPKFGVSSQVGPESALLADIKPWMDVLIEDIESNELRRYEDRAREASERASVLFRGEFVNALNTRVSKMERDIEALNRSLKGHPFHHEIYSFHRTAEAEFQPILKIIEISRISDDALDALFKPSVPDDFPHKDTINAVEQLLEDPDKDVSAFEDYRNFYTFEIHMEDIRTKARTRWETRRNTGSGAEQQVPLYVAIGASLAAVYGSAASLGMKGMSPALFDEAFSKMDGKNQRAMMSFYADLGLQVVIAAPLEKKTAISGYMHTLVEIDRIDDQSSADTVYVGQRARDELLAMNPDTWSKEEIAQRMAAE

SEQ ID NO: 34565 - protein, 392 aa, Neorhizobium galegae bv. orientalis
MARKFDTAGGLLHDLLDRFEGGTVRPIGYPDHDAFASVTASDAFVRSIAEAERTGGVERVYGKGRRHVELKHVRLADAALLYRHLGRTPARQAAIGIGETMLDGLTLHPKLREAALTAIDAWSRNRTWATLGIDDAASMRTAIVLAQAIVDGSHRGLDYRTFSRRTVANSKALEKLEAAVLRLITGVVDVPPSSGARAAFAALGLERFGPPLLLSGAFLLDRQPVPPSLPYLGIPPTAMMRIGFDKPPAYALTIENFASFNRHVLEADPERVGLTLFVGGYPSLATQRALAELGSILPESVPFFHWSDIDPDGTWIFRTIERALGRPLHPHLMSRELAEKFGEVSAGISKLRRSETSLSLISDLVNYFIEPGSKVMEQEQIDPKIPGWPITD

SEQ ID NO: 34566 - protein, 506 aa, Neorhizobium galegae bv. orientalis
MPLFRYLSDDAFLIFSRKHRYLYEASLLEIYDRFFSSGAVFPTPQELVHVIYDVIGQRPHLLLDADDLIDGLPEVVSKGRRRLKFAGNGGEVGDRALKAAQQVYQGLVRTGWLEEEEYGLKVTTDMPMGALLVVQRLSSLKSDVSQRFGGLVVHIKTSLDLVERLSVENPEKARSSAVHALREARVQADQFVKTLRAILSDLRRIRKSLLESEDLRQKMDTYFEEFIGELLLKDFQAILTFNHPYRFRDQIITTARRISYSADLLSVVADGYIEIGVAPDVQHARDEAVSDLLSIETTFDTIGDMFERIAQFRRALETRLRNTVKYAEQGERGLSARARGIVERLEGLLSANPERYMEPVVPVAVERIFLPWSAAQLASQRQAKLPIEAQPLAKRPYDPMYAFRKRMRADYLERISPSPERVRQFLVRILAPYHTVEARFVALQTIDDFLAFDAARRYALTGEIPGPVASQFELEYLPNGEPHDCEWLRCSNFSIRHLGDPSHREA

SEQ ID NO: 34567 - protein, 226 aa, Neorhizobium galegae bv. orientalis; identical to SEQ ID NO: 34563

SEQ ID NO: 34568 - protein, 1150 aa, Neorhizobium galegae bv. orientalis
MMELRQLTLVNWHLFDAEDIEVRGNFGILGENRSGKSTILDMVQAVLSGASRQYLRLNAVAGDGGKGRSMSKRTVLSYCLGTLGDGDVRRPESLTYVALGFEDTQNKRPPVTIGLAIEARRTDASETILGRFVCIGKLMTTADFTETRADGIYAAQWDDVKTRIIAFVGADHFINHRDRAIDFVREYMRRLVPSLPNAEQNASALLKAIVNAMTLNQGYSATEFVRRFILEDNPIKIGELRSSIETYRGVSATIVTLREKLEALKEIRVQVAAFEDSLHQRALAEWLARRARWLASRAENRAIKEQIAEARRFINAESEDRSIALEGINEAKSEIERLIKAIAAHAAKSGRDQWQETLKSITAENDRLVKDIDRRRKSATDLADLTVGFDDAGIIGTYCQLALRKADRNGLRHAEQELRAKAPDILAKAEKRRREVAAQIVPLERDITDLRKAFEQSRESGPAAYLSPETKLLVRRLESRGMDARPLCDLLEVMNPGWAAAAEALLGRDREAIFVERQNIRDATALFREGRREFRGASLVSLNKLAEFRDNPQAGTFPALFRTDDADARAFLQRRYGNVRLALTLDEFNQPGRALMQDGLYDDGLVRSHRSINPRDHKIGKAAQTDHLRNLQEDFVQKGESLSVLQQEDRLLARALTALDLFSRQDVDWLADMLDSVDGCMMRTKDAQMRIDAIDAAGDDGLRNRLLGQKGFQERKEAELRAIDARVSKYLVDAQSGERSLKSGDGTEGSDLNLKLARSLYRSQRKLYNYPEGCAAYREKLVSSRSPRSEASAIAGQLERDEAAAHRKLGQRSEDAAKRAAERNRVAELQTRSALHVYFNNPKFGVSSQVGPESALLADIKPWMDVLIEDIESNELRRYEDRAREASERASVLFRGEFVNALNTRVSKMERDIEALNRSLKGHPFHHEIYSFHRTAEAEFQPILKIIEISRISDDALDALFKPSVPDDFPHKDTINAVEQLLEDPDKDVSAFEDYRNFYTFEIHMEDIRTKARTRWETRRNTGSGAEQQVPLYVAIGASLAAVYGSAASLGMKGMSPALFDEAFSKMDGKNQRAMMSFYADLGLQVVIAAPLEKKTAISGYMHTLVEIDRIDDQSSADTVYVGQRARDELLAMNPDTWSKEEIAQRMAAE

SEQ ID NO: 34569 - protein, 392 aa, Neorhizobium galegae bv. orientalis; identical to SEQ ID NO: 34565

SEQ ID NO: 34570 - protein, 506 aa, Neorhizobium galegae bv. orientalis; identical to SEQ ID NO: 33539

SEQ ID NO: 34571 - protein, 229 aa, Neorhizobium galegae bv. orientalis
MLSEFEQVEATYGIDKAADLRKACRYLLRNQFAYSGDRGAATVYNTLIDNRFRRIIDGFFDSIGYRVHKNAEEQWVGILFDDDDPSSVPKMRLDETIVVLVLGSHWQEDADVGNLLDRATAVTTVNVLHERYRDMLQNTGKPAITAGRFLDLLKEVAVRNLISIGDFDYDAQDWEVVIRPMIKFVSGADVLARLESYVTTEERGMRTRAMPAVGELLRADASAAKGDTP

SEQ ID NO: 34572 - protein, 1153 aa, Neorhizobium galegae bv. orientalis
MMELRRITLVNWHLFDVEDIEVQGNFGILGENRSGKSTILDMIQVVLSGASRSYLRLNAVAGEGSKARSASKRTVLSYCLGTLNDGDVRRPETLTYIALGFEDQEKQQPPITIGLAIEARQTDAAETILGRFVVIGKLLTTADFTDKRADGIYATQWDEVKARIIASVGDVNFVNHRDKAIDFVREYMRRLVPSLPNAEQSASALLKAVVNAMTLNQGYSATEFVRRFILEDNPINIRDLRSSIETYRSVSATIVTLREKLEALKELGGFIAAFEESLGQKDLENWLARRAWWLASRAENRAIKERIAEARRFIDAEKEDRGLAIEGIKDAEQEIERLRKAIATHEARSGRDQWLEVLKSVTADNDRLKKEVDRRRRSAIELVDLTQVLDDTGFMKAYCALVAGPDGKADRKAMRDAEQNFRTHVVVTVETVERRRRETAAQIVLLTKEITGIRQVLDEVDERGSAAYLSRETKLLLRRLESRGMDARPFCDLLEVADASWTAAAEALLGRDREAVFVERRNIREATALFREGRRDFQGASLVSLNKLDEFRDAPRQGTFPALFRSADPDARAFLQRRYGNVRLALTLEEFNQPGRAIMQDGLYDDGLVRSHRAVNPRDHKIGRAAQADHLINLREDFAQKADVLSGLQREEKLLTHALAALDLLKRQDTDRLADMLDSIDDCAERMRDAQERVAAIDAAGDDGFKERLRAQKAFQDRKKEELKTIDERSRKYQVDVEVGERALKSGEGTEGSAMNLSIAKARYGTQRRLYQYPEGSGAYRQRLEALRRRSHDSGTMGQSARNEAVAHRKLGQQAAEAADRAADRNRRAELDARRALHDYFNNPKFGVSSQVGPESELLADIKPWMDLLIEDIERNELRRYEDKAKEASERASVLFRGEFVNALNTRVSKMERDIEALNRSLRGHPFHNEIYSFHRTAEAQFQPILKIIDISRISDEALDTLFKPNVPDDFQHKDTIKAVEQLLEDPDKDVSAFEDYRNFYAFEIHMEDVHTKARTRWETRRNTGSGAEQQVPLYVAIGASLAAVYGSAVSHRGQKGMSPALFDEAFSKMDGKNQRAMMSFYADLGLQVVIAAPLEKKPAIIGYMHSLVEIDRINEQSFANVVYIGKRARDEILAMNPETLSDADIAARMAAE

SEQ ID NO: 34573 - protein, 285 aa, Neorhizobium galegae bv. orientalis
MARGRKFTIAQDLLQDLLDRFEDGTAQPVGYPDHGGFADITASDVFMRKIGEAERRGGVALVYGSGRRRGELKLVRLTDARLLYEYLDRTPSRQTALTVGEEVLGGLSIHPAIRDVAFSAVEAWSRNRKWINIGVESAASMRNAVILAQAIVEKRHLDLDYRTFSRRIVADSKALEKLEGAVLRLVGAVVDVPPASSARAAFATLGLERFSPPLLLSGRFLLDGISVGASLSYLGIPPTEMMRISFSRQPDYVLTVENFASFNRHVLEADPNGSGLTLFVGGYPS

SEQ ID NO: 34574 - protein, 490 aa, Rathayibacter toxicus; identical to SEQ ID NO: 34298

SEQ ID NO: 34575 - protein, 243 aa, Rathayibacter toxicus
MSETVAPEPLMHPETEPFLAPVAMEEDSDELFVGDRGVLDLEVRRVLVQVLHRRFLLADRHREQWTVLLEHQQLIESRLNEMFVRLVVDHERGVAYKQQVRSDEFDVPILLRDLPYSRPETLVLVHLRTVYQRETATGELAAHVDSEDVEQTVLSYFSDGDRDTAKRQRMIRKALERLGRDGIVDEESAGRFRISPLVEIVLSAEKLRELRDWLQRQSVSTVVAAGDDGEDSDSDDDLLEVQR

SEQ ID NO: 34576 - protein, 1115 aa, Rathayibacter toxicus; identical to SEQ ID NO: 34300

SEQ ID NO: 34577 - protein, 645 aa, Burkholderia contaminans LMG 23361; identical to SEQ ID NO: 34032

SEQ ID NO: 34578 - protein, 224 aa, Burkholderia contaminans LMG 23361; identical to SEQ ID NO: 34033

SEQ ID NO: 34579 - protein, 1210 aa, Burkholderia contaminans LMG 23361; identical to SEQ ID NO: 34034

SEQ ID NO: 34580 - protein, 230 aa, Burkholderia contaminans LMG 23361; identical to SEQ ID NO: 34035

SEQ ID NO: 34581 - protein, 495 aa, Brevibacterium flavum; identical to SEQ ID NO: 31488

SEQ ID NO: 34582 - protein, 212 aa, Brevibacterium flavum; identical to SEQ ID NO: 31489

SEQ ID NO: 34583 - protein, 1111 aa, Brevibacterium flavum; identical to SEQ ID NO: 31490

SEQ ID NO: 34584 - protein, 368 aa, Brevibacterium flavum; identical to SEQ ID NO: 31491

SEQ ID NO: 34585 - protein, 483 aa, Leptospira santarosai
MDYKLLQRLLRSSAIRLLRKDNAPFIIYFLEKYFRSSARTFVPFEELKILLRYELENLNDQEEISLQRSADVYLGEWIGENFLTRRIRSAEGIEEIILEPSVELEKVFSWMEDIRSLEDKDVIGTESRFFSVLNKLKEIVEESVSDPEEKIRQLESKRDELDLQIRKLKAGEQVSKFPSERIRSQYVYARKEALGLLSDFRQVEGNFMEITKMIHKKYLEVVQKGEILRFALDGNDELLRSEQGRSFQTFWDFLRSERSQEQFESILDSLYSLEDVLELDSRKFFRNFRRNLREAGSRVNGVVTRMSEQLKKSLVERTLRENRRSKELIAEIKNLVLENPLDFSQTDFYSLEEMDVRFSMERPLWRGDPEETFRTVRIENTDEDENVFDILESIRGIDLEMYEQRIQTLLRISPEVSLEKVLREYPDDVCFESLVAYVWIAGNGEFHSLDDSETFVYSVSIMDHSSEKLAYRIPKGTYRVGHL

SEQ ID NO: 34586 - protein, 187 aa, Leptospira santarosai
MNKPHIYAASILRLLKGPINSESDAKIWQNLLDNEKPVREHFEKLGIFLHLDREDGYAFLRQTSDDESAESDEKLPVITRKLPLTKEETLFLILLRECIIEIEEKDPSGSILFRKEELSDKVSPFFSDLSDEIDRQKRFEKLLRKSEELGFVKQIEPETIRIEKLLKAKLTVSELEGLRGKFRLGTE

SEQ ID NO: 34587 - protein, 1118 aa, Leptospira santarosai
MTDLFSPGEIAANTGYRLEFLEILNWGTFHGRIWKLRPEGENFLLTGANGSGKSTLVDAILTLLVPAAKRNYNLASGLESKKRDRSERSYVEGHYGRSSSGSEGILKIRGKQEECYSVLSAVFQANGRFPRIRIAQIFWFESGELKKIYLFSDKELDFEKDLVLGKRTVKELKADLKNSGARLYDQFKAYNVDFRKAVGLESEKAIDLFNQIVAIKSLGVLNEFVREHMLESKDKRSRIEELNRNFSDLSETYEAIVNAKEQLKLLEPIEKKAAEYREWNRKAADLQALIVYVPYYFAEKNYELRQIREQDYLFELSRLKDRSDELSTEIESLNQEERKLFNALENNDTQRRIADLVRKREGILSDLKTRGIERKKYSSYLSKIGLEEAFSEETFYTNLRIAGGMLTETDSIWEEIRDRSGKLTLQKMELQKNFDSVRSELEYLKKKRDNLPRTQSEIRAKIASGIGLSEKRFPFICELIRVKESEKEWTGALERLLRNFGLRMLVAEEDYEAVSAYVNSSYLGGKLVFSRMVPLSGPILQPKDKEEVFYKLELKSELSNVKKEWLEAQILREFGHICGDLNRLRKEEKALTKEGLIKSGRIRHEKDDRKNISDARDYILGWNNTEKIAALESEFAILGQNIYRLNAAIDLVREEENKNKNKRDDLLLFLRFEQFSQIDDESLKGPLQDTERQIRELELRSEEYGKLKEQYELAKARLTDVQGRQRETDKEFNVLEDRLSTLRKDMEDLRQRIRKVDRETSISLEPILKERLRETILTLESIVETERNFSDRLVVERDQYLEKRDSIGEELNRGMDRYVKRFREEADREELSVSVSNAEAFAKLTERIRQDRLPEFQEKFRTMMSDKVAKQILDFKAELDDDVSEIKERIDELNDSLKDLDYSKGKSYIQIRYFDTKDREIVGDSGFKEMLRGSIPDLGDSSHNEEKFAKIRELLKKLKGEGGSDRWPRLVTDPRNWLDFQAAEFLRDNNQILQVYDSSAGKSGGQTVKLAYTILASAIAYQFKIRERNSFRFVVIDEMFNNLDGENSRYALNLFRQLGLQLLVVTPMDKITIVEPYVRSVHFVKNNSEGNDSRVYPISKENVSSGKDENSERKVGNL

SEQ ID NO: 34588 - protein, 391 aa, Leptospira santarosai
MISPEILRKRSLAYYHNELLRSIVLGGVLFPWEISIGKVLPEEILKNPSLLRELRAESKENKGFGFRIVFRSKETRKYGIQTIPTKIVFDTEDDFLRFTKKKDEFLSYRTDCTLILSVLPELKDWILKNTLSVIEESGKWESILSVCSYFLEYRNPGLYIRELPIRIPTKFIEENKKVLRSLLDFLLPEIVDAKDFETRYGLKKAEPLVRFRILDLGIAKSSTGGLTDLSIPVRDFRKLELSGCGRVFILENKTNFANLFNFLSFPQLKGTISIFGQGFGLNVLKDCSWLEKMEIFYWGDLDVQGFEILSQLREQYPQSRSFLMDLKTFVRFRDFAVDGISSSKSSEPKFLTPSERETWKYLSSLDSKNRLEQEKIPHEYVQEVLSGLDGS

SEQ ID NO: 34589 - protein, 490 aa, Corynebacterium minutissimum
MSVEARALSLRRLMRDSAAIRLLAADNAPVILALIAEYFPRGTRARPAAEVYELMVTDFEVLASEFSMPRTPQNYCNDWVKAGWLIRKSGKSSHGETLEPSEEALSALEAIERWEAPVTTVTASRVESISSALQRLARDTNEDIASRVASLEEERDRIDREIEKARRGQFERLTAAEAEERVQDVLNMAMAVPSDFARVRHELEALNHQLRRQLLDPEGYRGEVLEEIFNGVDHIAESDAGRSFRGFYSLLMDRERSAWLDQWITEVLDSEAGQALAPDRRQQLRRLFRDMEDTSFEVNQTMTGLARSLRNYVSSEQFAEDRRMIELLREARGMAIDAAQNSELKAFHRMETPLQRIGMSIHSVSRIRLANPGREVVEETPVAYQPEAEDPQALYELVRESEIDFEELHEAIRGAVAQSGPCTIGQVLQAHPPTQGLASVVGLVHIADQHPVPVLRPSREKVTWTEEDGTVRCAHIPAKYFDHTTVKELQ

SEQ ID NO: 34590 - protein, 221 aa, Corynebacterium minutissimum
MTAAHTPRVDSAHEPPLWEHDKGSLTYHSRRALVQLLQGPLIRAQKEPVLWAAIISDEENLRARLHEVFLELVVDETEGFAFTRMVEEETLSIPQVLRTDKLKHIDTAILLNLRQELGLALPGERVIVDVEDLREGIGYVRAVDNRDEAGFNRRFNAAINRIHNDYSLLSATETEGRFEVSPVLRQLFDASTVTAIRDEYARLAQADEEQVDEEKEKASDD

SEQ ID NO: 34591 - protein, 1132 aa, Corynebacterium minutissimum
MTSHTSLYPGQFRISRIQLINWGTFHGYFSIPVARKGFLITGGSGSGKSTLLDAMSAVLVPQSHLKFNAASQQDLGRHNGRSLVSYVRGAWRKQENAQTGEIAPEYLREGATNSVVALTYDNGAGKQHTLIAIFRLNGGENSVGQIKKLYGLVPGDEDVDKLSPLLTRSLDTRKIKALYKGPGASFTPTYATFADRFRKRLGIKNVEGQLLLHRTQSAKSLSSLDQLFRDYMLDKPSTFSRAEEAVEQFEDLRQAYLRVEDVKAQIDTLAPLPQLHAQRATAEADKHKAEAMSEALPAVRARLVAEELDSSIRALSAQQVEAQSEVESLEADVAHLDDAERRAAMAVSQLSAGELDALRAKMETADIEIEHRSKEFQRLAAAVGEWTEHYELSPQGFAELQANAKLRLSDFETDSANLTNQQQEAGVAARDAATACARLDSELRSFSSRRTNIDKALVELRSQLARDTGYAESELPFAGELIDISPQQADWEPVIQKLLHGFAATLLVPEDARQAINQWVNSRNVGTRLEYRTIPEFTSAPASARSPRQLIHKLEFQDHPMTAWVRQHISRRFNYECVESVAELDKVTTTPAVTRDGLESRPKDKDGSTRFIKDDRTRFAGTAWYRVGSTNTAKIELLRSQLKQAKATASATARQVHNLNRKMDILRTQRDKAQQVLDSRFQDIDTASAKARKQDLQAQYDSLASSPEAQALAAAHQHAKEKLEAARTRLNQAQKHLGDVEGELKRSTERRHAIGTVPEIADKDIAKAVEEALHKGKRTLTIDNIDARRDEVQADLQDAARTAARRIEDANGKIVSVLHAYLSQWPAEAADLEPQASFAGEGIEKLKYLRADRLADFRARFLELLNGQTVQNLSHLASSLRHARSDIETRMEFINKSLERSPFNGERTLRIDVKDARGQVVQDFQRDLDAATSHSLAEISKDEHDAALQRYHALDKILSRLGSSHPEDIRWRNVVLDTRRHVSFIGRECYPDGTTANTYQDSASLSGGQAQKLVFFCLAAALRFRLAEPDQDVPTYGSIILDEAFDRADPAFTRTAMSVFASFGFHMILATPFKLIQTLSPYVDGTIVVNYDEPIINGRPQARTGYSLIDASSLSTHNPEQPRPEEPTDADA

SEQ ID NO: 34592 - protein, 383 aa, Corynebacterium minutissimum
MRMPKDLQVHAAKYLRNHFAEALSDPDSLHLAWPLHPPTATAAARDIGTTQDFIRAWQRWPHQDEVIYETRNWSRAGLGTNNVPTRITINGAERIATAAGLEREYSTAQQRAQDIAAIFPESPDFTHTVHRSYNQWKDLSPYDLRCLGPCLRWLRANPNSGEWERAVPVEGVDGKWIGNHRRLLLTLLAPFGITDLGLRRNDTRLRLRYLNHTPALSDIEIPLADAAKLFPDTPPRVLIVENKQTFLALPTLADASPPTIALLGSGTAAHQLRALRWLHEADITYWGDLDAAGFAILNAVRAHFPHTKSLLMDTATVTEFQHLAVPDPGDGSATLTHLTTEEQRAYRLLFTAGRLRIEQERIPFMHVSEEMSYQLEAWIASLN

SEQ ID NO: 34593 - protein, 478 aa, Myxococcus fulvus 124B02
MDFTTLETLRLKHPGWRLLVADHAPLIVGFLHRVFVASNARAIAQRELVLRLEDHLHALRESKGAAAFPRGASAYLDEWAADGTGWLRKFYPPEMDEPHFDLTPAAERAIRWLVQLTEQPFVGTESRLLTVFHLLQEMTEGTEVDPKARLAELERRKAELEEEISRVREGHLELMDESALKDRFQQMSDTARGLMSDFRALEDGFHALDRRVRERIATWEGTRGELLETVLGERDAINGSDQGRSFRAFWDFLMSPERKEALTRNLERVLSHPAIQSLQPDARLPRIHFDWLEAGEHTQRTVARLSGQLRRFLDDRVWLENRRILQVLRGIERNALAVRSRPPGEGFVSLEELAPTLELPLERPLYGPAARARMVDEEVKEATDDVPSEALFNLAFIDKARLRLNVREALQAREQVSLAELVREHPLQHGLAELVTYLSLASEDRKASVDDARTQDLFWTDASGATRRASLPLVLFVR

SEQ ID NO: 34594 - protein, 204 aa, Myxococcus fulvus 124B02
MMTHAIRTADAADTLSLVLVSLLKGAVYRDEHAGVWQALLQLQPKVREQLAVLGLKLVLDEPEGYAFLRQRSESEGGVELPRLVARRQLGYGLSLLLALLRKKLADVDAAAGGTRLVLRRHEVHELVRLFLPEGTNEVRWAERVNQDLERAVGMGFVRRLGEEEDTFEVRRILKAFIDAQWLEDFERRLEAYRVRLVEEQGGTE

SEQ ID NO: 34595 - protein, 1127 aa, Myxococcus fulvus 124B02
MSTVRTLTQADLLDIGAPNERAGFRLHRFEVYNWGTFHQHVWHLDLRGESGLLTGDIGSGKSTLVDGLVTLFVPPQKLAYNKAAGAEAKERNLRSYVRGQYKSERGDAGQVARPVYLRDAPTYSVLLAHFHNEGYGQDVTLVQVMWMREPEGQPVRLYVVADGKLSIAEHFSRIGSDLNALKKRLKTLAREVHETFPPYQAAFRRRFGLENEQALDLFLQTVSMKSVGNLTDFVRHHMLPPFDVETRLAALIGHFDDLHRAHEAVLQAKRRVSRLEPLVADHERHAVLARELEALRLCREALRPWFSEQKARLFEERLASVRDEREKLRVEAEALREQRERQGTERDGLRQAISANGGDRLETEKAELTQRRRERDERALKSDRYARMAQSVGLPAATDLDLFLSNTRAIQLQREATAGELAEVQESRTELGMALRDLKKSHEAVAVELESLRRQRSNIPARFLHLRARLCADLGLPEEALPFAGELLRVRDEARDWTGAIERVLYSLGTSLLVVDADYPSVSQWVERTHLNERLVYYRVREDGLARPQEPRPDSLPGKLLIKPGSHMGGWLSAQLARQFDYTCCDTPEQFQRARQALTRSGQVKTGGERHLKDDRRRIDDRSQWVLGWTNDSKRQSLESEGKALQTRLQAASAKWEAHEQRHARLRQQAEQLGQLAVFDNFRELDWRSVASDIQRREARLGELEGESDVLRGFERQLAAIEKELAATDTALKAVEKRQGRQEEKEEAARRTLATCQRTASETPESVRACFPRVAGLCAEGQGELLLEAEACDERERQVRERLQSRIDGEARKLERVRDALLSAMQAYRAEFPVETQELGASLEAAGEYVALLHSLRADDLPRFEERFKRLLNENTIREVANFQAQLHRERHGIRERVDTINRSLRAIDYNPDRYIVLELSPTQDADIREFQQDLRACIEGTLGGAEEDAYSEQKFLDVKRIIERFRGREGSADADAKWTGRVTDVRNWFSFSASERWRADDQEHEHYADSGGKSGGQKEKLAYTVLAASLAYQFGLQWGETRSRSFRFVVIDEAFGRGSDESAAYGLELFRRLDLQLLIVTPLQKIRVIEPYVASVGYVHNEEGRRSRVRNLSIEQYHAEREARSA

SEQ ID NO: 34596 - protein, 487 aa, Microbacterium sp. Ag1
MTGTRVEAAFSRAVTAFSTPTLDLLHGRFAPFVVASLSLLFTADRVSIPIADAQAELAEILDELRDAGDDDDDRRVPSGTGRDVARNWVRLGWLVQQIDEDVEVYRLSAHAVEALEIAGRTGGGRTRVSNSRVRTLLEAVEHLADSAEADPVRRLARLREERAALDAEIDRIEESGRADPLDDEELFEEAENVLHLARELPADFTRVAESLKLMQRDVVAHLRRDERPTGEVLREYLQRAQDVMNSTPEGRAFAGALKLIGDPERIDALTDQLHGLLRQPLARMLDSTQRAELDAIGRRVELGVEEVLAAQRRASHVITGQVKTHDPLRDRQIDDLLRDVIAALHVWDGTGASDAPVRSLPLADLGHLRQTVSSIRPPAVPAPLADAGDVEFADVDSRAWGGPRYAELEQYVAGLGPEFDLAAAFAESDDDTRRPVDLVGLLEIAHRNGMTESETVSVVEALRPDGSTRRFAFGAVTARNTKEDAHA

SEQ ID NO: 34597 - protein, 220 aa, Microbacterium sp. Ag1
MPEESPAPEAAVDDPFIAPVPMEEDIEEHFAGDRGTLDPEIRRLLAHILQRRFIAAERNRKEWTLLLDHQHVIESRLNDLYLRLVVDHGRGFAYKQQLRSDEIDMPVLLKDSPYTRAETLVLVHLRTVYQRESAAGESSVRIDIEDLEQTVLSYFTDVDGGTARQQKAIRNAMDRLDREGIVQEETSGRYRITALVEVVLSAETLKELRDWLRSQEAVQR

SEQ ID NO: 34598 - protein, 1119 aa, Microbacterium sp. Ag1
MTMVDTLFGLIPAGSRGQQWIADELQLINWGGYDGGPHRVRFSPNATLLCGGSGSGKSTLMDAYIALMMPHTTPFNGASNGGVTGRPRGEEQRNILSYGRGKIDESRTEDGTKLRVLRGDGEDTWSAIATTWLDHDGSRFTAVRAWYIPADARVLEDTTRVRATVNGAFDLAQLEKAATQRLSDASVRAAGLETLATDREFSARLQAVLGIGAAGSGAKAISLLARIQAGQQITTVDDLYKKLVLEEPETMATADAVVAHFDELESTRTRMLTAKQQVSALEPIRGIKERIAASAERVRIIDEVGVFTDPSSLAALWNAQRRLDLLREVEVELGDRSRALSLAVREKRALVDAADAEREGLLDVLRQSGGDRLETAQRELRVAERRLDDVRRERAKFDAIVRDLGAEVENADQFEALVADSRGSSPRSGIRDARAAFADAETARRTTELEISRLRQERERTGLVRGSIPSHLDESRAMLAEAAGLDPSELPFVGELIEVRTEFEPWREAFNLALGGFARTLLVDAEKLSSFRAAINSTRTPERLNYEGVPTGLLEVRNADPQTLPGRLDYLPTPFTGWLQQRLQDRFGYVCVDSSSQLDAHQKALSINGQVSQGSRGAHGGQGRANVLGFTNDRRLREIDDQLRLLTDRHDGYASTAQDAEAALDRIEARSTAFAKIEDLTWEQIDVAAVEAERERWLSVEAEVTTASPEIAQLKRQAEDLRSRASTLRDEEARLSNELTQTQEHWGQVTDDVDACQRVIDSAAATDLSLGETHASFLDGRFLHAESGASVTASERLTHLDTALRTAAQRLHEDRREAAEAHEQQRESMRRLMTGFLERWDNLTILPDPDESVGEFESILEALQTNGLHELETEWRDSLLKLSGNDLTSLDSTLSRSLREIKDRIDPINRIMEELPFYDDDHRLQITPRENQSEARKRFRRELREVRGLIDAAETDAEREAVYRKMSRLIGRMRRTAPDFAELIDVRNHVRVSAERVTATTREHVALYDHIGEKSGGESQELVAFIVGAALRYQLGDAGAARPRYAPVFMDEALIKADAHFTKRAIGAWRGLGFQLVIGAPNDKYSAIEPHVDVEYDILKDTRGRSWAKAKVGLPDAAI

SEQ ID NO: 34599 - protein, 486 aa, Serratia fonticola
MSFYEFQARFRRIYQENIAWKLLRADNAPLILAFVADLFSEENEVPYGRARILLESILEQCRLQGIWITESPATSYLNQWIQAGWLRELDGQLTKTDACETALRFSLSLDQHNATTTASHLRIVQDAVRDFVISISPNPDRRLAVLEQKRREIQREIDAVKAGVIVELSPSQQRERLREIYQLASVLTGDFRRVEDEIRTMDKDIRIQMIEQGASRGEVLLAVLEKEQLLTETDAGSAFEGFFQLLCDQNRTTEFREQLQVILNLPVAESLTAQQKQFLGQLMRELSRESERVFLIRRKTEESLRAYIESGTLSEQRAVDRLLGRLERLAIRFKEDQNSLKISTSVRLPTGHIRFYSPDALLLKSPDEQLDTSGVEVQTNGSIPSDDMLDYLDTVRMLEVAQCLLELLQRGGPMTLAALAQQQPLEMGLEELVAWLRVAKAVKATELDEKETIMVTDKQGVQLNAVIPGYLLSAAMFPANLGELAL

SEQ ID NO: 34600 - protein, 256 aa, Serratia fonticola
MRRLSQLSKEQRERTPEPEPVAKLPEERLDLELDLVVPELATAEPEITEVDTEVLAPEIRRTLVSLLRVGVVLAAQKPKLFEALCRHQAVIGNHLANMYLRLLLDEPGGVAFVLQQDLEEDEETETISLINRRTLSLYDTLLLLVLRKHYQERERAGEQRVIIDIERIESHLTPFLPLTNNSKADRKKLNSALDKMAERYILSAIRGESERYEITPVIRYVVNAAFLEAMLEEYERLALNAETSPANKEEADDGEE

SEQ ID NO: 34601 - protein, 1128 aa, Serratia fonticola
MAKSEQLTLAGADCGQIRLAELSVYNWGSFHQLHTAVIDPLGTLVTGDNGSGKSTLIDGLMALLLPAGKASFNIAAAQGDRTDRSLVSYMRGSFGSEHDGAKTRVKSKREGPVLTALRALYRADDGSCIVLAALFWTTKHSHALADISRIYLVARRDVALKELLDRFGEGNVRGLNQWLKEDPAITPCGDNFSDYQETYRRCLHMENKNAPALLARALGLKKIDDLTELIRELVLEASGVKDDARRVVDEFADLVAIHERLLDARNQRDHLIRFPDLDRSLRSSEAEIKRLTAQLDALPVYMGECGFRLWDSRIKGLQNQLDALALEIRQLDRDEQETQEQVEKTHTDYINAGGDRIEIIKQELAQAQRQLESVGVKASEYQQEVKALGLETSLREGVFLHNQAISREKLQTISDEKRAAQDGFGALSAELANLQGQLRQLEQELEGIRARPDSNIDLRFQRLRDEMVAALALPREQCLFIGELLDVDPDQQHWQGAIERALGGIRTTLAVPEASFHLVTRWLNQRHTGLHVRVQVVREAVASAQPAFHHDGYLHKLTWREHPYRSWLQHHLARFDLHCVDTVETLDATAFSMTQQGLIHRDQGRFEKKDQHKVDDRRAWQLGFSNQTRIALLEQDIKSSGSELSKTQKALESARIDLDEVNQREALWQKLPRYRWEDIDAPLWQGKVGRIEQQLNQWVASGSDLQQCKARWEEAKQRLATLRGEKDRKNASQGGLDNEKANAQREQDKASKAAEPGMEDEVRLLLQQRVGALDDAELSQLAFLAESHRKRLVTAQDKASDRKNTALREAVGSMSSFRTKWEIIAGSWGAGVDSLPEYLQHLEQLEREGLPALVEQFKARLNKHATQSMVRIRQRIDAERDDILERIATINKVLARTEFRAGSYLKLGTKTELYPHVQDFNRQLDKVFAQATSDDHLARYQQLRLVVGILEKASNPVSSGTQESLRLLDARYQMSFFAEERDMANHEVRDVLLSSGGKSGGEKESFAGTIVAASLAYVLTPEGQDRPVYCTVFLDEAFSNTAEAVSRRVLQVFRELHIHVNIITPYKNLNLARESARSLLIAERDAKNHESRLCEVTWAEIDRRLDTARQRRAQNLGIELTEVGQHGG

SEQ ID NO: 34602 - protein, 396 aa, Serratia fonticola
MADDWGRLPEQAYAMISKREWFHRGNLKARLLGERPFPIRVSLKPPTNRAILADLAHFQRYVGAWRQFPQQQWLEWEERNYRTLGSQRVPMALVLEDITSLLAYLGKEAQARSDSWVRNMAPLLAIEAKLYPVLVNYLELLASLSPIDIQRLQQLIPQLKPGMGNGQYLRALPLQGVDTKFVEQYVRLISDLLDCLHDGAIEAQGGLANWLDVKGNHKGWLTVRPLCAAAQARLGGLGLLQLTVDELRQQPLPAKHILVVENVQSGLGLPLLADTIAVSGGGKNVSWLDAPWLADKQVAYWGDIDSWGLHVLSDARSKLPQLTALMMDHTTVMRYSAMMVDEDSSMTVVPTHLTADELVLFEALIAGNYPGTRLEQEKLAPDYIQQRLSEWLSSLQ

SEQ ID NO: 34603 - protein, 484 aa, Sedimenticola sp. SIP-G1
MFFAQGREHFFKPLNGKYRGQVLDCLRTFYATLYGSLADYSRSFQRDQVIEILEETIARSPVLDEDEAEAHQAPARSQREQANWILNQLLEHGWLERQVDEATMQSTYAFTRLGRLFTQPMVEAAGGRFRTRHRNTRNTRNALQSFLDKGEVYDLLDAFEYSERIISDFSDVIAELDERKRQLVREVEAQQVVQRASDEFFDFMERRFMPDLSIRLSADSVEKYRDEIGELINKARRKRREFKARAERELRRAAPELIEHVSRSVYLRILDGIETRMHNASAIMLPALRQALNGFTRRADIIMRQLSYTGASAQNRLFSLCEQLRQAPEAEQARLLSDMGRVLSVMDMGFVDPDTIRLHQGRRPRLVNTAVEAEPSDDRASRKALFVQTAVDLAFTFNSQGQRDYLVRALCEGHRIRSHQLPVGDARELLMSAHVIEVGALGAGEFAFRVTPTNNRVGSEYFHACDEFTIELIERESDAERSAG

SEQ ID NO: 34604 - protein, 221 aa, Sedimenticola sp. SIP-G1
MLSEALGEALETTGVTLQEFRELLLRLLNYGVLCRAESHTEQQLYDRYLRIESLVGEYLDLIGITLFHDRRFAYLRLYPPGASVPGMEDAPEGAFAGGLRARLRQDEVALLLVLRLQYDKALREGQLDEQGYVMESVESLSIAMRNLLGRTLPDKIMERKRVFNRLRQLRLIEYRQDEEMESGEAWMRIHPMIVTFVTDEALAALEQGLPQTDPDEDDNVS

SEQ ID NO: 34605 - protein, 1213 aa, Sedimenticola sp. SIP-G1
MFLKQFVYINWGNIPNIEFDFGPVNLFSGGNGSGKTTAADAIQTVMTAAHENLFQYNPGQDETTQRGRGGKRVRTLASYVLGCDDGSYARLDPTDGYLAAVFHPTRGESGEPFTAIIAVRAWLDSAGNNRVARQEDGQFFIISGEQLGLNHFVRQDSAGRYVVPLPELQTLLISEFGKRRVEKYDTKKAYLRRLYGALRGKPDAVTEAEAVAAARAFSRFMSYKPIKGINRFVADEILERKDLGEAVRSVSSQLKTIHHMERDAANLLASMATLQRAGDQVQRYNEQWSELNLLDYSLAQAEYQTRQADYLRGKRRQQSQREAQRDTDQALVRLEHQMEQVRDQLISLEAQRQGVHSLRQKDELEKQRDQLNNRLAQQAQSVLAQDRLVSDNIQASQDIAEALQDGTLLEGQSRITAMEAEALTREVAGTDRQLIQELHHLVQRDISGAMPTLEAELAQAQALQQTHNRWHRFWHDGETGESPREQLAALSHARRSRYQQLTEQRRQKQQEIERLNANQVSYPPYVERALKAIRQHCPAADPRVLCDHVEVKDPRWQAAIEGYLGGARFSILVEPDYEAEAIRIVRQLPGRDNRARVIQGTRAARDAARLSLDPQSIIHVLAFSHAVARAYLTASYGSVLRVASAESLRMTRRGITEDGMGSGNYSMWRCDLPDSELVFGAAARERALQAKLQELTEIELEWNQANDHLQQIGRLLGAVDRLRVTGYGDGLQAIVETHQALARVEGLLQQLDLSEHQELEERLQALKAEQQELEKSKGQLHEKRGEIRTELESIDKQLKALSDLQEQNRERLDQCEAALQALAATWPEFDLEARLQLADEEAPDLDINTARNFRHELEKGLQYSQRKAEEEIKAHNQHCRPADTIIYPDFTGDYDAALFRAMCGLRREIDRVYNILKNNILVEKHQQLDELKGAFNNAFVTHLCHTIHQALNDGKRQVEQLNRELQHHRFGADRETFRFDSDWIPEYRDYARFFQEVVKNPQLGDEATLFEVELSAKSQKVLDELMGMLLDEDEQRAMRDLERIADYRNYRRYEIYKEVEGKPPIPLSEYGTGSGGQLETPAYIIRSAAITSAFRFAEGSTHLRMVLVDEAFSKMDETRSREVIDYLTGSLGLQLLFIMPTSKCGPYMDLISHEFVFAKVPSETLRGELRTRVLVDRKQCNQERIQALWANHRRNVYHQAELDFMQEFAASGE

SEQ ID NO: 34606 - protein, 488 aa, Nitrosomonas communis
MTLDYATFDLLRQNHPAWRLLRSDHAPLVASFLQRVFIVPNVRVMAQADLSEALEDELFALRERLGADAFPKAALEYLNDWASTEKGWLRKFYTSGSDEPHFDLTPASEKAIAWLATLIERSFVGTESRLLTLFELLKQMSEGSETDPQARIAELNKRRDEIDAEIARVQAGDISLLDNTALKERFQQFTQLARELLADFREVEHNFRSLDRRVRERIALWEGAKGALLEEIMGERDAIADSDQGRSFRAFWDFLMSSSRQEELTALLERVLSLPPVTELKPDVRTRRIHYDWLEAGEHTQRTVAQLSQQLRRFLDDQAWLENRRIMDILHGLEVKALALRESPPPGEIMDIIDMAATIELPMERPLYTVSAKTAIAEIELQAGDIEESEAGSMQALYSQVLIDKGRLTRHIRHALQDRSQITLGKLCELQPLQHGLAELVAYLELASNSFKTVVDEEVTETIVWPGTDTAGEEKIKQARVPRVIFVK

SEQ ID NO: 34607 - protein, 216 aa, Nitrosomonas communis
MTEPTIENTTTDYDLSALVIPLLKGVIYQENDAILWHALLQLQARVRDYVGVLGLELVLDEAEGYAFLRARKEEPDDDAAPKLPRLIARRPLSFPVSLLLALLRKKLAEFDAGGSDTRLMLNREEIVELMRVFLPERSNEARLIDQIETYINKIVELGFLRRLKPVTASPGKQAVVFEVKRILKAFVDAQWLANLDARLADYQAYLANEHGESSDG

SEQ ID NO: 34608 - protein, 1128 aa, Nitrosomonas communis
MAERQPLEFDFVADDTLSGFRLQRLEVFNWGTFDSRVWNLQLNGKNSLLTGDIGSGKSTLVDAITTLLVPAHRIAYNKAAGADNKERTLRSYVLGHYKSERSEMGVSAKPVALRDASNYSVILGVFHNVGYDQTITLAQVFWMKDGQGQPARFYVCAEHALSIITDFSQFGSDIAQLRKKLRAGNENRDVELFESFPPYGAWFRRRFGIENEQALELFHQTVSMKSIGNLTDFVRNHMLEPFDVAPRITALLSHFDDLSRAHEAVLKAKRQVELLTPLIANCEQHAALRAQIEERRACREALKPYFASLKLDLLENRLAALAIEWMNQDALVKRSEARRDTQRAEVDELNRSIADNGGERLERLALEIHQKEQERQLRERKAQRYAELVRTIDDMPAENEVDFLAQRQRLAALAETAQTRDVQLQNDLTEYGVSLRQSKQEHDALTAEIISLKARRSNVPAEQITLRTALCQALDLPEEKMPFAGELLQIRDDERDWEGAVERLLRNFGLSLLVPDEHYPAVVNWVDNTHLQGRLVYFRVRASARNKPPDLHRDSLARKLVIKPDSPFYDWLEREVSHRFDLACCTTQEQFRRETRAITRTGQIKAPGERHEKDDRHRLNDRSRYVLGWSNAAKIAVLETKAKKLERQLGELASLISKIQAEQSILKARLTALSKLDEYTDFGELDWQLVAVELAKLQDEKLKLELTSDVLKQLTERLNQAVAALQKTESQLEVHKDKRSKIEQKKSDTEVLRAQTQALVDDSAQATHAAYFELLDTMRSQALGEQPLTIESCDSRERDMRDWLQKQIDSKSSTLSSLAERIIKAMTSYKEEFKLETAEIDASIEAAFEYRNMLHHLQSDDLPRFEARFKELLNENTIREVANFHSQLVRERETIKERIAYINESLTDIDYNPGRYIILEAQSTLDADIRDFQNELRACTEGALTGSDDSQYSEAKFLQVRHIIERFRGRQGLAEQDRRWTAKVTDVRNWFLFAASERWREDDSEHEHYSDSGGKSGGQKEKLAYTILAASLAYQFGLEWGAVRSRSFRFVVIDEAFGRGSDESAQYGLRLFAQLNLQLLIVTPLQKIHIIEPFVSSVGFVHNEDGRTSKLRNLSIEAYQQEKARMTG

SEQ ID NO: 34609 - protein, 483 aa, Leptospira santarosai
MDYKLLQRLLRSSAIRLLRKDNAPFIIYFLEKYFRSSARTFVPFEELKILLRYELENLNDQEEISLQRSADVYLGEWIGENFLTRRIRSAEGIEEIILEPSVELEKVFSWMEDIRSLEDKDVIGTESRFFSVLNKLKEIVEESVSDPEEKIRQLESKRDELDLQIRKLKAGEQVSKFPSERIRSQYVYARKEALGLLSDFRQVEGNFMEITKMIHKKYLEVVQKGEILRFALDGNDELLRSEQGRSFQTFWDFLRSERSQEQFESILDSLYSLEDVLELDSRKFFRNFRRNLREAGSRVNGVVTRMSEQLKKSLVERTLRENRRSKELIAEIKNLVLENPLDFSQTDFYSLEEMDVRFPMERPLWRGDPEETFRTVRIENTDEDENVFDILESIRGIDLEMYEQRIQTLLRISPEVSLEKVLREYPDDVCFESLVAYVWIAGNGEFHSLDDSETFVYSVSIMDHPSEKLAYRIPKGTYRVGHL

SEQ ID NO: 34610 - protein, 189 aa, Leptospira santarosai
MNKPHIYAASILRLLKGSINSESDAKIWQNLLDNEKSVREHFEKLGIFLHLDREDGYAFLRQTSDDESAESDEKLPVITRKLPLTKEETLFLILLRECIIEIEEKDPSGSILFRKEELSDKVSPFFSDLSDEIDRQKRFEKLLRKSEELGFVKQIEPETIRIEKLLKAKLTVSELEGLRGKFRLGTEKR

SEQ ID NO: 34611 - protein, 1118 aa, Leptospira santarosai
MTDLFSPGEIAANTGYRLEFLEILNWGTFHGRIWKLRPEGENFLLTGANGSGKSTLVDAILTLLVPAAKRNYNLASGLESKKRDRSERSYVEGHYGRSSSGSEGILKIRGKQEECYSVLSAVFEANGRFPRIRIAQIFWFESGELKKIYLFSDKELDFEKDLVLGKRTVKELKADLKNSGARLYDQFKAYNVDFRKAVGLESEKAIDLFNQIVAIKSLGVLNEFVREHMLESRDKRSRIEELNRNFSDLSETYEAIVNAKEQLKLLEPIEKKAAEYREWNRKAADLQALIVYVPYYFAEKNYELRQIREQDYLFELSRLKDRSDELSTEIESLNQEERKLFNALENNDTQRRIADLVRKREGILSDLKTRGIERKKYSSYLSKIGLEETFSEETFYTNLRIAGGMLTETDSIWEEIRDRLGKLTLQKMELQKNFDSVRSELEYLKKKRDNLPRTQSEIRAKIASGIGLSEKRFPFICELIRVKESEKEWTGALERLLRNFGLRMLVAEEDYEAVSAYVNSSYLGGKLVFSRMVPLSGPILQPKDKEEVFYKLELKSELSNVKKEWLEAQILREFGHICGDLNRLRKEEKALTKEGLIKSGRIRHEKDDRKNISDARDYILGWNNTEKIAALESEFALLGQNIYRLNSAIDLVREEENKNKNKRDDLLLFLRFEQFSQIDDESLKGPLQDTERQIRELELRSEEYGKLKEQYELAKARLTDVQGRQRETAKEFNVLEDRLFTLRKDMEDLQQRIRKVDRETSISLEPILNERLRETILTLESIAETERNFSDRLVVERDQYLEKRDSIGEELNKGMDRYVKRFREEADREELSVSVSNAEGFAKLTERIRQDRLPEFQEKFRTMMSDKVAKQILDFKAELDDDVSEIKERIDELNDSLKDLDYSKGKSYIQIRYFDTKDREIVGDSGFKEMLRGSIPDLGDSSHNEEKFAKIRELLKKLKGEGGSDRWSRLVTDPRNWLDFQAAEFLRDNNQILQVYDSSAGKSGGQTVKLAYTILASAIAYQFKIRERNSFRFVVIDEMFNNLDGENSRYALNLFRQLGLQLLVVTPMDKITIVEPYVRSVHFVKNNSEGNDSRVYPISKENVSSGKDENSERKVGNL

SEQ ID NO: 34612 - protein, 392 aa, Leptospira santarosai
MISPEILRKRSLAYYHNELLRSIVLGGVLFPWEISIGKVLPEEILKNPSLLRELRAESKENKGFGFRIVFRSKETRKYGIQTIPTKIVFDTEDDFLRFTKKKDEFLSYSTDCTLILSVLPELKDWILKNTLSVIEESGKWESILSVCSYFLEYRNPGLYIRELPIRIPTKFIEENKKVLRSLLDFLLPEIADAKDFETRYGLKKAEPLVRFRILDLEIAKSSTGGLTDLSIPVRDFRKLELSGCGRVFILENKTNFANLFNFLSFPQLKGTISIFGQGFGLNVLKDCSWLEKMEIFYWGDLDVQGFEILSQLREQYPQSRSFLMDLKTFVRFRDFAVDGIPSSKSSEPKFLTPSERETWKYLSSLDSKNRLEQEKIPHEYVQEVLSGLGGSQ

SEQ ID NO: 34613 - protein, 483 aa, Leptospira santarosai
MDYKLLQRLLRSSAIRLLRKDNAPFIIYFLEKYFRSSARTFVPFEELKILLRYELENLNDQEEISLQRSADVYLGEWIGENFLTRRIRSAEGIEEIILEPSVELEKVFSWMEDIRSLEDKDVIGTESRFFSVLNKLKEIVEESVSDPEEKIRQLESKRDELDLQIRKLKAGEQVSKFPSERIRSQYVYARKEALGLLSDFRQVEGNFMEITKMIHKKYLEVVQKGEILRFALDGNDELLRSEQGRSFQTFWDFLRSERSQEQFESILDSLYSLEDVLDLDSRKFFRNFRRNLREAGSRVNGVVTRMSEQLKKSLVERTLRENRRSKELIAEIKNLVLENPLDFSQTDFYSLEEMDVRFPMERPLWRGDPEETFRTVRIENTDEDENVFDILESIRGIDLEMYEQRIQTLLRISPEVSLEKVLREYPDDVCFESLVAYVWIAGNGEFHSLDDSETFVYSVSIMDHPSEKLAYRIPKGTYRVGHL

SEQ ID NO: 34614 - protein, 189 aa, Leptospira santarosai
MNKPHIYAASILRLLKGSINSESDAKIWKNLLDNEKSVREHFEKLGIFLHLDREDGYAFLRQTSDDESAESDEKLPVITRKLPLTKEETLFLILLRECIIEIEEKDPSGSILFRKEELSDKVSPFFSDLSDEIDRQKRFEKLLRKSEELGFVKQIEPETIRIEKLLKAKLTVSELEGLRGKFRLGTEKR

SEQ ID NO: 34615 - protein, 1118 aa, Leptospira santarosai
MTDLFSPGEIAANTGYRLEFLEILNWGTFHGRIWKLRPEGENFLLTGANGSGKSTLVDAILTLLVPAAKRNYNLASGLESKKRDRSERSYVEGHYGRSSSGSEGILKIRGKQEECYSVLSAVFEANGRFPRIRIAQIFWFESGELKKIYLFSDKELDFEKDLVLGKRTVKELKADLKNSGARLYDQFKAYNVDFRKAVGLESEKAIDLFNQIVAIKSLGVLNEFVREHMLESRDKRSRIEELNRNFSDLSETYEAIVNAKEQLKLLEPIEKKAAEYREWNRKAADLQALIVYVPYYFAEKNYELRQIREQDYLFELSRLKDRSDELSTEIESLNQEERKLFNALENNDTQRRIADLVRKREGILSDLKTRGIERKKYSSYLSKIGLEETFSEETFYTNLRIAGGMLTETDSIWEEIRDRLGKLTLQKMELQKNFDSVRSELEYLKKKRDNLPRTQSEIRAKIASGIGLSEKRFPFICELIRVKESEKEWTGALERLLRNFGLRMLVAEEDYEAVSAYVNSSYLGGKLVFSRMVPLSGPILQPKDKEEVFYKLELKSELSNVKKEWLEAQILREFGHICGDLNRLRKEEKALTKEGLIKSGRIRHEKDDRKNISDARDYILGWNNTEKIAALESEFALLGQNIYRLNSAIDLVREEENKNKNKRDDLLLFLRFEQFSQIDDESLKGPLQDTERQIRELELRSEEYGKLKEQYELAKARLTDVQWRQRETAKEFNVLEDRLSTLRKDMEDLRQRIRKVDRETSISLEPILNERLRETILTLESIAETERNFSDRLVVERDQYLEKRDSIGEELNKGMDRYVKRFREEADREELSVSVSNAEGFAKLTERIRQDRLPEFQEKFRTMMSDKVAKQILDFKAELDDDVSEIKERIDELNDSLKDLDYSKGKSYIQIRYFDTKDREIVGDSGFKEMLRGSIPDLGDSSHNEEKFAKIRELLKKLKGEGGSDRWSRLVTDPRNWLDFQAAEFLRDNNQILQVYDSSAGKSGGQTVKLAYTILASAIAYQFKIRERNSFRFVVIDEMFNNLDGENSRYALNLFRQLGLQLLVVTPMDKITIVEPYVRSVHFVKNNSEGNDSRVYPISKENVSSGKDENSERKVGNL

SEQ ID NO: 34616 - protein, 392 aa, Leptospira santarosai; identical to SEQ ID NO: 31652

SEQ ID NO: 34617 - protein, 489 aa, Xanthomonas euvesicatoria; identical to SEQ ID NO: 30424

SEQ ID NO: 34618 - protein, 233 aa, Xanthomonas euvesicatoria; identical to SEQ ID NO: 30425

SEQ ID NO: 34619 - protein, 1351 aa, Xanthomonas euvesicatoria; identical to SEQ ID NO: 30426

SEQ ID NO: 34620 - protein, 489 aa, Xanthomonas euvesicatoria; identical to SEQ ID NO: 30424

SEQ ID NO: 34621 - protein, 233 aa, Xanthomonas euvesicatoria; identical to SEQ ID NO: 30425

SEQ ID NO: 34622 - protein, 1351 aa, Xanthomonas euvesicatoria; identical to SEQ ID NO: 30426

SEQ ID NO: 34623 - protein, 489 aa, Xanthomonas euvesicatoria; identical to SEQ ID NO: 30424

SEQ ID NO: 34624 - protein, 233 aa, Xanthomonas euvesicatoria; identical to SEQ ID NO: 30425

SEQ ID NO: 34625 - protein, 1351 aa, Xanthomonas euvesicatoria; identical to SEQ ID NO: 30426

SEQ ID NO: 34626 - protein, 489 aa, Xanthomonas euvesicatoria; identical to SEQ ID NO: 30424

SEQ ID NO: 34627 - protein, 233 aa, Xanthomonas euvesicatoria; identical to SEQ ID NO: 30425

SEQ ID NO: 34628 - protein, 1351 aa, Xanthomonas euvesicatoria; identical to SEQ ID NO: 30426

SEQ ID NO: 34629 - protein, 489 aa, Xanthomonas euvesicatoria; identical to SEQ ID NO: 30424

SEQ ID NO: 34630 - protein, 233 aa, Xanthomonas euvesicatoria; identical to SEQ ID NO: 30425

SEQ ID NO: 34631 - protein, 1351 aa, Xanthomonas euvesicatoria; identical to SEQ ID NO: 30426

SEQ ID NO: 34632 - protein, 489 aa, Xanthomonas euvesicatoria; identical to SEQ ID NO: 30424

SEQ ID NO: 34633 - protein, 233 aa, Xanthomonas euvesicatoria; identical to SEQ ID NO: 30425

SEQ ID NO: 34634 - protein, 1351 aa, Xanthomonas euvesicatoria; identical to SEQ ID NO: 30426

SEQ ID NO: 34635 - protein, 489 aa, Xanthomonas euvesicatoria; identical to SEQ ID NO: 30424

SEQ ID NO: 34636 - protein, 233 aa, Xanthomonas euvesicatoria; identical to SEQ ID NO: 30425

SEQ ID NO: 34637 - protein, 1351 aa, Xanthomonas euvesicatoria; identical to SEQ ID NO: 30426

SEQ ID NO: 34638 - protein, 489 aa, Xanthomonas euvesicatoria; identical to SEQ ID NO: 30424

SEQ ID NO: 34639 - protein, 233 aa, Xanthomonas euvesicatoria; identical to SEQ ID NO: 30425

SEQ ID NO: 34640 - protein, 1351 aa, Xanthomonas euvesicatoria; identical to SEQ ID NO: 30426

SEQ ID NO: 34641 - protein, 489 aa, Xanthomonas euvesicatoria; identical to SEQ ID NO: 30424

SEQ ID NO: 34642 - protein, 233 aa, Xanthomonas euvesicatoria; identical to SEQ ID NO: 30425

SEQ ID NO: 34643 - protein, 1351 aa, Xanthomonas euvesicatoria; identical to SEQ ID NO: 30426

SEQ ID NO: 34644 - protein, 489 aa, Xanthomonas euvesicatoria; identical to SEQ ID NO: 30424

SEQ ID NO: 34645 - protein, 233 aa, Xanthomonas euvesicatoria; identical to SEQ ID NO: 30425

SEQ ID NO: 34646 - protein, 1351 aa, Xanthomonas euvesicatoria
MNSQSNLSPAQPGASLFAETLAEQRAQQFRMRRLQVHNWGTFNGLTEVPIAEKGFLFVGRSGSGKSTLLDAMSALLTPPSIVDFNAAAREAERSGRDRSLVSYVRGAWADQQDSASGEIATQYLRKGATWTALVLEYANAHGEAVSLIRLFWIAGSGNAAADVRRHYMVAPRRFDVATELDGFDLDLRKLKARLGEDVAHFDGFAGYAERFRHALGIGNEMALRLLHKTQSAKNLGDLNAFLRGFMLDEPRTFEAADRLVEDFAELDGAHHAVVTARRQVETLTPAREHHAALMALRHSVGELRELQLGVDSYREQQRLALLEERLQELDNQDRGLAGEEGQRRESLDNHEQKLVGLEREQRAAGGEQIEELERERARVERERDERLRRRAQIEQACRQLGTALAAGASGFAAQIAHAQTVLDNGKHDASALDEAIAERMGARRDDERRFAEIRAELEALKRAPSSMPAPMQALRARFCEDTGIAEAALPFVGELVQVREDQTAWRGAIERVLHGFVQSLLVDERHYAQVSEWVNRTHIGTRLVYFRVRRNDELHSRRVDPGALPGKLQLREHAFTEWLRNELTRRFDYACVDNAAALRNADRAITREGQVKHPGDRYEKDDRHAVNDRKRWLLGHDNRDKLKVFEREAQALAQRIASCDADVAALRKQREQDQERQLAAHTLVERDWDEIDVGPKLQRLSDIDEQLVQLREGNSGLRALGQAIDTARTLRDQAKRTYEDVRLERAQLARERVRLEQQHAACAGRAGSATLTPTQLQGLRERLAALTPLSLDNLEAHFRVVERGLAEQLADSQGRDSRLSAQLLECFRKYCQQWPEDSGDFTVSLASADDFLARLDRLESDGLPRHEHRFFDLLQTQSKNNLLALQRYTAEAHKGIKQRMDEVNASLEQVPFNRDTVLTIEVGDRRLAEVQEFQQQLRAVLSHQQTEDRALAEAQFSTLRALVARLGAQEPEARRWREQVLDVRLHVEFIGVELDAQTRAQVEIYRSGAGKSGGQRQKLATTCLAAALRYQLGGEDGELPRYCAVVLDEAFDKADNEFTALAMNIFENFGFQMVVATPLKSVMTLEPFIGGACFVEISGRHNSGVLLIEYDEQAQRLKLPERSRGDEAAVADATDAASAIEAASEPVGVQGAANADGITADGLPLHIALPVPGDTSPAAQNTHSSKRKPAAATATANKQNKNKQNKNAKTTSPTRAAAQPHAKQPKKSPSRTPAVAGKPVADKRTSGAQQAPAVSSGAASRSNVGKTTRSSKAQGKPIVAANASNATSSKVAAASAPVKNTAAAKPRATAASTGQPARGAGKTTSARAVAEPSPATTRVARAGAPKARGKR

SEQ ID NO: 34647 - protein, 489 aa, Xanthomonas euvesicatoria; identical to SEQ ID NO: 30424

SEQ ID NO: 34648 - protein, 233 aa, Xanthomonas euvesicatoria; identical to SEQ ID NO: 30425

SEQ ID NO: 34649 - protein, 1351 aa, Xanthomonas euvesicatoria; identical to SEQ ID NO: 30426

SEQ ID NO: 34650 - protein, 489 aa, Xanthomonas euvesicatoria; identical to SEQ ID NO: 30424

SEQ ID NO: 34651 - protein, 233 aa, Xanthomonas euvesicatoria; identical to SEQ ID NO: 30425

SEQ ID NO: 34652 - protein, 1351 aa, Xanthomonas euvesicatoria; identical to SEQ ID NO: 30426

SEQ ID NO: 34653 - protein, 489 aa, Xanthomonas euvesicatoria; identical to SEQ ID NO: 30424

SEQ ID NO: 34654 - protein, 233 aa, Xanthomonas euvesicatoria; identical to SEQ ID NO: 30425

SEQ ID NO: 34655 - protein, 1351 aa, Xanthomonas euvesicatoria; identical to SEQ ID NO: 30426

SEQ ID NO: 34656 - protein, 489 aa, Xanthomonas euvesicatoria; identical to SEQ ID NO: 30424

SEQ ID NO: 34657 - protein, 233 aa, Xanthomonas euvesicatoria; identical to SEQ ID NO: 30425

SEQ ID NO: 34658 - protein, 1351 aa, Xanthomonas euvesicatoria; identical to SEQ ID NO: 30426

SEQ ID NO: 34659 - protein, 489 aa, Xanthomonas euvesicatoria; identical to SEQ ID NO: 30424

SEQ ID NO: 34660 - protein, 233 aa, Xanthomonas euvesicatoria; identical to SEQ ID NO: 30425

SEQ ID NO: 34661 - protein, 1351 aa, Xanthomonas euvesicatoria; identical to SEQ ID NO: 30426

SEQ ID NO: 34662 - protein, 489 aa, Xanthomonas euvesicatoria; identical to SEQ ID NO: 30424

SEQ ID NO: 34663 - protein, 233 aa, Xanthomonas euvesicatoria; identical to SEQ ID NO: 30425

SEQ ID NO: 34664 - protein, 1351 aa, Xanthomonas euvesicatoria; identical to SEQ ID NO: 30426

SEQ ID NO: 34665 - protein, 489 aa, Xanthomonas euvesicatoria; identical to SEQ ID NO: 30424

SEQ ID NO: 34666 - protein, 233 aa, Xanthomonas euvesicatoria; identical to SEQ ID NO: 30425

SEQ ID NO: 34667 - protein, 1351 aa, Xanthomonas euvesicatoria; identical to SEQ ID NO: 30426

SEQ ID NO: 34668 - protein, 489 aa, Xanthomonas euvesicatoria; identical to SEQ ID NO: 30424

SEQ ID NO: 34669 - protein, 233 aa, Xanthomonas euvesicatoria; identical to SEQ ID NO: 30425

SEQ ID NO: 34670 - protein, 1351 aa, Xanthomonas euvesicatoria; identical to SEQ ID NO: 30426

SEQ ID NO: 34671 - protein, 489 aa, Xanthomonas euvesicatoria; identical to SEQ ID NO: 30424

SEQ ID NO: 34672 - protein, 233 aa, Xanthomonas euvesicatoria; identical to SEQ ID NO: 30425

SEQ ID NO: 34673 - protein, 1351 aa, Xanthomonas euvesicatoria; identical to SEQ ID NO: 30426

SEQ ID NO: 34674 - protein, 489 aa, Xanthomonas euvesicatoria; identical to SEQ ID NO: 30424

SEQ ID NO: 34675 - protein, 233 aa, Xanthomonas euvesicatoria; identical to SEQ ID NO: 30425

SEQ ID NO: 34676 - protein, 1351 aa, Xanthomonas euvesicatoria; identical to SEQ ID NO: 30426

SEQ ID NO: 34677 - protein, 489 aa, Xanthomonas euvesicatoria; identical to SEQ ID NO: 30424

SEQ ID NO: 34678 - protein, 233 aa, Xanthomonas euvesicatoria; identical to SEQ ID NO: 30425

SEQ ID NO: 34679 - protein, 1351 aa, Xanthomonas euvesicatoria; identical to SEQ ID NO: 30426

SEQ ID NO: 34680 - protein, 489 aa, Xanthomonas euvesicatoria; identical to SEQ ID NO: 30424

SEQ ID NO: 34681 - protein, 233 aa, Xanthomonas euvesicatoria; identical to SEQ ID NO: 30425

SEQ ID NO: 34682 - protein, 1351 aa, Xanthomonas euvesicatoria; identical to SEQ ID NO: 30426

SEQ ID NO: 34683 - protein, 489 aa, Xanthomonas euvesicatoria; identical to SEQ ID NO: 30424

SEQ ID NO: 34684 - protein, 233 aa, Xanthomonas euvesicatoria; identical to SEQ ID NO: 30425

SEQ ID NO: 34685 - protein, 1351 aa, Xanthomonas euvesicatoria; identical to SEQ ID NO: 30426

SEQ ID NO: 34686 - protein, 489 aa, Xanthomonas euvesicatoria; identical to SEQ ID NO: 30424

SEQ ID NO: 34687 - protein, 233 aa, Xanthomonas euvesicatoria; identical to SEQ ID NO: 30425

SEQ ID NO: 34688 - protein, 1351 aa, Xanthomonas euvesicatoria; identical to SEQ ID NO: 30426

SEQ ID NO: 34689 - protein, 489 aa, Xanthomonas gardneri; identical to SEQ ID NO: 31208

SEQ ID NO: 34690 - protein, 234 aa, Xanthomonas gardneri; identical to SEQ ID NO: 31209

SEQ ID NO: 34691 - protein, 393 aa, Xanthomonas gardneri; identical to SEQ ID NO: 31211

SEQ ID NO: 34692 - protein, 496 aa, Xanthomonas gardneri
MHRSSVDRTQSYILARHQHPAWQLLAGRRAPLVLGCLQALFEAGQDGVDDDDAQQALATLLREHAGRSEFEIEGDVEALARKELRTWIRCALIVEREGRVYATDALELALRFVDGLENRVMTSTASRLAIVQREIERLEARLNPDPKSRVEHLRAQIAGLQRELEDAEDGRVETADAHEAAEGARELYALATSLRADFRRVEDSWRNADLRLRHAIVSERQHRGAIVDALLNGHDELLETPEGRVFQAFHQQLQQEVELEAMKHRLQAILRHPQALSALSALQQADMRWLVTRLVKEAGAVIRARSRSERDVRSFLRTNLAAEHHRVGQLLSEALAQAQRIDWQAAVRRGPSPFPPVAAPCGGLPLVDRLRFKSADHEALRELDLKRQSGNIEAIADDFWSSLDGLDRDALVRDTVAILQTSDRHLSLAALAERIPLTHDLESLALWVGMAREVGAPVGDDFEHLNLTTRDEKNLRFTVPKIELDPAAFAAFDWEP

SEQ ID NO: 34693 - protein, 234 aa, Xanthomonas gardneri; identical to SEQ ID NO: 31206

SEQ ID NO: 34694 - protein, 1103 aa, Xanthomonas gardneri
MSTLAAPSLGSLVLTHLDIYDWGAFGGRHSVPIDVAGTAIIGPTGSGKTTLVDALMTLLVAVPRYNLASTGGHDSDRDLVSYVRGVSGAGIGGDTTDNISRPGSVVTAVSARFSDGDAVVRIGGVFWFDGSSSATTDLKRRWIFCLGDSTSLDDWLEAHRENGARALKELERVHAGFKLYESKQTFLARLRNHFEVTENAFALLNRAAGLKQIDSIDKVFRELVLDDRSAFETAKSVVDEFATLAGIRQELETARRQRESLVPIDKSWGQHVDISVKLDERKRLISLLPIWFAERVMGLWHVQRERAEAELLKRQSESDELKGQLSAAEAAEEACHATYLLEGGQDIENLSKHIDLQRTTRDQRRRDANAYQIMARALGLPSALTAADVAANRASVGPRRAEEQQRHQEQKRAAWDMGAQHASQLADRERVGQELAAAKRRPKSNIPDAQSTFRDRLAQHLRLDAEALPFVAELIEVQSPQHAWRGAIERAIGSERLRILIAPENLDEALKWVNGRDTGLHVRLRKASIPDGQARFFDDGFTRKLNFKPHAHREALKHLLGDIDRHCVPDVDTLNRTPHAMTAEGLMSGRAGFFDKHDQRPLHADWMTGFDNRDLVAQLTRDLAAAIDLHQASQEALKLAEALAEATERVLGFLKSLEETSFETINVVSAENALVQLETQFATLTNPESDAQVAAKRWRAAQEATRDVRQAQTNLEVAISKVQDTIDRAHRAPQKNRLRIGEGLMDDERSWVDQNIDLPSFTDPALLADVERTARERIESERDSFANRLRGIEQQLIRDMGKAKLVDTGALTEAATELHDVPTYRERLRILDEEALPEKIHRFQQYLNQSSDQGVTQLLSDIANEVSGIEERIADLNATLKRVDFQPGRYLHLEPQRVEHESLRALRLAQTHLRSAQLKDDGGESHYQALTHVVKLLQEAADRRKLQGSLALLDPRYRLQFAVWVIARDDGRIIEKRTSSQGGSGGEKEIIASYVLTASLSYALCSPNRQHPLFGTVVLDEAFSKSSHAVAGRIIRALAEFGLHPLFVTPNEELRLLRDHTRSAIVVHRRGTQATVTSLTWEELEHHARERRKRTEMTVEIAE

SEQ ID NO: 34695 - protein, 383 aa, Xanthomonas gardneri
MKSPSEAARLLARHWQDAGKRERQLLQPDAWPMLVPIGRPTATEFTNETSRVRAHMEDWRAVTVGEVVAEPVRFRSGAEPVMVPTHWSLASAAEWADASNDIAIQGEQAELSQLLEAIPPIFHRLLVRQRGLWRTRSREEVVQATALALGLEPGMAAGRPMRSIAVAGIDSKFMERHGALVTALLDVRFEGQASKQGIVRFLDAADEGEHWLLVAPLSQGLLPFARQRVRARELVEVPLPAGRILVVENDRCLHLLPPMPDTIAVLGAGLNLAWLSAPWLRERDIGYWGDLDTWGLQMLAQARRLQPKVEAILMNHAVFEAHGSNSAVCEDTPALPEPPDGLNQEEQALYCHLRGLFKGRLEQEFLPAAEVANALTKWGYSNG

SEQ ID NO: 34696 - protein, 489 aa, Xanthomonas gardneri; identical to SEQ ID NO: 31208

SEQ ID NO: 34697 - protein, 234 aa, Xanthomonas gardneri; identical to SEQ ID NO: 31209

SEQ ID NO: 34698 - protein, 393 aa, Xanthomonas gardneri; identical to SEQ ID NO: 31211

SEQ ID NO: 34699 - protein, 496 aa, Xanthomonas gardneri; identical to SEQ ID NO: 34692

SEQ ID NO: 34700 - protein, 234 aa, Xanthomonas gardneri; identical to SEQ ID NO: 31206

SEQ ID NO: 34701 - protein, 1103 aa, Xanthomonas gardneri; identical to SEQ ID NO: 34694

SEQ ID NO: 34702 - protein, 383 aa, Xanthomonas gardneri; identical to SEQ ID NO: 34695

SEQ ID NO: 34703 - protein, 489 aa, Xanthomonas gardneri; identical to SEQ ID NO: 31208

SEQ ID NO: 34704 - protein, 234 aa, Xanthomonas gardneri; identical to SEQ ID NO: 31209

SEQ ID NO: 34705 - protein, 393 aa, Xanthomonas gardneri; identical to SEQ ID NO: 31211

SEQ ID NO: 34706 - protein, 496 aa, Xanthomonas gardneri; identical to SEQ ID NO: 34692

SEQ ID NO: 34707 - protein, 234 aa, Xanthomonas gardneri; identical to SEQ ID NO: 31206

SEQ ID NO: 34708 - protein, 1103 aa, Xanthomonas gardneri; identical to SEQ ID NO: 34694

SEQ ID NO: 34709 - protein, 356 aa, Xanthomonas gardneri
MKSPSEAARLLARHWQDAGKRERQLLQPDAWPMLVPIGRPTATEFTNETSRVRAHMEDWRAVTVGEVVAEPVRFRSGAEPVMVPTHWSLASAAEWADASNDIAIQGEQAELSQLLEAIPPIFHRLLVRQRGLWRTRSREEVVQATALALGLEPGMAAGRPMRSIAVAGIDSKFMERHGALVTALLDVRFEGQASKQGIVRFLDAADEGEHWLLVAPLSQGLLPFARQRVRARELVEVPLPAGRILVVENDRCLHLLPPMPDTIAVLGAGLNLAWLSAPWLRERDIGYWGDLDTWGLQMLAQARRLQPKVEAILMNHAVFEAHGSNSAVCEDTPALPEPPDGLNQEEQALYCHLRGL

SEQ ID NO: 34710 - protein, 489 aa, Xanthomonas gardneri; identical to SEQ ID NO: 31208

SEQ ID NO: 34711 - protein, 234 aa, Xanthomonas gardneri; identical to SEQ ID NO: 31209

SEQ ID NO: 34712 - protein, 393 aa, Xanthomonas gardneri; identical to SEQ ID NO: 31211

SEQ ID NO: 34713 - protein, 496 aa, Xanthomonas gardneri; identical to SEQ ID NO: 34692

SEQ ID NO: 34714 - protein, 234 aa, Xanthomonas gardneri; identical to SEQ ID NO: 31206

SEQ ID NO: 34715 - protein, 1103 aa, Xanthomonas gardneri; identical to SEQ ID NO: 34694

SEQ ID NO: 34716 - protein, 383 aa, Xanthomonas gardneri; identical to SEQ ID NO: 34695

SEQ ID NO: 34717 - protein, 489 aa, Xanthomonas perforans; identical to SEQ ID NO: 31202

SEQ ID NO: 34718 - protein, 233 aa, Xanthomonas perforans; identical to SEQ ID NO: 30425

SEQ ID NO: 34719 - protein, 1353 aa, Xanthomonas perforans
MNSQSNLSPAQPGASLFAETLAEQRAQQFRMRRLQVHNWGTFNGLTEVPIAEKGFLFVGRSGSGKSTLLDAMSALLTPPSIVDFNAAAREAERSGRDRSLVSYVRGAWADQQDSASGEIATQYLRKGATWTALVLEYANAHGEAVSLIRLFWIAGSGNAAADVRRHYMVAPRRFDVATELDGFDLDLRKLKARLGEDVAHFDGFAGYAERFRHALGIGNEMALRLLHKTQSAKNLGDLNAFLRGFMLDEPRTFEAADRLVEDFAELDGAHHAVVTARRQVETLTPAREHHAALMALRHSVGELRELQLGVDSYREQQRLALLEERLQELDNQDRGLAGEEGQRRESLDNHEQKLVGLEREQRAAGGEQIEELERERARVERERDERLRRRAQIEQACRQLGTALAAGASGFAAQIAHAQTVLDNGKHDASALDEAIAERMGARRDDERRFAEIRAELEALKRAPSSMPAPMQALRARLCEDTGIAEAALPFVGELVQVREDQTAWRGAIERVLHGFAQSLLVDERHYAQVSEWVNRTHIGTRLVYFRVRRNDELHSRRVDPGALPGKLQLREHAFTEWLRNELTRRFDYACVDNAGALRNADRAITREGQVKHPGDRYEKDDRHAVNDRKRWLLGHDNRDKLKVFEREAQALAQRIASCDADVAALRKQREQDQERQLAAHTLVERDWDEIDVGPKLQRLSDIDEQLVQLREGNSGLRALGQAIDTARTLRDQAKRTYEDVRLERAQLARERVRLEQQHAACAGRAGSATLTPTQLQGLRERLAALTPLSLDNLEAHLRVVERGLAEQLADSQGRDSRLSAQLLECFRKYCQQWPEDSGDFTVSLASADDFLARLDRLESDGLPRHEHRFFDLLQTQSKNNLLALQRYTAEAHKGIKQRMDEVNASLEQVPFNRDTVLTIEVGDRRLAEVQEFQQQLRAVLSHQQTEDRALAEAQFSTLRALVARLGAQEPEARRWREQVLDVRLHVEFIGVELDAQTRAQVEIYRSGAGKSGGQRQKLATTCLAAALRYQLGGEDGELPRYCAVVLDEAFDKADNEFTALAMNIFENFGFQMVVATPLKSVMTLEPFIGGACFVEISGRHNSGVLLIEYDEQAQRLKLPERSRGDEAAVADATDAASAIEAASEPVGVQGAANADGITADGLPLHIALPVPGDTSPAAQNTHSSKRKPAAATATATANKQNKNKQNKNAKTTSPTRAAAQPHAKQPKKSPSRTPAVAGKPVADKRTSGAQQAPAVSSGAASRSNVGKTTRSSKAQGKPIVAANASNATSSKVAAASAPVKNTAAAKPRATAASTGQPARGAGKTTSARAVAEPSPATTRVARAGAPKARGKR

SEQ ID NO: 34720 - protein, 489 aa, Xanthomonas perforans; identical to SEQ ID NO: 31202

SEQ ID NO: 34721 - protein, 233 aa, Xanthomonas perforans; identical to SEQ ID NO: 30425

SEQ ID NO: 34722 - protein, 1353 aa, Xanthomonas perforans; identical to SEQ ID NO: 34719

SEQ ID NO: 34723 - protein, 489 aa, Xanthomonas perforans; identical to SEQ ID NO: 31202

SEQ ID NO: 34724 - protein, 233 aa, Xanthomonas perforans; identical to SEQ ID NO: 30425

SEQ ID NO: 34725 - protein, 1353 aa, Xanthomonas perforans; identical to SEQ ID NO: 34719

SEQ ID NO: 34726 - protein, 489 aa, Xanthomonas perforans; identical to SEQ ID NO: 31202

SEQ ID NO: 34727 - protein, 233 aa, Xanthomonas perforans; identical to SEQ ID NO: 30425

SEQ ID NO: 34728 - protein, 1353 aa, Xanthomonas perforans; identical to SEQ ID NO: 34719

SEQ ID NO: 34729 - protein, 489 aa, Xanthomonas perforans; identical to SEQ ID NO: 31202

SEQ ID NO: 34730 - protein, 233 aa, Xanthomonas perforans; identical to SEQ ID NO: 30425

SEQ ID NO: 34731 - protein, 1353 aa, Xanthomonas perforans; identical to SEQ ID NO: 34719

SEQ ID NO: 34732 - protein, 489 aa, Xanthomonas perforans; identical to SEQ ID NO: 31202

SEQ ID NO: 34733 - protein, 233 aa, Xanthomonas perforans; identical to SEQ ID NO: 30425

SEQ ID NO: 34734 - protein, 1353 aa, Xanthomonas perforans; identical to SEQ ID NO: 34719

SEQ ID NO: 34735 - protein, 489 aa, Xanthomonas perforans; identical to SEQ ID NO: 31202

SEQ ID NO: 34736 - protein, 233 aa, Xanthomonas perforans; identical to SEQ ID NO: 30425

SEQ ID NO: 34737 - protein, 1353 aa, Xanthomonas perforans; identical to SEQ ID NO: 34719

SEQ ID NO: 34738 - protein, 489 aa, Xanthomonas perforans
MKHQARIAGYRQLREQPVWKLLAADHAPELIGLLQTVLMDGERRLPSAVLHERLQRQLDALRADELSRELPRTAQAYLAHWLAQGWLERRLPEGAAEEEYELSRAATQAIRFIAGLRESSSSATESRLSLVIQQLVQLAGQTEADPELRLAALRDERARIDAEIERVASGRVAALDGKRALERARDLIHLSDELAEDFHRVRDDFEQLNRQFRERIIDDEGARGDVLEQLFNGVDVIADSEAGRTFEAFWSLLNDTQQSSQLDQALDALLARGFARKLDRRERAFLRGLTGTLLERGGEVHTVMQHFARSLRGFVQSRGYLEQRRLNQLLKQAQGEALQLRDSLHATTATGYTQALSSSRLRSLSQWRLHDPRLTQVDGRVQAADAAEISLDSVGDLVAQSEIDVRSLRNDLHELLGQRPRLTIGDALQQRPAVQGLGSVIGYLSLGTRHGMVIEGQMETVQWEGSDGAVRRARIPLVWFTREKRNELV

SEQ ID NO: 34739 - protein, 233 aa, Xanthomonas perforans; identical to SEQ ID NO: 30425

SEQ ID NO: 34740 - protein, 1351 aa, Xanthomonas perforans; identical to SEQ ID NO: 30426

SEQ ID NO: 34741 - protein, 489 aa, Xanthomonas gardneri; identical to SEQ ID NO: 31208

SEQ ID NO: 34742 - protein, 234 aa, Xanthomonas gardneri; identical to SEQ ID NO: 31209

SEQ ID NO: 34743 - protein, 393 aa, Xanthomonas gardneri; identical to SEQ ID NO: 31211

SEQ ID NO: 34744 - protein, 496 aa, Xanthomonas gardneri; identical to SEQ ID NO: 34692

SEQ ID NO: 34745 - protein, 234 aa, Xanthomonas gardneri; identical to SEQ ID NO: 31206

SEQ ID NO: 34746 - protein, 1103 aa, Xanthomonas gardneri; identical to SEQ ID NO: 34694

SEQ ID NO: 34747 - protein, 383 aa, Xanthomonas gardneri; identical to SEQ ID NO: 34695

SEQ ID NO: 34748 - protein, 496 aa, Xanthomonas gardneri; identical to SEQ ID NO: 34692

SEQ ID NO: 34749 - protein, 234 aa, Xanthomonas gardneri; identical to SEQ ID NO: 31206

SEQ ID NO: 34750 - protein, 1103 aa, Xanthomonas gardneri; identical to SEQ ID NO: 34694

SEQ ID NO: 34751 - protein, 383 aa, Xanthomonas gardneri; identical to SEQ ID NO: 34695

SEQ ID NO: 34752 - protein, 489 aa, Xanthomonas gardneri; identical to SEQ ID NO: 31208

SEQ ID NO: 34753 - protein, 234 aa, Xanthomonas gardneri; identical to SEQ ID NO: 31209

SEQ ID NO: 34754 - protein, 393 aa, Xanthomonas gardneri; identical to SEQ ID NO: 31211

SEQ ID NO: 34755 - protein, 489 aa, Xanthomonas perforans; identical to SEQ ID NO: 34738

SEQ ID NO: 34756 - protein, 233 aa, Xanthomonas perforans; identical to SEQ ID NO: 30425

SEQ ID NO: 34757 - protein, 1351 aa, Xanthomonas perforans; identical to SEQ ID NO: 30426

SEQ ID NO: 34758 - protein, 489 aa, Xanthomonas gardneri; identical to SEQ ID NO: 31208

SEQ ID NO: 34759 - protein, 234 aa, Xanthomonas gardneri; identical to SEQ ID NO: 31209

SEQ ID NO: 34760 - protein, 393 aa, Xanthomonas gardneri; identical to SEQ ID NO: 31211

SEQ ID NO: 34761 - protein, 496 aa, Xanthomonas gardneri; identical to SEQ ID NO: 34692

SEQ ID NO: 34762 - protein, 234 aa, Xanthomonas gardneri; identical to SEQ ID NO: 31206

SEQ ID NO: 34763 - protein, 1103 aa, Xanthomonas gardneri; identical to SEQ ID NO: 34694

SEQ ID NO: 34764 - protein, 383 aa, Xanthomonas gardneri; identical to SEQ ID NO: 34695

SEQ ID NO: 34765 - protein, 496 aa, Xanthomonas gardneri; identical to SEQ ID NO: 34692

SEQ ID NO: 34766 - protein, 234 aa, Xanthomonas gardneri; identical to SEQ ID NO: 31206

SEQ ID NO: 34767 - protein, 1103 aa, Xanthomonas gardneri; identical to SEQ ID NO: 34694

SEQ ID NO: 34768 - protein, 383 aa, Xanthomonas gardneri; identical to SEQ ID NO: 34695

SEQ ID NO: 34769 - protein, 489 aa, Xanthomonas gardneri; identical to SEQ ID NO: 31208

SEQ ID NO: 34770 - protein, 234 aa, Xanthomonas gardneri; identical to SEQ ID NO: 31209

SEQ ID NO: 34771 - protein, 393 aa, Xanthomonas gardneri; identical to SEQ ID NO: 31211

SEQ ID NO: 34772 - protein, 489 aa, Xanthomonas gardneri; identical to SEQ ID NO: 31208

SEQ ID NO: 34773 - protein, 234 aa, Xanthomonas gardneri; identical to SEQ ID NO: 31209

SEQ ID NO: 34774 - protein, 393 aa, Xanthomonas gardneri; identical to SEQ ID NO: 31211

SEQ ID NO: 34775 - protein, 496 aa, Xanthomonas gardneri; identical to SEQ ID NO: 34692

SEQ ID NO: 34776 - protein, 234 aa, Xanthomonas gardneri; identical to SEQ ID NO: 31206

SEQ ID NO: 34777 - protein, 1103 aa, Xanthomonas gardneri; identical to SEQ ID NO: 34694

SEQ ID NO: 34778 - protein, 383 aa, Xanthomonas gardneri; identical to SEQ ID NO: 34695

SEQ ID NO: 34779 - protein, 489 aa, Xanthomonas gardneri; identical to SEQ ID NO: 31208

SEQ ID NO: 34780 - protein, 234 aa, Xanthomonas gardneri; identical to SEQ ID NO: 31209

SEQ ID NO: 34781 - protein, 393 aa, Xanthomonas gardneri; identical to SEQ ID NO: 31211

SEQ ID NO: 34782 - protein, 496 aa, Xanthomonas gardneri; identical to SEQ ID NO: 34692

SEQ ID NO: 34783 - protein, 234 aa, Xanthomonas gardneri; identical to SEQ ID NO: 31206

SEQ ID NO: 34784 - protein, 1103 aa, Xanthomonas gardneri; identical to SEQ ID NO: 34694

SEQ ID NO: 34785 - protein, 383 aa, Xanthomonas gardneri; identical to SEQ ID NO: 34695

SEQ ID NO: 34786 - protein, 489 aa, Xanthomonas perforans; identical to SEQ ID NO: 31202

SEQ ID NO: 34787 - protein, 233 aa, Xanthomonas perforans; identical to SEQ ID NO: 30425

SEQ ID NO: 34788 - protein, 1353 aa, Xanthomonas perforans; identical to SEQ ID NO: 34719

SEQ ID NO: 34789 - protein, 489 aa, Xanthomonas perforans; identical to SEQ ID NO: 31202

SEQ ID NO: 34790 - protein, 233 aa, Xanthomonas perforans; identical to SEQ ID NO: 30425

SEQ ID NO: 34791 - protein, 1353 aa, Xanthomonas perforans; identical to SEQ ID NO: 34719

SEQ ID NO: 34792 - protein, 489 aa, Xanthomonas perforans; identical to SEQ ID NO: 31202

SEQ ID NO: 34793 - protein, 233 aa, Xanthomonas perforans; identical to SEQ ID NO: 30425

SEQ ID NO: 34794 - protein, 1353 aa, Xanthomonas perforans; identical to SEQ ID NO: 34719

SEQ ID NO: 34795 - protein, 489 aa, Xanthomonas perforans; identical to SEQ ID NO: 31202

SEQ ID NO: 34796 - protein, 233 aa, Xanthomonas perforans; identical to SEQ ID NO: 30425

SEQ ID NO: 34797 - protein, 1353 aa, Xanthomonas perforans; identical to SEQ ID NO: 34719

SEQ ID NO: 34798 - protein, 489 aa, Xanthomonas perforans; identical to SEQ ID NO: 31202

SEQ ID NO: 34799 - protein, 233 aa, Xanthomonas perforans; identical to SEQ ID NO: 30425

SEQ ID NO: 34800 - protein, 1353 aa, Xanthomonas perforans
MNSQSNLSPAQPGASLFAETLAEQRAQQFRMRRLQVHNWGTFNGLTEVPIAEKGFLFVGRSGSGKSTLLDAMSALLTPPSIVDFNAAAREAERSGRDRSLVSYVRGAWADQQDSASGEIATQYLRKGATWTALVLEYANAHGEAVSLIRLFWIAGSGNAAADVRRHYMVAPRRFDVATELDGFDLDLRKLKARLGEDVAHFDGFAGYAERFRHALGIGNEMALRLLHKTQSAKNLGDLNAFLRGFMLDEPRTFEAADRLVEDFAELDGAHHAVVTARRQVETLTPAREHHAALMALRHSVGELRELQLGVDSYREQQRLALLEERLQELDNQDRGLAGEEGQRRESLDNHEQKLVGLEREQRAAGGEQIEELERERARVERERDERLRRRAQIEQACRQLGTALAAGASGFAAQIAHAQTVLDNGKHDASALDEAIAERMGARRDDERRFAEIRAELEALKRAPSSMPAPMQALRARLCEDTGIAEAALPFVGELVQVREDQTAWRGAIERVLHGFAQSLLVDERHYAQVSEWVNRTHIGTRLVYFRVRRNDELHSRRVDPGALPGKLQLREHAFTEWLRNELTRRFDYACVDNAGALRNADRAITREGQVKHPGDRYEKDDRHAVNDRKRWLLGHDNRDKLKVFEREAQALAQRIASCDADVAALRKQREQDQERQLAAHTLVERDWDEIDVGPKLQRLSDIDEQLVQLREGNSGLRALGQAIDTARTLRDQAKRTYEDVRLERAQLARERVRLEQQHAACAGRAGSATLTPTQLQGLRERLAALTPLSLDNLEAHLRVVERGLAEQLADSQGRDSRLSAQLLECFRKYCQQWPEDSGDFTVSLASADDFLARLDRLESDGLPRHEHRFFDLLQTQSKNNLLALQRYTAEAHKGIKQRMDEVNASLEQVPFNRDTVLTIEVGDRRLAEVQEFQQQLRAVLSHQQTEDRALAEAQFSTLRALVARLGAQEPEARRWREQVLDVRLHVEFIGVELDAQTRAQVEIYRSGAGKSGGQRQKLATTCLAAALRYQLGGEDGELPRYCAVVLDEAFDKADNEFTALAMNIFENFGFQMVVATPLKSVMTLEPFIGGACFVEISGRHNSGVLLTEYDEQAQRLKLPERSRGDEAAVADATDAASAIEAASEPVGVQGAANADGITADGLPLHIALPVPGDTSPAAQNTHSSKRKPAAATATATANKQNKNKQNKNAKTTSPTRAAAQPHAKQPKKSPSRTPAVAGKPVADKRTSGAQQAPAVSSGAASRSNVGKTTRSSKAQGKPIVAANASNATSSKVAAASAPVKNTAAAKPRATAASTGQPARGAGKTTSARAVAEPSPATTRVARAGAPKARGKR

SEQ ID NO: 34801 - protein, 489 aa, Xanthomonas perforans; identical to SEQ ID NO: 31202

SEQ ID NO: 34802 - protein, 233 aa, Xanthomonas perforans; identical to SEQ ID NO: 30425

SEQ ID NO: 34803 - protein, 1353 aa, Xanthomonas perforans; identical to SEQ ID NO: 34719

SEQ ID NO: 34804 - protein, 489 aa, Xanthomonas perforans; identical to SEQ ID NO: 31202

SEQ ID NO: 34805 - protein, 233 aa, Xanthomonas perforans; identical to SEQ ID NO: 30425

SEQ ID NO: 34806 - protein, 1353 aa, Xanthomonas perforans; identical to SEQ ID NO: 34719

SEQ ID NO: 34807 - protein, 489 aa, Xanthomonas perforans; identical to SEQ ID NO: 34738

SEQ ID NO: 34808 - protein, 233 aa, Xanthomonas perforans; identical to SEQ ID NO: 30425

SEQ ID NO: 34809 - protein, 1351 aa, Xanthomonas perforans; identical to SEQ ID NO: 30426

SEQ ID NO: 34810 - protein, 489 aa, Xanthomonas perforans; identical to SEQ ID NO: 34738

SEQ ID NO: 34811 - protein, 233 aa, Xanthomonas perforans; identical to SEQ ID NO: 30425

SEQ ID NO: 34812 - protein, 1351 aa, Xanthomonas perforans; identical to SEQ ID NO: 30426

SEQ ID NO: 34813 - protein, 489 aa, Xanthomonas perforans; identical to SEQ ID NO: 34738

SEQ ID NO: 34814 - protein, 233 aa, Xanthomonas perforans; identical to SEQ ID NO: 30425

SEQ ID NO: 34815 - protein, 1351 aa, Xanthomonas perforans; identical to SEQ ID NO: 30426

SEQ ID NO: 34816 - protein, 489 aa, Xanthomonas perforans; identical to SEQ ID NO: 34738

SEQ ID NO: 34817 - protein, 233 aa, Xanthomonas perforans; identical to SEQ ID NO: 30425

SEQ ID NO: 34818 - protein, 1351 aa, Xanthomonas perforans; identical to SEQ ID NO: 30426

SEQ ID NO: 34819 - protein, 489 aa, Xanthomonas perforans; identical to SEQ ID NO: 34738

SEQ ID NO: 34820 - protein, 233 aa, Xanthomonas perforans; identical to SEQ ID NO: 30425

SEQ ID NO: 34821 - protein, 1351 aa, Xanthomonas perforans; identical to SEQ ID NO: 30426

SEQ ID NO: 34822 - protein, 489 aa, Xanthomonas perforans; identical to SEQ ID NO: 34738

SEQ ID NO: 34823 - protein, 233 aa, Xanthomonas perforans; identical to SEQ ID NO: 30425

SEQ ID NO: 34824 - protein, 1351 aa, Xanthomonas perforans; identical to SEQ ID NO: 30426

SEQ ID NO: 34825 - protein, 489 aa, Xanthomonas perforans; identical to SEQ ID NO: 31202

SEQ ID NO: 34826 - protein, 233 aa, Xanthomonas perforans; identical to SEQ ID NO: 30425

SEQ ID NO: 34827 - protein, 1353 aa, Xanthomonas perforans; identical to SEQ ID NO: 34719

SEQ ID NO: 34828 - protein, 489 aa, Xanthomonas perforans; identical to SEQ ID NO: 31202

SEQ ID NO: 34829 - protein, 233 aa, Xanthomonas perforans; identical to SEQ ID NO: 30425

SEQ ID NO: 34830 - protein, 1353 aa, Xanthomonas perforans; identical to SEQ ID NO: 34719

SEQ ID NO: 34831 - protein, 489 aa, Xanthomonas perforans; identical to SEQ ID NO: 31202

SEQ ID NO: 34832 - protein, 233 aa, Xanthomonas perforans; identical to SEQ ID NO: 30425

SEQ ID NO: 34833 - protein, 1353 aa, Xanthomonas perforans; identical to SEQ ID NO: 34719

SEQ ID NO: 34834 - protein, 489 aa, Xanthomonas perforans; identical to SEQ ID NO: 31202

SEQ ID NO: 34835 - protein, 233 aa, Xanthomonas perforans; identical to SEQ ID NO: 30425

SEQ ID NO: 34836 - protein, 1353 aa, Xanthomonas perforans; identical to SEQ ID NO: 34719

SEQ ID NO: 34837 - protein, 489 aa, Xanthomonas perforans; identical to SEQ ID NO: 34738

SEQ ID NO: 34838 - protein, 233 aa, Xanthomonas perforans; identical to SEQ ID NO: 30425

SEQ ID NO: 34839 - protein, 1351 aa, Xanthomonas perforans; identical to SEQ ID NO: 30426

SEQ ID NO: 34840 - protein, 489 aa, Xanthomonas perforans; identical to SEQ ID NO: 34738

SEQ ID NO: 34841 - protein, 233 aa, Xanthomonas perforans; identical to SEQ ID NO: 30425

SEQ ID NO: 34842 - protein, 1351 aa, Xanthomonas perforans; identical to SEQ ID NO: 30426

SEQ ID NO: 34843 - protein, 489 aa, Xanthomonas perforans; identical to SEQ ID NO: 31202

SEQ ID NO: 34844 - protein, 233 aa, Xanthomonas perforans; identical to SEQ ID NO: 30425

SEQ ID NO: 34845 - protein, 1353 aa, Xanthomonas perforans; identical to SEQ ID NO: 34719

SEQ ID NO: 34846 - protein, 489 aa, Xanthomonas perforans; identical to SEQ ID NO: 34738

SEQ ID NO: 34847 - protein, 233 aa, Xanthomonas perforans; identical to SEQ ID NO: 30425

SEQ ID NO: 34848 - protein, 1351 aa, Xanthomonas perforans; identical to SEQ ID NO: 30426

SEQ ID NO: 34849 - protein, 489 aa, Xanthomonas perforans; identical to SEQ ID NO: 31202

SEQ ID NO: 34850 - protein, 233 aa, Xanthomonas perforans; identical to SEQ ID NO: 30425

SEQ ID NO: 34851 - protein, 1353 aa, Xanthomonas perforans; identical to SEQ ID NO: 34719

SEQ ID NO: 34852 - protein, 489 aa, Xanthomonas euvesicatoria; identical to SEQ ID NO: 30424

SEQ ID NO: 34853 - protein, 233 aa, Xanthomonas euvesicatoria; identical to SEQ ID NO: 30425

SEQ ID NO: 34854 - protein, 1351 aa, Xanthomonas euvesicatoria; identical to SEQ ID NO: 34646

SEQ ID NO: 34855 - protein, 489 aa, Xanthomonas perforans; identical to SEQ ID NO: 31202

SEQ ID NO: 34856 - protein, 233 aa, Xanthomonas perforans; identical to SEQ ID NO: 30425

SEQ ID NO: 34857 - protein, 1353 aa, Xanthomonas perforans; identical to SEQ ID NO: 34719

SEQ ID NO: 34858 - protein, 486 aa, Photorhabdus temperata subsp. thracensis
MNFQGLQAKYRRLFQESAAWKLLRADNSPLILAFLGELFSEDSEVPFSRARVSLDAELVRCRELGLWETETGAGTYLNKWIREGWLREMDDTLTKTDASEIALRFSQGLDERSSGTTASHLRIVQEAVRDFAVAISPNVDERVTLLEDRKSEIQREIDALRAGVVTELTEVEQRERIREIYQLASVLTGDFRRVEDEIRRLDQEIRIQIIEGDSTRGDILLAVLEKEALLAKTDAGSAFESFFDLLCDQNRTMELRDQLRSILNRPVAEYLTTQQRQFLSQLMRELSRESDRVFQIRRRTEESLRAYIESGTAQENRAVDRLLGQLERLAVELKNADCDLQTTTALSLPVGAASISSPESMLLKSPDEKLDTSGVEEQLNSREPSIQMLDCLDAVQIRLIAEKALVTLKEFGPMTIASIAHYHPLNSGLEELVAYLRVAKSVGAASLEEKESIEISDKQGVRLRVSIPTFLLSADLFPDSLDELVL

SEQ ID NO: 34859 - protein, 296 aa, Photorhabdus temperata subsp. thracensis
MNKDRGTRATLGKSDSDPQKEQQTGFFDQLIKHHTQLEYNPLTGTSVVESAVAANKSSSVEVDDVLVNDHPESSNSGMPPDARRVLVSLLRQGVILSSQKAKLFESLCRYQCAVRKHLSEVYLKLVLDEKAGVAFIAGFQNEEDTESLGIDGEEVVSLISRRTLSLYDTLLLLVLRKHYQDRETSGEQRIIIDIERIESHLTPFLPLTNSTKSDRRKLKGALEKMVTKKILSSVRGSEDRFEITPVIRYVVSAEFLENMLNEYLKMAGEKGIELNKNGSNAVDYQDEEEETGDEND

SEQ ID NO: 34860 - protein, 1132 aa, Photorhabdus temperata subsp. thracensis
MTDQTLSADSLFHVGQIRLAELSVYNWGSFNGLHTALIDPMGTLVTGDNGAGKSTFIDGLMALLLPAGKATFNVAAAQGDRSDRTLLSYMRGSFGSAHDGAGTRVRSKRESGVVTGLRALYQGDDGSKITLAALFWITKSTNVLADVTRVYVVAKRDLTLKEMLDAFGDGNARSFKQWLRDDPAMTCCDDNFSDYQELYRKLLYMDNKNAPALLSRALGLKKIDDLTGLIRELVLEPSTVKDDAKKVVEEFADLVAIHSQLVDARAQQVHLSRLPELSSIIEKTTKEFEALTVERNSLPVYFGEIFAQLWSEKIADIEAELEALSLKIKQAEGQKVDADKLVERRHEEYLQFGGDKIESLRKEMGHTQDQLNRVVRNSSQYQTHANELALPSVLEEAVFLKNQSEASARLASIQRDEEEYQDRFATISAKFSELQANIHDISQEIREIEARPDSNIDVKYQQLRDELVNSLELSKDQCVFIGELIDVEDHEKIWQGAIERALGGLRTTLAVPHHCYSMVTRWLNARHTGLHVRVQVVNNAETNQGQSAEFKPDGYLRKLVWRTHPYREWLKRHLQRFDLQCVSNTEELDQTPFSMTQQGLMHMDKGRFEKKDQHRIDDRRRWCLGFSNKSRLAILNNDKKDLGLKLEETGKKVSQARQDLNAVSDRKILWEKLQSYRWDDINAPYWHEKFSDLQTDLKVLEQSGGDLDKARERWELAKEQLAQIQSALNQLNSDSGGVKNTLRNAQEEWNKARAKAEKGLPDSARQLLAIRVGVLNTNDLSRMAELVSKVEEELDRLLDSRRNNKDRAERSAISIMVSFRSNDKWQVFTVDWQSDIGSLPDYLNHLRQLEEEGLPNLVEQFIERLNKHATQSLARIKTKLESEREDILERIDIINRVLKRTEFRSGTHLKLGSKREKFPHVNEFEQHLRKVLSQVTSDDHEARFRQLAKVVEILGKASAPGSSNTLESLRLLDPRYQMSFYAEELDINTGEIRDVLESSSGKSGGEKESFAATIVAASLAYVLTPNGYDRPVYCTVFLDEAFSNTAETVSRRVLRVFRELHIHVNLITPYKNLNLARESARSLLIAERDQENHDSHLCEVTWEEIDRRMGEEKEKKLAAEASGLGIELEKLI

SEQ ID NO: 34861 - protein, 398 aa, Photorhabdus temperata subsp. thracensis
MKRELNGGRWGLLPAQVKNLIRQREWDNLSSLRARLLGSRAFPVRVGLKPPRGSSAISDMVHFQRFVDEWKSFPYQDHVEWSSKNFRELSEQRIPAFVVIESMQHLIQFLGNDALSRSKVWERNMKPFLRIDKDLYPALVKCIDIVEKLSLKDAELLAKLLPQLKQGLGEGQYLRALPLIGIDTKFLENHQILIEELTDVIHKGAVSAFGGLTAWLGCLTNPKGWLTIRPLCHTAMAALGGIPILQIPGELLKQHELPASNILVVENLQSGLALPDMPDTIAVIGGGKNIAWMDAAWLKGKRVGYWGDIDTWGLSILSDARDKFVDIESLMMDVETVKVHEDRMVPEPNPVESSPSSLNEDEARLFNDLISGRFHSSRLEQERLSSDYIRSKLIDWLS

SEQ ID NO: 34862 - protein, 489 aa, Xanthomonas pisi DSM 18956
MKHQARIAGYRQLREQPVWKLLAADHAPELIGLLQTVLLDGERRLPSAVLHERLQRQLDALRADELSRELPRTAQAYLAHWLAQGWLERRLPEGAAEEEYELSRAATQAIRFIVGLRESSSSATESRLSLVIQQLVQLAGQTEVDPELRLAALREERARIDAEIERVASGRVAALDGKRALERARDLIHLSDELAEDFHRVRDDFEQLNRQFRERIIDDEGARGDVLEQLFNGVDVIADSEAGRTFEAFWSLLNDTQQSSQLDQALDALLARGFARKLDRRERAFLRGLTGTLLERGGEVHTVMQHFARSLRGFVQSRGYLEQRRLNQLLKQAQGEALQLRDSLHATAATGYTQALSAARLRSLSQWRLHDPRLTQVDGRVQAADAADISLDSVGDLVAQSEIDVRSLRRDLHELLGQRPRLTIGDALQQRPAAQGLGSVIGYLSLGTRHGVVIDGQMETVQWEGGDGALRRARIPLVWFTREKRNELD

SEQ ID NO: 34863 - protein, 233 aa, Xanthomonas pisi DSM 18956; identical to SEQ ID NO: 33498

SEQ ID NO: 34864 - protein, 1345 aa, Xanthomonas pisi DSM 18956
MNSQSNLSPAQPGASLFTDSLAEQRAQQFRMRRLQVHNWGTFNDLTEVPIAEKGFLFVGRSGSGKSTLLDAMSALLTPPSIVDFNAAAREAERSGRDRSLVSYVRGAWADQQDSASGEIATQYLRKGATWSALVLEYRNAHGEAVSLIRLFWIAGSGNAAADVRRHYMVAPRSFDVASELDGFDLDLRRLKARLGEEIAHFDGFAGYAERFRHVLGIGNEMALRLLHKTQSAKNLGDLNVFLRGFMLDEPRTFEAADRLVEDFAELDGAHHAVVTARRQVETLSPAREHHAALMALRHSVGELRELQLGVDSYREQQRLALLETRLHELDSQDRGLAGEEGQRRESLDNHEQKLAGLEREQRAAGGEQIEELERERARVERERDERLRRRVQIEQACRQLGTALAAGASGFAEQIAYAQTVLENGKHDASALDEAIAERMGARRDDERRFAEIRAELDALKRAPSSMPAPMQALRARLCEDTGIAEAALPFVGELVQVREDQSAWRGAIERVLSGFAQSLLVDDRHYAQVSEWVNRTQLGTRLVYFRVRRNDALHARTPDARALPGKLQLRDHAFTEWLRNELMRRFDYECVDNAAALRNADRAITREGQVKHPGDRYEKDDRHAVNDRKRWLLGHDNRDKLKVFEREAQTLAQRIAGCDADVAALRKQREQDQERQLAAHTLVERDWDEIDVGPKLQRLSDIDEQLQQLREGNSGLRALGQAIETARTLRDQAKRTYEEVRLERAQLARERVRLEQQHAACAGRAGTAALTPTQLQGLRERLAALAPLSLDNLEAHFRVVERGLAEQLAESQGRDSRLSAQLLDCFRKYCQQWPEDSGDFTVSLASADDFLARLDRLESDGLPRHEHRFFDLLQTQSKNNLLALQRHTAEAHKGIKQRMDEVNASLEQVPFNRGTLLTIEVSDRRLGEVQEFQQQLRAVLSHQQTEDRALAEAQFSTLRELVARLGAQEPDARRWREQVLDVRLHVEFIGVELDAQTRAQVEIYRSGAGKSGGQRQKLATTCLAAALRYQLGGEDGELPRYCAVVLDEAFDKADNEFTALAMNIFENFGFQMVVATPLKSVMTLEPFIGGACFVEISGRHNSGVLLIEYDEQAQRLKLPERSRADEAGPAIAEQPASVTQREAAPDWAQARTRADSTGAVSGAEGAAPQRDPAQDEATAKASRGAGKVASASAQAVQTAPKPSKTAAASAGAGSGKSESAKTAAGRAASAKPASARRASPAAGTARNPATPTKSARTPANTRTPSGRTASVKPIAKPKNAATTAAAPKKPADKPTVASLRATASLRGAAATKATAARGAAKPASVAKARTASTRGSAGKPRAKR

SEQ ID NO: 34865 - protein, 486 aa, Xanthomonas hyacinthi DSM 19077
MRFDYASMDMLRQHHPAWRLLRADHAALVASFLYRAFVAPNVRNVAQGDLVEALEDELFGLREQLGNDAFPRTALQYLDDWAANDKGWLRKFYGPDSDEPQFDLTPAAEKAILWLSTLGERGFVATESRLLTLFELLRQISEGTQTDPAARVAELQRRRAEIDAEISQVLGGSPPLLDDTAVRDRFQQFLQLARELLGDFREVEHNFRQLDRRVRERIALWEGGKGALLEDVMGERDAIAESDQGRSFRAFWDFLMSSRRQEELSELLERVLTLPAVNEQQPDMRLRRVHYDWLEAGEHTQRTVAELSRQLRRFLDDQAWLENRRIMDLLHSIEAHALALRDAPPADVTMHIDGTAASVELPMERPLYTAALQPKIVDVVLEADGTDVDDAALYAQVFVDKARLVRHIRHALHGRSQITLAELVRMQPMQQGLAELVAYLQLADDGFRSTVDEHAYDPVDWEGLDAGGNPYHRQARLPRVIFLGAA

SEQ ID NO: 34866 - protein, 214 aa, Xanthomonas hyacinthi DSM 19077
MMDNPSASPAVDGLPVLAVKLLKGVLYQESDPQLWGSLLGLQSQVRDYLSVLGLELILDEAEGYAFLRSRRAPEADDGVADPTPRLVARRQLSFPVSLLLALLRRKLAEADASGGDTRLVLTLEDIVEMVRVFLPPSSNEARVLDQLEAHLGKIVELGFLRRMKPAAGQVGSQPALYEVRRILKAFVDAQWLADFDARLAAYRAQIGGIEDEPG

SEQ ID NO: 34867 - protein, 391 aa, Xanthomonas hyacinthi DSM 19077
MSWTRPVDLVAQVGKAWDSGTLLALLAGGKSPFPMRLRLRGPTSADLVDRFDDVRVWVAELQALPHIRIETRQFRHRVRGNTTLPNEAWVDTLDDALALIDRRNEVATFDAQVQQTRDRQPSLLGWLHKWPLRALALGAYWPRLLDVVDWMQAHPRPGLYLRQVDIPGVHSKFIERHLGVLSELLDAVLPESAIDTAASGVGGFNRRYGFAAKPERVRFRVLDPALSLLPGVTGGDVTLDVGSFRALRCNLTRVFITENETNFLAFPAVTGSLVLFGAGYGFDTLDGNDWLRQGQLYYWGDIDTHGFAILDQLRARLPEVQGFLMDRATLMACEPFWGREEHQLTRDLPRLRDEEYSLYDDLRDQRIRDNLRLEQEFIGFDRVHRALEALC

SEQ ID NO: 34868 - protein, 498 aa, Bifidobacterium adolescentis
MERLRPVYETGVLRLLLRGNSMLYVALLRSTFDPLTGELPREIVEERFSRSLTRLAETGDYTPKEGQTSAEAAHTILQQLTKEGEGDYAWLANSLDVAAHRYLYRLTARAHRAIEALDRLEDTTKALSGAQANSIIMEIEHARMQLTADPRERIRLLERDIEERQKQIDELKHSDTLDKLTSQQVGDIIGVIHNTLRGVPIDLRELALEERDNGDNLRRSMQSGSISVEQALGTYHDEYHRAFHESDSGRRFEDAFQVIVTDEGRREIDEAVRDIAQNPYLEGEPGILLAQVRAELKRIYEGIEDVRRQIRISDEAVSRLVRQQTDTHYRTMLDKLHRLFVRASDDAKTHPGSDERPYRTDTGTAQFQALPSRPAKSMARAATAGLDDAPSTNVDAPDLKAMVEMCGPRLTHMIGLIRRDPVKTADGRFVDFAASFNRLPREERRESELIGFLSALRTQDGPATVAWHCVSIDGGERVWRTRPILTTEAALDEIIEEG

SEQ ID NO: 34869 - protein, 281 aa, Bifidobacterium adolescentis
MSMTDNTDGFDTGIGIEEETGPKSGMPSEGPDMTRDRPALFDGDTGDMPLEARMAAIALKRERYIDGSLYDRACQYREAVERSLNNDMLRLVDNTKYRIMYASPVTDAETNIRSLKTRVSLTREEAATLAALRIKVLEYENQKTKPGDWLISFDDIRALLATGAGFLTASNDEEGTAKKITSVISRMRTYGYLAETGDENMYVLTPLVPMVLDQKLADRWLGSDDTDGDGMKDADGDGYDDSSIGADGGDTSDSTGTVSSGVEQDAFDFDSADDAFDGGEH

SEQ ID NO: 34870 - protein, 1152 aa, Bifidobacterium adolescentis
MEDGMKIVSDRWMLQSRQIVNWGSYGGYHVFRPSMDDAMPVTLLAGASESGKSTLVDAQISLLYPSGTPYNKASNSGRSERNDYTYLRGMIGISDGENGETPIFLRGRDADGTPQNIWGAIVDTYANRSDGGLLSCAKFLYLTAGDGPDGLRRQYVTWNQTIDPRLMDRHRDTSFTRGLMEQTYPGCTTHVNAQAFHASIWQDMGLSAEACRLLHKIQSADAPSKLDDIFKQGVLDVPESIRLARETVDDYNRFSENFHSMEDKMERVAILQDIQARYGEYAKQASERREYTPIDPDREQGETTLAAWTWSRMASEVRAGLPSAQRKAKESQDAIDRSQQRIDELDTQIEAVKERMNGIDGGSLQQLGKDFERARQDADEARRQRHAIAERFERVEGRLPADEQTWNAKRAALALSLDTYDKRLEDARSEYQRMVVERHARQGERDLLRQDYRRKIEHRTRISDDMDHARTLIARATGLDETELPYVAELMDVDEGDEQWRLAMDVTYAPIAQTILVDKRHEQGFAAKVSAIDPTRMTRRAWRFVDTDAQYDSACNEGWMSSKLRYKEDSPFVGWLKEQTASQRFDARCVEAIDDMDRAERQVQVDGQIKSGDRGFHGVKGLRQVIGFVNERYLAELERQLDGAERALEDADRRGRQMANAMTLLQDEHELALTVADLPWGKIDVDGLETKAERIRLQIERIESDPELAQLQDELKQLLRQKDDEGKNRYRAEAELENAQHAVHAEQAWLDMHGDSDFDDAALSDMVSNLLADTYETCFDTSRPQERPQRIAGGFDREGTAPFDVRVLRRIGNTVRARLQQIDERAVQLRADTERAMGDYLKHHSTEGDTVMASVEDYPYFLDELKNLNMLVTRAATDEEYANSVEKLYMSFQQLNRAFNTDEENVREQLDRINGMLKGQQFGPRGGRLSLHVDFHPIDRQFKSSLGRIMSKLDDWTRNARSNPMETRKAFAGCETFIGRLQAELGQIRDTNGIKEYGARNLDPRVRSSFYAIVHHNDLPDERISSTGGKSGGALQELTSFVYGAALIYLFGGDLTSKPTYTTLFLDEALIKADGRYTKRALTVLPRLGFQIIVSAPESKTAEILSIADKAYVAYKDPATGNSYLQELDREPATQAETQDATVEQTQPATEA

SEQ ID NO: 34871 - protein, 399 aa, Bifidobacterium adolescentis
MRRKLDEYVDAHLTRHMYDTDESWPLRKTIRLPKQAELEQHYNQIRAQNETIRDWARQHHCETSEKTKIVSSGLIQQKSPLIDSVTIPDLDTALRIATKQTRERYLREHDRMSALAKEFGLEPANAMNVAKTLKDHDDTDFHLVIQAAHYFANHDCHTMTPRMAPIPGFSAKWLGTPNSQRRKAICQLTGQDNLTFQERPNELRLRLMDAEHHDQPDLIVTQPWVRSQPTDIEHAIIIENKDTYQAMPTVEHAICILGNGYAATSHITTLLPWLTTIPNIIYWGDMDANGLDILSKLRATGIPCTSILMDTTAYRTYEQYGTQFDAKNKPLTTQTPQPTPGLTTEERKLYETLCTGTDIQYLRIEQERIPIRDATTILHDQHHWPIDIPGNDIPNNNTK

SEQ ID NO: 34872 - protein, 451 aa, Enterobacter aerogenes
MPLEEAIQSLTGILVEHVSQEQYDINQDNPSLQASRELREWIKRRLIVERDGRVFATDALEVAITFVESLDNRFMTSTASRLSTVQREIENLETRLNPNPANRVTTLRRRIAELERELQEAEAGHIEVLETHQAVEHIREVFNLASSLRADFRRVEDSWREADRALRQSIIGEQYHRGDIVERLLNDQDALLNTPEGRVFDSFQQQLRQSSELKAMSERLRVILSHPSASDALNRLQRHDLRWLVKRLVDESQTVLQARARSERDVRGFMKTGLAAEHHRVGHLLNEFLNQALKLDWQRQIVRKQEVPLPAVGVAVTGVPAIERLRFKEVDDEAEQTLDLSNHAADLTQIGDDFWDAFNGLDREALIQQTLQVLANENRPVSLAELAALLPPAHDLETFAIWIGMAREAGIAVIDSQREFAELSDGEGRRWRFNLPTTGLESQALMDIDWE

SEQ ID NO: 34873 - protein, 208 aa, Enterobacter aerogenes; identical to SEQ ID NO: 34400

SEQ ID NO: 34874 - protein, 973 aa, Enterobacter aerogenes
MGALLWFDSTSSSVTDMKRLWLFSDNPEQTLEHWLNVYHDGGTRLLRQMEKEVTGIWTYPNKKQYLARLRDFFEVGENAFTLLNRAAGLKQLNSIDEIFRELVLDDHSAFDRATEVADSFDGLTEIHQELETARKQQQSLQPVALSWDKYQKQERQLAERKALESLLPIWFAQQASQLWREKVSHLEIEFGEAQIREEQIQSQLELQKKVVADCMQHYYQAGGANIDELNERINDWQKTLGRREALARQYQQLIHNLGLPPDLSQQQLEANQHEAEARCVQLADDIKLKQEEAYQKGALSHNITVELRERETERAEIARRPDSNLPAHYQAFRSELAKALNVGESELPFVAELIQVKPEEAQWRGAIERAVGSNRLRILVAPESAQEALRWVNQRNNRLHVRLLEVKLPHSPARFFDDGFTRKLLWKDHPWREAVKALLAESDRHCVDSPEQLRNTPHAMTVQGLMSGKQRFYDKQDQKRLDEDWLTGFDNRDRLNFLAREVAALQEQTKTANAAFEVAKGEVALLQNQAISFQKIQQIDYDSIDVPGAKSQLEALKERLENLIHPDSDASVAKAKLDEAQTVESEFDKQLRAANKVTNGLDTELTSAKAAERKAQQTAQQGMQDEERELCTLHFPAVTLEQLPDIRDLERHHERGIQQEIEGVKGELHRLSIELTKRMSEAKRVDTGALVEAGADLDDISVYLQRLQELTEEALPEKLNRFLDYLNRSSDDGVTQLLSHIEHEVLVIEERLNELNETMFRVDFQPDRYLRLDTKKVVHESLRTLEKAQRQLNTARFVDDNGESHYKALQVLVAQLRDACERNRTLGAKALLDPRFRLEFAVSVMDRQSGNVIESRTGSQGGSGGEKEIIASYVLTASLSYALCPAGSRYPLFGTIVLDEAFSRSSHAVAGRIIAALREFGLHAVFITPNKEMRLLRDHTRSAIVVHRRGQDSNMASLSWEELEQHFRRRENA

SEQ ID NO: 34875 - protein, 385 aa, Enterobacter aerogenes; identical to SEQ ID NO: 34402

SEQ ID NO: 34876 - protein, 491 aa, Mycobacterium senegalense
MPEPGMSGPSLNQLYQLNREVADSRSARLLVTNNLATYLTLMERHLDRGAKLTEMELVVRLERDLADLGTETEQSGLALIKYWASQGWLHRITEQSGDTERNVCYLTYEARAVLDFARRMRREDTLATGGSITGIAAGLRRVAGQVSNDPERIRADIEAEIAKLRDELDALDQGQRPEPDLVDVEDEARAIALQMEQIISDIGQYGSMLNRITTRLLDASADTDLGYRERQRQLFDDYESLFASRESASYTAFTRMIQDPEQRAALVADIDAVTRELPHLDPGLREVMTGFFSLVSAQTAEVGRTRQRCARRIKRFVASGTLEHSRGVTRQLNDALASAHDLLSVSLADSRIGIEVPLVRTDFNSIGAVAFKIRDAIPPSQAEPSEGEVNLSAFSALASQVDAAELAQLVNGALARGPLPLPDAIGMLDSAYLGHVIVLWSWALKQQPADGTESGNSVRVRFRSLEGADREIEIPRLVFTEPIPTVSESLL

SEQ ID NO: 34877 - protein, 251 aa, Mycobacterium senegalense
MTDNPDPSPVKDGVIDFDALPSIDAVERSTDQRRAPRFDGDVSELPDRACWALQHLLSRRYISKDNHSELWSWVTRYRAELTVRLSELDMRLCISDDHDIAYVEQADYESHWRRRLLRRETLNTYDSILALHLAKLMRAAARDENVLISRDEIHELFAGVNNDTDRDTASFDKRIDNAIERLTDIEMLARNREDEDSFTISPVVNAIMTASMITELQQQFEQLKRAANGTVDDPDDLDVSDRLSDDVDAHG

SEQ ID NO: 34878 - protein, 1120 aa, Mycobacterium senegalense
MAEPTNQFSLSRLQVINWGVFDGYHSIPFSPHGTLITGSSGSGKSSLLDAISLAFLPSHRRNFNASGDTTAAGSGTGKRTVDKYVRGAWGERREGTSRQIMYLRGTGPAWSAVAVTYSDRTGRSVTGLVLKWLAAEKNSDPGSRYYLIDADRDIFGLCNRWAANGYDAAVFRDDGWTGGRSESQYLAQLYSSIGIRASDAAQQLLGKAKSLKSVGGLEQFVREFMLDEPASLSGVEEALEQINPLVEARGLLDVARRKRNTLGNIAAVQARYADEAAKFGVIDTIDNAMIRDYVDHVRLAQAGPEIANLDDQITQLGAQRDEFGTQQRQLKNEHNSLMAQINTVTVDLVPLQQRLTEAERISEEVSRRRSAYEDKVTSLGLTPPDNGEEFWSLRETLMEEADRLHRELFTGNQPYVEASAKEVRAREARESVEAELERVQRLGSPLPKTEYEMRARIARALDISERDLVYVAELMELKPDETRWRLAVEKVLRGAGLRLLVPDAYMERALRFVNENDMRGRIQLQHVQHGAQLRTPAPGTLATKLQLADPTHDSAVEALNVVAAVGDYVCVDGPGEFTEQSRAVTDQGLRKDSGRLSIKDDRSRLRPSDYIFLGGTAAKVEALQDDLAAAHDVYQVARTARERLDEHRGQLQSRERACRALCDQYMQWSDIDTDSVDEMLERLQDEHDLLVSDNPDAERLQQRADECWERVEKVIQQIGSLNERETALDRRRTALLELSEALTERLGSSEFPSHARDTIDGYAADIALTLELLEPEPYRNELIRVISRERDRLRADRNRSHDELAGIMAAYDSSFPDAIPNDSDVFDERVHDYVALCRRIDERELPDAYERMQRLITEQAPGAILNLHMIADNEARRITEQIARVNTGLGAVEFNRGTRLTLHAGTRHLAAVDELNEKAQRISARVSLVSFGDETAMFEQYTDILQLRKLLAGNTPEDRQWTRDALDVRNRFVLYCEERDAETGEVIRTYSNSGDNSGGEQEKLMAFCLAGALSFNLASPDSNDTRPLFAQLMLDEAFSKSDPQFAQQALSAFRKFGFQLVIVSTVQNSTTIQPYIDNVVMVSKSDASAPNARPVASVTSASISEFADLRRTSGDAVPSA

SEQ ID NO: 34879 - protein, 468 aa, Vibrio alginolyticus; identical to SEQ ID NO: 31127

SEQ ID NO: 34880 - protein, 216 aa, Vibrio alginolyticus
MASEIILRELKDIEVKTSADYTDNLRKTSAYLIRNQWVWKEKRGHKEHFKRCEDNQTYFHKLFDSLDMTWHFDRNFGYAGVLPRGVGKRLDVTTTIFLLILRKMYDTEASMGRTELGRVKPPATELINQYELIKGSRPQVTETSHALENLKRKGVIELGVKDLDTKLFEITVLPNITRVVSATYLGLLDEFMDSFSSDELKDGSAECDEAVEVSYD

SEQ ID NO: 34881 - protein, 826 aa, Vibrio alginolyticus
MFAWQNSDSANLNREVAAAERAVQSSLNKVMTAIKSFQTTTLDIKSFQFPDTFDIQSFELFATQWTECLSDLEQIKVHELSASTPDSIVLVADKLIALKPTLSSIGSLVEKADKDVSKTVERLKTHGSSIQQRIKRLSKGLSDINQSTALTIDLLKSAGISVTPVCDVCEINDKEWQPAIESYLGANREALLIAPNDFERALELYEIAQLKDGRIKRARIINPDHALKQSRLPSIGMVSTLVETSDSTARGFMNILLNRTRIARTRSDLRRETKALMVSGLATGSGTVGGTSHIDGLMIGKNAKTEQKIALEAELLEVTQRLVNVNAPAMMLSRLNQQWAKLFSALMQGAEDAQNINSQYRIELDRLEQAKEQLKPLSSADERLKLAKEEAEKAWSDCNNNISQAENDRENASLEMTKLTVVIEELSTKREEAEQFRTQIEQSFLHDTTKADQQWQKIEKQFENQEDLYSLIQNEASLRAQDFREKEIRARGALRENTIAFTNYFSEDIANRQELLEAARPDNSNVEAYLFIEADCRDWIERILSVQLLQHQQAAQAAAEQMEQNFRGIIVGELQSRFEQMKFTFNQLNRLLKEIPFHDNIYSFHYSVVESESLNKVYDYITTADREETELVGTMFDLPSEHEAIGLLKSALINGDDLITEIRDYRNFFTYDMKMKNKETGEENRISKMQGTGSGGEQQTPAYIALAASFMNVYKIGSESGQGASLVLLDEAFNNMDAGNASAAVAFLKEIGLQLLIAAPPEVTLKIGKEMDQIYTICREGRDVAIDHTKIFERGQELIDQRNPVYHPELITERVAELKSKATSDV

SEQ ID NO: 34882 - protein, 416 aa, Vibrio alginolyticus
MFDMSQNLERLLTQLSKKIDLSEEVKSGVTIRITDRAYKWYFALSDTTKDALHREMENLGFVRLRYRKKVMLGAFKHIESIHVVDGGVLLDSLGITPRMKLICDLSTQLESVSFQVSWWEETRDEIIIAWSQSKTFHGIKPVQIELILDAMKLVEIISSSVSVSLPDMRTLSVKLYYDSKRLENKTLVNLVYKLMSPHLEPDVAKMIETGEELLEHCGICKYPVPMRFKAKGTLICQGRIDLSALQYGIGVSPDEVLGVEWVQDVPYVLFIENRTSFERYVREVDDEGLVIYTAGFPPSAWMRAINLLVKNLINHVPLYHWGDRDVGGYRILAFLTKWLNADITPYLMGLDLEIGLKLDEAKTTRPVSELILALESARDYPSISVLYDKLVALNQSELTWIEQEQIPPRSPVTLLR

SEQ ID NO: 34883 - protein, 486 aa, Arthrobacter sp. YC-RL1
MQPSHRANSLWIQSQQFRSSAAYRLLTAQPWAVAFIRAEFTADRPRIALELFHASLDSFLKTARTSDEQIPQTYSAQDFAETWVKQGLLARPLIDGRFVYEPSAQTLRTLRFLADFSTDDSHLNSSRLNTLLSSLESLAHETDPDPEARIRALESQIAQRQAQIDQLRSGTDPAVLSRTTALSAARSVLDLAASLPADFRRMRDGVQDMLHSLREGILDASTAKGVAVGQVLEADRQLRSTAEGETFRGFTEFLNSPEAQQRFRAALAEVLERDFVDDLDTPERQILTNLLRELRRQAAEVHTSYGKLSESLHAFVQSEDYKQAELLRRAVREAEAAISKSAGLKPRSGLAPLELFAPQFVTLHGLGIYDPSEHVAPPPLAHAPEFSAEDIVRTPSTPEADMPALRSAIAQRLRGAAQDPVPLDQVFAALPAEHQHLNTIRALIEIGRTNGENLDESQLLGIEFTQLDGSTRTAYLPALSFTKEPL

SEQ ID NO: 34884 - protein, 230 aa, Arthrobacter sp. YC-RL1
MTYTDSYAAPITDPLFDGDTGSFPLPLRQLLVRLLRGPYLDGSVDAAAWQLLLDSQGAVTKYFSEIFLALSLDMDRKIAMLAPVDIEQAHTAPIAPRRPLKRDETLLALRLRLLLEQQSGTGADAVISRAGMHEILAEHRAAADRDDKRFAESCDAAIARLGSLRLLTNTELADEFRISPALAMALPLASIQDIPRYIAAIDANEGVLNLAEAEPDEADASEQTDALVQE

SEQ ID NO: 34885 - protein, 1107 aa, Arthrobacter sp. YC-RL1
MSIEMTLPLGGEINPGQHRLSRVQLVNWGTFHGLHDLGVDRAGTLVTGHPGVGKSTLFDAMGHVFFASPRLNESANDAATREDRRTTYSYMRGRKFKTSSGTVFQRPGATWSAVLLSYQDGLGNTVSAGAVFDLPDAGLEGQVSKHYLLCEGALDIAELENHGPRRFTVSSLSKALSPAEAFDTHKAFIDRLRRRLGVESDKAFALLRTLQNGKGLAKGVNQFFRHEVLEEPATLKAAAAAVEDFAHLRGIYRQLDTARAQRDVLAAVPEQDRAYRSLAERIGTTRQLLETELAQLEAQVRQLVLRNDLAAHRAEHAQLTARQAELGERKAKLDDQLQSLEAAHDAAGSASLMLLEREADAARKALSEKERVLRALQEQADQAGLAFEFSATGLDELRANAARTLQQLDSITKDAQTVEYEAMASLVNLRKRADTLAEQIRSYQRRSTNIDDRSVAARRAIASACSLREEQLPFAGELMDVSADCAMWRLAAEKALHSVARTLLVPGEFLAQVTHAIDKLDGLGRVRWADISLAPREAEAGPADLVTKLDFAPGEAGAWLRAKITSDYPLACVENDAAMHIHPKAITPAGTIKTGTGLFERDTRTLPASEYLLGFTNEAKISELQSKAARLEIKVQDAKNAADDRSAAKAKVLAKAQLLGALIEDERTFAQLDAAPALQALRRSEQKLGDALTLSGDSSRVRAQIEAAKAESEQLVGDLALVRSRAGELGLQIERAEKVLAADPADSGDWLERVPAALRGHELLGGLLETIGAGSSPASEEISSAFAEARLQLAGQLSELTARRQEIGGALSETFRRFAREFGGSHAQTHGTSPEAAEHYAQLHEQIVADGLPHHEAQFREYFANRSYERFSDLLQLLDEERRMISERIKPLNQILGEVAFEHGSLLRLEVENSIPVEAATFRKDLKNALQDAYTTKDEGTLASSYQALEALVSALSDPGLSAWRSTVLDVRQHVVISCNEHKPNGEVETGLEPGTLSGGEGQRFTSFIMGAALAYQLGFATAGFTSFGTVMIDEAFIQANSEYAAAGIRALQEFGFHLVLAAPEDKIDLSRHLGSITDIIKHPGSNISGFVTTGRSPAMATTITLR

SEQ ID NO: 34886 - protein, 483 aa, Luteimonas sp. FCS-9
MSDPTPPSLFSVVPAGVFGPLASANREHYWLLLHRLFDEFFGPDAPMPPSHGLPRREITAAIERYLVADDPWEDEDGQGPDTPSGTRAHVIYERFRSAGWLRQERIGAREMVSMPPAVSQLLSTLVEFAEHGPTFVSAKVRSIELQMQQVVEGAGAGDALDEAADQARRLLVSLSAMSLQVRDLMPELSRAETTAQFARQWFEQYVSRFFIGDYAGLHRADHPLARRSSILAMVQQVETGPRHEALLAWYREHLAGGDDARAALRLARSLRRLRELERIDEYLGRLDDDIRQANRRALAFLDYRLRAPDRLDILLRRACRGVSTAPAEALRLPVAPGALVDEARLRPPRTRPQPIPRSANAAQVPTPEQLARLSLLRRMKRARLVTAEDMARYVGRHLGEADSVDSSGMAVASIEDLRAYQTLLTLALRSRRIGGLRRDDPLGRLLRGFRVELLDSGDPVDNGLLRAPRFVVRRLAPASRNTA

SEQ ID NO: 34887 - protein, 208 aa, Luteimonas sp. FCS-9
MKRSWNTLSQQSNGLYAVQDFERAAYRLVTEQVLYAADRTSRVAYHLVEDHFDDFVGALAPLGIRLERNAHYRYLVALPAHGEGVAVTLDETLLLLVLRQRYDEAMRQGQIEEHGEVVVELPELQEAYQALAGRAMPDVGALRTLARMLRRWGVARLVDSDRDDPQPFHLLVRPAIVEIVGGLWLQRLDQHNRDDGADADPEDDDAAA

SEQ ID NO: 34888 - protein, 1142 aa, Luteimonas sp. FCS-9
MQLLERVHLVQFFLFEAQTLELDATSAIIAPNGAGKSALLDALQIVLLGGDRSRIRFNAQAGGSARARTIRDYCLGVYRSGDDGRKRRTATTYISLVFRDQETGRALTAGIALGASVDEPEHRLHGPYLLPGVALELDDHLERVKGRELPLAWATFRELAARRCREAGDKVELHTTSERFVRDLLFRLRAAPGAQPDLNAYRKAFQNALNLQRVEDVDLFVRTLVAEDRPTDIARFRALLDSFRQIRDKIEQVRQRIESAEEVERQYGKVAAQAVRAASYRALAAEYRRDLLGEQVEQAEQAGEAARQALAAARLQLQEARSERESLKHELELAQQQLQGSRGYGEQASFDELAGRDREELARLKRELARQIGYVRDQLHALRGVAAPELDDARIEAALAPWRDWAAALSGLAPDAAIDLAPDRFHADARDALAAAAPLRAAVSARARAAHDAWQAVRSRRDALKGNQQRLSAGKAGLRDDVMRLMNYLREAGIEAQPVCDLVRVRDPAWQPAVEAYLRSHVEALLVPAGQEEQAVRVYRALQGARAVYGVKLALPNAGRGARGERAAVDSVAALIEGDDADAVAYLRRQLGDLRCVETEAEVVRSRQGLTRDGLVAKGGGIERRRLPAGSELRIGANDGRERLRVLREELEAAERELREREPEARRLEALQQALARFADADETADALHAQLLQHRQIESRYRARARSQADAIDPDLLRLGEQVRALRERHDENERRIEALIGTEALSRNGVEQAQRVLEGLQAQETLVAQAAVEAFRDADVDPNRVERQREELDTKWPSLEERSRRCDERARDSDGQLARLLPEAWSALSQYARDHGLGLDFDASAWRQARGLLQRELGQLRDTDLVRYQGEAEQAYATAVETFRAGVASALYDNFSRLKQQIATLNRTLRSSPAFSNNERYQFHYEVVPEFRDLERFIRRAADVGGEDGLFGSAGEVPAAFRELIEDGAAARSASSPLDDYRRFFRFEVQIRQDDRVIGSLSERMRSGSGGEHRAPLYVIAGAALAAAYGKSDGNPGGMGLILLDEFGDKIDAQNARATTNYLRSLGLQLVLAAPDTAQGTLSGVLDSYVELFRDGDLLQVERIEVKAAARALLLSDQFDLHPELLDEEAARIARERATT

SEQ ID NO: 34889 - protein, 478 aa, Polyangium brachysporum
MMFFTPPREHFFRPLTHDNRELCAAVLRLLHERVHGANADYAEVLTRELVLEVIQRALGDAALRALAFGASQTTVRAEDERTYASELLRKLKEHGWLEDYRDPIDLRPTLKLSRAGKAFSETFANLDDSRAKTRQRNMRSARKALAAFIATRDADELLDAHEFASRVVQDLQDDIEYFRHLIQSLTREALAQKVAWNEFNDFIEKRFAREYAVRLVADSAERHRGQINEALEEVRALDGNLRALADAHLLQRAPWLEQQVQGRSPMLWLADRIESMVEAACGLKLPMLRSEMNNYVRRFTSLLRQALSLDYGAESPLGRTVAWLKERPTAEHDLLLDVLARRLAASEIRLPGGVLRWTVRDREAAVPEQTPLVVDKASRLNALLRQAEAEAFAFSDQQVLQGLLPHLSQGPITLASLPVATAEDAVRVLHAVGAVRSTEGRRLVRARKTTGQVRTPYFQADDYELRPEPSDSVSDKAV

SEQ ID NO: 34890 - protein, 234 aa, Polyangium brachysporum
MLQSLAQFLDQRLATEGTGTVKPARFAELAGRLLASGVVWREQSQPEAGLYDDALQCEQLLREWFACIGFVLVHDSDARLLRLYPPGEGGGEDEEDGVRRLRARLSRDFVAAVIALRFLYTEALTGRRPLVDERLTISLEELSQAVVSLLAHKLPNAASERLALLRELRKHRVLHFVEGDDAGDMQMGLAVLRPVMSFVSDEAMEEALRMVGRRLDSRVPQPPAGGPRHEDRST

SEQ ID NO: 34891 - protein, 1230 aa, Polyangium brachysporum
MKIGKLLTWHWGSLEDREWPFADTVLLTGESGSGKSTLLDAIQTVLTAAHQHVVQFNVGQDESTQSRRGGKEPRTLAAYALGQQADGVFLRSRSTSYAGIVFEASEQSAEQLEPFTALVAVEAFEDGRRAVLQGAPQFFIVRRALSLDHLARRAGEALAASPLPLKELYVQLQHRLQVGRDKAGTVVQRFPDKGSYLQHLYGALMGKTAVGESDATRAAKSIVKAMAYKELGNVNDLVRDEILEPHDFSRDLDKMRELMRSIAGLKAEAERLALNLERLETAAASANQVLDEARRFVTTTIAHALRARSEAQDELASVQRQIGIQDKKQAQLQEKLASLEAQETQLREQLRLVDKRLDDSDVAREKQALENQIRLQADQFRLHWGRVQEAARGIGGMVAQLGQLLTLDLSAVPALAAAVEALRPAAQQVLKPWPAMAGAYSRDAALDVMLPAFELEVFDAQLVALRQGIHEGDASVQGAVLQALTDVGMRLNQLRDDATQRDAELRRLQAGRAQGPKDAHDAVALIEGELPSARPHLLAQLVEPRAGTRWQNAIEGYMGGDRFAIIVEAGMEARCARLVKQHYPVRSPKVVQGRKAMEDTEGRQLEARAVLHELQCRHPVANAFLMAQYGRVRKVDSEEELARTPQGLMEQGLGSRGYGMFACRAPDGELAFGEAARQRRRQWCEDELQRLAGEIRAMESLRQSLQMITRMFNGAVFTPLTPLLLAVLESQAQHAHAAQALKALDLSAIDALLIEQKDLKDRIEAVRTHHSDETEQVGATKQALSGLYRREADLEIRLPELDIACTNATVWASRFADAVPTLATEPQLLAEAEALAAEADTSLDALRHRVLSLRESLPRTLRELAQGVGAYLSGARDDSERFAWTDPPRSIDRLEELLPLVERTRAAVAEQAQRQRAIGLADNARLLREAEAQFNHVFTSSFCFKVRDDVKQGALTLQRLNRHLQDIRFGHDSFKLEWDWVPRLQKVQEFFEAVEGAVEGMEHDRGSIFSSPRLTDEQRATAEEIRRLLLANDQGASERALRELADYRNYRRYDIVRSSPVGSTRLSTWGTGSGGELETPFYVVRSAVLAHALGHFGRDRRGAPALRLMLSDEAFSKMDESRSRSVLRFLSQTLGLQLVVAMPTSKSGAVKPEFDKEFTFSKVIAHRGGQELFVSEAQEKTLNRPALARLWDAHAEQAREAARARWQVEQNAQPGHAVNPVPTSSDDPAA

SEQ ID NO: 34892 - protein, 370 aa, Polyangium brachysporum
MPLDRKTAPELYDAADADQIELLRMQLDDLLGTGWMALQLAPPRAFAGFTDRKPRLELCDFDALAAWAGYTPQAQRWQRQWREHLAAHWAAHPHAAPADPVAVLDYLARNPLAQMEALPLADATCSLVTLTALCRSGRRMALREASAQSFQGRSKLLDHREELLRLLGAASGQFCESPIQLLLAPPARPHAGPDGFADVLFIENLATFEHMADARAPDWGGSLLVYAAGFRGSARRLRSTGGCRLYLRAPASVGHLPVIESWLFDTQSEHHQLPVHFFGDLDHAGMQILASLRAVFPHASAWRPGYATLARLLAQGGGHAPGLADKAQQVDPGQTGCAYADGELLPLLREQGRVIDQEAFDPERIDGDSA

SEQ ID NO: 34893 - protein, 566 aa, Cellulosimicrobium funkei
MQHDDVDTLRRSSAAWRLLRADTAPLVLSFLGSLFVEDNVRAIPESELVARLDDHLWAVDGRSARASGSEPRYPRAPQAYVDHWAHPDQGWLRAWYPPGSGEPHYDATPAVEQAVRWVASLRGRGFVGTESRLNTVFELLRQLAVGTQTDPAERLRELEERRAAIDEEIAQVRAGRVAVLDAAAQRDRYQQLTQTAADLLSDFREVEANFRSLDRELRERITGWDGAKGELLEEVVRSRTAIAESDQGRSFHAFYDFLLDRRRQEEFAALVERVQSLDAIAPDVVRPAPGAPGPVPDAAATDAAAREQEHRRLRRVHYDWLDAGERTQATVRTLSEQLRRFLDDQVWLENRRVMDILRGVEAKALAARDVRRGPGGPPGMAIDAVAPDVVLPTERPLFTPRPTARLDSDHVEAGDDDFEVDALYDQVHVDPERLARTVRATLTAPGGPGEVALADLLEAAPLEHGLAELVTYLSLEDPRFVVVHDDERTDEVRWEGEAPSGPVADDGAPDPVVRVARLPRVTYARRTGAAGGVPPAPRDPVPHRPPATPRDEHLHDTADPAPEETP

SEQ ID NO: 34894 - protein, 254 aa, Cellulosimicrobium funkei
MSTTRTARDPELSVVVTSLLKGVVYRESGEALWRDLLAREAQVRDTVAMMGLQVVVDEGDGYAYLRSQPEHERDERVPRLIPRRELPFDVSLLLALLRKRLAQADSEGGETRLVLARTEIVDLLRVFLAQDAGAAANEARLVDRVDGLVRRVVELGFLRPAGRPDPDGAPDGGAAPVEDGDPAAGDARRYEVRRILKAFVDAQWLADFDARLAQYLELAADGGARGTASGTAGTGTSTGASAATSAGTTTRTVA

SEQ ID NO: 34895 - protein, 1220 aa, Cellulosimicrobium funkei
MEGLFSAVELHDPAADLDARAGFRLERLEVLNWGTFDQRVWAFDLDGRNALLTGDIGSGKSTIVDAVTTLLVPSHRISYNKAAGAGARERSLRSYVAGHYKSERDEATGTTRHVGLRERGTYSVVLGRFSNRGFDQEVTLAQVFWLAPGQSGQPDRFFVTADRSLTITEDFAGFGGDVAALRRRLRESGAQVRDHFPEYGRDFRRLLGIPSEQAMDLFHQTVSMKSVGDLGEFVREHMLEPFDADRWTDRLVAHFDDLTSAHDAVVRATAQIERLAPLLTDCDAHDALGERSAALVARRDALRAFTASRRVADLDGLIGALDERVADGESRRQRVGDELGLLAAERQRLELDRAGHGGDRLAAIEGEVARREVERAARERRVTQLAGYAAAAGLTLGGADGAEPGVTAPRGAEPGDVPGFGGRGDDDPGFGGGAAAVAAALVDAEAFAALRRRADDAAVRVRDDLARAEERVSEVAAELRAVEQETADVKAELASLADRRSNLPRTHLEVRDRLCAAVGLAPGDVPFVGELLAVRPEHADWEGAAERVLRGFALSLLVPAAHYEAVAAWVDREHLGLRLVYHRVPERVPAARPAPRDDVPLLADLLDVRRLDDAPSLTAWVETELERRADHACAPDLDAFRRLPRAITRAGQVKHSPDHHEKNDTRAVDDRRGYVLGWSTQAKIDALLEQAAEVTARRDTLARRRDEAAAVRGELQARSAALGRLDVYRDWDELDRGAETARIAELAEEKRRLEQASDELGRIAGLLDDNARRHGELEAERDRVVATLGADRHALDEARTARERARAVLDGAGETLDEETTAALAAEFDRELAAVGPADGDGATGPTRAADLDAVENAVRSRLTAEAEQAQRERADLGTRVAGQMASFRSAYPVETAELDADVRSADGYREIHDRLVRDDLPRFEADFKAYLNTNAIRDIAGFAAELAKQADVIRDRIDTINDSLRAIDYNPGRYIRLEMSRTPNLEVREFQQDLRACTDGDGILAEDDRALAEGDGSLADGALSYSEDRFLRVKALVERFRGREGMTDLDEAWRRRVTDVRNWFVLSASERSRADDSEHEHYSDSGGKSGGQKEKLAYTVLAASLAYQFKLDWGAVRSTAFRFVVIDEAFGRGSDESTRFALELFRRLGLQLLIVTPLQKIHVIEPYISAVGFVDNPSGRSSRLRTLSIAAYRDGRTVGEAPPSDAGLETAAEPEPAAR

SEQ ID NO: 34896 - protein, 506 aa, Bifidobacterium bifidum; identical to SEQ ID NO: 31032

SEQ ID NO: 34897 - protein, 347 aa, Bifidobacterium bifidum [sequence omitted]

SEQ ID NO: 34898 - protein, 1196 aa, Bifidobacterium bifidum; identical to SEQ ID NO: 31034

SEQ ID NO: 34899 - protein, 506 aa, Bifidobacterium bifidum
MGDIRREMERLRPVYETGVLRLLLRQNSMMYVALLRAAFDPLTGELPRETLEESFSQSLSRLVDSGEYQLREDQTIADASRRILADLTREGDDDYAWLANSHDAASHRFLYRLTARAHRAIEALSRLEDDSRTLSGAQANSIIMEIEHARMQLTADPGERVALLNREIKARKHEIRQIRHGQRQAALTESQVEDVIAVIHNTLRGVPIDLRELVLNERDNGDALRRRMQAGDMSVDDILTSYHDEYRRSFSESDSGRRFEDAFQVIITDEGRQQIDAALRDIAHTPYLAGESGVLLDQVRAELSRIYDGIEAVRRQMRVSDEAISRLVRQQTDTRYRTMLGKLNRLYAHVNADAKAHQGDDARPYRTDTAAGRFPPLPSRPARPMVRTTTPGLSVPQTPGDATAPDLRSMIDNGGPRLRRMAALILESSVYADDGNGAIDIVASFNGLPKAERKESELVGFLGELGCGDGAGVAWHCISADGSPRDWITGPVLAQEDELHDIVKED

SEQ ID NO: 34900 - protein, 340 aa, Bifidobacterium bifidum
MSDLTNDTAQPDADMDMIGDDMTGTDSADTDSASTGADDMGAVDVEYDGADAEGAVNPYALFEGDTGDMTADARMVAIMLKRERYISGRFYDLALDNRAAVVRSLNNDLLDLVVNEHYRVMYATAVSGPDMTLRALKTRASLKREEAALLAFLRIRVLEYENAHVAPDEWLVSFEEIRAALATGAGYLASRNDEEGVLRQVGAIVSVMCTYGYLRQLDDDETMYRITPLVPVVLDRQLADSWLAVADRDDDGEPAGDMAPAGSRSAAGDTSNADASGADDDGDSDDAGPDAELFEAPLFDDDADADAAENIKGADDANGANDSGIDDETASDGGTAREGE

SEQ ID NO: 34901 - protein, 1194 aa, Bifidobacterium bifidum
MSGKDMQMIADRWMMESRRLVNWGSYEGYHEFRPSTDSQLPVTLLAGASESGKSTLVDAQISLLYPTGTPFNKASNSGRSERSDYTYLRGMIGVGGSDGVDEPMYLRGRDESGAPRSIWGAIVDTYRNFTTGQILSCGKFLYLMPGDGRGDVRRLYLAWDKPIDPRRMDVFRESPFTPTQLKSTYPGCVTFPNAEAFHTHIWDVMGLSAEACRLLARIQSADAPSRLDDIFKQGVLGVPEALDLARATVEDYERYDANFRSMEEKTRRMGKLRAITASYGDYESARDAVHSFDAVNPATKSGSATIRAWAIRRMIGEVNERQPLDRRLRDERRSEARAAGKRIESLRTRIDAVRERMRGLDGGDLTRLDAEMRQAERALADITAGRQRIGRMFEAAGEEFPKDEHAWDERRIEAVTFMRSYEQRKGLLDDMRNQTYAAHASVKQTLQRLNDDYERQKSQRTRISRQMDETRAMLCRATGLGPSELPYVAELMDVREDQEHWRLAMNAAYGSMAQTILVDKRHERGFAAKVSAIDPHAMARRTWQFVDIERGGAGNGPGGANTGATGGTAGEVWLSSKLRYREDSPFAGWLREQTSSERLDALCVDGIDDSDHAVRQVQADGQIKSGKRGQHGIKDRQQVIGFVNESYLAQLRTRIQDAQRQCDETAQSYASAKEQADRLQRERELADQLAYTAWEKIDENSAKAAIADIERTIASVRNNPKLAELDTLQESLSKELDRSQRQRIDIERQAELADQAVNAAQTWLDEHAAQPQPQTRPLDGEAADVSPKAVTNGRTLLTDEVEEALAESYEQRLSGLGDATTRAHMIIGAGAPQRMAQGDTFADRVIAGIGKDLEARVSMLEGRAASARTAVEARMGAYIEMYAGGDDTIAASVDDYRYYQDELESLSKLATVEATAVEYHNCLDKLLMSFLTIKRAIDTDAGDIHDQLERINAMLDGQQFGPRHGSLSLHADVRRPERAFWSALTRVIGTLNDRKAAQTDDDLDGARCAFASCAAMIDMLRREIGQIRDVNGVKSYGARNLDPRCRSSFYALVRHSDGQVERITSTGGRSGGALQELTSFVYGAALIYLLGGGMDNKLKPSYTTLFLDEALIKADGRYTRRALSVLPRLGFQVIVSAPESKTGEILEVSTKAYVTRKDPDAGYTTLHEARLDGIDEMDGADEPEGTVESDDAAE

SEQ ID NO: 34902 - protein, 506 aa, Bifidobacterium bifidum; identical to SEQ ID NO: 30917

SEQ ID NO: 34903 - protein, 340 aa, Bifidobacterium bifidum
MSDLTNDTAQPDADMDMIGDDMTGTGSADTDSASTGVDDMGAADVEYDGADAEGAVNPYALFEGDTGDMTADARMVAIMLKRERYISGRFYDLALDNRAAVIRSLNNDLLDLVVNEHYRVMYATAVSGPDMTLRALKTRASLKREEAALLAFLRIRVLEYENAHVAPDEWLVSFEEIRAALATGAGYLASRNDEEGVLRQVGAIVSVMCTYGYLRQLDDDETMYRITPLVPVVLDRQLADSWLAVADRDDDDEPAGDMAPAGSRSAAGDTSNADASGADDDGDSDDAGPDAELFEAPLFDDDADADAAENIKGADDANGANDSDIDDETASDGGTAREGE

SEQ ID NO: 34904 - protein, 1194 aa, Bifidobacterium bifidum
MSGKDMQMIADRWMMESRRLVNWGSYEGYHEFRPSTDSQLPVTLLAGASESGKSTLVDAQISLLYPTGTPFNKASNSGRSERSDYTYLRGMIGVGGSDGVDEPMYLRGRDESGVPRSIWGAIVDTYRNFTTGQILSCGKFLYLMPGDGRGDVRRLYLAWDKPIDPRRMDVFRESPFTPTQLKSTYPGCVTFPNAEAFHTHIWDVMGLSAEACRLLARIQSADAPSRLDDIFKQGVLGVPEALDLARATVEDYERYDANFRSMEEKTRRMGKLRAITASYGDYESARDAVHSFDAVNPATKSGSATIRAWAIRRMIGEVNERQPLDRRLRDERRSEARAAGKRIESLRTRIDAVRERMRGLDGGDLTRLDAEMRQAERALADITAGRQRIGRMFEAAGEEFPKDEHAWDERRIEAVTFMRSYEQRKGLLDDMRNQTYAAHASVKQTLQRLNDDYERQKSQRTRISRQMDETRAMLCRATGLGPSELPYVAELMDVREDQEHWRLAMNAAYGSMAQTILVDKRHERGFAAKVSAIDPHAMARRTWQFVDIERGGAGNGPGGANTGATGGTAGEVWLSSKLRYREDSPFAGWLREQTSSERLDALCVDGIDDSDHAVRQVQADGQIKSGKRGQHGIKDRQQVIGFVNESYLAQLRTRIQDAQRQCDETAQSYASAKEQADRLQRERELADQLAYTAWEKIDENSAKAAIADIERTIASVRNNPKLAELDTLQESLSKELDRSQRQRIDIERQAELADQAVNAAQTWLDEHAAQPQPQTRPLDGEAADVSPKAVTNGRTLLTDEVEEALAESYEQRLSGLGDATTRAHMIIGAGAPQRMAQGDTFADRVIAGIGKDLEARVSMLEGRAASARTAVEARMGAYIEMYAGGDDTIAASVDDYRYYQDELESLSKLATVEATAVEYHNCLDKLLMSFLTIKRAIDTDAGDIHDQLERINAMLDGQQFGPRHGSLSLHADVRRPERAFWSALTRVIGTLNDRKAAQTDDDLDGARCAFASCAAMIDMLRREIGQIRDVNGVKSYGARNLDPRCRSSFYALVRHSDGQVERITSTGGRSGGALQELTSFVYGAALIYLLGGGMDNKLKPSYTTLFLDEALIKADGRYTRRALSVLPRLGFQVIVSAPESKTGEILEVSTKAYVTRKDPDTGYTTLHEARLDGIDEMDGADEPEGTVESDDAAE

SEQ ID NO: 34905 - protein, 506 aa, Bifidobacterium bifidum
MGDIRREMERLRPVYETGVLRLLLRQNSMMYVALLRAAFDPLTGELPRETLEESFSQSLSRLVDSGEYQLREDQTIADASRRILADLTREGDDDYAWLANSHDAASHRFLYRLTARAHRAIEALSRLEDDSRTLSGAQANSIIMEIEHARMQLTADPGERVALLNREIKARKHEIRQIRHGQRQAALTESQVEDVIAVIHNTLRGVPIDLRELVLTERDNGDALRRRMQAGDMSVDDILTSYHDEYRRSFSESDSGRRFEDAFQVIITDEGRQQIDAALRDIAHTPYLAGESGVLLDQVRAELSCIYDGIEAVRRQMRVSDEAISRLVRQQTDTRYRTMLGKLNRLYAHVNADAKAHQGDDARPYRTDTAAGRFPPLPSRPARPMVRTTTPGLSVPQTPGDATAPDLRSMIDNGGPRLRRMAALILESPVYADDGNGAIDIVASFNGLPKAERKESELVGFLGELGCGDGAGVAWHCISADGSPRDWITGPVLAQEDELHDIVKED

SEQ ID NO: 34906 - protein, 340 aa, Bifidobacterium bifidum
MSDLTNDTAQPDADMDMIDDDMTGTGSADTDSASTGVDDMGAADVEYDGADAEGAVNPYALFEGDTGDMTADARMVAIMLKRERYISGRFYDLALDNRAAVIRSLNNDLLDLVVNEHYRVMYATAVSGPDMTLRALKTRASLKREEAALLAFLRIRVLEYENAHVAPDEWLVSFEEIRAALATGAGYLASRNDEEGVLRQVGAIVSVMCTYGYLRQLDDDETMYRITPLVPVVLDRQLADSWLAVADRDDDDEPAGDMAPAGSRSAAGDTSNADASGADDDGDSDDAGPDAELFEAPLFDDDADADAAENIKGADDANGANDSDIDDETASDGGTAREGE

SEQ ID NO: 34907 - protein, 1194 aa, Bifidobacterium bifidum
MSGKDMQMIADRWMMESRRLVNWGSYEGYHEFRPSTDSQLPVTLLAGASESGKSTLVDAQISLLYPTGTPFNKASNSGRSERSDYTYLRGMIGVGGSDGVDEPMYLRGRDESGAPRSIWGAIVDTYRNFTTGQILSCGKFLYLMPGDGRGDVRRLYLAWDKPIDPRRMDVFRESPFTPTQLKSTYPGCVTFPNAEAFHTHIWDVMGLSAEACRLLARIQSADAPSRLDDIFKQGVLGVPEALDLARATVEDYERYDANFRSMEEKTRRMGKLRAITASYGDYESARDAVHSFDAVNPATKSGSATIRAWAIRRMIGEVNERQPLDRRLRDERRSEARAAGKRIESLRTRIDAVRERMRGLDGGDLTRLDAEMRQAERALADITAGRQRIGRMFEAAGEEFPKDEHAWDERRIEAVTFMRSYEQRKGLLDDMRNQTYAAHASVKQTLQRLNDDYERQKSQRTRISRQMDETRAMLCRATGLGPSELPYVAELMDVREDQEHWRLAMNAAYGSMAQTILVDKRHERGFAAKVSAIDPHAMARRTWQFVDTERGGAGNGPGGANTGATGGTDGEVWLSSKLRYREDSPFAGWLREQTSSERLDALCVDGIDDSDHAARQVQADGQIKSGKRGQHGIKDRQQVIGFVNESYLAQLRTRIQDAQRQCDETAQSYASAKEQADRLQRERELADQLAYTAWEKIDENSAKAAIADIERTIASVRNNPKLVELDTLQESLSKELDRSQRQRIDIERQAELADQAVNAAQAWLDEHAAQPQPQTRPLDGEAADVSPKAVTNGRTLLTDEVEEALAESYEQRLSGLGDATTRAHMIIGAGAPQRMAQGDTFADRVIAGIGKDLEARVSMLEGRAASARTAVEARMGAYIEMYAGGDDTIAASVDDYRYYQDELESLSKLATVEATAVEYHNCLDKLLMSFLTIKRAIDTDAGDIHDQLERINAMLDGQQFGPRHGSLSLHADVRRPERAFWSALTRVIGTLNDRKAAQTDDDLDGARCAFASCAAMIDMLRREIGQIRDVNGVKSYGARNLDPRCRSSFYALVRHSDGQVERITSTGGRSGGALQELTSFVYGAALIYLLGGGMDNKLKPSYTTLFLDEALIKADGRYTRRALSVLPRLGFQVIVSAPESKTGEILEVSTKAYVTRKDPDTGYTTLHEARLDGIDEMDGADEPEGTVESDDAAE

SEQ ID NO: 34908 - protein, 506 aa, Bifidobacterium bifidum
MGDIRREMERLRPVYETGVLRLLLRQNSMMYVALLRAAFDPLTGELPRETLEESFSQSLSRLVDSGEYQLREDQTIADASRRILADLTREGDDDYAWLANSHDAASHRFLYRLTARAHRAIEALSRLEDDSRTLSGAQANSIIMEIEHARMQLTADPGERVALLNREIKARKHEIRQIRHGQRHAALTESQVEDVIAVIHNTLRGVPIDLRELVLTERDNGDALRRRMQAGDMSVDDILTSYHDEYRRSFSESDSGRRFEDAFQVIITDEGRQQIDAALRDIAHTPYLAGESGVLLDQVRAELSRIYDGIEAVRRQMRVSDEAISRLVRQQTDTRYRTMLGKLNRLYAHVNADAKAHQGDDARPYRTDTAAGRFPPLPSRPARPMVRTTTPGLSVPQTPGDATAPDLRSMIDNGGPRLRRMAALILESPVYADDGNGAIDIVASFNGLPKAERKESELVGFLGELGCGDGAGVAWHCISADGSPRDWITGPVLAQEDELHDIVKED

SEQ ID NO: 34909 - protein, 347 aa, Bifidobacterium bifidum
MSDLTNDAAQPDADMDMDMIGDDMTGTGSADTDSADTDSASTGADDMGAADVEYDGADAEGAVNPYALFEGDTGDMTADARMVAIMLKRERYISGRFYDLALDNRAAVIRSLNNDLLDLVVNEHYRVMYATAVSGPDMTLRALKTRASLKREEAALLAFLRIRVLEYENAHVAPDEWLVSFEEIRAALATGAGYLASRNDEEGVLRQVGAIVSVMCTYGYLRQLDDDETMYRITPLVPVVLDRQLADSWLAVADRDDDDEPAGDMAPAGSRSAAGDTSNADASGADDDGDSDDAGPDAELFEAPLFDDDADADAAEDIRGADDANGANDSGIDDETASDGGTAREGE

SEQ ID NO: 34910 - protein, 1196 aa, Bifidobacterium bifidum
MSGKDMQMIADRWMMESRRLVNWGSYEGYHEFRPSTDSQLPVTLLAGASESGKSTLVDAQISLLYPTGTPFNKASNSGRSERSDYTYLRGMIGVGGSDGVDEPMYLRGRDESGAPRSIWGAIVDTYRNFTTGQILSCGKFLYLMPGDGRGDVRRLYLAWDKPIDPRRMDVFRESSFTPTQLKSTYPGCVTFPNAEAFHTHIWDVMGLSAEACRLLARIQSADAPSRLDDIFKQGVLGVPEALDLARATVEDYERYDANFRSMEEKTRRMGKLRAITASYDDYESARDAVHSFDAVNPATKSGSATIRAWAIRRMIGEVNERQPLDRRLRDERRSEARAAGKRIESLRTRIDAVRERMRGLDGGDLTRLDAEMRQAERALADITAGRQRIGRMFEAAGEEFPKDEHAWDERRIEAVTFMRSYEQRKGLLDDMRNQTYAAHASVKQTLQRLNDDYERQKSQRTRISRQMDETRAMLCRATGLGPSELPYVAELMDVREDQEHWRLAMNAAYGSMAQTILVDKRHERGFAAKVSAIDPHAMARRTWQFVDTERGGAGNGPGGANTGATGGTAGEVWLSSKLRYREDSPFAGWLREQTSSERLDALCVDGIDDSDHAVRQVQADGQIKSGKRGQHGIKDRQQVIGFVNESYLAQLRTRIQDAQRQCDETAQSYASAKEQADRLQRERELADQLAYTAWEKIDENSAKAAIADIERTIASVRNNPKLAELDTLQESLSKELDRSQRQRIDIERQAELADQAVNAAQAWLDEHAAQPQPQPQTRPLDGEAADVSPKAVTNGRTLLTDEVEEALAESYEQRLSGLGDATTRAHMIIGAGAPQRMAQGDTFADRIIAGIGKDLEARVSMLEGRAASARTAVEARMGAYIEMYAGGDDTIAASVDDYRYYQDELESLSKLATVEATAVEYHNCLDKLLMSFLTIKRAIDTDAGDIHDQLERINAMLDGQQFGPRHGSLSLHADVRRPERAFWSALTRVIGTLNDRKAAQTDDDLDGARCAFASCAAMIDMLRREIGQIRDVNGVKSYGARNLDPRCRSSFYALVRHSDGQVERITSTGGRSGGALQELTSFVYGAALIYLLGGGMDNKLKPSYTTLFLDEALIKADGRYTRRALSVLPRLGFQVIVSAPESKTGEILEVSTKAYVTRKDPDTGYTTLHEARLDGIDETEGADEPEGTVESDDAAE

SEQ ID NO: 34911 - protein, 506 aa, Bifidobacterium bifidum
MGDIRREMERLRPVYETGVLRLLLRQNSMMYVALLRAAFDPLTGELPRETLEESFSQSLSRLVDSGEYQLREDQTIADASRRILADLTREGDDDYAWLANSHDAASHRFLYRLTARAHRAIEALSRLEDDSRTLSGAQANSIIMEIEHARMQLTADPGERVALLNREIKARKHEIRQIRHGQRQAALTESQVEDVIAVIHNTLRGVPIDLRELVLNERDNGDALRRRMQAGDMSVDDILTSYHDEYRRSFSESDSGRRFEDAFQVIITDEGRQQIDAALRDIAHTPYLAGESGVLLDQVRAELSRIYDGIEAVRRQMRVSDEAISRLVRQQTDTRYRTMLGKLNRLYAHVNADAKAHQGDDARPYRTDTAAGRFPPLPSRPARPMVRTTTPGLSVPQTPGDATAPDLRSMIDNGGPRLRRMAALILESPVYADDGNGAIDIVASFNGLPKAERKESELVGFLGELGCGDGAGVAWHCISADGSPRDWITGPVLAQEDELHDIVKED

SEQ ID NO: 34912 - protein, 367 aa, Bifidobacterium bifidum
MSDLTNDAAQPDADMDMIDDDMTGTGSADTDSASTGADDMDAVDVEYDGADAEGAVNPYALFEGDTGDMTADSRMVAIMLKRERYISGRFYDLALDNRAAVVRSLNNDLLDLVVNEHYRVMYATAVSGPDMTLRALKTRASLKREEAALLAFLRIRVLEYENAHVAPDEWLVSFEEIRAALATGAGYLASRNDEEGVLRQVGAIVSVMCTYGYLRQLDDDETMYRITPLVPVVLDRQLADSWLAVADRDDDDEPAGDMAPAGSRSAAGDTSNADASGADDDGDSDDAGPDAELFELRCSMTTPMRTPPRTSRAPMMPMARTTATLTTRPPRTAALHGKGSDDERQGHADDRRPMDDGKQEARQLGIL

SEQ ID NO: 34913 - protein, 1189 aa, Bifidobacterium bifidum
MIADRWMMESRRLVNWGSYEGYHEFRPSTDSQLPVTLLAGASESGKSTLVDAQISLLYPTGTPFNKASNSGRSERSDYTYLRGMIGVGGSDGVDEPMYLRGRDESGAPRSIWGAIVDTYRNFTTGQILSCGKFLYLMPGDGRGDVRRLYLAWDKPIDPRRMDVFRESSFTPTQLKSTYPGCVTFPNAEAFHTHIWDVMGLSAEACRLLARIQSADAPSRLDDIFKQGVLGVPEALDLARATVEDYERYDANFRSMEEKTRRMGKLRAITASYDDYESARDAVHSFDAVNPATKSGSATIRAWAIRRMIGEVNERQPLDRRLRDERRSEARAAGKRIESLRTRIDAVRERMRGLDGGDLTRLDAEMRQAERALADITAGRQRIGRMFEAAGEEFPKDEHAWDERRIEAVTFMRSYEQRKGLLDDMRNQTYAAHASVKQTLQRLNDDYERQKSQRTRISRQMDETRAMLCRATGLGPSELPYVAELMDVREDQEHWRLAMNAAYGSMAQTILVDKRHERGFAAKVSAIDPHAMARRTWQFVDTERGGAGNGPGGANTGATGGTAGEVWLSSKLRYREDSPFAGWLREQTSSERLDALCVDGIDDSDHAVRQVQADGQIKSGKRGQHGIKDRQQVIGFVNESYLAQLRTRIQDAQRQCDETAQSYASAKEQADRLQRERELADQLAYTAWEKIDENSAKAAIADIERTIASVRNNPKLAELDTLQESLSKELDRSQRQRIDIERQAELADQAVNAAQAWLDEHAAQPQPQPQTRPLDGEAADVSPKAVTNGRTLLTDEVEEALAESYEQRLSGLGDATTRAHMIIGAGAPQRMAQGDTFADRIIAGIGKDLEARVSMLEGRAASARTAVEARMGAYIEMYAGGDDTIAASVDDYRYYQDELESLSKLATVEATAVEYHNCLDKLLMSFLTIKRAIDTDAGDIHDQLERINAMLDGQQFGPHHGSLSLHADVRRPERAFWSALTRVIGTLNDRKAAQTDDDLDGARCAFASCAAMIDMLRREIGQIRDVNGVKSYGARNLDPRCRSSFYALVRHSDGQVERITSTGGRSGGALQELTSFVYGAALIYLLGGGMDNKLKPSYTTLFLDEALIKADGRYTRRALSVLPRLGFQVIVSAPESKTGEILEVSTKAYVTRKDPDTGYTTLHEARLDGIDETEGADEPEGTVESDDAAE

SEQ ID NO: 34914 - protein, 506 aa, Bifidobacterium bifidum; identical to SEQ ID NO: 31032

SEQ ID NO: 34915 - protein, 347 aa, Bifidobacterium bifidum [sequence omitted]

SEQ ID NO: 34916 - protein, 1196 aa, Bifidobacterium bifidum; identical to SEQ ID NO: 31034

SEQ ID NO: 34917 - protein, 506 aa, Bifidobacterium bifidum; identical to SEQ ID NO: 30917

SEQ ID NO: 34918 - protein, 340 aa, Bifidobacterium bifidum
MSDLTNDTAQPDADMDMIGDDMTGTDSADTDSASTGADDMGAVDVEYDGADAEGAVNPYALFEGDTGDMTADARMVAIMLKRERYISGRFYDLALDNRAAVIRSLNNDLLDLVVNEHYRVMYATAVSGPDMTLRALKTRASLKREEAALLAFLRIRVLEYENAHVAPDEWLVSFEEIRAALATGAGYLASRNDEEGVLRQVGAIVSVMCTYGYLRQLDDDETMYRITPLVPVVLDRQLADSWLAVADRDDDGEPAGDMAPAGSRSAAGDTSNADASGADDDGDSDDAGPDAELFEAPLFDDDADADAAEDIRGADDANGANDSGIDDETASDGGTAREGE

SEQ ID NO: 34919 - protein, 1196 aa, Bifidobacterium bifidum
MSGKDMQMIADRWMMESRRLVNWGSYEGYHEFRPSTDSQLPVTLLAGASESGKSTLVDAQISLLYPTGTPFNKASNSGRSERSDYTYLRGMIGVGGSDGVDEPMYLRGRDESGAPRSIWGAIVDTYRNFTTGQILSCGKFLYLMPGDGRGDVRRLYLAWDKPIDPRRMDVFRESSFTPTQLKSTYPGCVTFPNAEAFHTHIWDVMGLSAEACRLLARIQSADAPSRLDDIFKQGVLGVPEALDLARATVEDYERYDANFRSMEEKTRRMGKLRAITASYGDYESARDAVHSFDAVNPATKSGSATIRAWAIRRMIGEVNERQPLDRRLRDERRSEARAAGKRIESLRTRIDAVRERMRGLDGGDLTRLDAEMRQAERALADITAGRQRIGRMFEAAGEEFPKDEHAWDERRIEAVTFMRSYEQRKGLLDDMRNQTYAAHASVKQTLQRLNDDYERQRSQRTRISRQMDETRAMLCRATGLGPSELPYVAELMDVREDQEHWRLAMNAAYGSMAQTILVDKRHERGFAAKVSAIDPHAMARRTWQFVDTERGGAGNGPGGANTGATGGTDGEVWLSSKLRYREDSPFAGWLREQTSSERLDALCVDGIDDSDHAVRQVQADGQIKSGKRGQHGIKDRQQVIGFVNESYLAQLRTRIQDAQRQCDETAQSYASAKEQADRLQRERELADQLAYTAWEKIDENSAKAAIADIERTIASVRNNPKLAELDTLQESLSKELDRSQRQRIDIERQAELADQAVNAAQAWLDEHAAQPQPQPQTRPLDGEAADVSPKAVTNGRTLLTDEVEEALAESYEQRLSGLGDATTRAHMIIGAGAPQRMAQGDTFADRIIAGIGKDLEARVSMLEGRAASARTAVEARMGAYIEMYAGGDDTIAASVDDYRYYQDELESLSKLATVEATAVEYHNCLDKLLMSFLTIKRAIDTDAGDIHDQLERINAMLDGQQFGPHHGSLSLHADVRRPERAFWSALTRVIGTLNDRKAAQTDDDLDGARCAFASCAAMIDMLRREIGQIRDVNGVKSYGARNLDPRCRSSFYALVRHSDGQVERITSTGGRSGGALQELTSFVYGAALIYLLGGGMDNKLKPSYTTLFLDEALIKADGRYTRRALSVLPRLGFQVIVSAPESKTGEILEVSTKAYVTRKDPDTGYTTLHEARLDGIDETEGADEPEGTVESDDAAE

SEQ ID NO: 34920 - protein, 506 aa, Bifidobacterium bifidum LMG 13195; identical to SEQ ID NO: 30917

SEQ ID NO: 34921 - protein, 350 aa, Bifidobacterium bifidum LMG 13195; identical to SEQ ID NO: 32050

SEQ ID NO: 34922 - protein, 1196 aa, Bifidobacterium bifidum LMG 13195; identical to SEQ ID NO: 32051

SEQ ID NO: 34923 - protein, 489 aa, Stenotrophomonas maltophilia; identical to SEQ ID NO: 33309

SEQ ID NO: 34924 - protein, 233 aa, Stenotrophomonas maltophilia; identical to SEQ ID NO: 31708

SEQ ID NO: 34925 - protein, 1126 aa, Stenotrophomonas maltophilia
MAISKHTPALFNEGLPDPRLQQFRMRRLQVHNWGTFNGLTEVPIAERGFLFVGRSGSGKSTLLDAMSALLTPPAIVDFNAAAREAERSGRDRNLVSYVRGAWADQQDSGTGEIATQYLRKGATWTALVLEYRAGDGRVVSLVRLLWISGNGTSAGDVRKHYMIAERPFDIAKDLGGFDLDLRKLKQKLSDLHHFDTFSGYAERFRDLLGIDNEMALRLLHKTQSAKNLGDLNVFLRDFMLDTPKTFDAAERLVSDFAELDGAHQAVVTARRQVETLLPARAYYNDLKEMHRRRGDDEALKLGVDSFRESRRQALIEARLREMDVRDRGLLGEEAQRRAALDNHTERLAELELQRRQQGGERIEELEREQGRAEAERDRRQAKREQASLAAQQLGAELPDDAHGFAELVERAQNELQDRQRASSALDDAISDRLGGKRDDERRFGEVRAELEAMQRTPSNIPAPMQKLRARLAEETGIAEAALPFVGELIQVRSEEQGWQGAIERVLGGFALSLLVDDKHYNDVAEWVNRTHLGMRFTYYRVRRNDDAFAREPSAKSLLHKLELREHVFESWLRRELGKRFDYECVDAKQLRNVDRGITREGQVKHPGDRFEKDDRSAVGDRRRWILGFNNHDKVGAFEREAQELAKRIASCETDIARLRGQRDRDNERRLACHELVSISWNEIDIAAPQQRLTDIEATLRDLREGNADLARLAKQIDAVRADIEQARRTYEDVRVERGQLVKERDRLDRARQQSRALVLPSLAQEQEAGLAERLQEQGPLSLETLEAHMRQVSNALNEQLSTSQQDLNRIENQLIGCFRRFIQQWPEESGDFTVSVASAEDFLARLERLERDGLPQHEERFFDLLQNQSKNNLLALQRHSAEARKSIGQRLDEVNASLEQVPFNRGTLLTIELSDRRLPEVGEFHLQLREVLAQQQTEQRELAESQFTVLRQLVNRLGSQEGEDKRWRELVLDVRMHVEFIGVELDAETRQQVEIYRSGAGKSGGQRQKLATTCLAAALRYQLGGADSQLPSYAAVVLDEAFDKADNEFTALAMNIFDNFGFQMVVATPLKSVMTLEPFIGGACFVEISGRHDSGVLLIEYDEEGKRLKLPERAASRPTNRKKPNA

SEQ ID NO: 34926 - protein, 493 aa, Mycobacterium sp. EPa45
MDVDDDTTLSAVDLLEINREIQGSPTIRLLAALNLGGYATLMERHLNEGVISETELVVRLERDLDELGRPAGEQSGLGLIKSWASQGWLHRVADQRTGVERNLCYLTQDARRALDFLRGLRRQDTIATGGSINGIASRLKQIALRVGNDPVRIRAGIQAEIEALQAELDALERGEDLDRSADVDMTDMYDEAHAIALQMERLITDIGQYGTMIERATAALDEPIDSNLAYRDRQRQMYADYQAAWDSQGRDSHRAFLRMINDPDQRAEFEADVLAVAHALPALDPALRKVMAGFFELVGQQIDEVERIQQRCAQRVKRFTAFGTLEQSRGVARQLNDAIGAARALLKSSLTDSRLDIELPLARHAFSSVGALSFRIGELSDPKPAQAAEGELDLTSFAALTTQVDAPAMSEMINTALDADGRLSLPEAVEMLDAAYLGHVIVLWSWALKQPDASTTAEPVTVRFQSLDGRDREMEVPHLVFTEPISSLLGASA

SEQ ID NO: 34927 - protein, 232 aa, Mycobacterium sp. EPa45
MTTTDADIDFSSLPQVDQTARTPHQRRPRFDGDVSELPDRACWALQQLLTRRYISAEADADLYSWVLEYRAQLSVRLSELDLMLRVVDGTDVAFVEQARYESARGVKLLRREPLGTYDSILALHLAQMSRAAGGQAVLISREEVHGLFSGVRGGVDRDIVTFTGRIDAAIARLTALDILRKTRDDEDSYTVSPVINAVMTASVIAELQQQFELLLSGSASPDHDEQESALDG

SEQ ID NO: 34928 - protein, 1123 aa, Mycobacterium sp. EPa45
MAEQFHLSRLQVINWGVFDGYHDIPFSDGGALIAGASGSGKSSLLDAISLGFLPFNRRNFNASGDNTAAGSSAGRRTVDKYVRGAWGQRSDGGSSKVMYLRGEGTAWSAIAVSYRSNTGRTVTGLVLKWLTGESRSDSSSRFVLADGDRDIEDVCNRWAAGRFDSGVFKDDEWRFSTKVESQYLAQLYATIGIRASDAAQQLLGKAKSLKSVGGLEQFVREFMLDEPSSLTRLPDALRQIDPLVEARELLAVAQKKRKILGDIEKIQQRYASESSDLGIIDLVDQPMVRAYTDHVRLAQCGPQIESMDATIDQLGNEYEDVTRQLNLAKAEGDSLNAQISGSSASLGPLQSQLAGAEAQAEQVSRRRAAYEAMLAAQDIDVPDSADEFWNLREELATEVTELLAKLDRGREASTDAEYAQKAARIARDDAAKELKRVEHVGSALPEFAITMREHICAAVGVDPGELPYIAELMDLRPDQSRWRVAVEKVLRGVGLRLLVPDDRYSAVLRFVNETNMGGRLQLHHVRASLVGAVPADAEPNTLGGKLFVVDPTHPCAAEAADVIAAAGDHLCVDTPDVFSRFRRAVTDTGLYKDSERLAVKDDRRPLKQSDYIYQGDVRAKIDALTVDLACAEETYQQARRKADEIAAQRQQWRDRAAACKAICEQFPQWNQVDIDTADGHADRLREQFELLLADNPDIEALTARADECWEEIQTLMTRRGAIQTRRDDLDSRRTQLLELQDRLTPAFVSEPLTELLNRYAAAIPVALEVLNPEPHREAVFNTIRREREQLRESRRRSYDELARILNTFDTAFPDAIPNDSEVFDERVHDYVALCRHIDERELPDAYERMMRLVTEQAPDAILTLHRVAEQEARRISEQIDRVNTGLGAVEFNSGTRLTLRATPRSLTAVAELTEIVRAISRRIAEVGLGDKQAILDQYADILRLRNRLASTAPEDKAWTRDALDVRNRFTFDCAEWDVRTEELIRTHSNAGDNSGGEQEKLMAFCLAGALSFNLASPESSDNKPVFAQLMLDEAFSKSDPQFAQQALQAFRKFGFQLVIVATVQNATTIQPYIDSVIMVSKTEATSRSARPVATVVSKTISDFTTLRAEMRSSAARERVPAGV

SEQ ID NO: 34929 - protein, 480 aa, Mycobacterium haemophilum
MDDNAGLSAVELLELNRDLQNSRAIRLLTTTNLGLYATLMERHLAEGAIAETELVVRLEHDLDDLDDPQSGLALIKSWASQGWLHRIVDERHDQNVCYLTQDARRALDFLRGMRRHDTIATGGSITGIASRLKQVAVKVDRDPARIRKHIEAEIAALHEELDQLDAGQRPQPDVTDCYDEARAIALQMERLITDIGQYGTMIEQATAALDEPIDSNTEYRDRQRQMYTDYQAAWDSQGRDSHRAFLRMINDPDQRAEFEADVAAVAEALPALDPALRKVMAGFFELVGHQIDEVERIQQRCAQRVKRFTAFGTMEQSRGVARQLNNAIGAARALLKSSFTDSRLDIDVPLARHAISSIGALSFKIGDLSNPKPAKPGNSEVDLTSFAALGTQVDAPAMSDMLNHAITNGPVSLPDAVAMLDTAYLGHVVVLWSWALQQPNPESSESTPVRFRSLDGRDREIAVPRLTFIEPITTLAGATA

SEQ ID NO: 34930 - protein, 238 aa, Mycobacterium haemophilum
MKTDQPTPDPDIDFSSLPQVDQNARPPVARRPRFDGDVSELPDRACWALQHLLARRFITAEADADVYSWVLEYRKELSVRLSELDLLLRIAEVGYETNGVAFVEQARYESARNIKLLRREPLGTYDSILALHLAQMMRAAGGQTVLISREEMHGLFAGVLNDTDRDAVTFAARIDGAIARLAGLEILRKSRDDENSYTISPVITAIMTASVITKLQQQFEQLLTGGTPQDTEEIALDD

SEQ ID NO: 34931 - protein, 1120 aa, Mycobacterium haemophilum
MTEQFHLSRLQVINWGVFDGYHCIPFSAGGALIAGASGSGKSSLLDAISLGFLPFNRRNFNASGDNTAAGSSAGRRTVDKYVRGAWGQRSDGGSSRVMYLRGDGTAWSAVAVTYASDSGRTVTGLVLKWLTGESRNDSSSRFVLGDGDLDIEDVCNRWAAGRFDAAVFKEDWRFSTKVESQYLAQLYATIGIRASDAAQQLLGKAKSLKSVGGLEQFVREFMLDEPDSLARLPEALKQIDPLVEARELLAVAQKKRKILGDIETIQQRYASESSDLGIIDLVDAPMVRAFTDHVRLAQSPTQIATLDGTIDQLENEYEDVTRCLNLAKAEADSLNAQISGCSANIAPLQSQVTAAETEAEQVTRRRTGYEGLLTAHDIEIPDTAEEFWNLREELLAQATELLAKVERNREASTDAEYAQKSARIARDDTAKELKRVEHVGSALPEFALAMREHICAAVGADAAELPYIAELLDLKPDQTRWRLAVEKVLRGAGLRLLVPDQHWAAVLRFVNETDMRGRLQLHHVRAKFLGAEPVEPNPNTLAGKLFAVDPQHPCAAEAVDIITAAGDHVCVDTPDVFDRFRRAVTDAGLYKDSDRLAIKDDRRPVKQSEYLYQGDVSAKINALTLELAGAEEAYQKARRTADDIAAQRQQWRDRAAACKAICEQYPQWSQIDTETADGHADRLREQYELLLADNPDIEALNARADECWSQIQKLMTRRGAIQTRRDGLDERRTRLLELQDRLSPTFVSEPLTDLLRRYAATIPVSLELLDPEPHRDALFAAIKKEREQLRESRRRSYDELARILNTFDTSFPDAIPNDSDDFDERVHDYVALCRHIDERELPEAYERMMRLVTEQAPDAILTLHRVAEQEARRISEQIDRVNTGLGAVEFNRGTRLTLRATPRHLLAVNELTEIVRSISRRIAEVGLGDKQAILDQYADILRLRNRLASTAPEDKAWTRDALDVRNRFTFDCAEWDISNEELIRTHSNAGDNSGGEQEKLMAFCLAGALSFNLASPESTDNRPVFAQLMLDEAFSKSDPQFAQQALQAFRKFGFQLVIVATVQNATTIQPYIDSVVMVSKTEATGRSARPVASVATRTISEFTSLRHEMRAAVPRVPARA

SEQ ID NO: 34932 - protein, 480 aa, Mycobacterium haemophilum; identical to SEQ ID NO: 34929

SEQ ID NO: 34933 - protein, 238 aa, Mycobacterium haemophilum; identical to SEQ ID NO: 34930

SEQ ID NO: 34934 - protein, 1120 aa, Mycobacterium haemophilum; identical to SEQ ID NO: 34931

SEQ ID NO: 34935 - protein, 491 aa, Mycobacterium senegalense; identical to SEQ ID NO: 34876

SEQ ID NO: 34936 - protein, 251 aa, Mycobacterium senegalense; identical to SEQ ID NO: 34877

SEQ ID NO: 34937 - protein, 1120 aa, Mycobacterium senegalense; identical to SEQ ID NO: 34878

SEQ ID NO: 34938 - protein, 480 aa, Mycobacterium haemophilum; identical to SEQ ID NO: 34929

SEQ ID NO: 34939 - protein, 238 aa, Mycobacterium haemophilum; identical to SEQ ID NO: 34930

SEQ ID NO: 34940 - protein, 1120 aa, Mycobacterium haemophilum; identical to SEQ ID NO: 34931

SEQ ID NO: 34941 - protein, 480 aa, Mycobacterium haemophilum; identical to SEQ ID NO: 34929

SEQ ID NO: 34942 - protein, 238 aa, Mycobacterium haemophilum; identical to SEQ ID NO: 34930

SEQ ID NO: 34943 - protein, 1120 aa, Mycobacterium haemophilum; identical to SEQ ID NO: 34931

SEQ ID NO: 34944 - protein, 490 aa, Xanthomonas oryzae pv. oryzicola; identical to SEQ ID NO: 31050

SEQ ID NO: 34945 - protein, 232 aa, Xanthomonas oryzae pv. oryzicola; identical to SEQ ID NO: 31051

SEQ ID NO: 34946 - protein, 1142 aa, Xanthomonas oryzae pv. oryzicola
MKSSSSSLFADDLPDPRVQQFRMRRLQVHNWGTFNGLTDVPIAAKGFLFVGRSGSGKSTLLDAMSALLTPPNLVDFNAAAREAERTGRDRNLVSYVRGAWADQQDSASGEIATQYLRKGSTWTALVLEYRNGEGRVISLIRLFWIAGSGAAAADVRKHYMVAERSFDIASELVGFDLDLRKLKARLGDDIAHFDNFSGYAERLRHQLGIANEMALRLLHKTQSAKNLGDLNVFLRGFMLEAPKTFDASERLVGDFAELDGAHRAVVTARRQVETLLPARAHYDDLQSVQRQRGRLQELKLGLDPYREQRRLALLDARLHALDVNDQGLAGEEGQRRAAVDNHQQRLSDLEAQRRSQGGERIDALEREQLQVQGELARRSDKRAKAEQACRQLDQTLADNAHGFAEQSAQARAALEDGQRLAAEQDEAIVERIAGKREDSQRFAQVRAEIEALTRNPSNIAAPMQALRARLSEETGIPEAALPFLGELIQVREEDAAWRGAIERVLHGFAQSLLVDERHYAELAEWVNRTHLGSRLVYYRVRNNEQAFAGREPGSASLLHKLQLREHPFAGWLRRELGKRFDYDCLESAKALRTAERAITREGQIKHPGERYEKDDRHAVGDRRRWLLGFDNRDKLALYEREAIELAQRIAACDADVAELRARRERDASRRLAQHTLANLAWEEIDVAAQLQRRDDIANALRQLREGDANLRALGEAIERTRGDLEQAKRTFDGVREERIALGVERTRLEKQRLHCADADARVVTPLQREGLEERLANLGALSLDNLEAHFRQIGNAIAEQTSASDSEHNRLEQLLLGCFRRYSQQWPEDSGDFIISLAGAEDFLARLQRLERDGLPQHEARFFELLQSQSKNNLLALQRHTAEARKSIAQRLDEVNASLEQVPFNHGTLLTIELSDRRLPEVIDFHQRLRDVLGHHQTEQRDVAEQQFAVLRELVRKLGSADGEDKRWREVVLDVRLHVEFVGVELDAATRQQVEIYRSGAGKSGGQRQKLATTCLAAALRYQLGGEDGELPCYAAVVLDEAFDKADNEFTALAMNIFENFGFQMVVATPLKSVMTLEPFIGGACFVEISGRHDSGVLLIEYDEQARRLKLPERSRSAAAAGAARATEPSDAVGGASVDELH

SEQ ID NO: 34947 - protein, 393 aa, Xanthomonas oryzae pv. oryzicola
MAPAAPMMLPAAALLALRGQWQRARGQWLIGEGAPQAIGLRAPTQAQAIARFDAFGAWLQEWSRTGLPGRVEYRAVSWTQLGPQRLPQTWVLDDAGQAAGALGEGERWARARQRSAALQARWPQAVALAARLRRQFDLLADWPEAEFARLVAVVEWLHQHRDSGLFLRQLPIAGIDSKWIEPHRGVIADWLAGLRGIAEPRSFASLSGLRNAPDRVRLRLLDPALRHHLGGLEDITAPIAQIAALRLPVRRVLIVENRETGLACESLPGTLVLMARGYAVEYVSNIAWLRELPLYYWGDIDTHGLAILHRLRTHAPHTTAVLMNEATLQATPRALWGHERRPHRAQRLAALSIQEQRLYADLRGGRFGPSPRLEQERIAWDYAWPRIQAALAD

SEQ ID NO: 34948 - protein, 489 aa, Xanthomonas translucens pv. undulosa; identical to SEQ ID NO: 32239

SEQ ID NO: 34949 - protein, 234 aa, Xanthomonas translucens pv. undulosa
MNWHDHELDPEQGRSNDAVDSAAPDAGTDLFPGDSGRLPVEARRALCQLLSGPSVDAQRHSRLWPALLRSEAAIRSALADLFLELVLDREAGIAFTRQADTGELEAPVLLRSSPLTFIDSVLLLYLRQQLAEADARGLRAVVEEAQLGEALAVYEKNLSTDRAGFLRRVGNAVQKMKDNHILTRLRGEDERYEVSPALKLLFSAEDVAALAQVYRQLREGPDSGEDAAAAAQDA

SEQ ID NO: 34950 - protein, 1198 aa, Xanthomonas translucens pv. undulosa
MKSSASTPGLFAGDLPDPRLQQFRMRRLQVHNWGTFSGLTEIPIAARGFLFVGRSGSGKSTLLDAMSALLTPPSIVDFNAAAREAERSGRDRNLVSYVRGAWADQQDSESGEIATQYLRKGATWTALVLEYRNGEDRVVSLVRLFWIAGNGTAAADVRKHYMVAERAFDIAADLDGFDLDLRKLKQRLHDVHHFDSFAGYAERFRHQLGIGNEMALRLLHKTQSAKNLGDLNAFLRGFMLEEPKTFDAAERLVGDFAELDGAHQAVVTARRQVETLLPARAHHAELMAVRRQRSELDELKLGIDSYREQRRLALLDARLQELDTQDRGLAGEEGQRRAALENHQRRLDDLEAQRRAQGGERIDALERERGQLEVERDRRAGKRTQAEQACRQLEQVLAGSAQGFAGQAAQARAALEDGTRAAAELDEAISQRIAGKAEDAKRFAEVRAEIDALKRNPSNIPAPMQALRARLSADTGVPEAALPFVGELLQVRSEDADWRGAIERVLHGFAQSLLVDERHYADVADWVNRTHLGIRLVYYRVRDNEHALPGRAPAAGSLLHKLELREHAFAGWLRRELGKRFDYDCVDNAKALRHAERAITREGQVKHPGERYEKDDRHAVNDRRRWLLGFDNRDKLALFEEEGLALAQRIAACDADVAALRARRERDGARRLAQHTLANLAWDEIDVAAPLQRLDDIATALRQLREGDGNLRALGEAIDHARADIKQAERTYESVREERIGLGVERVRLEKQRLNCADANARVVTPLQRQGLDERLAGLGVLSLDNLEAHFRQIGNAIVEQTSASDKEHNRLEQLLLGCFRRYCQQWPEDSGDFTVSLSSAEDFLARLQRLERDGLPRHEARFFELLQSQSKNNLLALQRHTAEARKSIAQRLDEVNASLEQVPFNRGTLLTIELGDRRLPEVIEFHQRLRDVLGHHQTEQRELAEQQFAVLRELVRRLGSQDGEDKRWRELVLDVRLHVEFVGVELDAATRQQVEIYRSGAGKSGGQRQKLATTCLAAALRYQLGGEDGELPRYCAVVLDEAFDKADNEFTALAMNIFENFGFQMVVATPLKSVMTLEPFIGGACFVEISGRHDSGVLLIEYDEQARRLKLPERTRGTATPADAAPAPEAEQPGTAPSRLRADTAAVVRGDAGEPAVSDGAAAMAPVPHRALPKSKAKSKPESKPESKPGSKPNSKA

SEQ ID NO: 34951 - protein, 402 aa, Xanthomonas translucens pv. undulosa; identical to SEQ ID NO: 32242

SEQ ID NO: 34952 - protein, 486 aa, Diaphorobacter sp. J5-51
MKADKAIATYRRMRAKPLWRLLASNTGPTVIGLLQAHLYEGERSLPASIFHERIARDLEDLRAQGEDFPQTAQAYVASWLADGYLERRFPAGASEEEYELSTAAVEAIRFVSGLEQPHSAATESRLTLVIEALARLAEDTDTDKFRRIDRLMAEQARIDKEIDAIQKGQMRVLPHATALERTREIITLADGLAGDFRRVRDQFDQLNRDLRERIMDNDGNRGDVLDSLFAGIDLISESDAGRTFSAFWRLLTDPEQGATLDQALDSVMSREFVGQLEAKERRFLLRLTRTLLEQGGMVHEVLQTFARSLKHFVQSREYLEQRRLNHLLKDAQRAALALKDEVRATETLQYTLELTSSRLRSLSQWVLYDPSLQALPGQMAEGDAPPIDLESVSELVAQSEIDFRTLKANVLAVLEQRSQASIADVLEQFPAAQGLGSVVGLLALGSRHGFKADHSETVGWVGGDDERRSARIPKIFFLRERANELV

SEQ ID NO: 34953 - protein, 235 aa, Diaphorobacter sp. J5-51
MNWSENDEAAMPAEAQAPDASQASANTLFMGDGGELALDTRRALVQLLAGPSLDGRRHPKLWLILVRDEAVIRRRLAELFLELVIDRDVQVAFTRQADTGDLEVPLLLRRAQLTFIDSILLLHLRQRLTQADSQGDRAVVSTDEIMEFLTLYERASNTDRAGFVKRVHASIEKIKKHSILQKIRSSEDRFEISPTLKLLFSAEEIQALTHLYQRMAAGETPAQLAQTESDEGADQ

SEQ ID NO: 34954 - protein, 1124 aa, Diaphorobacter sp. J5-51
MISEPQTASLFAREQFRMTRLQVYNWGTFSGLHDVPISERGFLFVGRSGAGKSTLLDAFSALLVPPRWIDFNAAAREADRSGRDRNLVTYIRGAWAEQKDGESGEIATRYLRSGTTWSALALTYQNALGQSVVLVQVFWLRGNANGSTDVKRHYLVLERAFDLRELEDFGQSNFDIRKLKQSFPEAFARDEFRPYCERFCRLLGIESEMALRLLHKTQSAKNLGDLNTFLRDFMLDKPETFEVADRLVSEFGELNAAHQAVVTAREQVQTLAPAQEQYQRRDSLMLQRNGLDELRLGVDGYRETRRIELLKQHVESLEVQASGSEGEVSRRQSILDNHTTTLRDLERQHREAGGDQIEQWEAEKSGLEGQRTDRLRKRGQAEDACKKLGWSLPDSPQAFAELLGNARQEVENWEQRSNENREEQFRLAGQKKDAETSFSQAVKEVQALQRQPSNIPADMLEMRRDIAAAIGISESALPFVGELIEVKPDEAEWQGAIERVLHGFALSLLVDERQYSALANYINNTHLGQRLVYYRTGRSETWQAKPIGANSLVLKLNVKDGTYADWLQAELRQRFDYACVDSIQAFRSADRAITREGQVKHSKTRHEKDDRRSVGDRRNWVLGFDNREKLGLFQAQAQELAATITRLGGEIETLADQDKNRATRAIQCQTLVNLQWQEIDVVPLLDRISTIEQQIREAREGNTALLQISGRIDKQKNLVDQADKDLRDAKVAHDSVLKQINDSTQKLESLLQDASRVPLTPHQIKGLDERFTKQSDAIRLESLDKVATAVERGLNTEIGEIKDEIGDCEKEIEARFADFKRQWPMDAVDMDTSLASAADFFAKLVRLETDGLPAYEQRFFELLQNQSHQNLAALSTYLNDARKAILERMDLVNDSLGQVPFNQSANQRTYLHIDASDRQLVDVKEFKQEIQQALSHAWTEDREFAEARFLALRRLVDRLASQDPEQKRWRETVLDVRQHVEFIGREIDESGVEVEIYRSGAGKSGGQRQKLATTCLAAALRYQLGGNDHGVPMYAPVVLDEAFDKADNEFTALAMNIFTNFGFQMVVATPLKSVMTLEPFIGGACFVDISDRRVSGVLLIEYDGDRQRLKLPEHAREEASVEAS

SEQ ID NO: 34955 - protein, 506 aa, Bifidobacterium bifidum ATCC 29521 = JCM 1255 = DSM 20456; identical to SEQ ID NO: 30917

SEQ ID NO: 34956 - protein, 345 aa, Bifidobacterium bifidum ATCC 29521 = JCM 1255 = DSM 20456; identical to SEQ ID NO: 32843

SEQ ID NO: 34957 - protein, 1198 aa, Bifidobacterium bifidum ATCC 29521 = JCM 1255 = DSM 20456
MTMSGKDMQMIADRWMMESRRLVNWGSYEGYHEFRPSTDSQLPVTLLAGASESGKSTLVDAQISLLYPTGTPFNKASNSGRSERSDYTYLRGMIGVGGSDGVDEPMYLRGRDESGAPRSIWGAIVDTYRNFTTGQILSCGKFLYLMPGDGRGDVRRLYLAWDKPIDPRRMDVFRESSFTPTQLKSTYPGCVTFPNAEAFHTHIWDVMGLSAEACRLLARIQSADAPSRLDDIFKQGVLGVPEALDLARATVEDYERYDANFRSMEEKTRRMGKLRAITASYDDYESARDAVHSFDAVNPATKSGSATIRAWAIRRMIGEVNERQPLDRRLRDERRSEARAAGKRIESLRTRIDAVRERMRGLDGGDLTRLDAEMRQAERALADITAGRQRIGRMFEAAGEEFPKDEHAWDERRIEAVTFMRSYEQRKGLLDDMRNQTYAAHASVKQTLQRLNDDYERQKSQRTRISRQMDETRAMLCRATGLGPSELPYVAELMDVREDQEHWRLAMNAAYGSMAQTILVDKRHERGFAAKVSAIDPHAMARRTWQFVDTERGGAGNGPGGANTGATGGTAGEVWLSSKLRYREDSPFAGWLREQTSSERLDALCVDGIDDSDHAVRQVQADGQIKSGKRGQHGIKDRQQVIGFVNESYLAQLRTRIQDAQRQCDETAQSYASAKEQADRLQRERELADQLAYTAWEKIDENSAKAAIADIERTIASVRNNPKLAELDTLQESLSKELDRSQRQRIDIERQAELADQAVNAAQAWLDEHAAQPQPQPQTRPLDGEAADVSPKAVTNGRTLLTDEVEEALAESYEQRLSGLGDATTRAHMIIGAGAPQRMAQGDTFADRIIAGIGKDLEARVSMLEGRAASARTAVEARMGAYIEMYAGGDDTIAASVDDYRYYQDELESLSKLATVEATAVEYHNCLDKLLMSFLTIKRAIDTDAGDIHDQLERINAMLDGQQFGPHHGSLSLHADVRRPERAFWSALTRVIGTLNDRKAAQTDDDLDGARCAFASCAAMIDMLRREIGQIRDVNGVKSYGARNLDPRCRSSFYALVRHSDGQVERITSTGGRSGGALQELTSFVYGAALIYLLGGGMDNKLKPSYTTLFLDEALIKADGRYTRRALSVLPRLGFQVIVSAPESKTGEILEVSTKAYVTRKDPDTGYTTLHEARLDGIDETEGADEPEGTVESDDAAE

SEQ ID NO: 34958 - protein, 505 aa, Bifidobacterium angulatum DSM 20098 = JCM 7096; identical to SEQ ID NO: 33574

SEQ ID NO: 34959 - protein, 342 aa, Bifidobacterium angulatum DSM 20098 = JCM 7096; identical to SEQ ID NO: 30942

SEQ ID NO: 34960 - protein, 1165 aa, Bifidobacterium angulatum DSM 20098 = JCM 7096; identical to SEQ ID NO: 30943

SEQ ID NO: 34961 - protein, 405 aa, Bifidobacterium angulatum DSM 20098 = JCM 7096; identical to SEQ ID NO: 33577

SEQ ID NO: 34962 - protein, 487 aa, Bifidobacterium catenulatum DSM 16992 = JCM 1194 = LMG 11043
MLRLLLRGNSMLYVALLRSTFDPLTGELPREIVEERFSRSLTRLAETGDYTPKEGQTSAEAAHTILQQLTKEGEGDYAWLANSLDVAAHRYLYRLTARAHRAIEALDRLEDTTKALSGAQANSIIMEIEHARMQLTADPRERIRLLERDIEERQKQIDELKHSDTLDKLTSQQVGDIIGVIHNTLRGVPIDLRELALEERDNGDNLRRSMQSGSISVEQALGTYHDEYHRSFHESDSGRRFEDAFQVIVTDEGRREIDEAVRDIAQNPYLEGEPGILLAQVRAELKRIYEGIEDVRRQIHISDEAVSRLVRQQTDTHYRTMLDKLHRLFVRASDDAKTYPGSDERPYRTDTGTAQFQALPSRPAKSMARAATAGLDDAPSTNVDAPDLKAMVEMCGPRLTHMIGLIRRDPVKTADGRFVDFAASFNRLPREERRESELIGFLSALRTQDGPATVAWHCVSIDGGERVWRTRPIFTTEAALDEIIEEG

SEQ ID NO: 34963 - protein, 279 aa, Bifidobacterium catenulatum DSM 16992 = JCM 1194 = LMG 11043; identical to SEQ ID NO: 33633

SEQ ID NO: 34964 - protein, 1152 aa, Bifidobacterium catenulatum DSM 16992 = JCM 1194 = LMG 11043; identical to SEQ ID NO: 31089

SEQ ID NO: 34965 - protein, 411 aa, Bifidobacterium catenulatum DSM 16992 = JCM 1194 = LMG 11043; identical to SEQ ID NO: 31090

SEQ ID NO: 34966 - protein, 484 aa, Bifidobacterium pseudocatenulatum
  DSM 20438 = JCM 1200 = LMG 10505
MLLRNNSMLYVALLRSTFDPLTGELPREIVEERFARSLNRLIETGDYTLKDGQTAREAAHSVLLDLAREGEGDYAWLANSMDVASHRYLYRLTARAHRAIEALDRLEDTTKALSGAQANSIIMEIEHARMQLTADPRERIRLLKRDIEERQKEIDELEHSEALEKLTSEQVGDIIGVIHNTLRGVPIDLRELALSERDNGDALRRRMQAGAMSVESILTAYHDEYRRAFRESDSGRRFEDAFQVIVTDEGRREIDDAVRDIARNPYLDGEPSVLLNQVRSELKRIYEGIEDVRRQIRTSDEAVSRLVRQQTDTSYRTMLAKLNQLFAKTSAEAKAHPNDQSRPYHTDAGQAKFPTLPSRPARSMARAASSSLNDAPAATIEAPDLKNMVEICGPRLTRMIRLIRSNPVTTSDGMFVDLAASFNQLPKAERRESELVGFLSALRTQDDSSYVTWRCISIDGSERVWRTKPILITETTLDDIIEER

SEQ ID NO: 34967 - protein, 260 aa, Bifidobacterium pseudocatenulatum; identical to SEQ ID NO: 31084
  DSM 20438 = JCM 1200 = LMG 10505

SEQ ID NO: 34968 - protein, 1152 aa, Bifidobacterium pseudocatenulatum
  DSM 20438 = JCM 1200 = LMG 10505
MADGMKIVSDKWMLQSRQIVNWGSYGGWHEFRPSMDETMPVTLLAGASESGKSTLVDAQISLLYPSGTPYNKASNSGRSERNDYTYLRGMIGVSDSENGETPIFLRGKDADGTPQNIWGAIVDTYVNKTDGGLLSCGKFLYLNAGDGQDGLRRRYITWNRTIDPRLMDQYRNTPFTRSMFEKTYPECTTHTNAAAFHASIWQDMGLSADACRLLHKIQSADAPSKLDDIFKQGVLDIPESIRLAHETVDDYNRFNENFHSMEDKMARVAILQNIQTRYGEYAKQTTERREYEPINPDSEHGNATLSAWARSRMASEVRAGLPAAQRKVKESQEAIDRAMQRVGELNTRIDAVKERIQGIDGGSLQQLGKDLQRVRQDIDEASRQRHAIAERFEQVEGRLPDSEQTWDAKRAMLAETLDTYEERLKDANARFQQLVGERHDRQRDRDSLRRDYQRKLTHRTRISDDMDDARTLIMRATGLDASELPYVAELMDVNEQDEQWRLAMNVTYAPIAQTILVDKRHEQGFAAKISAIDPKLMTRRTWRFIDTGMQYESSASEGWMSSKLQYREDSPFAGWLKNQTTSPRFDARCVHAIDDMNHDERQVQADGQIKSGDRGFHGSKGLHQVIGFMNEQYLAELKNQLDKAEQALQNADRRSEQMSNAISLLQDEHELARIVADMPWSKIDVNGLREQETRIRRQIERIENDPELGQLQTELKQLNQQATAENRNQYQAEDDLDKAQHAVQAEQAWLDAYGNDDFDDATLSSMVSNLLADAYENCFGASVRAQDRPKLIAGLFDHESETPFHARALRNIARIARTRIQEIDARSNQLRADTERIMDDYLNNHSTDDNTVMASVEDYRYFLDELDELNMLVTRAATDEEYANSVKKLYMSFQQLNRALRTDEENIKEQLNRINSMLKGQQFGPQGGRLSLDVTFSPIDRQFETTLSRILSKLEDWTRNASDNPTETRKAFNNCETFVNRLHNELDKIHDTNGIKAYGARNLDPRVRSSFYAIVHHDNAPDERISSTGGKSGGALQELTSFVYGAALIYLLGGDLTARPTYTTLFLDEALIKADGRYTKRALAVLPRLGFQIIVSAPESKTAEILNVANRAYVAYKDPSTGNSYLQELDSETITQDETQPTTAPAKPTTEA

SEQ ID NO: 34969 - protein, 400 aa, Bifidobacterium pseudocatenulatum; identical to SEQ ID NO: 33459
  DSM 20438 = JCM 1200 = LMG 10505

SEQ ID NO: 34970 - protein, 509 aa, Rhodopirellula islandica
MEIERLVAFLESSPTVRLLRADQAAFVVCFLRHSLKLTGQDSAISLSHNELQHRLTVFQEQLREDGYDAFSGSADRYLREWSDAGWLRRFLPAESSSPHYQLTRYAEDAIGFLEQSISRETRMVGTESRLRLVIDTLTDLVQGASSDREQRLQTLIEQRDDLNRQIDSIRGGAEIETYHPAQVRERFHTAVDLLKTLQGDFRAVEDRFEEIARDVTRGALDTERGRGDILAGALDAEDLVKQQDEGVSFDAFVAFLFSPQAQAKLRETIAEVTRLEAITDQRGAIEHVRAMVPSLLAEAENVLRQTGRLSQTLRRLLDSQSTSHRKRTAEVLQEIRTLAAKMKQSTSQTGIPVPSEIGLRVDTTLGISSPLTRPFWTPPQVFDIAVETNEIDWETAKRHARKLSGLKRLQWDRMRDLVHRVTDLQTNITLSQLLEHRPPTVGVIELVGWMQIAHEDGHAIDAEATEQVTVTTEDPLSGESSTVHVRVPLVTFSKTHQIENEPVRKGKPR

SEQ ID NO: 34971 - protein, 237 aa, Rhodopirellula islandica
MTEPSSQTDPTPDNTFSDTMPPPVPWAPAAVRLLQGIVYHDDAGDTWERILSGVTPLTDYFARIGLQLIVNEEDGMAYLRQIDPESLPPEYPSIPKLFRSVRLTFEASLLCVLLREELRQFEEEIHRDGRCVVTQAALLEVWQSLAPTETDDVRANRNLGGQLRKLEELKFVRQFEKDPPSWEVRRILKARLPLQKLERLRADLEAELERRDAGSVQEEELDAETGRRKDAEGSENI

SEQ ID NO: 34972 - protein, 1140 aa, Rhodopirellula islandica
MMRFSVSRILSPTNMKPSQPLELFADDDEVSERLKPGFRLATFEVFNWGTFDGQVHSISPQGTSCLLVGENGAGKSTLVDAMLTLLVRPGVRNYNVAAGASKKERDERTYIRGAYDRTAGSDEKPRIQYLREGTGFYTALLATFASARSGKSFTVCQVMYLTSSGDRKIFYAFDRKPRSIAGDLGDLTSTGDIKSTLIDRGFEVTENFKTYHGWMKRLVKFRSKAMDIFNQTVAVKDVQRLDQFIRDHMLEKKSWNDKVSKLLEHFAQLSEAHRALVQVRQQSELLVPILRTGKRFQETNAKLQSARKELAASGLFFDIQTGELLRPLCQQWKLRMEHLDEQISLLDHSLKSKRGEAASVDHEIRHSGGARLQQLPFLIEKEEQHAASKKEKRLLYESKLKQVGIDETISSPEQLEKVHRQIGDQQQRIAIEKQTATDQLESLNYEIGVLRQELATDESELESLRQRKGNLPDAFIEVRSELCAAFRLSPTDLPFAAELIAVNPDHGRWEASIEQVLHSFARTLLVPDDLYAKVSGFVDLQRLTDSRGRGLRLTYDRVGARQSTPSQPSTDLGLPDMLLYRDNHPLVPYVRGEILSRFDHLACESIRDFQMAGRRAMTVHRHVKQNRRQHAKDDRTAIGDRKHFVLGWDNRTKREALERSIGEQKALLDRRVSSAESLRRRSDQATRRLSLLDELSAVTQFDTIDDHRHDFEASQLRLEKQKLEESSDQVRQLKAKLAALNAEIQGLESERDRFVGERSNLQTEIGKSEGILKQVDAKVEEARSNDRFASTQAFFDGVVHQLGERKLTLENLGMLPRDIADELNVRVSELEERIVPVRDNLTKAMSKLLNRFPVFESELDPTPQALPSFKQLAERINKDDLPRHERRFKQRLKEKVLQEIGLLHGSLEDEREEIRSKVETLNEALRQLDWNPGSFMRLEPSDTSDAEIRDFRRELAGCLEGTLGGTDDANEATFKKIEQLVDRLRDDANLRWREKVIDVRNWFKFAAREYDTVSGEPGSYYDGGTGQSGGEKGKLAFLVLVAAIAYQYDLQPDDPSRERFQFVMVDEMFSRSDDTRAKYALDLFERFGLQLAIVAPLDAKARITESYVGTYGHIIKDPDTHRSQLISLTTEQYRAADQEA

SEQ ID NO: 34973 - protein, 385 aa, Rhodopirellula islandica
MITAKQIRDKAKRLFGKAIKAWLNHELEAFFPHRIPANLTPSQDLSKAIAEVESLREHSKRTIGSGYRIEWKSRRSRTHGQNDFPDAVFVDTMDDLVELSDRVGDWKSLQLAVATLRDRQPRLEDWLRAGTNWKLILELSDVLPDLLSILDHMLLHPRPDCFARELPVAVSTKLIEQHRRRLAIWLDLLLPPDAIDFRFGHDQFEPRYGLRYARPHYLLRVLDEALQHDLGLPFDELSLPAESIDKLPARDQRVIIVENKVSLLSLPLMRRTLALGGLGNGVTQLSEISWLSKCKVIYWGDLDADGFRILDRLRVILPHVESRLMDRSIVEQFADLATKGNASEAHAVENLCESELRCYHHVCETNLRIEQEHLPTELIFKALSL

SEQ ID NO: 34974 - protein, 487 aa, Paraburkholderia glathei PML1(12)
MKARRTAAALDNLRNQPLWRLLAATKGPVFIALLQSLFLDVDKVLPSSVMHERLVREIDALRADGEELPQTAQAYVTEWLNNGWLSRRFPPGASEEEYELSADALTALRFVTSLLKPRTTATESRLSLVIQQLSRLAAETNVNPEARLVALRAERERIDEAIAEVEHGGIKILPVERAIERAREVIALAQELTSDFRSVRDEFEKLNRGLRQSLMENEGSRGEVLEQLFAGVDIIGESDAGRTFNAFWRLLTDSEQSATLRESLDEVANRPFARDLESHERRFLLSLTGTLLNEGRGVHDVLQHFARSLKSFVQSREFLEQRRLHSLLKEATQAAFAAKNAVRSNEQVGFELMQSSSRIRSVAQWVMYDPAQRVTDSSMKEAEPSELDLETVSELVRQSEIDFRTLKQNVRAVLDRRTQASVGDVLAAFPAEQGLGSVVGYVALGARHGEVTEGSEIVRWTGDDLVHRRAKLPAIYFIRERYLELVE

SEQ ID NO: 34975 - protein, 228 aa, Paraburkholderia glathei PML1(12)
MAASDETVEGVTFRGDTGTLPVETRRVLVQLLLGPSVDARRQSKLWPVLLRDEALIRSRLHELFLEIVIDHEQRVAFTRQVISDEADIPILLRKASLTFLETALLLFLRQRLTQSDAQGDRAVVSLIEMQEHLHVFERDGNPDHAKFERQAVNAVDKAKKLSLLQRIRSSDERYEVSPTLKLLFTAEEIQDLTRTYARLAANGENTEDRHLPDEEGLDGTDEQGDAEL

SEQ ID NO: 34976 - protein, 1110 aa, Paraburkholderia glathei PML1(12)
MLDGAEDQFRLARIQTFNWGTFSNVFDFPIPKEGYLFVGPSGSGKSTILDAHAALMTPPKWVDFNVAAREAERHGRDRSVMTYLRGAWAQQTGESGEYVSQYLRSGTTWSAIAETYRNDQGRIVVLAQVLWVKGNSTAQTDARKIYLTLERAFDIQELEFFAKNEFDVRRFKHDLPDAKVHPEFSGYQERFRRLLGIDNERALRLLHKTQSAKNLGDLNVFLRDFMLDEPETFDIAASLVNEFGELNEAHQEVVAARKQIETLKPARDEYLEMEKGTFDLNGLLAIQAAIDQYKEHQRKVLLESRLAEVTVDHKGSVEETRRLTEMVANELERLTDLQRQKLDMGAGILDRLKQDIKLAEDEKPNRITRREQADKACKLMGWTVPNDVIAFVQCTEAAKERVMKARDFKADIEHRKDALKDEHRIAKDEFGNAVAEVKALERQKSSLPAKLVALREQMARDLSIPEEKLPFVGELIEVKSDALEWQGAIERVLGGFARSILVDDKHSSAVSTYVNERNIGQRLVYFRVLPQTGARSPGPNSLVRKLNVGADTFGDWVREELKTHFDFECAQTLQAFRNAQRAVTREGQIKHNTMRHEKNDRYSVNDRSQWVLGFDNKAKLALYKEMAVGLASQISKLDQKIGKVREEEDLQHMQMLHCQTLSNLTWNDVDVASLVTRIHDLTARLEEELAARPDLAELDKRIKAQEDVHTAAVSKKNGEHVRGLDFKRTIDRIEAQLTDLARLWPTSDRPPAFAEQISARYLATNKDLTLENLDQVTNLVERSLNVELRSLESHLTDLRNAIVQRFVEFNRLWPALSGGLDATLASADDYFGKLQRLEKDNLPAYEERFFSLLREQSDQNLTLLATKLDQERSAIRVRMELVNESLSTAPFNSGTHLVIETSDKALEDVKHFRASLRESLSHSFSTDRELAEERFKALAALVKRLASQESAEKNWRNLVLDVRQHVEFVARELDQDDLEIEVYRSGAGKSGGQRQKLAATCLAAALRYQLGGQDRSLPSYSTVVLDEAFDKADAEFTAMAMNIFKTFGFQMIVATPLKSVMTLEPFIGGACFVHIKDRKKSAVIPIEYDSDSHRLKLSHDISHAEETSIT

SEQ ID NO: 34977 - protein, 394 aa, Paraburkholderia glathei PML1(12)
MPKKLLSPDAVRDFLTRRFNNQHQNWLAGEGSWPLIVGLGTPTEKDIADDAAGVRAWTAAWEKRTGPGTVMSEDRQFARLGRQRFPVGLSLESPAVVASAVGQGIRWATASGRYAYLTGRWPPLIRGMKLASKFDVLADYPSEDFERLVALLAWLEANPASNLYLRQLPVEGLDTKWIGQRTGLVSGLLRELSASAGESNDFHAVCGLRKPPHRVYIRLLCPELRVLVGGLCDIEAPVNELAMLPIEPRSLVIIENLETGLALPDLAGTVAAIRLGNAVSALEALPWLRVSNAVYWGDIDTHGFAILNRARRVLPQLRSVLMDEVTLMSHRSLWGREPVQYGNEALETLVDSEKAVYDGLRTNAWGHQIRLEQERLVWDDSVRMLQHALFGGRD

SEQ ID NO: 34978 - protein, 489 aa, Xanthomonas citri pv. citri; identical to SEQ ID NO: 30402

SEQ ID NO: 34979 - protein, 233 aa, Xanthomonas citri pv. citri; identical to SEQ ID NO: 32320

SEQ ID NO: 34980 - protein, 1340 aa, Xanthomonas citri pv. citri; identical to SEQ ID NO: 30404

SEQ ID NO: 34981 - protein, 427 aa, Robinsoniella sp. RHS
MEALLKINEEYQYNSYFLSREVCIQILGDYFAQRRVMMQKEELESELDILEPPATRILNWLLKAQWLKKLDDYYMQVTNIIIPDYAAIFIDAFERLNSDEEDDTQIYIQNIYAILFSFKNDPRANTSLLKTALVNVRKLNKSLQDMLHNMDKFFTSLLEQKNYADLLKEHLEGYVEEIINKKYHILKTSDNFYLYKTDIKGWIREMQSDMEWISLMSRREQKEINEGDMLRILDDIERGFDDIEHRISFMDREHMKYVRATVTRLNYLLNGEADRRGLVIQLLNELSAGQGQEDKIKKVSARMNLSSFEILSDKSLYKKRRAKSSFHAENRSEEVREELSREEILKLNQLHNRYSKKQIEEFIENRMENGRMKVSDSMIETIEEFEQLILAYDYAIRKGSGFAVESQEVEFIENGKYRYPNLTFVKK

SEQ ID NO: 34982 - protein, 299 aa, Robinsoniella sp. RHS
MITYYDELSLEERQEVTAVIQTLYKQTFLLERKFDKRTGRFQFNKDYRICNKHLEFVREYLAVSGIALLDNSQGGIIYIQGENIVGEKLPRLATLYILLLKLIYDEQMSAASTSVNVYTTLGDLNERVGSFHLLKDRPSNTEVRRAVALLKKYQIVEPLDAMEELDQNARLIIYPCVNVVLMTDDIRAMLEALKAEPSEKFMETEEAGDDDGTGEAAGIEEAYGTGEAAGTEEAYGTGEAAGTEEAYGIGEAAGTEEAYGIGEAAGTEEIEGTEGIEEIADADETEGDEDEGTDDEDEA

SEQ ID NO: 34983 - protein, 1104 aa, Robinsoniella sp. RHS
MCLNNWHYIDRKILSFNQEINFFTGHSGSGKSTIIDAMQIVLYANTDGRGFFNKAAADDSDRSLIEYLRGMINIGDDNEFSYLRNENFSSTIVLELTRTDTLECQCVGVAFDVDTSTNEISRVFFWHDGPLLEHDYRIKHRSMSVSEIKTELQQRFTKEECFYTSHNERFRRQLYDVYLGGLDMEKFPLLFKRAIPFKMNIKLEDFVKEYICMEQDIHIEDMQESVMQYGRMRKKIEDTCKEIEELKEIQALYQKVCEKEQERKKYSYFTDKLDILQLKERVVTLQNKVILYTQDITGQKEQIGVLDREIEELGKTGDEVLKHISATGYEELKQQLISINELLERMGKSKARWDQTGLRLKEWIDHDMTSNSVIWDIEKFIKYEISEVELHHLQASIRDLQTEVTEQKQDLDIDIRALKTEQKKILEELKDLHHGRKSYPKELQDARQQLAYQLCEKAGKPVKVDILADLLDIRDEKWRNAVEGYMGNHKLAIIVEPSFSKDAMEIYRSMDKKKYYQVAVLDTEKIMQKEFRVKKGSLAEEVSAKEGHVRAYINFLLGNVMKCSSVEELRESSIGITPECILYQGFKLQHINPDNYTRWAYIGADSLRRRMKQLNKRSQELVKELDPRLETRKSYDKMLGMESLSNDAADYLDWLADIRDCKAKEKSKKDLELRIQKLRDKDIASLEKNRNELLKLQKEKRRWRESIQKAMWKKQEEIIEGKRLHLNLGEELTQKEKKFPSDPAMDEEVQEYLKKKTNPNFEKLRDYFTGQVNAALRGQDEFFRDLCALRHQYLLHYPARGFAHDKADNREYDELLERLKCDNLPKYMEIAGERARLATREFKNDFMLKIRSAIVEAMQRKDELNRIISRLDFGKDKYQFIFAKNKGPDGRFYDMFMDDSLEINPSDLSLSMENQMNLFTIAHESHYGELISELISIFIPPENATPEEMEEAKRNMHKYADYRTYLSFDMQQTIQSENETIKIHLSRMLKKNSGGEGQNPLYVALLASFAQAYRFNLPPKLQRNPTIRLVILDEAFSKMDGEKVASCIKLIRDLGFQVIISATNDKMQNYLENVDKTFVFANPNKKSISIQEFERVEFRQLSGE

SEQ ID NO: 34984 - protein, 484 aa, Klebsiella pneumoniae
AKNQHPAWILLASRRAPLVLSCLKTLFEKAHDGIPLEDAIQSLSGMLIEHVSQEQYDINQDNPSLQASRELREWIKRRLIVERDGRIFATDALEVAITFVESLDNRFMTSTASRLSTVQREIENLETRLNPNPANRVATLRRRIAELERELQEAEAGHIEVLETHQAVEHIREVFNLASSLRADFRRVEDSWREADRALRQSIIGEQYHRGDIVERLLNDQDALLNTPEGRVFDSFQQQLRQSVELTAMSERLRVILSHPSASNALNRLQRHDLRWLVKRLVDESQTVLQARARSERDVRGFMKTGLAAEHHRVGHLLNEFLNLALKLDWQRQMIRKQEVPLPAVGVAVTGVPAIERLRFKEVDDEAEQTLDLSNHATDLTQIGDDFWDAFNGLDREALIQQTLQLLAKENRPVGLAELAALLPPAHDLETFAVWIGMAREAGIEVIDSQREFAELSDGEGRRWRFNLPTTGLESQALMDIDWE

SEQ ID NO: 34985 - protein, 249 aa, Klebsiella pneumoniae; identical to SEQ ID NO: 31023

SEQ ID NO: 34986 - protein, 1096 aa, Klebsiella pneumoniae; identical to SEQ ID NO: 31024

SEQ ID NO: 34987 - protein, 382 aa, Klebsiella pneumoniae; identical to SEQ ID NO: 31025

SEQ ID NO: 34988 - protein, 518 aa, Bradyrhizobium japonicum; identical to SEQ ID NO: 33912

SEQ ID NO: 34989 - protein, 212 aa, Bradyrhizobium japonicum; identical to SEQ ID NO: 31966

SEQ ID NO: 34990 - protein, 1144 aa, Bradyrhizobium japonicum; identical to SEQ ID NO: 31967

SEQ ID NO: 34991 - protein, 389 aa, Bradyrhizobium japonicum; identical to SEQ ID NO: 30454

SEQ ID NO: 34992 - protein, 524 aa, Bifidobacterium animalis subsp. animalis IM386; identical to SEQ ID NO: 31717

SEQ ID NO: 34993 - protein, 269 aa, Bifidobacterium animalis subsp. animalis IM386; identical to SEQ ID NO: 31718

SEQ ID NO: 34994 - protein, 1165 aa, Bifidobacterium animalis subsp. animalis IM386; identical to SEQ ID NO: 31719

SEQ ID NO: 34995 - protein, 406 aa, Bifidobacterium animalis subsp. animalis IM386; identical to SEQ ID NO: 31720

SEQ ID NO: 34996 - protein, 490 aa, Cellulomonas sp. A375-1
MITRAEGAYLGAVRAFQNPMLDLLHKKHAPLVVSLLSVTFTAERPTVPVADAHTEIGDALDQLRAAGYEENLPTGSARDLCRQWADAGWLVRQVLDDDVEAYRLSAHAVGALEVAGRAGGARARVSQSRVRTLLDAVEQLAQDADPDVLVRMARLDGQIKRLQAELDRVQRTGTVDEVDDEELLEEAENVLHLVRELPADFARVAESIKAMQRDVVTALRQDERPTGDVLREYLERGEHVMESTSEGRAFAGALRLIGDPQRLDELAQQLDVVLRHRFTRRLAQQQRTELREIVRRIEQGLDQVFTAQREASYVITAQVRNHDPLRDRQVDVLLRDVMAGMQAWLPGARRFQPVDPLRRLPVAEVEHLRQTAGDLRPPEAPTPLAAWDDDGDDVTGDDARAWGGPHYADLTSHLVAFADGSDEVDVAAAFEAAPDGLRRPVDLLGMLEIAHTHGMTETGRVAFVDAVRPDGTRRRLAFGAVTTTTKDDDA

SEQ ID NO: 34997 - protein, 238 aa, Cellulomonas sp. A375-1
MPETTTEDVAVTVHDEPVEAASAPRADEGFIAPVPMEEDPAELFAGDSGTLDADVRRVLVRLLQRRFLVADKNRAQWRTLLENQQVIESRLHDLFVHLVVDHDRGVAYKRQVRSAELDVPVLLRDDAYSRAETLVLVHLRTVFQREQGAGETSVRVDVEELEQTALTYFDPDDTNVAAHQREIRAAVARLEREGLIEEESQGRFRVTPLVEIVLSNERLAELREWLREQAARTQEVTR

SEQ ID NO: 34998 - protein, 1127 aa, Cellulomonas sp. A375-1
MTMIDTLFGLIPAESTGQQWVARDLQLVNWGGYDGHHRVRLASTATLLSGGSGSGKSTLMDAYIALLMPHTTPFNGASNGGVVGRPRGKDQRNILSYARGKLDESRTEDGTRQRVLRGDGRDTWSAIAMTWVDQSGTELTAVRGWYVPSAARTLEDVVAVRAVREGSFDLRELEAAAAHRFGRAAVTEAGLTVFDTDRELTARLHSTLGIGAAGDGNKAVALLGRIQAGQQITTVDALYKAMVLEEPDTFATADAVVEQFDKLTGTREQMITARQQVKALEPIRAYRADIEQAAERLRVIEQLGTFDDATSPAALWKHERRLDLLRDAEQDLQRRHQQSNARAAETAARIAAARSELDGVKETLWSSGGDRLATAQRELAGVEARLQDVRRARTRFDDVLRALPGTSVTTDAEHTALVARAHAALRDTDAKASARQALFDAMSEKKEAAADLADLTAERAAVARRHDNIPGELHRARAALAEAAGLAPDDLPFVAELIEVRTEHEPWRDAFNLALGGFATRLLIDVAHLGAFRKAIDAVPTARRIRFQGVPTGMRDDVALDSRTLPGRLDFRNGPFTGWLRGELARAFAFVCVDTPGELSQHAKALTRSGQVSEGTQGAHGGQGRGNVLGFTNTRRLAHLDEQVARAQERLHLVEAQVSEAEAGLDTHDVERRAYETLTEITWDQVDVATIEAAQARWAQVIEEVTSGNPEITRLQRRAAELDTTIQVLAEQLGVTKDEARAASELWSTTTDEVDTAQQALDEARSAGTRVGHDQRTYLEALLVGTDVQDVRTTNAAAGANDALRAFDDVLARAHSLLLADRQAAQQIIGTARESLRRTFETFVERWPDPNLGADPDDSYADFERILTELETNGLHDLEDEWRKSLLRLSGNDLTDLHSALARSVREIKERIRPVNDILADLPFADDEHRLRIEARDTQSTVVARFRKELRDLREVLATEATDAERERRYLRMAKVIDRIRRTAPDFADLIDVRRHVRLSAEKVDLEGNHVALYDHIGEKSGGESQELVAFIVGAALRYQLGDAGAERPRYAPVFLDEALIKADARFTGRAIGAWRGLGFQLVIGAPNDKFSALEPHVDVKYVVLKDATGRSRTKPIAGVPDPMASE

SEQ ID NO: 34999 - protein, 416 aa, Cellulomonas sp. A375-1
MSSRFVSLAEAAETVTHRLRTAWADAVCIQITQCTNRAIHVQLSPGVTSGAVVLRLGLDARTRWVEEWSAVAARGLPGVTVERRRVVVSQVAEMLPATLTLSGLDAATELLALAGLRPPFDHQRACRVAGEILASSARLTPTVLRAVCQLDDDDVQVALEAVRWLRAHPDVGDWTARSIPIPRMHSKWLLKHGALLRDLVGRDVLDEVRSRLAVVHLTYVDPAYAMTGGRRHDAWTTGDTHELAYEPHTVLVVENRDCRLWFPLTPGTVVVEGGGMAAAALLADIPWLRRAPGVVYWGDIDAAGFAILNHFRSALARTSPDGASGRPVASILMDAAALSRYSHLGVDRDARGRRIPSSSETLPHLTDDETEAYHQIATAGEVALRRIEQERIPIADAADALSLHASHATTAPPWRD

SEQ ID NO: 35000 - protein, 510 aa, Bifidobacterium dentium JCM 1195 = DSM 20436; identical to SEQ ID NO: 31064

SEQ ID NO: 35001 - protein, 235 aa, Bifidobacterium dentium JCM 1195 = DSM 20436; identical to SEQ ID NO: 30735

SEQ ID NO: 35002 - protein, 1168 aa, Bifidobacterium dentium JCM 1195 = DSM 20436
MAGDDMKIIADRWMMESRQIVNWGSYDGYQEFRPSIDAESPVTLLAGASESGKSTLVDAQISLLYPNGTPYNKASNAGRSERNDYTYLRGMIGISDGDNGETQIFLRGRDANGTPQAIWGAIVDTYVNRTTGSTLSCGKFLYLPAGDGKDEVRRRYIAWNRKIDPQIMDRYRDTPFTPSMFKKAYPDCSIFPNASAFHAYIWQEMGLSAEACRLLHKIQSADAPSRLDDIFKQGVLDVPEALRLAQDTVDDYDRFNANFHSMEDKARRVAKLQDIQTQYDAYAKHLTQVREYEAVNPESQQGLETLTLWMRSRMASEVRAGLPAAERKVKQQECDLHEAQERISDVNRQREAIVERIKGIDGGTLQRLSDDLERARRDMQDVRSQRQSIVEKFEGVEGALPSDETSWNAKRDALARSMETFDERMGNLESKRDRLIGERTAASQECAQLRRDYDRKRRQRTRITQAMDEARALIAKAVGLSPDELPYAAELMDVCESDERWRTAMNVTYAPIAQTILVDSRHERGFAAKISAIDPALMIRRTWQFVDVDKSYDCTRNDGWMSSKLQYCEDSPFAGWLKEQTASARLDALCVETIDDAAHERRQVQADGQIKSGVHGFHGIKGMNPIIGFVNEGYLTELKKQLDEAHHRLSDTERRCGMVRKSIDLMHAEKNLADLVANMTWNKIDVVGAETLVENLKRRIEQIEDNPEMTRLAERREEIDRLLDEANARFYHAKSEMQSTQAAVDAEHAWLEAYEGIEFDDDALSGDVSNMLADVYEGCFGGVVHAEDRPKLIAGGNDEIGGHSFETRVGHAMERAMREQNAALGKRAGELRTVVEQSMASYLERYAPDDDSATGGVEDYRFYLEELHSLQMLVTREATDEEYANSLDKLTKNFLQLNRALNTDQENVKDQLERINGMLAGQKFGPRGGRLSIDVEFRPIERAFVSSLKATLNKLDEWFRNDKDDPDATRKAFTSCATFIERVRRELEQVRDVNGIRSYGARNLDPRARSTFYAIVHHDDGPDERISSTGGKSGGALQELTSFIYGAALIYLLGGDVTGSPTYTTLFLDEALIKADGRYTQRALNVLPRLGFQVIVSAPESKTAEILGVSTKAYVAYKDPSVGRSFLQELTSEDIARQEAELHDAIDDMPAAPNDIGPTTATILEQVF

SEQ ID NO: 35003 - protein, 492 aa, Bifidobacterium kashiwanohense JCM 15439 = DSM 21854
MYETGVLRLLLRGNSMLYVALLRSTFDPLTGELPREIVEERFSRSLTRLAETGDYTPKEGQTSAEAAHTILQQLTKEGEGDYAWLANSLDVAAHRYLYRLTARAHRAIEALDRLEDTTKALSGAQANSIIMEIEHARMQLTADPRERIRLLERDIEERQKQIDELKHSDTLDKLTSQQVGDIIGVIHNTLRGVPIDLRELALEERDNGDNLRRSMQSGSISVEQALGTYHDEYHRSFHESDSGRRFEDAFQVIVTDEGRREIDEAVRDIAQNPYLEGEPGILLAQVRAELKRIYEGIEDVRRQIRISDEAVSRLVRQQTDTHYRTMLDKLHRLFVRASDDAKTYPGSDERPYRTDTGTAQFQALPSRPAKSMARAATAGLDDAPSTNVDAPDLKAMVEMCGPRLTHMIGLIRRDPVKTADGRFVDFAASFNRLPREERRESELIGFLSALRTQDGPATVAWHCVSIDGGERVWRTRPIFTTEAALDEIIEEG

SEQ ID NO: 35004 - protein, 279 aa, Bifidobacterium kashiwanohense JCM 15439 = DSM 21854; identical to SEQ ID NO: 33633

SEQ ID NO: 35005 - protein, 1152 aa, Bifidobacterium kashiwanohense JCM 15439 = DSM 21854; identical to SEQ ID NO: 33642

SEQ ID NO: 35006 - protein, 208 aa, Bifidobacterium kashiwanohense JCM 15439 = DSM 21854; identical to SEQ ID NO: 33643

SEQ ID NO: 35007 - protein, 502 aa, Bifidobacterium scardovii JCM 12489 = DSM 13734; identical to SEQ ID NO: 33605

SEQ ID NO: 35008 - protein, 271 aa, Bifidobacterium scardovii JCM 12489 = DSM 13734
MSDDNPYALFEGDRGDMPADARRAAIALKRERYIDGTLYELALDHYDAVTRSLNNDLLEPVINERYRIMYAAPVAGEDVTLRSLKTRASLKREEAALLAFLRIRVLEYENMRVAADEWIVSLEEIRAALATGAGHLSARNDEEGVLRQIGALISAMNTYGYLERLDDDTMLRITPLVPAVLDRELADAWLGVAAADEDDETDGPGSDPSRDGTDDGPDDGDAEPGGTGEPGGGPDGGNGRRSPGMVDEPLFGDDALDDDALGGEAADGEGE

SEQ ID NO: 35009 - protein, 1190 aa, Bifidobacterium scardovii JCM 12489 = DSM 13734
MAAKDMQMIADRWMMESRRLVNWGSYEGYHEFRPSTDGRLPVTLLAGASESGKSTLVDAQISLLYPTGTPFNKASNSGRSERSDYTYLRGMVGVGNTDEGDRPIYLRGLDDNGAPQAVWGAIVDTYRNTTTGQVLSCGKFLYLMPGDKGSEVRRQYVAWDRPIDPRAMDRFRESAFTPSQLKTAYPECLTFPSAEAFHTHIWSVMGLSADACRLLHKIQSADAPSRLDDIFKQGVLGVPEALDLARSTVEDYERYDENFRTMEQKARRMDALQGIQRAHGGYAAAVGAARAFDPVDPAGETGRDTLRAWAIARMAGEVAAQLPLDEQERDARMAASRAAGARSEELRGRIDAIRAQMQGLDGGNLARLEFELDQSRRTLAAVRDNRAHTAELFDAVGETMPASEQAWDQRRVEAVNFKRVYDQRAAELETERSAADRAHYAALDTLQRLRHDYERQKTQRTRISRQMDETRAMLCRATGLDAGELPYVAELMDVREDEEAWRLAMNVAYGPIAQTILVDKRHEQGFAAKVSTIDPHQMARRTWQFVDTTRDYGAAAASEDAPDARPADRAAAPEDAWLSSKLRYRDESPFAGWLREQTRSERLDARCVAAIDDADRDTRQVQADGQIKSGKRGQHGVKDRQQVIGYVNESYLHDLERQIDQASDTANGTERTLTAAKRQVDALRRGLTLADQLAYTAWDRIDADGAAAAVTELETTIASIKNDPELAKLAALKDSLSEELDRSERDRIQDEQAADAAADAADAARAWLNSHQTGAAGTSAGADGTEAGPAPSDAAAAPLDDEVASALAESYDGKLPGDDPALRAHMIIGAGQAASSGNQFAERVIAGIGKDMASRVDALSERVAVARAGVETRMDSYLHDYAADDDAVTASVEDYRYYLEELESLSRLTAVAATDGEYRRCLDQLLMSLLTIKRAIDTDASDIRSQLDRINAMLEGQQFGPKHGSLSLHADVRRPERAFSAQLSRAIGTLNDWKSEPAAQGAADSRRAFAACAPMIDLLRDQLAQVKDANGVKSYGARDLDPRCRSSFYAIVHHEDGPDERITSTGGRSGGALQELTSFVYGAALIYLLGGGMTSEPSYTTLFLDEALIKADGRYTQRALTVLPRLGFQVIVSAPESKTGEILEVSTKAYVTYKDPDTGLTSLREAVLRPEEGAQAPAGAADAAEDRDRP

SEQ ID NO: 35010 - protein, 387 aa, Bifidobacterium scardovii JCM 12489 = DSM 13734
MSEPKDVAAITDRVEAHMRANLYRIEQAWPYTVPVGLPGRAELEKHAIAVHNNNNDIKKWAGQRGCETTVTQRKIGTAVGLISAVTVPDEATALRVAGRGLATQYREARRRLIRLRAEFDAEPDTIEAVAAMTGHEQALDFDLLITAAHYFADYDAAGMRPRQVPLTGFSGKWLNESNTRRRKAICRLLGRETLELSSRPRELRFRYLDPRRADAELERIAWCPWNGTALAGIRYAVIIENKDTYQDMPPIPDGICIWGSGDAIGAVAPEIPALRDMRVVYWGDMDADGLEILSMLRERGLDCDSMFMDCAAYERYRRYGTDLSERGRRLALRDPKPAPGLRPAERELYVRLCEDAAMPFRRVEQERITLADAAEALRGLGVPAGRA

SEQ ID NO: 35011 - protein, 490 aa, Xanthomonas oryzae pv. oryzicola; identical to SEQ ID NO: 31050

SEQ ID NO: 35012 - protein, 232 aa, Xanthomonas oryzae pv. oryzicola; identical to SEQ ID NO: 31051

SEQ ID NO: 35013 - protein, 1142 aa, Xanthomonas oryzae pv. oryzicola; identical to SEQ ID NO: 31052

SEQ ID NO: 35014 - protein, 393 aa, Xanthomonas oryzae pv. oryzicola
MAPAAPMMLPAAALLALRGQWQRARGQWLIGEGAPQAIGLRVPTQAQAIARFDAFGAWLQEWSRTGLPGRVEYRAVSWTQLGPQRLPQTWVLDDAGQAAGALGEGERWARARQRSAALQARWPQAVALAARLRRQFDLLADWPEAEFARLVAVVEWLHQHRDSGLFLRQLPIAGIDSKWIEPHRGVIADWLAGLRGIAEPRSFASLSGLRNAPDRVRLRLLDPALRHHLGGLEDITAPIAQIAALRLPARRVLIVENRETGLACESLPGTLVLMARGYAIEYVSNIAWLRELPLYYWGDIDTHGLAILHRLRTHAPHTTAVLMNEATLQATPRALWGHERRPHRAQRLAALSIQEQRLYADLRGGRFGPSPRLEQERIAWDYAWPRIQAALAD

SEQ ID NO: 35015 - protein, 490 aa, Xanthomonas oryzae pv. oryzicola; identical to SEQ ID NO: 31050

SEQ ID NO: 35016 - protein, 232 aa, Xanthomonas oryzae pv. oryzicola; identical to SEQ ID NO: 31051

SEQ ID NO: 35017 - protein, 1142 aa, Xanthomonas oryzae pv. oryzicola; identical to SEQ ID NO: 31052

SEQ ID NO: 35018 - protein, 393 aa, Xanthomonas oryzae pv. oryzicola
MAPAAPMMLPAAALLALRGQWQRARGQWLIGEGAPQAIGLRVPTQAQAIARFDAFGAWLQEWSRTGLPGRVEYRAVSWTQLGPQRLPQTWVLDDAGQAAGALGEGERWARARQRSAALQARWPQAVALAARLRRQFDLLADWPEAEFARLVAVVEWLHQHRDSGLFLRQLPIAGIDSKWIEPHRGVIADWLAGLRGIAEPRSFASLSGLRNAPDRVRLRLLDPALRHHLGGLEDITAPIAQIAALRLPARRVLIVENRETGLACESLPGTLVLMARGYAIEYVSNIAWLRGLPLYYWGDIDTHGLAILHRLRTHAPHTTAVLMNEATLQATPRALWGHERRPHRAQRLAALSIQEQRLYADLRGGRFGPSPRLEQERIAWDYAWPRIQAALAD

SEQ ID NO: 35019 - protein, 490 aa, Xanthomonas oryzae pv. oryzicola; identical to SEQ ID NO: 31050

SEQ ID NO: 35020 - protein, 232 aa, Xanthomonas oryzae pv. oryzicola; identical to SEQ ID NO: 31051

SEQ ID NO: 35021 - protein, 1142 aa, Xanthomonas oryzae pv. oryzicola; identical to SEQ ID NO: 31052

SEQ ID NO: 35022 - protein, 393 aa, Xanthomonas oryzae pv. oryzicola; identical to SEQ ID NO: 35018

SEQ ID NO: 35023 - protein, 490 aa, Xanthomonas oryzae pv. oryzicola; identical to SEQ ID NO: 31050

SEQ ID NO: 35024 - protein, 232 aa, Xanthomonas oryzae pv. oryzicola; identical to SEQ ID NO: 31051

SEQ ID NO: 35025 - protein, 1142 aa, Xanthomonas oryzae pv. oryzicola; identical to SEQ ID NO: 34946

SEQ ID NO: 35026 - protein, 393 aa, Xanthomonas oryzae pv. oryzicola; identical to SEQ ID NO: 34947

SEQ ID NO: 35027 - protein, 490 aa, Xanthomonas oryzae pv. oryzicola; identical to SEQ ID NO: 31050

SEQ ID NO: 35028 - protein, 232 aa, Xanthomonas oryzae pv. oryzicola
MNWQADNAETDAHAPSAHVDAAAPEADAATGLFPGDSGALPVDARRVLCQLLAGPSVDVQRHSKLWPALLRHEAAVRSRLADLFLELMLDRDAGVAFTRQADTGELEAPVLLRSLPLTFIDSVLLLHLRQQLAEADARGVRAVVEDAPLSEALAVYEKNLSTDRAGFMRRVGNAIQKMKDNHVLTRLRGEDNRYEVSPTLKLLFSAEDVSALAQIYRQLREQPGTVGDAERA

SEQ ID NO: 35029 - protein, 1142 aa, Xanthomonas oryzae pv. oryzicola
MKSSSSSLFADDLPDPRVQQFRMRRLQVHNWGTFNGLTDVPIAAKGFLFVGRSGSGKSTLLDAMSALLTPPNLVDFNAAAREAERTGRDRNLVSYVRGAWADQQDSASGEIATQYLRKGSTWTALVLEYRNGEGRVISLIRLFWIAGSGAAAADVRKHYMVAERSFDIASELVGFDLDLRKLKARLGDDIAHFDNFSGYAERLRHQLGIANEMALRLLHKTQSAKNLGDLNVFLRGFMLEAPKTFDASERLVGDFAELDGAHRAVVTARRQVETLLPARAHYDDLQSVQRQRGRLQELKLGLDPYREQRRLALLDARLHALDVNDQGLAGEEGQRRAAVDNHQQRLSDLEAQRRSQGGERIDALEREQLQVQGELARRSDKRAKAEQACRQLDQTLADNAHGFAEQSAQARAALEDGQRLAAEQDEAIVERIAGKREDSQRFAQVRAEIEALTRNPSNIAAPMQALRARLSEETGIPEAALPFVGELIQVREEDAAWRGAIERVLHGFAQSLLVDERHYAELAEWVNRTHLGSRLVYYRVRNNEQAFAGREPGSASLLHKLQLREHPFAGWLRRELGKRFDYDCLESAKALRTAERAITREGQIKHPGERYEKDDRHAVGDRRRWLLGFDNRDKLALYEREAIELAQRIAACDADVAELRARRERDASRRLAQHTLANLAWEEIDVAAQLQRRDDIANALRQLREGDANLRALGEAIERTRGDLEQAKRTFDGVREERIALGVERTRLEKQRLHCADADARVVTPLQREGLEERLANLGALSLDNVEAHFRQIGNAIAEQTSASDSEHNRLEQLLLGCFRRYSQQWPEDSGDFIISLAGAEDFLARLQRLERDGLPQHEARFFELLQSQSKNNLLALQRHTAEARKSIAQRLDEVNASLEQVPFNHGTLLTIELSDRRLPEVIDFHQRLRDVLGHHQTEQRDVAEQQFAVLRELVRKLGSADGEDKRWREVVLDVRLHVEFVGVELDAATRQQVEIYRSGAGKSGGQRQKLATTCLAAALRYQLGGEDGELPCYAAVVLDEAFDKADNEFTALAMNIFENFGFQMVVATPLKSVMTLEPFIGGACFVEISGRHDSGVLLIEYDEQARRLKLPERSRSAAAAGAARATEPSDAVGGASVDELH

SEQ ID NO: 35030 - protein, 393 aa, Xanthomonas oryzae pv. oryzicola; identical to SEQ ID NO: 34947

SEQ ID NO: 35031 - protein, 490 aa, Xanthomonas oryzae pv. oryzicola; identical to SEQ ID NO: 31050

SEQ ID NO: 35032 - protein, 232 aa, Xanthomonas oryzae pv. oryzicola; identical to SEQ ID NO: 31051

SEQ ID NO: 35033 - protein, 1142 aa, Xanthomonas oryzae pv. oryzicola; identical to SEQ ID NO: 35029

SEQ ID NO: 35034 - protein, 393 aa, Xanthomonas oryzae pv. oryzicola; identical to SEQ ID NO: 34947

SEQ ID NO: 35035 - protein, 490 aa, Xanthomonas oryzae pv. oryzicola; identical to SEQ ID NO: 31050

SEQ ID NO: 35036 - protein, 232 aa, Xanthomonas oryzae pv. oryzicola; identical to SEQ ID NO: 31051

SEQ ID NO: 35037 - protein, 1142 aa, Xanthomonas oryzae pv. oryzicola; identical to SEQ ID NO: 31052

SEQ ID NO: 35038 - protein, 393 aa, Xanthomonas oryzae pv. oryzicola; identical to SEQ ID NO: 35018

SEQ ID NO: 35039 - protein, 490 aa, Xanthomonas oryzae pv. oryzicola; identical to SEQ ID NO: 31050

SEQ ID NO: 35040 - protein, 232 aa, Xanthomonas oryzae pv. oryzicola; identical to SEQ ID NO: 31051

SEQ ID NO: 35041 - protein, 1142 aa, Xanthomonas oryzae pv. oryzicola; identical to SEQ ID NO: 31052

SEQ ID NO: 35042 - protein, 393 aa, Xanthomonas oryzae pv. oryzicola; identical to SEQ ID NO: 35018

SEQ ID NO: 35043 - protein, 489 aa, Xanthomonas sp. NCPPB1128
MKPHVRIAGYRQLREQPLWKLLAADHAPELIGLLQTLLGDAQRRLPADVLHERLQRQLDALKDDELSRELPRTAQAYVAHWLAQGWLERRLPEGDAQEDYELSRQAAQAIRFIAGVRDSASVATESRLSLVIQQLVQLAGQTETDPDARLAALRAERERLDAEIERVAAGKLAALDGKRALERTRDIIRLSDDLTEDFRRVRDDFERLNREFRERIIDDEGARGDVLEKLFAGIDVIGESEAGRSFQAFWSLLNDAEQSVQLDAALEALLARGFARRLDRHERAFLRGLTGTLLERGGQVHEVMQHFARSLRGFVQSRGYLEQRRLNQLLKQAQGEALQLRDHLHATAATGYVLPLSSARLRSPSQWRLHDPRSQQVDGRVQAAEAATISLDSVGDLVAQSEIDLRGLRNDLHDLLGRQPQLSIGEALRQRPAAQGLGSVIGYLALGTRHGVVVDGEWEAVQWEGGDGQVRRARIPLVWFTKEKRNELV

SEQ ID NO: 35044 - protein, 228 aa, Xanthomonas sp. NCPPB1128
MSWSDEFHGHDADAGDAAAAAATADADTGTALFAGDSGSLPLEARRALCQLLSGPSVDAYRHGPLWQALLRHEAAIRRVLSELFLELVLDRDGGVAFARQADTGELETPALLRTAPLTFIESVLLLFLRQQLAEADTRGERAVVDEAQLLEVLSVYEKNVSTDRAGFARRVLAAIAKMRDNHLLSKLRGSEDRYEVSPALKLLFSAEDVQALSAAYRGLRDGAAEAAP

SEQ ID NO: 35045 - protein, 1268 aa, Xanthomonas sp. NCPPB1128
MTSLSESSTVPVAPSLFAETLAEQRAQQYRMRRLQVHNWGTFNGLTDVPIAEKGFLFVGRSGSGKSTLLDAMSALLTPPSIVDFNAAAREAERSGRDRSLVSYVRGAWADQQDSASGEIATQYLRKGATWSALALEYRNAQGQAVSLVRLFWIAGSGTAAADVRKHYMVVPRGFDVAAELDGFDLDLRRLKLRLGEDVHHFDSFAGYAERFRHLLGIGNEMALRLLHKTQSAKNLGDLNAFLRSFMLDEPRTFEAADRLVDDFAELDGAHHAVVTARRQVETLTPARDYHAELLALRRGVGELRELQLGIDGYREQRRLALLDARLQELDTQDRGLAGEEGQRREALDNHEQTLAELETQQRAQGGEQVEALERERGRVERERDERMRRRGQVEQACRQLGMGLAGSASGFAEQVAQARALRDGVAGEASSLDEAIAERMAERREDERRFAVIRTEIEALLKAPSSIPAPMQALRARLCAETGLSEAALPFVGELVQVEADQAAWRGAIERVLHGFAQSLLVDERHYASVADWVNKTQLGTRLVYFRVRHNDPLQRREPDAKSLLRKLELRDHAYAPWLRQELARRFDYTCVDTVAQLRDAERAITREGQVKHPGDRYEKDDRHAVGDRKRWLLGYDNRDKLKVFEREGQTLAQRIAACDADVAALRKQREQDQGRQLAAHTLAEREWDEIDVAPKLQRLSDIAEQLLQLREGDTALRALGEQIATVRARRDQARRTYEDVRLERAQLSRERARLEAQRETCAARVATAVIGPAQVAGLDARLAALPPLSLDNLEAHLRSVERGLGEQLAQSQAQDARLSQQVLDCFRRYCQQWPEDSGDFTVSLAGADDFLARLQRLESDGLPRHEGRFFDLLQTQSKNNLLALQRYTAEAHKAIKQRMDEVNASLEQVPFNRGTLLTIEVSDRRLLEVQEFQQQLRAVLGHQQTEDRALAEAQFAMLRGLVQRLGAQEPELRRWREQVLDVRQHVEFVGVELDAESRAQVEIYRSGAGKSGGQRQKLATTCLAAALRYQLGGEDGELPRYAAVVLDEAFDKADNEFTALAMNIFENFGFQMVVATPLKSVMTLEPFIGGACFVEISGRHNSGVLLIEYDAQAHRLKLPERSRNEAATPAAESVEAVDQAGADLPPPAADAADATAETLADAVAKPARASGKARDAGSKPRTTPKTSPATPGKRARNAGATPAAKASSAKAPRTSAAAAAPASTATRSAAQPASAKTAKAAIGSKPATPAKAAARKSPPATVKRRGG

SEQ ID NO: 35046 - protein, 478 aa, Mycobacterium chlorophenolicum
MDDHGGRSAADLLELNRDLQSSPTVRLLAATNLSLYSTLMDRHLSGGVVAETELVVRIERDLADLEDDQSGLALIKSWASQGWLHRIVDERTDQNVCYLTQDARRALDFLRGMRRQDTIATGGSINGIAGRLRHVALKVGNDPARIRKHIENEIEALRRELDQLEAGERPEPDVTDAYDEARAIALQMERLITDIGQYGTMIEQATAALDEPIDSNVEYRDRQRQMYADYQAAWDSQGRDSHRAFLRMINDPDQRAEFEADVAAVAEALPHLDPALRAVMAGFFELVGHQIDEVERIQQRCAQRVKRFTAFGTLEQSRGVARQLGEAIGAARTLLKTSLTDSRLDLELPLARHAISSVGALSFKIGDLSNPKPAKPADGEVDLASFAALTTQVDAPAMSEMLNAAVARGPVTLPDAVAMLDNAYLGHVIVLWSWALKQPNDDTGRSTTVRFRSLDGRDREMAVPDLSFTEPITAGVAS

SEQ ID NO: 35047 - protein, 228 aa, Mycobacterium chlorophenolicum
MSTDTAADFAAFSDLPQVDQSARPPHQRRPRFDGDVSELPDRACWALQHLLTRRYISAESDSDIYAWVLEYRHQLSVRLSELDLLLRIVDGTDVAFVEQARYESAKGIKLLRREPLGTYDSILALHLAQMMRASGGQSVLISRDEMHGLFSGVLNDVDRDAVTFAGRVDAAIARLTGLEILRRSRDDEDSYTISPVITAVMTASVISELQQQFELLANGGTTAEEIQE

SEQ ID NO: 35048 - protein, 1118 aa, Mycobacterium chlorophenolicum
MTEQFHLSRLQVINWGVFDGYHSIPFSEGGALIAGASGSGKSSLLDAISLGFLPFNRRNFNASGDNTAAGSSAGRRTVDKYVRGAWGQRSDGGTSRVMYLRGDGTAWSAVAVTYASDSGRTVTGLVLKWLTGESRNDSSSRFVLGDGDLGIEDVCNRWAAGRFDTGVFKEDGWRFTTKVESQYLAQLYATIGIRASDAAQQLLGKAKSLKSVGGLEQFVREFMLDEPDSLARLPEALKQIDPLVEARELLAVAQKKRKILGDIEKIQQRYASESTDLGIIDLVDLPMVRAYTDHVRLAQCPAQIAQLDTTVDQLDNEYEDVTRALNLAKAEADSLNAQISGTSANIGPLQSQVTAAEAEAEQVSRRRGAYEDMLAAQDLEVPDTADEFWNLREDLLAQATELLAKVERHREASTDAEYAQKAARIARDDAAKELKRVEHVGSALPEFALLMREQICAAVGVDAAALPYVAELMDLRPDQTRWRTAVEKVLRGVGLRLMVPDQHWTAVLQFVNETNMRGRLALHHVRAKMLGADPVDPEPNTLAGKLFAVDPAHPCTAEAVDIVTAAGDHVCVDTPEVFARFRRAVTDTGLYKDSDRLAIKDDRRPLKQSEYLYQGDVSAKINALTVDLAAAEEAYQKARRIADDIAAQRQQWRDRAAACKAIGEQFPQWSQIDTETADGHADRLREQYELLLADNPDIEALNARADECWSQIQKLMTRRGAIQTRRDDLDARRTRLLELSERLSPAFVSEPLTELLGRYAGQLPVGLELLDPEPHRDALFSAIKKEREQLRESRRRSYDELARILNTFDTAFPDAIPNDSNDFDERVHDYVALCRHIDERELPEAYERMMRLVTEQAPDAILTLHRVAEQEARRIAEQIERVNTGLGAVEFNRGTRLTLRATPRSLTAVSELTEIVRAISRRIAEVGLGDKQAILDQYADILRLRNRLASTAPEDKAWTRDALDVRNRFTFDCAEWDVASDELIRTHSNAGDNSGGEQEKLMAFCLAGALSFNLASPESQDNRPVFAQLMLDEAFSKSDPQFAQQALQAFRKFGFQLVIVATVQNATTIQPYIDSVVMVSKTEATGRNARPVATVATRSIAEFTELRHQMRTRVPAGV

SEQ ID NO: 35049 - protein, 473 aa, Mycobacterium obuense
MDDQLSAADLLERNRELQASPTVRLLSATNLSLYAALMDRHLSGGVVAETELVVRLERDLADLGDDQPGLALVKSWASQGWLHRIVDERTDQNVCYLTQDARRALDFLRGMRRQDTIATGGSITGIAGRLKQIAIRVGNDPARIRKSIEAEIDTLRRELDELEAGERPEPDVTDAYDEARAIALQMERLITDIGQYGTMIEQATAALDEPIDSNLAYRDRQRQMYADYQAAWDSQGRDSHRAFLRMINDPDQRAEFEADVAAVAGALPHLDPALRRVMAGFFELVGQQIDEVERIQQRCAQRVKRFTAFGTLEQSRGIARQLNEAIGAARTLLKTSLTDSRLDLELPLARHAISSVGALSFKIGDLSNPKPAKPAEGDVDLASFAALTTQVDAAAMAEMINDALPMSLPDAVARLDNAYLGHVIVLWSWALKQPQETAGESTTVRFRSLDGRDREIAVPNATFTEPITVGVAP

SEQ ID NO: 35050 - protein, 226 aa, Mycobacterium obuense; identical to SEQ ID NO: 34542

SEQ ID NO: 35051 - protein, 1119 aa, Mycobacterium obuense
MTEQFHLSRLQVINWGVFDGYHSIPFSEGGALIAGASGSGKSSLLDAISLGFLPFNRRNFNASGDNTAAGSSAGRRTVDKYVRGAWGQRSDGGTSRVMYLRGDGTAWSAVAVTYASDSGRTVTGLVLKWLTGESRNDSSSRFVLGDGDLGIEDVCNRWAAGRFDTGVFKENGWRFTTKVESQYLAQLYATIGIRASDAAQQLLGKAKSLKSVGGLEQFVREFMLDEPDSLARLPEALKQIDPLVEARELLAVAQRKRKILGDIEKIQQRYASESTDLGIIDLVDLPMVRAYTDHVRLAQCPAQIAQLDTTIDQLENEYEDVTRSLNLAKAEADSLNAQISGTSANIGPLQSQVTAAETEAEQIERRRAAYEDMLAAQDLDVPDTADEFWNLREELLQQATELLAKVERNREASTDAEYAQKAARMTRDDAAKELKRVEHVGSALPEFALLMRDQICAAVGVDAAELPYVAELMDLRADQTRWRTAVEKVLRGVGLRLMVPDQHWTAVLQFVNETNMRGRLALHHVRAKMLGADPVEPESNTLAGKLFAVDPAHPCAAEAVDIVTAAGDHACVDTPDVFARFRRAVTDTGLYKDSDRLAIKDDRRPLKQSEYLYQGDVTAKINALTVDLAAAEDAYQKARRTADDIAAQRQQWRDRAAACKAICEQFPQWSQIDTETADGHAERLREQYELLLADNPDIEALNARADECWSQIQKLMTRRGAIQTRRDDLDTRRTRLLELEERLSPAFVSEPLTELLTRYSAQLPVSLELLDPEPFRDALFGAIKKEREQLRESRRRSYDELARILNTFDTAFPDAIPNDSENFDERVHDYVALCRHIDERELPEAYERMMRLVTEQAPDAILTLHRVAEQEARRIAEQIERVNTGLGAVEFNRGTRLTLRATPRSLTAVSELTEIVRAISRRIAEVGLGDKQAILDQYADILRLRNRLASTAPEDKAWTRDALDVRNRFTFDCAEWDVASDELIRTHSNAGDNSGGEQEKLMAFCLAGALSFNLASPESQDNKPVFAQLMLDEAFSKSDPQFAQQALQAFRKFGFQLVIVATVQNATTIQPYIDSVVMVSKTEATGRNARPVATVATRSIAEFTELRHQMKQKVPALAH

SEQ ID NO: 35052 - protein, 481 aa, Mycobacterium chubuense
MDDHGGRSAADLLELNRDLQSSPTVRLLAATNLSLYSTLMDRHLSGGVVAETELVVRLERDLADLEDDQSGLALIKSWASQGWLHRIVDERTDQNVCYLTQDARRALDFLRGMRRQDTIATGGSINGIAGRLRHVALKVGNDPARIRKHLENEIETLRRELDQLDRGERRTFSEPDVTDAYDEARAIALQMERLITDIGQYGMMIEQATAALDEPIDSNVEYRDRQRQMYADYQAAWDSQGRDSHRAFLRMINDPDQRAEFEADVAAVAEALPHLDPALRAVMAGFFELVGHQIDEVERIQQRCAQRVKRFTAFGTLEQSRGVARQLNEAIGAARTLLKTSLTDSRLDLELPLARHAISSVGALSFKIGDLSNPKPAKAADGEVDLASFAALTTQVDAPAMSDMLNAAVARGPVSLPDAVAMLDNAYLGHVIVLWSWALKQPNDDTGRSTTVRFRSLDGRDREMAVPELSFTEPITAGVAS

SEQ ID NO: 35053 - protein, 228 aa, Mycobacterium chubuense
MSTDTEADFAAFSDLPQVDQSARPPHQRRPRFDGDVSELPDRACWALQHLLTRRYISAESDSDIYAWVLEYRHQLSVRLSELDLLLRIVDGTDVAFVEQARYESAKGIKLLRREPLGTYDSILALHLAQMMRASGGQSVLISREEMHGLFSGVLNDVDRDAVTFAGRVDAAIARLTGLEILRRSRDDEDSYTISPVITAVMTASVISELQQQFELLANGGTTAEEIQE

SEQ ID NO: 35054 - protein, 1121 aa, Mycobacterium chubuense
MTEQFHLSRLQVINWGVFDGYHSIPFSEGGALIAGASGSGKSSLLDAISLGFLPFNRRNFNASGDNTAAGSSAGRRTVDKYVRGAWGQRSDGGTSRVMYLRGDGTAWSAVAVTYASDSGRTVTGLVLKWLTGESRNDSSSRFVLGDGDLGIEDVCNRWAARRFDTGVFKEYGWRFTTKVESQYLAQLYATIGIRASDAAQQLLGKAKSLKSVGGLEQFVREFMLDEPDSLARLPEALKQIDPLVEARELLAVAQKKRKILGDIEKIQQRYASESTDLGIIDLVDLPMVRAFTDHVRLAQCPAQIAQLDTTVDQLDNEYEDVTRALNLAKAEADSLNAQISGTSANIGPLQSQVTAAEAEAEQVSRRRGAYEDMLAAQDLEVPDTADEFWNLREDLLAQATELLAKVERHREASTDAEYAQKAARIARDDAAKELKRVEHVGSALPEFALLMREQICAAVGVDAAALPYVAELMDLRPDQTRWRTAVEKVLRGVGLRLMVPDQHWTAVLQFVNETNMRGRLALHHVRAKMLGADPVDPEPNTLAGKLFAVDPTHPCAAEAVDMVTAAGDHVCVDTPEVFARFRRAVTDTGLYKDSDRLAIKDDRRPLKQSEYLYQGDVSAKINALTVDLAAAEEAYKKARRIADDIAAQRQQWRDRAAACKAIGEQFPQWSQIDTETADGHADRLREQYELLLADNPDIEALNARADECWSQIQKLMTRRGAIQTRRDDLDARRTRLLELSERLQPAFVSEPLTELLNRYAGQVPVVLELLDPEPHRDALFSAIKKEREQLRESRRRSYDELARILNTFDTAFPDAIPNDSDNFDERVHDYVALCRHIDERELPEAYERMMRLVTEQAPDAILTLHRVAEQEARRIAEQIERVNTGLGAVEFNRGTRLTLRATPRSLTAVSELTEIVRAISRRIAEVGLGDKQAILDQYADILRLRNRLASTAPEDKAWTRDALDVRNRFTFDCAEWDVASDELIRTHSNAGDNSGGEQEKLMAFCLAGALSFNLASPDSRDNRPVFAQLMLDEAFSKSDPQFAQQALQAFRKFGFQLVIVATVQNATTIQPYIDSVVMVSKTEATGRNARPVATVATRSIAEFTELRHQMRADAKVPALAR

SEQ ID NO: 35055 - protein, 482 aa, haloalkaliphilic bacterium ACht6-1
MSLSYNDILQLFKFHSGWKLLRADSAPLIISFLNKAFIEPNLRSISRSNLISKLEDTLYELRQSENEECYPRSASAYLEDWAHDSKGWLRKFYPDDSDEPHFDLTPATEKVIGWLESLSGRAFIGTESRLMTIFEILRQMVLGAETDVATRIEALEAEKNQIDKQIEAIKNGEVPVLDQTALRERFMQFSTMSNDLRSDFRAVEENFRKLDLQVREKIASWEGRKGDLLEEIFGERDVITDSDQGRSFQAFWDFLMSPSSQEEFSELLQKVFAMDCISSSKPDNRLRRIHFDWLEAGEKTQRTVANLSEQLRRYLDNQAYLENKRIMSILDSISQGALRVKHNMPRNSTFMNLDKLSPDIHLIMERPLFKPNAEIDLSGVILEAEEAEFDSGALFNQIYVDRAELEANIRRELQTVSQVTLCALTEKYPLRKGLAELVCYISIASATHLSVFDEECEESIRWEDSDGRFRRATLPRIIFNRS

SEQ ID NO: 35056 - protein, 200 aa, haloalkaliphilic bacterium ACht6-1
MSDQKESGKAFSKVMINLLKGVMYADEDPKLWQHLLNLQVRVRDYAREIGLSLEISEDEGFAWLKTIEEQGEGEELPRLISRRQLSYPVSLLLALLRRRLAEHDATSSDNRLILSKGDIVEMITTFLPSGSNEVKMVNQVESHLKKVADMGFVRFLRSGKDTIEVRRILKVFVDAQWLNEFDQRIKEYLLSAGGEVKEDE

SEQ ID NO: 35057 - protein, 1124 aa, haloalkaliphilic bacterium ACht6-1
MNDQLSFSFDDNDALAGFRLSRAEVYNWGTFHQKVWTLSLEGKNGLLTGDIGSGKSTLVDAVTTLLVPSHRIVYNKAAGADTKERSLRSYVNGYYKTERSDGGVGAKPVALRDQNSYSVILGVFTNPGYLQTVTLAQVFWQKDPAGQPNRFFIVADCELQITEHFANFGSDIKNLKKRLKALPGVDDVYDSFPPYAASFRRRFGIENAQAMELFHQTVSMKSVGNLTDFVRMHMLEPFDVDSRIAALITHFDDLNRAHKAVLKAKSQINKLKPIVNDLDKHQKASHNCENYRVLRDTLKSYFARLKSDLLSKRLKKLCDEHVKLNGKVEQTKDDITRMQGERDDLRQAIADNGGDRLERLRNEIKELEISKDKRLQAYNQYSTLAEQLSFEKPLNLESFLTNRQCISDSMDENDAQETMLENSRREEDVQMARLRDEHSKVSEEVESLRKRRSNIGSHQVRIRDELCAALDISEEDLPFAGELLQVRAEECDWEGSIERVLHNFAMSLLVPDRLYKDVSSWVDSTHLKGRLVYFRTISRKTKSTVSLHPDSLVRKLSIKPDSEFYNWLEDELAKRFDYVCCSSIEQFRKEKMALTVSGQVKGSGNRHEKDDRFRLQDRSRYVLGWDNRAKLRALEQQRLSLEKEIQDCAEGISELQSKLKELRIRKENLVRLESFTRFEEIDWRPLSVRITELDKERQELEEASDVLKTLIHKLEQLNQRLRELESVLDSFKDERSKNEEKQNNTKQLLEQCTEMMDSGESQQRNQLFEQLDTLREKVLGKHQLSVESSDRRQQELREYLQGRIDSEEKKRSNLSEKIIRAMQDYRRDNAAETTDIDATVESGPEFRTMLSQLEADDLPKYEQRFKELLNENTIREIANFQSQLNRERQEIRERIERINQSLTGIEYNKGRYIVLEAQENTNTEVRDFRMALRACTEGGLTGSQTDQYAEDKFLQVKEIIDRFRGREGSTDMDKRWTQKVTDVRNWFSFAASERYMEDNSEYEHYTDSGGKSGGQKEKLAYTVLAASLAYQFGLEWGEIRSRSFRFVVIDEAFGRGSDDSARFGLELFKRLNLQLLIVTPLQKIHIIEPYVASVGFVYSPQGRESMLRNLTIEEYAAEKEACAL

SEQ ID NO: 35058 - protein, 404 aa, haloalkaliphilic bacterium ACht6-1
MRKQTNQKWTTPGEVKKLLLARWKRGEFLREIITPSLPYPVEIPLKYPRGQLLGENFGTAREWAKLYSAYSGSKLPYSVKWSEINFREIGRNEIPVSVQFESLEKISEFIDKKKSLNLFRTLYEELICSFPKLKPWVYNKPFMLLEFAPVIHKLIIVTEWIVNHPRPAIYLRQISIPQIDTKFIEKHKRVIGEWLDILLDSSQIDEGYSGTRNFELRYGFLFKQPLIRFRILDPDLFIAGLSDMALPADQFCRLRADFEDVFITENDINGLCFPSRKRTIVIFGRGYGFDYLTNASWLKQKRIWYWGDIDTHGFAILNQFRVFFPHTQSFLMDRETLLAHKDYWVEEKAPACAKLENLRIQETALYEDLVKGRLGKAVRLEQELVKFEYLLEALTNTAKSHQPH

SEQ ID NO: 35059 - protein, 494 aa, Tetrasphaera jenkinsii Ben 74
MATGIEGDFARIEAALGTPTLKLLDRKSAVIVLPIFAALFPDNAEPMPVERFHTRVDALLDELRASGHQVPSSSGKALAMQWVRERWLYRDPGQGQETYRPTGDAEQAMDYVTRATRTQLNLSLSRIETMRRVVSEAALAAHPDREERLRRLSEEIARLSAEHDRLRAGGELAVASESELIEQFANVLRELDGLPSDFRRVEEAMREMHRSIASRFRQDDSPIGEVLDDYLEQSSQLLTATPEGRAFQGALELLRNPDWLGSLRTDLGTILAHPIAGMMLPDETKQLRGTVAVIRRGIEDVNGQQSRLTTTLTEHILNYDHVRNRELDEVLKGIDASMRTWMQTARPRDHVEVELIPAHLEIDALKLRVFDPDSERPPEKLADTSDDEPEALSLEYIRKQGGPSLEELTRLVDEALANSGVIESAAALFNVQPDELRRPVEVLGLMHLLARLDAAVDASQPEQVDAVRPDGSTRSFLMPATSLQGDTQQQEPAS

SEQ ID NO: 35060 - protein, 261 aa, Tetrasphaera jenkinsii Ben 74
MTDQSFDHDVEPDDRYAELDDDVFASNSEDEEERLSLAMFEGDTSTLFPQQRLCLHALLKHRYISADRHPEHWAVLMDHEGTITSRLHDLFLDLHVDREHQIAFKRAASSHDDQPLPSLLRNVSHNKEETIMMVSLRRRFFAQRQEGDDTVFVDRQTILDEVADQRPDAATNRAMDHKRANNAVDALLAAGVLLRTGDPDRFQISPIIEVLLPIEKLRALWTWLLDRSSSDREAAHDGVDNDNDEAASPDSLFDSGDVEAL

SEQ ID NO: 35061 - protein, 1130 aa, Tetrasphaera jenkinsii Ben 74
MTAELTLPIVAPSSAAKPSDHAQWRIESIQMVNWGGFHGAHQVRVHHGSTLMSGASGSGKSTVLDAYIALMMPSDTPFNGASNDAAGRARSAEQRNLLTYLRGKMDSARVDGSNELRDHVLRGGNGEHIWGALAATFLNENGRRFTVVRIYFVKAGSTTGGDVVTSYATFDGHLHLAQLEPLAATRFDKRALRSIGLLPFNTFREFEDTLHTRLGIGGGDGGRKAMRLLARVQAGMEVKRVDTLYKSMVLEQPITFEKADNAIEHFANLDASYKKMLDEADKVKALQQLPDLQHELAQAESTAALIEAFGVNREGPTPFQLWRLHTERELLDGAVATNRSEYATTKTRFEQAREDEQRHAERLKQIAQEKRANGGDAIDARKREIDILAGHQDAVYAANLKFQASTEPINLLVPENSAEFGQAQADAAEFLAGFDARADDLRDQEDAIRDDDLSPLTTKKRELLEEKASLAGRAGMVPRRLHEARVKMAQAAGLDPMIDLPFVAELIDVRPDQERWRKAVETTLGGIARTVLVDRHARQRLSAAIDPIKITPRIRFQGVDLAAHEEFPCDEAYVSGKLAFKDSPFSAWVQDRVTAHGTDHRCVENASQLNDREPMVTLTGQTRDGDKGAHGESHDGNIIGFSNERRLTDIEAELGALEPAIRAVRGRIEQLRARSASLQSQKEAHTYVANARWADIDHLGLARRIEELEAEIAKLRAANSILDALQAEEEKVSLLHKEANRTKVLDEDRLTELTKQHGDLASEQDAVQDAIDAIDDAQSAHVTDEQQSYLDEMFAANWDVTSLGSFHSNMRAMGKRLRDESATARQSRDRTVRAMESMFEQYKARWTENNLGTSIASADGYREILDRIQTGGLHERRNKWRLEFAKWSSNDLLTLNEAFDTAMEDVEDRLVPINAILATLPFGGKGHLQIKHRRMISEDVSNFKRDLRKLSSGVALELTDAEVESRFKRLREFMTKISIPPGHTKKSTSMRDGYLDVRQHVVINAVCVDQHGHEIATYDSLGGKSGGETQELVAFIVGAALRYQLGDESRSRPRFAPVFLDEGFIKSDSEFAGRAVTAWQNLGFQLIIGAPLGQVTALEPYMDLLLTVTKSPKGYSFVRELSDAQQQGSS

SEQ ID NO: 35062 - protein, 395 aa, Tetrasphaera jenkinsii Ben 74
MKTPAAVTKDMERRLVNHWHSEIVSATEGATSAFPHAFPLGRAASADLRADYAAIHALTVTWQEWARGHGVELTYTSRIAKGGTRQVVPTHVLLTSVDQAATIVGKGWQERLARGRERLAVLLDRSRTLDRADAGRILRLVDGYADIDFALLLKVVDWYRADPSLARGLTPRQVPIPGVHAKWLQAHRAAVLALTGLDDLGLLANHPARIHFTYLDPDHRADGRRLHDSATVGDTFAPAYQPEVVVISENKDTAIHFPELAGGLIVEGVGRGGRTVASFPWIREAPLVVYWGDMDRDGYEILNGYRIDFDRDLDSILMNVAAYEEFEPYGTNHDQNGRDLVAGAPRVVDHLRADELEVYLRLLHPEHSGHRRIEQERIPLTRALSEVERLVSPTN

SEQ ID NO: 35063 - protein, 482 aa, Pseudarthrobacter siccitolerans
MPRSARSSADAISARLRDLELLTKGPAWALTRSAPWVIAVLQASFTRTRPQLPLEEFHADVDSFLEELRRQEPGLGGGANGKAFGDEWTRRQFLTRRNQSGQIVYEVTEPAARVLAFLDSLSSERSTLNGSRLGTLLGDVEKLANETNPDQSARLEALEEEIEERQQLIQDISTGEFDGLLDDDEAVEAAGNILDLAASLPADYKKMRDRIEELVGELRNQIIEESLTKGATMAQVLEADKRLRQSPEGRTFRSFTAFLEDPQQQLRFRSAIGEVLSRQFADDLSPEDRETLKNLVAELRQQHSQIQRIYGKLSESLNTYIQSDDFRQSVRLRQVLREAEQAIRSLSYERERPALVRGPVLFNAGFESLSMVKLFDPDEFAAPPKLADPIAFSDSDRVRSPRTGKAKPEVVRSAMAGASTLSEAWQQLPPEEQHINTIRALLSHALHDGAAFNTQAVDALDFEQIDGTTRRAYLPLVTLPKD

SEQ ID NO: 35064 - protein, 339 aa, Pseudarthrobacter siccitolerans [sequence omitted]

SEQ ID NO: 35065 - protein, 1154 aa, Pseudarthrobacter siccitolerans
MLPIGDVTNPGQMRLALVQVVNWGTFHGAHTMHVDRNGTLLTGNSGVGKSTLFDAMLRVFDARPRSNEAAAQRSGGAVEDKRTTFTYMRGKVGDKAVGEGSASAFQRPGATWSAVALTFDNAAGTRVTISALFDLPKNGTESSVGRFYVIDHAPLDLEALEGIADKRFTKAALETIFPDAQVFDVHKAFAERFRRLLGINSDQALPLLRVIQAGKGLGGSVNTFFRDQVLDAPATLAAADDVVEEFSNLMSIRQRLEDVRQQRDQLAPVPGLNREYAQSLLDANRLRDLAGEEFEAYKQKLAVTVHQKTLARFKELAQAKAKELGAERSVRDGLAKELRQLETEYNNQGGNAISAIEQSLENARVGLKLRQQVEEAARQALADAGLQLEWTEAGWEQAHEQAAARSAELKDDSQALQELRFEAFDAHATRKRELAAAEQELVSLKTRKSLLPPSSIENRAAIAAATSIPEDRMPFAGELMDLAEGQEKWRPAAERALRNLATTLLVPGEHFAAVTRYLNDHNVRGALRAVDVSKPLAGGALALEDVHDGDLLTKLDILTTGVAAEAGAWIRERIALDFAYPCVEDPDELARLDRGLSLGGVVKRNRHTVEKDDRFTSRQDYVLGFDNAAKLELVAGQVEDLRQDVAKAAELAQSREDSHQGMSRQLDALRRIAEDHRPWEQVSAAVAADELARIEQRLKDALAAQADLEPLRATIEGVRQKHQSSTEAAAVLQSEYKALDRQLTAADTLLEAARERLTQAPPSDTTVTALEPYFADFGDVSEMHELDNLANRVRTALLGELHTAESRGQATAERLTRIFEGFVREWGSAISADHGTTIGAASEFETRYHAIVSDGLPAQEAEFRQFFNQRTHESFSTLLHLLDEERRSITSRILPLNGILSQVNFHEGSYLELDIKQTLPPTAKQFKDAIQNALKARHTRPARAEGARTDGSSGAGDDDAELTARYKSLETLVKRLGSQAPEDRRWRAEVLDVRGHLLIQCKEHREVAGPSSGKKGGAKKTEVFMHADTGSMSGGERQRFTAFIMAAALSYQLGIAEQGFTTYGTVMMDEAFVLASEEFAGAGIKALHEFGFQLLLAAPENVIDLSRHLGSVTEILRDRRTNRSGVLTAPVIKRRAGEEGTWRSEANPVDIILR

SEQ ID NO: 35066 - protein, 491 aa, Mycobacterium nonchromogenicum; identical to SEQ ID NO: 32571

SEQ ID NO: 35067 - protein, 254 aa, Mycobacterium nonchromogenicum; identical to SEQ ID NO: 32008

SEQ ID NO: 35068 - protein, 1120 aa, Mycobacterium nonchromogenicum; identical to SEQ ID NO: 32009

SEQ ID NO: 35069 - protein, 491 aa, Mycobacterium fortuitum subsp. fortuitum DSM 46621 = ATCC 6841; identical to SEQ ID NO: 32571

SEQ ID NO: 35070 - protein, 254 aa, Mycobacterium fortuitum subsp. fortuitum DSM 46621 = ATCC 6841; identical to SEQ ID NO: 32008

SEQ ID NO: 35071 - protein, 1120 aa, Mycobacterium fortuitum subsp. fortuitum DSM 46621 = ATCC 6841; identical to SEQ ID NO: 32009

SEQ ID NO: 35072 - protein, 486 aa, Mycobacterium abscessus UC22; identical to SEQ ID NO: 31694

SEQ ID NO: 35073 - protein, 249 aa, Mycobacterium abscessus UC22; identical to SEQ ID NO: 30762

SEQ ID NO: 35074 - protein, 1115 aa, Mycobacterium abscessus UC22; identical to SEQ ID NO: 30763

SEQ ID NO: 35075 - protein, 489 aa, Stenotrophomonas maltophilia; identical to SEQ ID NO: 31432

SEQ ID NO: 35076 - protein, 233 aa, Stenotrophomonas maltophilia
MSWHEDPIDAPLADVAEDAYEAEPVATVAQPRRGNDVYYLGDTGRLPLDARRALCQLLIGPSIDQLRHAKLWPALIRSEAAIRSSLADLFLELVLDRDSGVAFTRQADTEDVDAPVLLRTSPLTFIDSVLLLYLRQQLAEADARGNRAVVADAEMAEALAIYEKNLSTDRAGFNRRVASAVQKMKDNHILTRLSGQEDRHEVSPALKLLFSAEDVSQLSAVYRQLRETPAAEA

SEQ ID NO: 35077 - protein, 1126 aa, Stenotrophomonas maltophilia
MAISKHTPALFNEGLPDPRLQQFRMRRLQVHNWGTFNGLTEVPIAERGFLFVGRSGSGKSTLLDAMSALLTPPAIVDFNAAAREAERSGRDRNLVSYVRGAWADQQDSGTGEIATQYLRKGATWTALVLEYRAGDGRVVSLVRLLWISGNGTSAGDVRKHYMIAERPFDIAKDLGGFDLDLRKLKQKLSDLHHFDTFSGYAERFRDLLGIDNEMALRLLHKTQSAKNLGDLNVFLRDFMLDTPKTFDAAERLVSDFAELDGAHQAVVTARRQVETLLPARAYYNDLKEMHRQRGDDEALKLGVDSFRESRRQALIEARLREMDVRDRGLLGEEAQRRAALDNHTERLAELELQRRQQGGERIEELEREQGRAEAERDRRKAKRDQAQEAAQQLQAELPDDAHGFAELVERAQNELQDRQRASAALDDAISDRLGGKRDDERRFGEVRSELEAMQRTPSNIPAPMQKLRARLAEETGIAEAALPFVGELIQVRSEEQGWQGAIERVLGGFALSLLVDDKHYNDVAEWVNRTHLGMRFTYYRVRRNDDAFAREPSAKSLLHKLELREHVFESWLRRELGKRFDYECVDAKQLRNVDRGITREGQVKHPGDRFEKDDRSAVGDRRRWILGFNNHDKVGAFEREAQELAKRIASCETDIARLRGQRDRDNERRLACHELVSISWNEIDIAAPQQRLSDIEATLRDLREGNADLAKLAKQIDAVRADIEQSRRTYEDVRVERGQLVKERDRLDRARQQSRALVLPSLAQEQEAGLAERLQEQGPLSLETLEAHMRQVSNALNEQLSSSQQDLNRIENQLIGCFRRFIQQWPEESGDFTVSVASAEDFLARLERLERDGLPQHEERFFDLLQNQSKNNLLALQRHSAEARKSIGQRLDEVNASLEQVPFNRGTLLTIELSDRRLPEVGEFHLQLREVLSQQQTEQRELAESQFTVLRQLVNRLGSQEGEDKRWRELVLDVRMHVEFIGVELDAETRQQVEIYRSGAGKSGGQRQKLATTCLAAALRYQLGGADSQLPSYAAVVLDEAFDKADNEFTALAMNIFDNFGFQMVVATPLKSVMTLEPFIGGACFVEISGRHDSGVLLIEYDEEGKRLKLPERSRQQANEPEEAEA

SEQ ID NO: 35078 - protein, 491 aa, Mycobacterium conceptionense
MPEPGMSGPSLDQLYQLNREVADSRSARLLVTNNLATYLTLMERHLDRGAKLTEMELVVRLERDLADLGTETEQSGLALIKYWASQGWLHRITEQSGDTERNVCYLTYEARAVLDFARRMRREDTLATGGSITGIAAGLRRVAGQVSNDPERIRADIEAEIAKLRDELDALDQGQRPEPDLVDVEDEARAIALQMEQIISDIGQYGSMLNRITTRLLDASADTDLGYRERQRQLFDDYESLFASRESASYTAFTRMIQDPEQRAALVADIDAVTRELPHLDPGLREVMTGFFSLVSAQTAEVGRTRQRCARRIKRFVASGTLEHSRGVTRQLNDALASAHDLLSVSLADSRIGIEVPLVRTDFNSIGAVAFKIRDAIPPSQAEPSEGEVNLSAFSALASQVDAAELAQLVNGALARGPLPLPDAIGMLDSAYLGHVIVLWSWALKQQPADGAESGHSVRVRFRSLEGADREIEIPRLVFTEPIPTVSESLL

SEQ ID NO: 35079 - protein, 251 aa, Mycobacterium conceptionense; identical to SEQ ID NO: 33483

SEQ ID NO: 35080 - protein, 1138 aa, Mycobacterium conceptionense
MIPTTPMYLTGSPTMWTLMAEPTNQFSLSRLQVINWGVFDGYHSIPFSPHGTLITGSSGSGKSSLLDAISLAFLPSHRRNFNASGDTTAAGSGTGKRTVDKYVRGAWGERREGTSRQIMYLRGTGPAWSAVAVTYSDRTGRSVTGLVLKWLAAEKNSDPGSRYYLIDADRDIFGLCNRWAANGYDAAVFRDDGWTGGRSESQYLAQLYSSIGIRASDAAQQLLGKAKSLKSVGGLEQFVREFMLDEPASLSGVEEALEQINPLVEARGLLDVARRKRNTLGNIAAVQARYADEAAKFGVIDTIDNAMIRDYVDHVRLAQAGPEIANLDDQITQLGAQRDEFGTQQRQLKNEHNSLMAQINTVTVDLVPLQQRLTEAERISEEVSRRRSAYEDKVTSLGLTPPDNGEEFWSLRETLMEEADRLHRELFTGNQPYVEASAKEVRAREARESVEAELERVQRLGSPLPKTEYEMRARIARALDISERDLVYVAELMELKPDETRWRLAVEKVLRGAGLRLLVPDAYMERALRFVNENDMRGRIQLQHVQHGAQLRTPAPGTLATKLQLADPTHDSAVEALNVVAAVGDYVCVDGPGEFTEQSRAVTDQGLRKDSGRLSIKDDRSRLRPSDYIFLGGTAAKVEALQDDLAAAHDVYQVARTARERLDEHRGQLQSRERACRALCDQYMQWSDIDTDSVDEMLERLQDEHDLLVSDNPDAERLQQRADECWERVEKVIQQIGSLNERETALDRRRTALLELSEALTERLGSSEFPSHARDTIDGYAADIALTLELLEPEPYRNELIRVISRERDRLRADRNRSHDELAGIMAAYDSSFPDAIPNDSDVFDERVHDYVALCRRIDERELPDAYERMQRLITEQAPGAILNLHMIADNEARRITEQIARVNTGLGAVEFNRGTRLTLHAGTRHLAAVDELNEKAQRISARVSLVSFGDETAMFEQYTDILQLRKLLAGNTPEDRQWTRDALDVRNRFVLYCEERDAETGEVIRTYSNSGDNSGGEQEKLMAFCLAGALSFNLASPDSNDTRPLFAQLMLDEAFSKSDPQFAQQALSAFRKFGFQLVIVSTVQNSTTIQPYIDNVVMVSKSDASAPNARPVASVTSASISEFADLRRTSGDAVPSA

SEQ ID NO: 35081 - protein, 499 aa, Yersinia similis
MEENAQQCTEKYISARSQHPTWILLASRRAPLVLGCLRAMFKTSHDGIPMEDALQALAGILSAHASQELYEIEPDNTHLQAGRELREWIKRRLVVEREGRIFATDALEVAIQFVESLDSRIMTSTASRLSVVQREIENLETSLNPNPESRINKLRSRIKALEEELSLAEAGHIVVLDEAQAVEGIREVYNLATSLRADFRRVEDSWREADRALRQSIISEQYHRGEIIDRLLDDQDSLLNTPEGRVFDSFQQQLRQTIELDNMRHRLRTILRHPVVPKALPWSQQRDLHFLVKRLVQETKVVLQARSRSERDVKGFMKTGLAAEHHRVGQLLNDIFSLALNLDWQRLAIRRQEIPLPPLGMAVTGVPAVERLRFKTLDEDIEPELDLSTTSVGLEQVGDDFWDAFDGLDREALIQGTLRVLAEQNRPISLGELAVLLPPAHDLETFALWLGMAHEAGITIQNEQREAVELIDDEQRIWRFYLPYAGLESQALKDIDWEL

SEQ ID NO: 35082 - protein, 252 aa, Yersinia similis; identical to SEQ ID NO: 33266

SEQ ID NO: 35083 - protein, 1096 aa, Yersinia similis; identical to SEQ ID NO: 33267

SEQ ID NO: 35084 - protein, 384 aa, Yersinia similis; identical to SEQ ID NO: 33268

SEQ ID NO: 35085 - protein, 452 aa, Pseudomonas putida
MDLDDALHSLAQAIANNADQEQSQTEPGTALQQANRELGEWIKRRLIVERSGRLYATDALESAFRFVDSLDDRVMTSTASRLSVVQREIENLETNLNSDPKSRALSLKRRIRELQIELDRAKAGHVPIFDEAKAIEGIREIYALATSLGADFRRVEDSWRNADRLLRQSIISDQCTRGEVLDNLLDGQDALLTTPEGKVFDSFQLQLRAPVELDLMRTRIRNIMRHPAVPQALHKYQQTELLRLVPRLLQESAAVLRARARSERDVKSFLKTGLVAEHHRVGHLLNEFLSLALRINWQRQAIRRTPVPIPPVGMALFGVPAVERLRFKAIAEEHAPTLDLTPRPADLEQIEDEFWQSFDGLDRDAFVLETLRILAQEGRPLSLAELASLLPPTHDLECFTLWITMAREAGLLIDEQEIERFDLADAEDRWWRFNLPFTQLESEKLQNIKWEL

SEQ ID NO: 35086 - protein, 213 aa, Pseudomonas putida
MDEELRTTRAVREVVQLLYKNGDIEESEDPGLYRAAVANADLVERIMEPFDLNVQLDELRGLAFVVVRQEPGDTADGWTHPLVRRHRFTLEQTLLIALLRQHLIAFEMESGVGAGVAQMTVDDVVTQLHTYLGEPGSDLKDRSRALNLLEQLKNHHLVTTIDSNDRFTIRPLIAHVANPDNLSTLIRWLETFGSSLDRSTNVDPVDEEGEEQP

SEQ ID NO: 35087 - protein, 383 aa, Pseudomonas putida
MKSPQELRNKLFRYWRQPGLRLRQLLDQAAWPLVLSIGKPTAQVFSSQVAMVQKHVEAWREVSVGKVEWKRIGYRSGADLVSIPTQWCLRSPTEWITAMSNEEISAQYMSLEHLVEHLPAVYRRLIITRPSLWKNKRSEEVIQVAGLAQRLSPGCAQGLPLRLLSGYGVDTKFFERNELLLSKMLDVRYEGEASRQGLCDFLDAYDDTSHWVLLAPLEAGLLPFKRQLVTTSELGRASLPGTRLLIVENQKCLHLLRELPGTIAILGCGSDLAWLGSAQLHGKSIAYWGDVDTWGMRMLARARSRFNAVIPLLMTATVFDAHSDFTVPEPIRAQDTPPADLTPSETALFKRLVQCSRGRLEQEFISREVVWAALEEWIQRRRG

SEQ ID NO: 35088 - protein, 491 aa, Mycobacterium conceptionense
MLEPGMSGPSLDQLYQLNREVADSRSARLLVTNNLATYLTLMERHLDRGAKLTEMELVVRLERDLADLGTETEQSGLALIKYWASQGWLHRITEQSGDTERNVCYLTYEARAVLDFARRMRREDTLATGGSITGIAAGLRRVAGQVSNDPERIRADIEAEIAKLRDELDALDQGQRPEPDLVDVEDEARAIALQMEQIISDIGQYGSMLNRITTRLLDASADTDLGYRERQRQLFDDYESLFASRESASYTAFTRMIQDPEQRAALVADIDAVTRELPHLDPGLREVMTGFFSLVSAQTAEVGRTRQRCARRIKRFVASGTLEHSRGVTRQLNDALASAHDLLSVSLADSRIGIEVPLVRTDFNSIGAVAFKIRDAIPPSQAEPSEGEVNLSAFSALASQVDAAELAQLVNGALARGPLPLPDAIGMLDSAYLGHVIVLWSWALKQQPADGAESGNSVRVRFRSLEGADREIEIPRLVFTEPIPTVSESLL

SEQ ID NO: 35089 - protein, 251 aa, Mycobacterium conceptionense; identical to SEQ ID NO: 33483

SEQ ID NO: 35090 - protein, 1120 aa, Mycobacterium conceptionense
MAEPTNQFSLSRLQVINWGVFDGYHSIPFSPHGTLITGSSGSGKSSLLDAISLAFLPSHRRNFNASGDTTAAGSGTGKRTVDKYVRGAWGERREGTSRQIMYLRGTGPAWSAVAVTYSDRTGRSVTGLVLKWLAAEKNSDPGSRYYLIDADRDIFGLCNRWAANGYDAAVFRDDGWTGGRSESQYLAQLYSSIGIRASDAAQQLLGKAKSLKSVGGLEQFVREFMLDEPASLSGVEEALEQINPLVEARGLLDVARRKRNTLGNIAAVQARYADEAAKFGVIDTIDNAMIRDYVDHVRLAQAGPEIANLDDQITQLGAQRDEFGTQQRQLKNEHNSLMAQINTVTVDLVPLQQRLTEAERISEEVSRRRSAYEDKVTSLGLTPPDNGEEFWSLRETLMEEADRLHRELFTGNQPYVEASAKEVRAREARESVEAELERVQRLGSPLPKTEYEMRARIARALDISERDLVYVAELMELKPDETRWRLAVEKVLRGAGLRLLVPDAYMERALRFVNENDMRGRIQLQHVQHGAQLRTPAPGTLATKLQLADPTHDSAVEALNVVAVVGDYVCVDGPGEFTEQSRAVTDQGLRKDSGRLSIKDDRSRLRPSDYIFLGGTAAKVEALQDDLAAAHDVYQVARTARERLDEHRGQLQSRERACRALCDQYMQWSDIDTDSVDEMLERLQDEHDLLVSDNPDAERLQQRADECWERVEKVIQQIGSLNERETALDRRRTALLELSEALTERLGSSEFPSHARDTIDGYAADIALTLELLEPEPYRNELIRVISRERDRLRADRNRSHDELAGIMAAYDSSFPDAIPNDSDVFDERVHDYVALCRRIDERELPDAYERMQRLITEQAPGAILNLHMIADNEARRITEQIARVNTGLGAVEFNRGTRLTLHAGTRHLAAVDELNEKAQRISARVSLVSFGDETAMFEQYTDILQLRKLLAGNTPEDRQWTRDALDVRNRFVLYCEERDAETGEVIRTYSNSGDNSGGEQEKLMAFCLAGALSFNLASPDSNDTRPLFAQLMLDEAFSKSDPQFAQQALSAFRKFGFQLVIVSTVQNSTTIQPYIDNVVMVSKSDASAPNARPVASVTSASISEFADLRRTSGDAVPSA

SEQ ID NO: 35091 - protein, 491 aa, Bordetella hinzii
MALDHLTLTTYRDRHPAWRLLASPHAPLVASFLYRVFVAPNVRVTSEADLTEMLEDELFALREALGAEVYPKAATEYLNDWCAPDKGWLRKFYKPGTDEAQFDLTPATEKAIAWLVSLTERPFVGTESRLLTLFTLLEQISTGSQADPARRLEELRRKRDEIDAEIGRVLSGDVPLMDDTAIKDRFLQFQQLARELLSDFRQVEHNFRQLDRSVREKIALWDGSKGALLDEVMGERDAIGDSDQGRSFRAFWDFLMSSRRQEELSARLDQVLGLPAVAALKPEPRTRRVHHDWLEAGEHTQRTVAQLSQQLRRFLDDRAFQENRRILELLRSIEIKALALRDTPPAGEVMLLDEMGADIALPQERPLFALHAKPRLAELILESGEDDDIDTARLFDQHVVDKARLREALRQALRQQSQISLRALLETQPLQQGLAELVTWLELAHAGNRGLDGLRATVDDDAQEIVEWAMQDSDGSTVRRRARMPRVIFTR

SEQ ID NO: 35092 - protein, 224 aa, Bordetella hinzii
MNDMHQDDPEGSAESRPPVVAELSQLMVHLLKGVLYRQDDERLWASLLNLQARVREQAAVLLLDLVLDEAEGYAFLKSQPEPEHADATPRLPRLIARRPLSYPVSLMLALLRKRLAESDAGGGDTRLVLSREEIAELMRVFLPDGTNEARLIDQVDSTITKVVELGYLRKLKPAAGASQQAPRYEVRRILKAFVDAQWLADFDARLEGYRTALSGGDRDKEAGR

SEQ ID NO: 35093 - protein, 1125 aa, Bordetella hinzii
MNDFSPQQLDFVADDSRVGFRLQRLEVLNWGTFDRRVWRYELDGRNGLLTGDIGSGKSTLVDAVTTLLVPAHRIAYNKAAGAETRERSLRSYVLGHYKSERNEATGSARPVALRDTTSYSVILGVFRNEGYGQAVTLAQVFWFREPQGQPARLFVTVERELSITEHFSGIGSDINGLRKKLRAMGCELNDSFPPYGAWFRRRFGIEHEQALELFHQTVSMKSVGNLTDFVRSHMLEPFDVGSRVEALLGHFDDLDRAHQSVLKAKRQIELLTPLVEDGRRHGQIAAEIQALREGRDALRPYFAGLKAALLERRLELLTQDAMRWDARIKQLGEQRDNARIEQGKLEGALRENGGDRLQQLAAAIQQQEAEKQQRQEKADAYTTLLTRIGEAAPGDEAAFMTQRSTIGEHAEALRTSIADHDTQINEDGYALRRGQEEHKALSDEIDSLARRKSNIDAAQVRIREALCAALSIAEEDLPFAGELIQVREDERDWEGAAERLLHGFGLSLLVPDAHYKDVADWVERQHLGTRLVYFHVRARKSTQAVSLHPQSLVRKLLIKPDTPHYDWLERELHHRFDLACCDSTEQFRRETRAITRAGQIKDPSGRHEKDDRRRIDDRSRYVLGWSNADKLRTLRDEREGLEQRMGDIGLRIADAQRLRGQCQAQLEALAKLEVFTRYSEIDWQAPAREMARLTEERDRLKAASDTLRELESQLAQVVERLKEIEGDLGEAQGKRGEIRSKHETALAQHAQALEIQAQAALDDKLLQTLEGWRAEVLGDHQLTVESCDNREQDVRNGLQARIDAEDKRLTRLTERIINAMRGFKETFKAETAEIDISLAALPEFERLMNELQRDDLPRFEARFKELLNVNTINEIANFNAQLARERETIKERVDAINQSLQVIDYNPGRYIRLLAQPSPDAEIRDFLQDLRACTEGALSGSEDEQYSEAKFLQVKAIIDRFRGREGLAEVDRRWMQKVTDVRNGFLFSASERWREDDAEHEHYSDSGGKSGGQKEKLAYTVLAASLAYQFGLEWGAVRSRSFRFVVIDEAFGRGSDESAQYGLELFRQLNLQLLIITPLQKIHIIEPYVSSVGFVHNESGRESRLRSLSIEEYRAQKAAATGGAA

SEQ ID NO: 35094 - protein, 401 aa, Bordetella hinzii
MTWSRPADLRAQIERLWQRGELLRAVVGDGALGWPLRLSLKSPSAADLSNRFDAVRGWVRDISAMPRVRIEWREWTHRVQGRQRLPDTLWIDTLEDALAMIGKTGDGRRFQALWQQTAEAQPALLPWLHRSPLQTLALAEHWPRLLAVVAWVQAHPRPGVYLRQVDAPGVDSKFIEAHRGILGQWLDLALPTEAIEPAATGMAGFARRYGFLEKPVRIRLRLLDPQLLQLPGCTGLTDITLDEDSFATLALPAQRVFITENEVNFLAFPPVSGAIVVFGAGYGWGALARANWLHRASLHYWGDIDTHGFAILDSLRKYFPLAASFLMDRSTLMAHALQWGEEPLDKRHMLPLPRLVDEEAALYDDLRNDRIRPQLRLEQERIGYRWLCAALATTAQDDSRP

SEQ ID NO: 35095 - protein, 454 aa, Coprobacillus sp. 8_1_38FAA
MGGIMVNIFDTLPVKFFNIFNTSDRVVISECIGVLYEYIKDDASFASLKENLIYELTKYFTNHLIELEDVQIQSPRERAFYVYRRLKECGWISEEVGENYQVYTSFEDYAISIIETLMNLDEDRDIEYSSMVYSIYSQFKNFDIENGHKIIDAQYSMTKSLMTKLKNLNTNIKRYIKRLVKDNMKNDLNQILDSLLSDYQMKIVDRAFYNLTTKDHPLKYRNSIISQIQKIVDDPQTTEIIIGNIMLSKDISYQEASDLFYKQTSYIIDAFESILDLINEINRKNEKFVASATNRIMFLMNAKEDIGGKINDILKEGQYYIEAFENVTTLSVNKYLDQNSLYLPRTIKKVKNVDLIIDDPLDENARLEAIEKLKRNEKYTKTAIEKVVLEELSEKESLLGSTYFENQKDLSMFILTWLYGFSQNACYKIEPQDQIIIKEHYQFREFMIRRVEDE

SEQ ID NO: 35096 - protein, 212 aa, Coprobacillus sp. 8_1_38FAA
MNKNELMKNMSQAYLLLSEKKKEEFSRILNRLLAVNYLCGGRKRDREDYYFISENEQLFKDFLMMLDYDFHLYKADRVIFIYNINNYNHLNLNQMQTIVLLLLRKLYFQKSQELQDTEFIHITLGELHGEIEATGIYNERLKKTELKTIYQFLSRYNICERVGDLNEDDSRFIIYPTINYILPVQKIEEINQRIQQFKKGDQHENINESETD

SEQ ID NO: 35097 - protein, 404 aa, Coprobacillus sp. 8_1_38FAA
MKNYREDILNNFIERYEKSSYYKGKSLKPQKSSIVLHERYPQYGQSRYPEVLEKIEDVVLQLEKEDLIQFAKGSIEGNRKLIFVPTEERVSKIYQELDRTPLKEKRNRYLNCLKMYELDSFFKDFQIAMEEKVFNYESVLPYLKVYDQEDLKNVMKILQGMKNQEEEISFRKFSEKVLGDTKKLEKYKNKIYHIIKDFYDDSIENIDDAFELFYIRKNPAYVYLKGSAILQINEQIIDLNEMNHYFVLPSSCIKDLKIKRIDARQVMTVENLTSFHDISLKDTFFIFTNGFHNHVIEAFLKCLYDFLGERVSYLHFGDIDAGGFHIYESLIKKTQIPFQTYKMNVNMLKKYKAYTKPLTENDRKRLLSVKDRHQEVIDYMLKYNVKLEQEIIGEEDERKNTYTY

SEQ ID NO: 35098 - protein, 460 aa, Clostridium bolteae WAL-14578; identical to SEQ ID NO: 30895

SEQ ID NO: 35099 - protein, 277 aa, Clostridium bolteae WAL-14578; identical to SEQ ID NO: 30896

SEQ ID NO: 35100 - protein, 1130 aa, Clostridium bolteae WAL-14578; identical to SEQ ID NO: 30897

SEQ ID NO: 35101 - protein, 392 aa, Clostridium bolteae WAL-14578; identical to SEQ ID NO: 30898

SEQ ID NO: 35102 - protein, 459 aa, Clostridium citroniae WAL-19142
MILMNEIPDRFWSLFRSINRSTYIEALLKINEEYEYSNYFLSREMCIQLLSEYFSRKKYVLWQDETEDDWDTLEPPATRVLNWLLRNGWLRKVDDYANMTVNIVIPDYAAVMIEAFARLARDEEDETEIYIQNVYAILFSLKNDPRSSITLLNTALVNTKKLNKSLQDMLHNMDKFFGSLLEQKNYESLLKEHLDRYVEEIVNRKYHILKTSDNFYLYKTDIKRWITAMRQDEEWIGQMCARPAGFFVRKPSNVTEAEVMEKLDQLERGFDDIEHRIANMDKEHTRYVRATVTRLNYLLNQEDNMKGLVVQLLNHLSEYDCPQEDVSSIGARMNLSQVSILSERSLYKKRRTKTDFKEQLKDEALSRELSMEEVLNLNKVKNRYSRKEIEGFIETHMENGIMAVDKDTVSNDEEFEKLILAYDYSTRLKSAYEVEDQEPEMIHNGRYTYPGFVFARRKK

SEQ ID NO: 35103 - protein, 265 aa, Clostridium citroniae WAL-19142
MPFDIPYYDGLMQEEQAQVTGSIRLLLHQTFILERKFDRRTWRFQYNQEFRACNKHLEFIRNYFAVSGVEVQENSQLGLIYIQGENLIGDKLPKLATLYLLVLKLIYDEQMESVSTSVNIYTTLREIHEKLGSYRLFKKQPSPTDIRRTVTLLKKYQILEPLDLLEDLNSDSRMIIYPCINVVLMGDDARQLLASFDERQEDEGVQGKADLPLEEPDVTEESELEENELEENEPEENEPEENGPEENGPEEKNIEEKGASDNGID

SEQ ID NO: 35104 - protein, 1140 aa, Clostridium citroniae WAL-19142
MELTEINRTAQEHSPAPQEGTPGKSRFLALSRICLNNWHYISRRTLSFNENINFFTGHSGSGKSTVIDAMQILLYANTDGRGFFNKAAADDSDRSLIEYLRGMVNIGDNNEFSYLRNQNFSSTIVLELKRSDTGECQCVGIVFDVETATNDISRRFFWHKGPVWENEYRTGKRTMSIAEVESYLQSHYNKEECFATSHNERFRRILYDTYLGGLDPEKFPLLFKRAIPFRMNIKLEDFVKEYICMEMDIHIEDMQESVMQYGRMRKKIEDTCVEIRDLEEIRQAFASYEEKENQIKKCTYFVKKLEILDLQTQVRTLADKLNLAKTDLLRQEEARAGVETQIADLTEQSDDLLRRIASTGYEDLKQQAESLNELLERLGKSEARWQQTTQALKCWEEEDITSNQTLWDIEEFENRTIDEHTLCRLKESIGSMCTDTEKQRQEASSVIRDLKNKEKQTKDELEKLRSGSKAYPKYLENARTFLQRRLLEETGKGVDVHVLADLLEVKNAQWRNAVEGYLGSQKLSLVVAPGYAKAALKIYGELDKKEYHSVAVLDTEKISGSQHAVLPNALSREVTVRESYIQPYMDLLLGKVIKCQTIEDLRECRIGITPDCMLYHSYRLQYINPDQYSKFAYIGKDSMRRRIRLLEQELESLGVQRKPHEEVVRECQRILTLEQLSLEPGEYMEWLKDIGSWNEKQREKKRILQKLEKLKVQNVDQLEQERKAVVSLCDGKKRERDELLNMIRDKENEISRYQNAAIALNVTLTDQERGWETNHDFESQLAGYLSSKDHPRYDRERESYAARCVKLTESRDTAFQNLMTVRTDYLRRYPNRNFPVNTKDNQAYDHLLKSLSCDHLDEYRKKAAEQARAAVEHFKNDFMYKIRSAIREAMLRKDELNRIISRLDFGKDKYQFVIGRNRGADGRYYDMFMDESLEVNPSELADSFDHQMDLFTAQHENRYGELMGELISIFISPENANPQQMEEAKRNMDKYADYRTYLSFDMQQLIQNEDEVIKIRLSRMIKKNSGGEGQNPLYVALLASFAQAYRINLSPKMERNPTIRLVVLDEAFSKMDAEKVASCIELIRGLGFQAIISATNDKIQNYVENVDKTFVFANPNKKSISIQEFERERFPELIKDLEEE

SEQ ID NO: 35105 - protein, 460 aa, Clostridium clostridioforme WAL-7855; identical to SEQ ID NO: 31512

SEQ ID NO: 35106 - protein, 249 aa, Clostridium clostridioforme WAL-7855; identical to SEQ ID NO: 31513

SEQ ID NO: 35107 - protein, 1129 aa, Clostridium clostridioforme WAL-7855; identical to SEQ ID NO: 31514

SEQ ID NO: 35108 - protein, 392 aa, Clostridium clostridioforme WAL-7855; identical to SEQ ID NO: 31515

SEQ ID NO: 35109 - protein, 509 aa, Sphingobium yanoikuyae
MLFGQLHSDIFALFAGSNRFLYERVLIGLYEGFYRSDLHFPTQGEVVQLIYTLLGDNAELWREDESPVVLDKLAARPGRRVRRRKLEAADAQATSAAMMRARHIYNRLQATGWIEESRYGLKVTVDMPAGAMRLAEFLCSLREGLSDQLGGLVIQVKNELEALQRNARENAPGLHKAARDAASFGRYLRSVLSALRDIDKRVVESDSVGRRLRHYFEDFVEKLLLQDYAAISTTSHPYRFRHRIFTALEAIEDSIADVAAIAEAYNEARLAPDPSAARDLVYDDLHKVRRVFDQIEEAFERIQQHRSRLETRLRNTVRYAGRRGNSFLQRSEPMLLQLDRLLARTDGQDMAPSMSGLLEPRRSYWSPALLARPRTYRSTVSGGLLVLPPPDPLREWRKRLDRDYLARLAVTPEQVSRFLERRVAPFGSGEASRFAIETVDDFLTLEALRLSVLAADADGRGNTIANHLAPHFRFSVDTGSTIDNDWLHCAGFTVSRIGDAVTPEIQDAQ

SEQ ID NO: 35110 - protein, 222 aa, Sphingobium yanoikuyae
MLSEFQTLEARDPRRMHRVTQAISQLLRHQFLHVQDRGSSALLEVLLRPEVERLVADYFEVAGYRLVVRESEGWAGILPDTEQIGHPRMRIDETLVLLLFRRLWEEGIQEGDVERYGSVMVTLNAAYDAYQDMVARARRATLGINEFKALVTALDRRAIVHMGDIDDEMEDMPITIRALIATVAGEEFMAHLEQLLAGGDYQESETEEPVIDLDDADEEEVA

SEQ ID NO: 35111 - protein, 1147 aa, Sphingobium yanoikuyae
MMQLAHIALVQWHLFGREDLAVGGDTAVLGQNRSGKSTLIDLIQAVMTGGSRRWYQFNRSAGETGSRKSERTLRGYCLGQLNEHEFLRQESVTHIVLTFDDPDGMRPPVSVGLCVEASAIEDAQVVGRYIAPGVRVDTDLLIEHLDGGQQRSAPWSLVRERLEQACAAAGTQLIRPDGPRNHIREYMRQLFTGRRHSDPDRFIRAFVMALSFEDMRSVEGFVHNFLLARNDIDIGELREGIQRYRDIQKDVHELERRLDALRALAELVSRFVTLLEREDVARGTARLAAMIEAGAALIANLRERRDTLAELDDIQQDIGRCDAEIAALGDRQDSLLAQSVAEGAAGKRAVVASELKAVDLARTGVVQRLEARFRAAALGASLLDHRERLAPLKLGALFQALEALRQQSDGLEPPTWPRDPLAMEYLIATARRSAIDSVAKIQERRDQAIAQRRGLQDELADLVARRDKARAGQVSLDDRTIRLMAALERENMRPRTLCQVAEIVDPQWREAAEALLGRDREAILVDPEHASRAVEIVRANRDGFRGCRVINSRRLAEQPPGFDTDSLATVFASDDPLAIAFLRFRTGQVRLAGTQAELLAGGRAIMRDGAYNSGIVVEVLRTRDLKIGRAAAPLMEAELLARIEDRQALIAVHAETERFHDDIHRKLLPLMADVDPADRLDLLVAAIDQHEESRTELQHRIDKIAMTVDPAIQHNLDKVKLQLRSATEEKEELIGRRGQLGQARIEIQRRLDAGDAQPGSWLCLRSRRALFKDRVRSSASLSILREAYRQQRGRPLPRLVQEMMKRADEARDAYQALQGEIRETLGHYRADFDNSAPIALPGAIATEVKPWLAANIAALEENELIQYRRQADEAAEQIGQLFRTAFIHELNARFNDLRSELDNLTRALRMRPLHGEIYTLHARPKEEFAALHRLARESEHDELTFDALFGRAAPRDAEHAQALAEVERLLSDESLDFSAYQDYRNYFTFDLRMEDVNKGRTTSYDKRKGTASGAERQVPYYVVIGAALASIYHGARRQYERSELGLGLAVFDEAFSKMDGPNQRTLLEFYDDIGLQVVIAAPSEKRAVVYENLDSVIDVFRHGDNASAEAVRIKPHARTQMRAANPQHLDDAALAERLDLFALDSTE

SEQ ID NO: 35112 - protein, 488 aa, Ralstonia sp. MD27
MSSARRAGQYDALRRQPLWQLLAADNAPQVLAILENLWLEQERTLLSSIAQERLTRELTRLREEGYNLPQTAQSYLYEWLKHGWLERRLRVGSSEEEYELSAPAVQALRFAQNQLKPRNTATESRLTSVIEQVSHLAEETNNNPEARLARLLAERERLDKEIEQTRAGHIKTLTSDQALERAREIISLVEDLAVDFHRVRDGFDKLNRQLRTDILQYDESRSRVLEALFNGVDLIAESEEGKTFNAFWRLLTDNAQSATLLDALDEVLSRPFARRLDPEERKFLHRLTDRLMTEGSLIHEVQTQFARSLRTFVQSREFQEQRRLQTVLKQAQQAALGARDTVSLVRPLPFHLTLTVAEFSSAGQLTLHDPELHAPPTVVTQVELPPLDLSQIDEMVRQSDIDFPQLKRNLLELLRHRSQVSVGEVLTIYPATQGLGSVIGYVALALNNGDAGPAEQKETVFWTDRQGSICKAALPLFYFVKERASELR

SEQ ID NO: 35113 - protein, 224 aa, Ralstonia sp. MD27
MSFADSDSQAMLPGSVPVLFEDDQGQLLFEARKVLVNLLKGPLLDGSRTPDQWAVLVRDEALLRARLHELFLELVLDPLNKVAFTRPVDAEELEAPSLLRVRALTFLDSVLLLYLRQQLLEAEGQGVRAAVSLADMAAALSVYESHQNTDHVTFVKRVGAAIERVKDMHLLKKLTDDRFEISPVLRLIFTAETIQALGAVYRSLVEGKGASAEGNNTGAEEAQA

SEQ ID NO: 35114 - protein, 1125 aa, Ralstonia sp. MD27
MATQATIDFDAGLPKDEPQFLLTRIQLQNWGTFSGRYSIDVPAEGMLLTGNSGSGKSTILDAHAALMTRPKWVDFNVAAREGDRSTRDRNLMSYLRGAWSEQTGDEGDAVVQYLRKETTWSVLAETYRSDTGAVVTVAQVLWVRGKSTTPTDVRRRYLLLERALDLGELDAFAQSDFDVRLLKRTIPELNVQEDFAPYEERFRRLLGIDHSTAMRLLHKTQSLKNVGDLNAFLREYMLQEPETFALAEKLVDGFNELNEAHRAVVTARDQQAVLEPASEAHEQLLAAEKSLRELGVLSLHIEPYVVQCKETLLESAIESAKTRRAGLETELKQKTQKEEDAQRYLGLLREKRNDQGGRILEQLQADLKQAERQRTHRTEKREQVQQHWQVLGWAAPTTGIAFVELQQRAQVHLETLTAKQETLSEERDGLKRQQHRLGEELQTLRREVEVMETKRSNIPSMLLTTRETLAKAIDVEEHDLPFAGELLEVKASDREWRGAIERVLNGFAQSLLVDEKHYHKVSQYVNQTRIDHRLVYLRMTPHANTPVRPEAESLYHKLEFAKNASQTGWVKEELIARFNYLCADNLDVFRQATRAVTREGQIKHNASRHEKNDRFSVNDSRQWVLGFDNSAKIALLKEDAQQIALQLVEVDANVKQLESSRRDFDDQVRHAQALQYFQWDDIDVASMLALISTLQKQFEAEKAARPNLEQINADIVQQDRVCRQLLDDIGAIKGKLHTANAEVDGLQLALENLSSAMLATELPNAMKVELEARFDAVGKALTLETLPEIHRLADKQLEKERSQLESHRTTQKTFIEAQFGHFVREWPAEAGGLDATLASAEDFFHKLRKIVEDGLPRYVERFRTLLREHSDQNLTLLATKLDQERKAIREGMELVNVSLATAPFNPGTHLVIDTEDRQLEDVRQLKQDLRDALSHAFDGAQDEDEQRFQKLNVLVKRLSSSETVDRNWRNLVLDVRQHVDFIAREMDADGVEVERYRGGSGKSGGQRQKLTSTCLAAALRYQLGGRDRAKPQFATVVMDEAFDKADAAFTEAAMNIFKTFGFQMVIATPLKSVMTLEPFIGGACFVDISDRKFSRVTLIPYDRQEKKLLLKSDVTSEAANEVIAA

SEQ ID NO: 35115 - protein, 396 aa, Ralstonia sp. MD27
MKLLLPEALRTQLRKTYERHRASWLAGQGSWPQCLPLGTATEKEAAQDIASVRCWCESWRGWQGFGQVGWVERQWLRLGTQNLPEQVTWTEPEMVAHDADEGAGWRRARACFETLVATWPALSGSVPVARLCIELAEYESTDFARLIQVLSWLLENPASNLLLRQLPINDVDTKWVENRKGMVAALLRLLRPETALETDFHTLCGLRKAPAQIRVRVLCPILRGKIGGLSDLEVPVEDLVALKWQPETLLIVENLATGLALPELQGTVAVMKLGNAVSLLEPFSWVPQDRVFYWGDLDTHGLAILARARQVFPQLRSVLMDEVTLRAWPQFWTQEKSQASLQALPELTVEERAVYDGLHQNRWGECLRLEQERIPWVIAEQCLREALNGVCFNSSR

SEQ ID NO: 35116 - protein, 486 aa, Photorhabdus luminescens subsp. luminescens
MNFQGLQAKYRRLFQESAAWKLLRADNAPLILAFLGELFSEDSEVPFSRARVSLDAELVRCRELGLWETETGAGTYLNKWIREGWLREMDDTLTKTDASEIALRFSQGLDERNSGTTASHLRIVQEAVRDFAVAISPNADERVALLEDRKSEIQREIDALRAGVVTELTGAEQRERIREIYQLASVLTGDFRRVEDEIRRLDQEIRIQIIEGDSTRGDILLAVLEKEALLAKTDAGSAFESFFDLLCDQNRTMELRDQLRSILSRPVAEHLSAQQRQFLSQLMRELSRESDRVFQIRRRTEESLRAYIESGTAQENRAVDRLLGQLERLAIELKNSGYDLQTATTLSLPVGAASISSPESMLLKSPDEKLDTSGAEEQLNSREPSMQMLDCLDVVQIRLIAERALATLKEFGPMTIASIANYQPINSGLEELVAYLRVAKSVGAALLEEKESIEISDKRGVRLRASIPTFLLSADLFPNSLDELVL

SEQ ID NO: 35117 - protein, 1131 aa, Photorhabdus luminescens subsp. luminescens
MTDQTLSANSLFHVGQIRLAELSVYNWGSFNGLHTALIDPMGTLVTGDNGAGKSTFIDGLMALLLPAGKATFNVAAAQGDRSDRTLLSYMRGSFGSAHDGAGTRVRSKREYGVVTGLRALYQGDDGSKITLAALFWITKSTNVLADVTRVYVVAKRDLTLKEMLNAFGNGNARAFKQWLRDDPTITCCDDNFSDYQELYRKLLYMDNKNAPALLSRALGLKKIDDLTGLIRELVLEPSTVKDDAKKVVEEFADLVAIHSQLVDARAQKVHLSRLPELNAIIEKTTKEFAELIAEKNSLPVYFGEIFAQLWSEKIADIKAELEALLLKISQAEEQKVDANKLVERRHEEYLQFGGDKIESLRKEVDHTQVQLSRVVRNSSQYQTHANELALPSVLEEAVFLKNQSVASTRLASIQQEEGEYQDRFATISAKFSGLQANIHDISQEIREIEARPDSNIDVKYQQLRDELVNSLELSKDQCVFIGELIDVEDREKSWQGAIERALGGLRTTLAVPHHCYSMVTRWLNARHTGLHVRVQVVNDSTTQGQSAAFKSDGYLKKLVWRNHPYREWLKHHLQRFDLQCVSSTEELDQTPFSMTQQGLMHMDKGRFEKKDQHRIDDRRRWCLGFSNKSRLAILNNDKKELTLQLAETEKKVSQARQDLNSVSDRKILWEKIQGYRWDDINAPYWHEKLSDLQADLKVLEQSGGDLEKARERWESAKEQLVQIQSVLNQLNSDSGGVKNTLKNAKEEWSKAQAKASKGLPDSARQLLEIRVGVLNTNDLGRMSELVLKVEDDLERLLDISRNSKDKAERLAISVMVSFRSNDKWQVFTVDWQSNIDGLPDYLNHLRQLEEEGLPNLVEQFIERLNKHATQSLARIKTKLESEREDVLERIDIINRVLKRTEFRVGTHLKLGSKREKFPHVNEFEQHLRKVLSQVTSDDHEARFRQLAKVVEILGKASAPGSSNTLESLRLLDPRYQMSFYAEELDSNTGEIRDVLESSSGKSGGEKESFAATIVAASLAYVLTPDGYDRPVYCTVFLDEAFSNTAETVSRRVLRVFRELHIHVNLITPYKNLNLARESARSLLIAERDQENHDSHLCEVTWEEIDRRMNEGKERKLPDEAADLGIEFEKLT

SEQ ID NO: 35118 - protein, 398 aa, Photorhabdus luminescens subsp. luminescens
MKRGQYEVSWGLLPAQVKSIIRQCEWDSLPSLKARLLGIKAFPIRVGLKPPKGNSAILDIIHFQRFIDEWKSFPHQDVVEWSSKNFRELSEQRIPTFVVIESMQCLIQFLGSDALSRSQVWERNMKPFLRVDKDLYPALVKRIDIVEKLSLRDAELLAKLLPQLKQGLGEGQYLRALPLIGIDTKFLENHQILIEELADIIHDGAVSASGGLIAWLGCSINPKGWLTIRPLCRAAMAELGGIPILQIPGELLRQYELPASNILVVENLQSGLALPEMFDTIAVIGGGKNIAWMDAVWLKDKRVGYWGDIDTWGLSILSDARNKFVDIEPLMMDVETVKVHEERMVPESNPVESNPSSLNEDEAKLFNDLISGRFQSSRLEQERLSSDYIRNKLMNWLS

SEQ ID NO: 35119 - protein, 499 aa, Yersinia similis; identical to SEQ ID NO: 35081

SEQ ID NO: 35120 - protein, 252 aa, Yersinia similis
MTGIFDRLVNTGNGELTQDVLSHIERDDMTTDALPDTDSESTEEKRTHKRVREAAQELLKYGLLEESHKPNLYRIALIHTEEMASILEPLDLSMGIDEVRGLLFVMVRQQETSEQDDWTHPLVRRQRLNLEQSLLIAILRQHFIAYEQENGIGASQALVAVDDLIPQLQVYLGDLGSDARERTRVINLLDQLKGHGLVSTPDAHERVIVRPIIAHLANPENLQALLAWLRDQVERSELPGDASELMGGEEMP

SEQ ID NO: 35121 - protein, 1096 aa, Yersinia similis
MKQSPLWCDSETFILTHLDLFNWGGFKGVHRAVIDPAGTAVIGPTGSGKTTLVDALMTLLCANPRYNLASTGGHESDRDLVSYVRGVSGPGDGGAGQSHIARQGKTITGVVATLACDTQQIRLGVLLWFEGTSSAATDMKKLWLFSDAPGHTLEHWLNVHHEGGMRALRQMEKEGTGIWTYPSKKSYLARLRDYFDVGENAFTLLNRAAGLKQLNSIDEIFRELVLDDHSAFERAAEVANSFDDLTEIYQELQIARKQIRSLQPIADSWGRYQVQSRLLEERQALEVILPIWFAEQAHGLWLVQTHRLEKEISETESTVKELQRQQAEQKKQVNERLKRYWDVEGGSVDVLKDRITDWQKTCHQREMQAANYQRLAINLDLSQELTAAGLQANQQKAETRLTALSEEISAAERSAFSKGITDHELTEQLQQLCQEKIDVERRPESNLPSQFQAFRSALATELGLDDTTLPFVAELVQVKQEEKSWRGAIERAIGSHRLRILVPHASADAALNWVNQRHNQLHVRLLEVKSPASQPLFFHDGFTKKLTYKEHTSRETVKALLADIDRHCVENTDQLRHTPHAMTAQGLMSGKARFFDKQDQKRLDEGWLTGFDNRDRLAFLAEQIQQKEQQLQIATQALRLAQAAVGKLQEQANALAHIQALNFESIDLPTAQRQLEELQARLDRLTHPQSDIAIAKAALDEAEARQKELERQYQQEVTACAGLKKDLERAAMLSRKVHNIAKQGMTGALQALGAAHFPQVAPEQLDDIQDIEREHARQLQGRLNEVNDRLQRLRDELIKRMSDAKKEDTGALSEVGRELDDIPNYLARLQTLTEEALPEKLKRFQEYLNRSSDDGVTQLLSHIDHEVALIEERLEELNDTMRRVDFQSGRYLCLIAKPVVHDSMRTLLRTQRQLNSARFVDDDGESQYKALQALVRLLKDACERNRTQGARALLDPRFRLEFAVSVIERETGSVIETRTGSQGGSGGEKEIIASYVLTASLSYALCPDGRTKPLFGTIILDEAFSRSSHVVAGRIIAALREFGLHAVFITPNKEMRLLRHHTRSAIVVHRRGPDSSLVSLSWEDLNEHHQQRNKPI

SEQ ID NO: 35122 - protein, 384 aa, Yersinia similis
MKSPIDIGKQLARQWHQSKVRSERLLTPGCWPLQLPIGKPSAKIFTANTQVVQRHVEVWRQVSIGLVEWESVSYRASLTPVSIPVRWCLRTPSEWINAASNLQVSQEFQQLEQLVAQVDKSFHALLINQRALWLHKDPHEVITAANLACKLTPGCAQGRPLRLLSEFGVDTKFFERNYSLLTKLLDERFEGEASGQGLATFLDAFEESSHWVLVTPLAPGILPFNMSKVTTTELASVDLPCSRILIVENEHCIHQLPQLPDTIAILGSGLDLQWLISPNLKSKSIGYWGDMDTWGLLMLARARAFQPAITALLMGRLLFEHYASGSAVAEPVNAQQAVPEGLHHHEADFYRYLLSQPRGRLEQEYLPRGVVEMALTEWVGHISL

SEQ ID NO: 35123 - protein, 499 aa, Yersinia pseudotuberculosis; identical to SEQ ID NO: 35081

SEQ ID NO: 35124 - protein, 252 aa, Yersinia pseudotuberculosis; identical to SEQ ID NO: 35120

SEQ ID NO: 35125 - protein, 1096 aa, Yersinia pseudotuberculosis; identical to SEQ ID NO: 35121

SEQ ID NO: 35126 - protein, 384 aa, Yersinia pseudotuberculosis; identical to SEQ ID NO: 35122

SEQ ID NO: 35127 - protein, 450 aa, Pseudomonas aeruginosa; identical to SEQ ID NO: 32505

SEQ ID NO: 35128 - protein, 249 aa, Pseudomonas aeruginosa; identical to SEQ ID NO: 32506

SEQ ID NO: 35129 - protein, 1101 aa, Pseudomonas aeruginosa; identical to SEQ ID NO: 32507

SEQ ID NO: 35130 - protein, 450 aa, Pseudomonas aeruginosa; identical to SEQ ID NO: 32505

SEQ ID NO: 35131 - protein, 249 aa, Pseudomonas aeruginosa; identical to SEQ ID NO: 32506

SEQ ID NO: 35132 - protein, 1101 aa, Pseudomonas aeruginosa; identical to SEQ ID NO: 32507

SEQ ID NO: 35133 - protein, 393 aa, Pseudomonas aeruginosa; identical to SEQ ID NO: 32927

SEQ ID NO: 35134 - protein, 450 aa, Pseudomonas aeruginosa; identical to SEQ ID NO: 32505

SEQ ID NO: 35135 - protein, 249 aa, Pseudomonas aeruginosa; identical to SEQ ID NO: 32506

SEQ ID NO: 35136 - protein, 1101 aa, Pseudomonas aeruginosa; identical to SEQ ID NO: 32507

SEQ ID NO: 35137 - protein, 393 aa, Pseudomonas aeruginosa; identical to SEQ ID NO: 32927

SEQ ID NO: 35138 - protein, 450 aa, Pseudomonas aeruginosa; identical to SEQ ID NO: 32505

SEQ ID NO: 35139 - protein, 249 aa, Pseudomonas aeruginosa; identical to SEQ ID NO: 32506

SEQ ID NO: 35140 - protein, 1101 aa, Pseudomonas aeruginosa; identical to SEQ ID NO: 32507

SEQ ID NO: 35141 - protein, 393 aa, Pseudomonas aeruginosa; identical to SEQ ID NO: 32927

SEQ ID NO: 35142 - protein, 450 aa, Pseudomonas aeruginosa; identical to SEQ ID NO: 32505

SEQ ID NO: 35143 - protein, 249 aa, Pseudomonas aeruginosa; identical to SEQ ID NO: 32506

SEQ ID NO: 35144 - protein, 1101 aa, Pseudomonas aeruginosa; identical to SEQ ID NO: 32507

SEQ ID NO: 35145 - protein, 393 aa, Pseudomonas aeruginosa; identical to SEQ ID NO: 32927

SEQ ID NO: 35146 - protein, 450 aa, Pseudomonas aeruginosa; identical to SEQ ID NO: 32505

SEQ ID NO: 35147 - protein, 249 aa, Pseudomonas aeruginosa; identical to SEQ ID NO: 32506

SEQ ID NO: 35148 - protein, 1101 aa, Pseudomonas aeruginosa; identical to SEQ ID NO: 32507

SEQ ID NO: 35149 - protein, 393 aa, Pseudomonas aeruginosa; identical to SEQ ID NO: 32927

SEQ ID NO: 35150 - protein, 450 aa, Pseudomonas aeruginosa; identical to SEQ ID NO: 32505

SEQ ID NO: 35151 - protein, 249 aa, Pseudomonas aeruginosa; identical to SEQ ID NO: 32506

SEQ ID NO: 35152 - protein, 1101 aa, Pseudomonas aeruginosa; identical to SEQ ID NO: 32507

SEQ ID NO: 35153 - protein, 393 aa, Pseudomonas aeruginosa; identical to SEQ ID NO: 32927

SEQ ID NO: 35154 - protein, 450 aa, Pseudomonas aeruginosa; identical to SEQ ID NO: 32505

SEQ ID NO: 35155 - protein, 249 aa, Pseudomonas aeruginosa; identical to SEQ ID NO: 32506

SEQ ID NO: 35156 - protein, 1101 aa, Pseudomonas aeruginosa; identical to SEQ ID NO: 32507

SEQ ID NO: 35157 - protein, 393 aa, Pseudomonas aeruginosa; identical to SEQ ID NO: 32927

SEQ ID NO: 35158 - protein, 450 aa, Pseudomonas aeruginosa; identical to SEQ ID NO: 32505

SEQ ID NO: 35159 - protein, 249 aa, Pseudomonas aeruginosa; identical to SEQ ID NO: 32506

SEQ ID NO: 35160 - protein, 1101 aa, Pseudomonas aeruginosa; identical to SEQ ID NO: 32507

SEQ ID NO: 35161 - protein, 393 aa, Pseudomonas aeruginosa; identical to SEQ ID NO: 32927

SEQ ID NO: 35162 - protein, 450 aa, Pseudomonas aeruginosa; identical to SEQ ID NO: 32505

SEQ ID NO: 35163 - protein, 249 aa, Pseudomonas aeruginosa; identical to SEQ ID NO: 32506

SEQ ID NO: 35164 - protein, 1101 aa, Pseudomonas aeruginosa; identical to SEQ ID NO: 32507

SEQ ID NO: 35165 - protein, 393 aa, Pseudomonas aeruginosa; identical to SEQ ID NO: 32927

SEQ ID NO: 35166 - protein, 450 aa, Pseudomonas aeruginosa; identical to SEQ ID NO: 32505

SEQ ID NO: 35167 - protein, 249 aa, Pseudomonas aeruginosa; identical to SEQ ID NO: 32506

SEQ ID NO: 35168 - protein, 1101 aa, Pseudomonas aeruginosa; identical to SEQ ID NO: 32507

SEQ ID NO: 35169 - protein, 393 aa, Pseudomonas aeruginosa; identical to SEQ ID NO: 32927

SEQ ID NO: 35170 - protein, 450 aa, Pseudomonas aeruginosa; identical to SEQ ID NO: 32505

SEQ ID NO: 35171 - protein, 249 aa, Pseudomonas aeruginosa; identical to SEQ ID NO: 32506

SEQ ID NO: 35172 - protein, 1101 aa, Pseudomonas aeruginosa; identical to SEQ ID NO: 32507

SEQ ID NO: 35173 - protein, 393 aa, Pseudomonas aeruginosa; identical to SEQ ID NO: 32927

SEQ ID NO: 35174 - protein, 450 aa, Pseudomonas aeruginosa; identical to SEQ ID NO: 32505

SEQ ID NO: 35175 - protein, 249 aa, Pseudomonas aeruginosa; identical to SEQ ID NO: 32506

SEQ ID NO: 35176 - protein, 1101 aa, Pseudomonas aeruginosa; identical to SEQ ID NO: 32507

SEQ ID NO: 35177 - protein, 393 aa, Pseudomonas aeruginosa; identical to SEQ ID NO: 32927

SEQ ID NO: 35178 - protein, 450 aa, Pseudomonas aeruginosa; identical to SEQ ID NO: 32505

SEQ ID NO: 35179 - protein, 249 aa, Pseudomonas aeruginosa; identical to SEQ ID NO: 32506

SEQ ID NO: 35180 - protein, 1101 aa, Pseudomonas aeruginosa; identical to SEQ ID NO: 32507

SEQ ID NO: 35181 - protein, 393 aa, Pseudomonas aeruginosa; identical to SEQ ID NO: 32927

SEQ ID NO: 35182 - protein, 450 aa, Pseudomonas aeruginosa; identical to SEQ ID NO: 32505

SEQ ID NO: 35183 - protein, 249 aa, Pseudomonas aeruginosa; identical to SEQ ID NO: 32506

SEQ ID NO: 35184 - protein, 1101 aa, Pseudomonas aeruginosa; identical to SEQ ID NO: 32507

SEQ ID NO: 35185 - protein, 393 aa, Pseudomonas aeruginosa; identical to SEQ ID NO: 32927

SEQ ID NO: 35186 - protein, 450 aa, Pseudomonas aeruginosa; identical to SEQ ID NO: 32505

SEQ ID NO: 35187 - protein, 249 aa, Pseudomonas aeruginosa; identical to SEQ ID NO: 32506

SEQ ID NO: 35188 - protein, 1101 aa, Pseudomonas aeruginosa
MKQALLWRDSETFILTSIELYNWGGFQGYHRAEIDPSGTAVIGPTGSGKTTLVDALMTLLCANPRYNLTSTGGHESDRDLVSYVRGVTGPGDGGIEQSHIARQGKTVTAIAATLERDGAQVRLGAVLWFEGTSSSASDLKKLWLLSESPEQTLEHWLSQHHAGGMRALRQMEKDGTGIWPYPSKKAFLARLRDYFEVGENAFTLLNRAAGLKQLNSIDEIFRELVLDDRSAFERAAEVAGSFDDLTDIHRELETARKQQRSLQPVADGWERYQVLQEQLHDKQALEGILPVWFAEQGYRLWLAETNRLEKEYKKAELDQEQCKSQLEAQKGVVDQHRQRYLRVGGAGIDQLRERIADWVRECDKRSLKAEQYQLLAKGLGLADELSAAALKENQQHIAARLEILDQQITDARQKAFDAGLVQQELNGRLQTLQQEGAEVEKRPGSNLPGQFHAFRSDLAQALGVNESALPFVAELVQVKPEELDWRGAIERAIGSHRLRILVPQDSSQAALRWVNQRHNRLHVRLLEVQEPTSRPVFFDDGFTRKLTFKEHPYREAIKALLADNDRHCVESPEQLRHTPHAMTAQGLMSGKERFFDKQDQKRLDEDWLTGFDNRDRLAFLAEQIREVNERLEPAKLALDAAQGDVRQLETQASLLNRVKELQFEDIDLPGAQSQLESLRTQLATLTRPDSNLAMIKVELDAAEALQESLDQQLRQLIEQYVQLKTQFDQAASATRKAYNSAEKGLNDTQRELAQAHFPTLTADDLGDIVELERKHTRELQGQLKALGEKLGDQKSELAKRMSDALKVDTGALAEVGRELVDVPRYLERLRVLTEEALPEKLKRFLEYLNRSSDDGVTQLLSYIDHEVSMIEERLDDLNSTMQRVDFQPGRYLRLVAGKVIHESLRTLQRAQRQLNSARFIDDEGESHYKALQDLVGLLKDACEHSRNQGAKALLDPRFRLEFAVSVIDRESRNVIETRTGSQGGSGGEKEIIASYVLTASLSYALCPDGSSRPLFGTIVLDEAFSRSSHAVAGRIIAALREFGLHAVFITPNKEMRLLRHHTRSAVVVHRRGLESSLVSLSWEALDEHHQQRIKAMHEVAH

SEQ ID NO: 35189 - protein, 393 aa, Pseudomonas aeruginosa; identical to SEQ ID NO: 32927

SEQ ID NO: 35190 - protein, 450 aa, Pseudomonas aeruginosa; identical to SEQ ID NO: 32505

SEQ ID NO: 35191 - protein, 249 aa, Pseudomonas aeruginosa; identical to SEQ ID NO: 32506

SEQ ID NO: 35192 - protein, 1101 aa, Pseudomonas aeruginosa; identical to SEQ ID NO: 32507

SEQ ID NO: 35193 - protein, 393 aa, Pseudomonas aeruginosa; identical to SEQ ID NO: 32927

SEQ ID NO: 35194 - protein, 450 aa, Pseudomonas aeruginosa; identical to SEQ ID NO: 32505

SEQ ID NO: 35195 - protein, 249 aa, Pseudomonas aeruginosa; identical to SEQ ID NO: 32506

SEQ ID NO: 35196 - protein, 1101 aa, Pseudomonas aeruginosa; identical to SEQ ID NO: 32507

SEQ ID NO: 35197 - protein, 393 aa, Pseudomonas aeruginosa; identical to SEQ ID NO: 32927

SEQ ID NO: 35198 - protein, 450 aa, Pseudomonas aeruginosa; identical to SEQ ID NO: 32505

SEQ ID NO: 35199 - protein, 249 aa, Pseudomonas aeruginosa; identical to SEQ ID NO: 32506

SEQ ID NO: 35200 - protein, 393 aa, Pseudomonas aeruginosa; identical to SEQ ID NO: 32927

SEQ ID NO: 35201 - protein, 450 aa, Pseudomonas aeruginosa; identical to SEQ ID NO: 32505

SEQ ID NO: 35202 - protein, 249 aa, Pseudomonas aeruginosa; identical to SEQ ID NO: 32506

SEQ ID NO: 35203 - protein, 1101 aa, Pseudomonas aeruginosa; identical to SEQ ID NO: 32507

SEQ ID NO: 35204 - protein, 393 aa, Pseudomonas aeruginosa; identical to SEQ ID NO: 32927

SEQ ID NO: 35205 - protein, 450 aa, Pseudomonas aeruginosa; identical to SEQ ID NO: 32505

SEQ ID NO: 35206 - protein, 249 aa, Pseudomonas aeruginosa; identical to SEQ ID NO: 32506

SEQ ID NO: 35207 - protein, 1101 aa, Pseudomonas aeruginosa; identical to SEQ ID NO: 32507

SEQ ID NO: 35208 - protein, 393 aa, Pseudomonas aeruginosa; identical to SEQ ID NO: 32927

SEQ ID NO: 35209 - protein, 450 aa, Pseudomonas aeruginosa; identical to SEQ ID NO: 32505

SEQ ID NO: 35210 - protein, 249 aa, Pseudomonas aeruginosa; identical to SEQ ID NO: 32506

SEQ ID NO: 35211 - protein, 1101 aa, Pseudomonas aeruginosa; identical to SEQ ID NO: 32507

SEQ ID NO: 35212 - protein, 393 aa, Pseudomonas aeruginosa; identical to SEQ ID NO: 32927

SEQ ID NO: 35213 - protein, 450 aa, Pseudomonas aeruginosa; identical to SEQ ID NO: 32505

SEQ ID NO: 35214 - protein, 249 aa, Pseudomonas aeruginosa; identical to SEQ ID NO: 32506

SEQ ID NO: 35215 - protein, 1101 aa, Pseudomonas aeruginosa; identical to SEQ ID NO: 32507

SEQ ID NO: 35216 - protein, 393 aa, Pseudomonas aeruginosa; identical to SEQ ID NO: 32927

SEQ ID NO: 35217 - protein, 450 aa, Pseudomonas aeruginosa; identical to SEQ ID NO: 32505

SEQ ID NO: 35218 - protein, 249 aa, Pseudomonas aeruginosa; identical to SEQ ID NO: 32506

SEQ ID NO: 35219 - protein, 1101 aa, Pseudomonas aeruginosa; identical to SEQ ID NO: 32507

SEQ ID NO: 35220 - protein, 393 aa, Pseudomonas aeruginosa; identical to SEQ ID NO: 32927

SEQ ID NO: 35221 - protein, 450 aa, Pseudomonas aeruginosa; identical to SEQ ID NO: 32505

SEQ ID NO: 35222 - protein, 249 aa, Pseudomonas aeruginosa; identical to SEQ ID NO: 32506

SEQ ID NO: 35223 - protein, 1101 aa, Pseudomonas aeruginosa; identical to SEQ ID NO: 32507

SEQ ID NO: 35224 - protein, 393 aa, Pseudomonas aeruginosa; identical to SEQ ID NO: 32927

SEQ ID NO: 35225 - protein, 450 aa, Pseudomonas aeruginosa; identical to SEQ ID NO: 32505

SEQ ID NO: 35226 - protein, 249 aa, Pseudomonas aeruginosa; identical to SEQ ID NO: 32506

SEQ ID NO: 35227 - protein, 1101 aa, Pseudomonas aeruginosa; identical to SEQ ID NO: 32507

SEQ ID NO: 35228 - protein, 393 aa, Pseudomonas aeruginosa; identical to SEQ ID NO: 32927

SEQ ID NO: 35229 - protein, 450 aa, Pseudomonas aeruginosa; identical to SEQ ID NO: 32505

SEQ ID NO: 35230 - protein, 249 aa, Pseudomonas aeruginosa; identical to SEQ ID NO: 32506

SEQ ID NO: 35231 - protein, 1101 aa, Pseudomonas aeruginosa; identical to SEQ ID NO: 32507

SEQ ID NO: 35232 - protein, 393 aa, Pseudomonas aeruginosa; identical to SEQ ID NO: 32927

SEQ ID NO: 35233 - protein, 450 aa, Pseudomonas aeruginosa; identical to SEQ ID NO: 32505

SEQ ID NO: 35234 - protein, 249 aa, Pseudomonas aeruginosa; identical to SEQ ID NO: 32506

SEQ ID NO: 35235 - protein, 1101 aa, Pseudomonas aeruginosa; identical to SEQ ID NO: 32507

SEQ ID NO: 35236 - protein, 393 aa, Pseudomonas aeruginosa; identical to SEQ ID NO: 32927

SEQ ID NO: 35237 - protein, 450 aa, Pseudomonas aeruginosa; identical to SEQ ID NO: 32505

SEQ ID NO: 35238 - protein, 249 aa, Pseudomonas aeruginosa; identical to SEQ ID NO: 32506

SEQ ID NO: 35239 - protein, 1101 aa, Pseudomonas aeruginosa; identical to SEQ ID NO: 32507

SEQ ID NO: 35240 - protein, 393 aa, Pseudomonas aeruginosa; identical to SEQ ID NO: 32927

SEQ ID NO: 35241 - protein, 237 aa, Pseudomonas aeruginosa
MRERLRTILRHPAVPKALNRPQQRELRWLALRLVRESQAVLQARARSERDVRGFMKTGLAAEHHRVGQLLNDFFNLALSVDWQRQAVRRSTVRLPPVGVAITGVPAIERLRFKTLDDDDTGELDLSLKPAGLEQIDDDFWDAFDGLDREALIHDTLAVLVEQGRPVSLGELASLLPPAHDLETFALWLAMAREAGIEVLTEERQLVELVDEDEQRWRFNLPYVGLDHEALKDIDWEL

SEQ ID NO: 35242 - protein, 249 aa, Pseudomonas aeruginosa; identical to SEQ ID NO: 32506

SEQ ID NO: 35243 - protein, 1101 aa, Pseudomonas aeruginosa; identical to SEQ ID NO: 32507

SEQ ID NO: 35244 - protein, 393 aa, Pseudomonas aeruginosa; identical to SEQ ID NO: 32927

SEQ ID NO: 35245 - protein, 237 aa, Pseudomonas aeruginosa; identical to SEQ ID NO: 35241

SEQ ID NO: 35246 - protein, 249 aa, Pseudomonas aeruginosa; identical to SEQ ID NO: 32506

SEQ ID NO: 35247 - protein, 1101 aa, Pseudomonas aeruginosa; identical to SEQ ID NO: 32507

SEQ ID NO: 35248 - protein, 393 aa, Pseudomonas aeruginosa; identical to SEQ ID NO: 32927

SEQ ID NO: 35249 - protein, 450 aa, Pseudomonas aeruginosa; identical to SEQ ID NO: 32505

SEQ ID NO: 35250 - protein, 249 aa, Pseudomonas aeruginosa; identical to SEQ ID NO: 32506

SEQ ID NO: 35251 - protein, 1101 aa, Pseudomonas aeruginosa; identical to SEQ ID NO: 32507

SEQ ID NO: 35252 - protein, 393 aa, Pseudomonas aeruginosa; identical to SEQ ID NO: 32927

SEQ ID NO: 35253 - protein, 450 aa, Pseudomonas aeruginosa; identical to SEQ ID NO: 32505

SEQ ID NO: 35254 - protein, 249 aa, Pseudomonas aeruginosa; identical to SEQ ID NO: 32506

SEQ ID NO: 35255 - protein, 1101 aa, Pseudomonas aeruginosa; identical to SEQ ID NO: 32507

SEQ ID NO: 35256 - protein, 450 aa, Pseudomonas aeruginosa; identical to SEQ ID NO: 32505

SEQ ID NO: 35257 - protein, 249 aa, Pseudomonas aeruginosa; identical to SEQ ID NO: 32506

SEQ ID NO: 35258 - protein, 1101 aa, Pseudomonas aeruginosa; identical to SEQ ID NO: 32507

SEQ ID NO: 35259 - protein, 393 aa, Pseudomonas aeruginosa; identical to SEQ ID NO: 32927

SEQ ID NO: 35260 - protein, 237 aa, Pseudomonas aeruginosa; identical to SEQ ID NO: 35241

SEQ ID NO: 35261 - protein, 249 aa, Pseudomonas aeruginosa; identical to SEQ ID NO: 32506

SEQ ID NO: 35262 - protein, 1101 aa, Pseudomonas aeruginosa; identical to SEQ ID NO: 32507

SEQ ID NO: 35263 - protein, 393 aa, Pseudomonas aeruginosa; identical to SEQ ID NO: 32927

SEQ ID NO: 35264 - protein, 450 aa, Pseudomonas aeruginosa; identical to SEQ ID NO: 32505

SEQ ID NO: 35265 - protein, 249 aa, Pseudomonas aeruginosa; identical to SEQ ID NO: 32506

SEQ ID NO: 35266 - protein, 393 aa, Pseudomonas aeruginosa; identical to SEQ ID NO: 32927

SEQ ID NO: 35267 - protein, 450 aa, Pseudomonas aeruginosa; identical to SEQ ID NO: 32505

SEQ ID NO: 35268 - protein, 249 aa, Pseudomonas aeruginosa; identical to SEQ ID NO: 32506

SEQ ID NO: 35269 - protein, 1101 aa, Pseudomonas aeruginosa; identical to SEQ ID NO: 32507

SEQ ID NO: 35270 - protein, 393 aa, Pseudomonas aeruginosa; identical to SEQ ID NO: 32927

SEQ ID NO: 35271 - protein, 450 aa, Pseudomonas aeruginosa; identical to SEQ ID NO: 32505

SEQ ID NO: 35272 - protein, 249 aa, Pseudomonas aeruginosa; identical to SEQ ID NO: 32506

SEQ ID NO: 35273 - protein, 1101 aa, Pseudomonas aeruginosa; identical to SEQ ID NO: 32507

SEQ ID NO: 35274 - protein, 393 aa, Pseudomonas aeruginosa; identical to SEQ ID NO: 32927

SEQ ID NO: 35275 - protein, 450 aa, Pseudomonas aeruginosa; identical to SEQ ID NO: 32505

SEQ ID NO: 35276 - protein, 249 aa, Pseudomonas aeruginosa; identical to SEQ ID NO: 32506

SEQ ID NO: 35277 - protein, 1101 aa, Pseudomonas aeruginosa; identical to SEQ ID NO: 32507

SEQ ID NO: 35278 - protein, 393 aa, Pseudomonas aeruginosa; identical to SEQ ID NO: 32927

SEQ ID NO: 35279 - protein, 450 aa, Pseudomonas aeruginosa; identical to SEQ ID NO: 32505

SEQ ID NO: 35280 - protein, 249 aa, Pseudomonas aeruginosa; identical to SEQ ID NO: 32506

SEQ ID NO: 35281 - protein, 1101 aa, Pseudomonas aeruginosa; identical to SEQ ID NO: 32507

SEQ ID NO: 35282 - protein, 393 aa, Pseudomonas aeruginosa; identical to SEQ ID NO: 32927

SEQ ID NO: 35283 - protein, 450 aa, Pseudomonas aeruginosa; identical to SEQ ID NO: 32505

SEQ ID NO: 35284 - protein, 249 aa, Pseudomonas aeruginosa; identical to SEQ ID NO: 32506

SEQ ID NO: 35285 - protein, 1101 aa, Pseudomonas aeruginosa; identical to SEQ ID NO: 32507

SEQ ID NO: 35286 - protein, 393 aa, Pseudomonas aeruginosa; identical to SEQ ID NO: 32927

SEQ ID NO: 35287 - protein, 450 aa, Pseudomonas aeruginosa; identical to SEQ ID NO: 32505

SEQ ID NO: 35288 - protein, 249 aa, Pseudomonas aeruginosa; identical to SEQ ID NO: 32506

SEQ ID NO: 35289 - protein, 1101 aa, Pseudomonas aeruginosa; identical to SEQ ID NO: 32507

SEQ ID NO: 35290 - protein, 393 aa, Pseudomonas aeruginosa; identical to SEQ ID NO: 32927

SEQ ID NO: 35291 - protein, 450 aa, Pseudomonas aeruginosa; identical to SEQ ID NO: 32505

SEQ ID NO: 35292 - protein, 249 aa, Pseudomonas aeruginosa; identical to SEQ ID NO: 32506

SEQ ID NO: 35293 - protein, 1101 aa, Pseudomonas aeruginosa; identical to SEQ ID NO: 32507

SEQ ID NO: 35294 - protein, 393 aa, Pseudomonas aeruginosa; identical to SEQ ID NO: 32927

SEQ ID NO: 35295 - protein, 450 aa, Pseudomonas aeruginosa; identical to SEQ ID NO: 32505

SEQ ID NO: 35296 - protein, 249 aa, Pseudomonas aeruginosa; identical to SEQ ID NO: 32506

SEQ ID NO: 35297 - protein, 1101 aa, Pseudomonas aeruginosa; identical to SEQ ID NO: 32507

SEQ ID NO: 35298 - protein, 393 aa, Pseudomonas aeruginosa; identical to SEQ ID NO: 32927

SEQ ID NO: 35299 - protein, 450 aa, Pseudomonas aeruginosa; identical to SEQ ID NO: 32505

SEQ ID NO: 35300 - protein, 249 aa, Pseudomonas aeruginosa; identical to SEQ ID NO: 32506

SEQ ID NO: 35301 - protein, 1101 aa, Pseudomonas aeruginosa; identical to SEQ ID NO: 32507

SEQ ID NO: 35302 - protein, 393 aa, Pseudomonas aeruginosa; identical to SEQ ID NO: 32927

SEQ ID NO: 35303 - protein, 450 aa, Pseudomonas aeruginosa; identical to SEQ ID NO: 32505

SEQ ID NO: 35304 - protein, 249 aa, Pseudomonas aeruginosa; identical to SEQ ID NO: 32506

SEQ ID NO: 35305 - protein, 1101 aa, Pseudomonas aeruginosa; identical to SEQ ID NO: 32507

SEQ ID NO: 35306 - protein, 393 aa, Pseudomonas aeruginosa; identical to SEQ ID NO: 32927

SEQ ID NO: 35307 - protein, 450 aa, Pseudomonas aeruginosa; identical to SEQ ID NO: 32505

SEQ ID NO: 35308 - protein, 249 aa, Pseudomonas aeruginosa; identical to SEQ ID NO: 32506

SEQ ID NO: 35309 - protein, 1101 aa, Pseudomonas aeruginosa; identical to SEQ ID NO: 32507

SEQ ID NO: 35310 - protein, 393 aa, Pseudomonas aeruginosa; identical to SEQ ID NO: 32927

SEQ ID NO: 35311 - protein, 450 aa, Pseudomonas aeruginosa; identical to SEQ ID NO: 32505

SEQ ID NO: 35312 - protein, 249 aa, Pseudomonas aeruginosa; identical to SEQ ID NO: 32506

SEQ ID NO: 35313 - protein, 1101 aa, Pseudomonas aeruginosa; identical to SEQ ID NO: 32507

SEQ ID NO: 35314 - protein, 393 aa, Pseudomonas aeruginosa; identical to SEQ ID NO: 32927

SEQ ID NO: 35315 - protein, 450 aa, Pseudomonas aeruginosa; identical to SEQ ID NO: 32505

SEQ ID NO: 35316 - protein, 249 aa, Pseudomonas aeruginosa; identical to SEQ ID NO: 32506

SEQ ID NO: 35317 - protein, 1101 aa, Pseudomonas aeruginosa; identical to SEQ ID NO: 32507

SEQ ID NO: 35318 - protein, 402 aa, Pseudomonas aeruginosa
MKSPTDIGRSLARQWQRSSVRLDRLLNSASWPQSFNIGKPSARLFSDNIRTVLRHVENWRSVKVGKVDWEPVSYRAGLAPISLPMRWHLRSPSEWIAATDDPSVSQEYAQLEYLVEQVDSSFHALLVAQRSLWLTKPSEEVIATAQLATQLSPGCAQGRPLRLLAEHGVDTKFFERNAILLTKLLDERFEGAASEQGLTTFLDAFEETSHWVLVVPLQPELLPFKRIRLTTSELAETSLPGSMCIRDSPGSRLLVVENEQCVHLLPETLPDTLAVLGAGLDLQWLASAHLAGKQIAYWGDMDTWGLLMLARARHHQPAVEALLMDRELFDQHSLGSAVVEPAKAQELAPEGLMTDEADFYRYLLAQERGRLEQEYLPRRQVEQAISKWFGESVAPAHPERTA

SEQ ID NO: 35319 - protein, 450 aa, Pseudomonas aeruginosa; identical to SEQ ID NO: 32505

SEQ ID NO: 35320 - protein, 249 aa, Pseudomonas aeruginosa; identical to SEQ ID NO: 32506

SEQ ID NO: 35321 - protein, 1101 aa, Pseudomonas aeruginosa; identical to SEQ ID NO: 32507

SEQ ID NO: 35322 - protein, 393 aa, Pseudomonas aeruginosa; identical to SEQ ID NO: 32927

SEQ ID NO: 35323 - protein, 450 aa, Pseudomonas aeruginosa; identical to SEQ ID NO: 32505

SEQ ID NO: 35324 - protein, 249 aa, Pseudomonas aeruginosa; identical to SEQ ID NO: 32506

SEQ ID NO: 35325 - protein, 1101 aa, Pseudomonas aeruginosa; identical to SEQ ID NO: 32507

SEQ ID NO: 35326 - protein, 393 aa, Pseudomonas aeruginosa; identical to SEQ ID NO: 32927

SEQ ID NO: 35327 - protein, 450 aa, Pseudomonas aeruginosa; identical to SEQ ID NO: 32505

SEQ ID NO: 35328 - protein, 249 aa, Pseudomonas aeruginosa; identical to SEQ ID NO: 32506

SEQ ID NO: 35329 - protein, 1101 aa, Pseudomonas aeruginosa; identical to SEQ ID NO: 32507

SEQ ID NO: 35330 - protein, 393 aa, Pseudomonas aeruginosa; identical to SEQ ID NO: 32927

SEQ ID NO: 35331 - protein, 450 aa, Pseudomonas aeruginosa; identical to SEQ ID NO: 32505

SEQ ID NO: 35332 - protein, 249 aa, Pseudomonas aeruginosa; identical to SEQ ID NO: 32506

SEQ ID NO: 35333 - protein, 1101 aa, Pseudomonas aeruginosa; identical to SEQ ID NO: 32507

SEQ ID NO: 35334 - protein, 393 aa, Pseudomonas aeruginosa; identical to SEQ ID NO: 32927

SEQ ID NO: 35335 - protein, 450 aa, Pseudomonas aeruginosa; identical to SEQ ID NO: 32505

SEQ ID NO: 35336 - protein, 249 aa, Pseudomonas aeruginosa; identical to SEQ ID NO: 32506

SEQ ID NO: 35337 - protein, 1101 aa, Pseudomonas aeruginosa; identical to SEQ ID NO: 32507

SEQ ID NO: 35338 - protein, 393 aa, Pseudomonas aeruginosa; identical to SEQ ID NO: 32927

SEQ ID NO: 35339 - protein, 450 aa, Pseudomonas aeruginosa; identical to SEQ ID NO: 32505

SEQ ID NO: 35340 - protein, 249 aa, Pseudomonas aeruginosa; identical to SEQ ID NO: 32506

SEQ ID NO: 35341 - protein, 1101 aa, Pseudomonas aeruginosa; identical to SEQ ID NO: 32507

SEQ ID NO: 35342 - protein, 393 aa, Pseudomonas aeruginosa; identical to SEQ ID NO: 32927

SEQ ID NO: 35343 - protein, 450 aa, Pseudomonas aeruginosa; identical to SEQ ID NO: 32505

SEQ ID NO: 35344 - protein, 249 aa, Pseudomonas aeruginosa; identical to SEQ ID NO: 32506

SEQ ID NO: 35345 - protein, 1101 aa, Pseudomonas aeruginosa; identical to SEQ ID NO: 32507

SEQ ID NO: 35346 - protein, 393 aa, Pseudomonas aeruginosa; identical to SEQ ID NO: 32927

SEQ ID NO: 35347 - protein, 450 aa, Pseudomonas aeruginosa; identical to SEQ ID NO: 32505

SEQ ID NO: 35348 - protein, 249 aa, Pseudomonas aeruginosa; identical to SEQ ID NO: 32506

SEQ ID NO: 35349 - protein, 1101 aa, Pseudomonas aeruginosa; identical to SEQ ID NO: 32507

SEQ ID NO: 35350 - protein, 393 aa, Pseudomonas aeruginosa; identical to SEQ ID NO: 32927

SEQ ID NO: 35351 - protein, 450 aa, Pseudomonas aeruginosa; identical to SEQ ID NO: 32505

SEQ ID NO: 35352 - protein, 249 aa, Pseudomonas aeruginosa; identical to SEQ ID NO: 32506

SEQ ID NO: 35353 - protein, 393 aa, Pseudomonas aeruginosa; identical to SEQ ID NO: 32927

SEQ ID NO: 35354 - protein, 450 aa, Pseudomonas aeruginosa; identical to SEQ ID NO: 32505

SEQ ID NO: 35355 - protein, 249 aa, Pseudomonas aeruginosa; identical to SEQ ID NO: 32506

SEQ ID NO: 35356 - protein, 1101 aa, Pseudomonas aeruginosa; identical to SEQ ID NO: 32507

SEQ ID NO: 35357 - protein, 393 aa, Pseudomonas aeruginosa; identical to SEQ ID NO: 32927

SEQ ID NO: 35358 - protein, 450 aa, Pseudomonas aeruginosa; identical to SEQ ID NO: 32505

SEQ ID NO: 35359 - protein, 249 aa, Pseudomonas aeruginosa; identical to SEQ ID NO: 32506

SEQ ID NO: 35360 - protein, 1101 aa, Pseudomonas aeruginosa; identical to SEQ ID NO: 32507

SEQ ID NO: 35361 - protein, 393 aa, Pseudomonas aeruginosa; identical to SEQ ID NO: 32927

SEQ ID NO: 35362 - protein, 450 aa, Pseudomonas aeruginosa; identical to SEQ ID NO: 32505

SEQ ID NO: 35363 - protein, 249 aa, Pseudomonas aeruginosa; identical to SEQ ID NO: 32506

SEQ ID NO: 35364 - protein, 1101 aa, Pseudomonas aeruginosa; identical to SEQ ID NO: 32507

SEQ ID NO: 35365 - protein, 393 aa, Pseudomonas aeruginosa; identical to SEQ ID NO: 32927

SEQ ID NO: 35366 - protein, 450 aa, Pseudomonas aeruginosa; identical to SEQ ID NO: 32505

SEQ ID NO: 35367 - protein, 249 aa, Pseudomonas aeruginosa; identical to SEQ ID NO: 32506

SEQ ID NO: 35368 - protein, 1101 aa, Pseudomonas aeruginosa; identical to SEQ ID NO: 32507

SEQ ID NO: 35369 - protein, 393 aa, Pseudomonas aeruginosa; identical to SEQ ID NO: 32927

SEQ ID NO: 35370 - protein, 450 aa, Pseudomonas aeruginosa; identical to SEQ ID NO: 32505

SEQ ID NO: 35371 - protein, 249 aa, Pseudomonas aeruginosa; identical to SEQ ID NO: 32506

SEQ ID NO: 35372 - protein, 1101 aa, Pseudomonas aeruginosa; identical to SEQ ID NO: 32507

SEQ ID NO: 35373 - protein, 393 aa, Pseudomonas aeruginosa; identical to SEQ ID NO: 32927

SEQ ID NO: 35374 - protein, 450 aa, Pseudomonas aeruginosa; identical to SEQ ID NO: 32505

SEQ ID NO: 35375 - protein, 249 aa, Pseudomonas aeruginosa; identical to SEQ ID NO: 32506

SEQ ID NO: 35376 - protein, 1101 aa, Pseudomonas aeruginosa; identical to SEQ ID NO: 32507

SEQ ID NO: 35377 - protein, 393 aa, Pseudomonas aeruginosa; identical to SEQ ID NO: 32927

SEQ ID NO: 35378 - protein, 450 aa, Pseudomonas aeruginosa; identical to SEQ ID NO: 32505

SEQ ID NO: 35379 - protein, 249 aa, Pseudomonas aeruginosa; identical to SEQ ID NO: 32506

SEQ ID NO: 35380 - protein, 1101 aa, Pseudomonas aeruginosa; identical to SEQ ID NO: 32507

SEQ ID NO: 35381 - protein, 393 aa, Pseudomonas aeruginosa; identical to SEQ ID NO: 32927

SEQ ID NO: 35382 - protein, 450 aa, Pseudomonas aeruginosa; identical to SEQ ID NO: 32505

SEQ ID NO: 35383 - protein, 249 aa, Pseudomonas aeruginosa; identical to SEQ ID NO: 32506

SEQ ID NO: 35384 - protein, 1101 aa, Pseudomonas aeruginosa; identical to SEQ ID NO: 32507

SEQ ID NO: 35385 - protein, 393 aa, Pseudomonas aeruginosa; identical to SEQ ID NO: 32927

SEQ ID NO: 35386 - protein, 450 aa, Pseudomonas aeruginosa; identical to SEQ ID NO: 32505

SEQ ID NO: 35387 - protein, 249 aa, Pseudomonas aeruginosa; identical to SEQ ID NO: 32506

SEQ ID NO: 35388 - protein, 1101 aa, Pseudomonas aeruginosa; identical to SEQ ID NO: 32507

SEQ ID NO: 35389 - protein, 393 aa, Pseudomonas aeruginosa; identical to SEQ ID NO: 32927

SEQ ID NO: 35390 - protein, 450 aa, Pseudomonas aeruginosa; identical to SEQ ID NO: 32505

SEQ ID NO: 35391 - protein, 249 aa, Pseudomonas aeruginosa; identical to SEQ ID NO: 32506

SEQ ID NO: 35392 - protein, 1101 aa, Pseudomonas aeruginosa; identical to SEQ ID NO: 32507

SEQ ID NO: 35393 - protein, 393 aa, Pseudomonas aeruginosa; identical to SEQ ID NO: 32927

SEQ ID NO: 35394 - protein, 450 aa, Pseudomonas aeruginosa; identical to SEQ ID NO: 32505

SEQ ID NO: 35395 - protein, 249 aa, Pseudomonas aeruginosa; identical to SEQ ID NO: 32506

SEQ ID NO: 35396 - protein, 1101 aa, Pseudomonas aeruginosa; identical to SEQ ID NO: 32507

SEQ ID NO: 35397 - protein, 393 aa, Pseudomonas aeruginosa; identical to SEQ ID NO: 32927

SEQ ID NO: 35398 - protein, 249 aa, Pseudomonas aeruginosa; identical to SEQ ID NO: 32506

SEQ ID NO: 35399 - protein, 1101 aa, Pseudomonas aeruginosa; identical to SEQ ID NO: 32507

SEQ ID NO: 35400 - protein, 393 aa, Pseudomonas aeruginosa; identical to SEQ ID NO: 32927

SEQ ID NO: 35401 - protein, 450 aa, Pseudomonas aeruginosa; identical to SEQ ID NO: 32505

SEQ ID NO: 35402 - protein, 249 aa, Pseudomonas aeruginosa; identical to SEQ ID NO: 32506

SEQ ID NO: 35403 - protein, 1101 aa, Pseudomonas aeruginosa; identical to SEQ ID NO: 32507

SEQ ID NO: 35404 - protein, 393 aa, Pseudomonas aeruginosa; identical to SEQ ID NO: 32927

SEQ ID NO: 35405 - protein, 450 aa, Pseudomonas aeruginosa; identical to SEQ ID NO: 32505

SEQ ID NO: 35406 - protein, 249 aa, Pseudomonas aeruginosa; identical to SEQ ID NO: 32506

SEQ ID NO: 35407 - protein, 1101 aa, Pseudomonas aeruginosa; identical to SEQ ID NO: 32507

SEQ ID NO: 35408 - protein, 393 aa, Pseudomonas aeruginosa; identical to SEQ ID NO: 32927

SEQ ID NO: 35409 - protein, 450 aa, Pseudomonas aeruginosa; identical to SEQ ID NO: 32505

SEQ ID NO: 35410 - protein, 249 aa, Pseudomonas aeruginosa; identical to SEQ ID NO: 32506

SEQ ID NO: 35411 - protein, 1101 aa, Pseudomonas aeruginosa; identical to SEQ ID NO: 32507

SEQ ID NO: 35412 - protein, 393 aa, Pseudomonas aeruginosa; identical to SEQ ID NO: 32927

SEQ ID NO: 35413 - protein, 450 aa, Pseudomonas aeruginosa; identical to SEQ ID NO: 32505

SEQ ID NO: 35414 - protein, 249 aa, Pseudomonas aeruginosa; identical to SEQ ID NO: 32506

SEQ ID NO: 35415 - protein, 1101 aa, Pseudomonas aeruginosa; identical to SEQ ID NO: 32507

SEQ ID NO: 35416 - protein, 393 aa, Pseudomonas aeruginosa; identical to SEQ ID NO: 32927

SEQ ID NO: 35417 - protein, 450 aa, Pseudomonas aeruginosa; identical to SEQ ID NO: 32505

SEQ ID NO: 35418 - protein, 249 aa, Pseudomonas aeruginosa; identical to SEQ ID NO: 32506

SEQ ID NO: 35419 - protein, 1101 aa, Pseudomonas aeruginosa; identical to SEQ ID NO: 32507

SEQ ID NO: 35420 - protein, 393 aa, Pseudomonas aeruginosa; identical to SEQ ID NO: 32927

SEQ ID NO: 35421 - protein, 450 aa, Pseudomonas aeruginosa; identical to SEQ ID NO: 32505

SEQ ID NO: 35422 - protein, 249 aa, Pseudomonas aeruginosa; identical to SEQ ID NO: 32506

SEQ ID NO: 35423 - protein, 1101 aa, Pseudomonas aeruginosa; identical to SEQ ID NO: 32507

SEQ ID NO: 35424 - protein, 393 aa, Pseudomonas aeruginosa; identical to SEQ ID NO: 32927

SEQ ID NO: 35425 - protein, 450 aa, Pseudomonas aeruginosa; identical to SEQ ID NO: 32505

SEQ ID NO: 35426 - protein, 249 aa, Pseudomonas aeruginosa; identical to SEQ ID NO: 32506

SEQ ID NO: 35427 - protein, 1101 aa, Pseudomonas aeruginosa; identical to SEQ ID NO: 32507

SEQ ID NO: 35428 - protein, 393 aa, Pseudomonas aeruginosa; identical to SEQ ID NO: 32927

SEQ ID NO: 35429 - protein, 237 aa, Pseudomonas aeruginosa; identical to SEQ ID NO: 35241

SEQ ID NO: 35430 - protein, 249 aa, Pseudomonas aeruginosa; identical to SEQ ID NO: 32506

SEQ ID NO: 35431 - protein, 1101 aa, Pseudomonas aeruginosa; identical to SEQ ID NO: 32507

SEQ ID NO: 35432 - protein, 393 aa, Pseudomonas aeruginosa; identical to SEQ ID NO: 32927

SEQ ID NO: 35433 - protein, 450 aa, Pseudomonas aeruginosa; identical to SEQ ID NO: 32505

SEQ ID NO: 35434 - protein, 249 aa, Pseudomonas aeruginosa; identical to SEQ ID NO: 32506

SEQ ID NO: 35435 - protein, 1101 aa, Pseudomonas aeruginosa; identical to SEQ ID NO: 32507

SEQ ID NO: 35436 - protein, 393 aa, Pseudomonas aeruginosa; identical to SEQ ID NO: 32927

SEQ ID NO: 35437 - protein, 450 aa, Pseudomonas aeruginosa; identical to SEQ ID NO: 32505

SEQ ID NO: 35438 - protein, 249 aa, Pseudomonas aeruginosa; identical to SEQ ID NO: 32506

SEQ ID NO: 35439 - protein, 1101 aa, Pseudomonas aeruginosa; identical to SEQ ID NO: 32507

SEQ ID NO: 35440 - protein, 393 aa, Pseudomonas aeruginosa; identical to SEQ ID NO: 32927

SEQ ID NO: 35441 - protein, 450 aa, Pseudomonas aeruginosa; identical to SEQ ID NO: 32505

SEQ ID NO: 35442 - protein, 249 aa, Pseudomonas aeruginosa; identical to SEQ ID NO: 32506

SEQ ID NO: 35443 - protein, 1101 aa, Pseudomonas aeruginosa; identical to SEQ ID NO: 32507

SEQ ID NO: 35444 - protein, 393 aa, Pseudomonas aeruginosa; identical to SEQ ID NO: 32927

SEQ ID NO: 35445 - protein, 450 aa, Pseudomonas aeruginosa; identical to SEQ ID NO: 32505

SEQ ID NO: 35446 - protein, 249 aa, Pseudomonas aeruginosa; identical to SEQ ID NO: 32506

SEQ ID NO: 35447 - protein, 1101 aa, Pseudomonas aeruginosa; identical to SEQ ID NO: 32507

SEQ ID NO: 35448 - protein, 393 aa, Pseudomonas aeruginosa; identical to SEQ ID NO: 32927

SEQ ID NO: 35449 - protein, 489 aa, Pseudomonas aeruginosa
MKHRERISRYRHLREQPQWKLLAADHAPEIIGLLQGLLMDGERTLPSSVLNERLQRALDQLNGDELSRELPRTAQAYIAHWLAQGWLERRLPDGVDQEQYELSTAALQAIRFADGLEQARVAATESRLALVIEQLSQLAAQTESDPDARLSALRDERDRIDAEIARVGAGRVIALDGKRALERARQIIGLADELTEDFRRVRDDFEQLNREFRERIIDDEGERGDVLSQLFEGVDVIGESDAGRSFQAFWRLLNDAEQSAQLDAALEAVLARGFARRLDRNERNFLRGFTSTMLERGGQVHDVLQNFARSLRGFVQSRGYLEQRRLNQLLKQAQSEALALRDEFPAQRGIGRDLQLTTSRLRSWSQWKLHDPRSAQVDGNVEYNDAAAISLESVGDLVASSEIDFRTLRRDLHDLLDAQPRLSIAQALSQREAPQGLGSVIGYLSLGTRFGNVIAGEQELAQWRGGDGQIRRARIPLVWFTQERRHELA

SEQ ID NO: 35450 - protein, 233 aa, Pseudomonas aeruginosa
MSWHEDPIDAPQADVAEDAYEAEPVAAVAQPRRGNDVYYLGDTGRLPLDARRALCQLLIGPSIDQLRHAKLWPALIRSEAAIRSSLADLFLELVLDRDSGVAFTRQADTEDVDAPVLLRTSPLTFIDSVLLLYLRQQLAEADSRGNRAVVADAEMAEALAIYEKNLSTDRAGFNRRVASAVQKMKDNHILTRLSGQEDRHEVSPALKLLFSAEDVSQLSAVYRQLRETPAAEA

SEQ ID NO: 35451 - protein, 1126 aa, Pseudomonas aeruginosa
MAISKHTPALFNEGLPDPRLQQFRMRRLQVHNWGTFNGLTEVPIAERGFLFVGRSGSGKSTLLDAMSALLTPPAIVDFNAAAREAERSGRDRNLVSYVRGAWADQQDSGTGEIATQYLRKGATWTALVLEYRAGDGRVVSLVRLLWISGNGTSAGDVRKHYMIAERPFDIAKDLGGFDLDLRKLKQKLPDLHHFDTFSGYAERFRDLLGIDNEMALRLLHKTQSAKNLGDLNVFLRDFMLDTPKTFDAAERLVSDFAELDGAHQAVVTARRQVETLLPARAYYNDLKEMHRRRGDDEALKLGVDSFRESRRQALIEARLREMDVRDRGLLGEEAQRRAALDNHTERLAELELQRRQQGGERIEELEREQGRAEAERDRRQAKREQARQAAQQLGAELPDDAHGFAELVERAQNELQDRQRASSALDDAISDRLGGKRDDERRFGEVRAELEAMQRTPSNIPAPMQKLRARLAEETGIAEAALPFVGELIQVRSEEQGWQGAIERVLGGFALSLLVDDKHYNDVAEWVNRTHLGMRFTYYRVRRNDDAFAREPSAKSLLHKLELREHVFESWLRRELGKRFDYECVDAKQLRNVDRGITREGQVKHPGDRFEKDDRSAVGDRRRWILGFNNHDKVGAFEREAQELAKRIASCETDIARLRGQRDRDNERRLACHELVSISWNEIDIAAPQQRLSDIEATLRDLREGNADLAKLAKQIDAVRADIEQSRRTYEDVRVERGQLVKERDRLDRARQQSRALVLPSLAQEQEAGLAERLQEQGPLSLETLEAHMRQVSNALNEQLSSSQQDLNRIENQLIGCFRRFIQQWPEESGDFTVSVASAEDFLARLERLERDGLPQHEERFFDLLQNQSKNNLLALQRHSAEARKSIGQRLDEVNASLEQVPFNRGTLLTIELSDRRLPEVAEFHLQLREVLSQQQTEQRELAESQFTVLRQLVNRLGSQEGEDKRWRELVLDVRMHVEFIGVELDAETRQQVEIYRSGAGKSGGQRQKLATTCLAAALRYQLGGADSQLPSYAAVVLDEAFDKADNEFTALAMNIFDNFGFQMVVATPLKSVMTLEPFIGGACFVEISGRHDSGVLLIEYDEEGKRLKLPERSRQQANEPEEAEA

SEQ ID NO: 35452 - protein, 450 aa, Pseudomonas aeruginosa; identical to SEQ ID NO: 32505

SEQ ID NO: 35453 - protein, 249 aa, Pseudomonas aeruginosa; identical to SEQ ID NO: 32506

SEQ ID NO: 35454 - protein, 1101 aa, Pseudomonas aeruginosa; identical to SEQ ID NO: 32507

SEQ ID NO: 35455 - protein, 393 aa, Pseudomonas aeruginosa; identical to SEQ ID NO: 32927

SEQ ID NO: 35456 - protein, 450 aa, Pseudomonas aeruginosa; identical to SEQ ID NO: 32505

SEQ ID NO: 35457 - protein, 249 aa, Pseudomonas aeruginosa; identical to SEQ ID NO: 32506

SEQ ID NO: 35458 - protein, 1101 aa, Pseudomonas aeruginosa; identical to SEQ ID NO: 32507

SEQ ID NO: 35459 - protein, 393 aa, Pseudomonas aeruginosa; identical to SEQ ID NO: 32927

SEQ ID NO: 35460 - protein, 450 aa, Pseudomonas aeruginosa; identical to SEQ ID NO: 32505

SEQ ID NO: 35461 - protein, 1101 aa, Pseudomonas aeruginosa; identical to SEQ ID NO: 32507

SEQ ID NO: 35462 - protein, 393 aa, Pseudomonas aeruginosa; identical to SEQ ID NO: 32927

SEQ ID NO: 35463 - protein, 488 aa, Nocardia farcinica
MDFDEIDFLRRSDPAWRLLRADHAPLVLSFLRKVFVVDNVRAISATELAGRLDDELYALNEQHGEATYPKAAKAYLDDWAAPANGWLRKYYPAGSDEAHFDATPAVEKALTWLESLRVRSFVGTESRLNTVFELLRQMAYGAETDPDVRLAELYRRRSAIDAEITQVAAGRFAVLDDSAQRDRYQQFAATARELLADFREVEANFRGLDRSLRARIAGWAGSRGQLLDEVVGNRAAITDSDQGRSFQAFYDFLLSHERQTELTELLEKVQSLDAVGETDPRMRHIHYDWLDAAERTQATVRLLSEQLRRFLDDQVWLENRRVMDILHSIESSALALRERPIPALTCELDGTAPVIGLPMERPLYTPKEKVSLDSAGIAEADENVDASALFEQVFVDRELLCGVVRGELRERAQVGLREVLGRRPLEQGMAELIAYLSLDDPAFQIVFDEATREQVRWIDDGGAERVATIPRVTFIRPSHGDRAVSGHL

SEQ ID NO: 35464 - protein, 200 aa, Nocardia farcinica
MSTSLRRDELDLPLVITHLMKGVVYADSHEKVWRNLLPLQPQVRDYVGVMGLTVVVDETEGYAFLRSKPEADDDGKLPRLIPRRALSFHVSLMLALLRKKLAEFDASGADTRLILTRDQLVEMVRMFLPESSNEARLVDQIDTLLGKVIDLGFLRRIAGQDAAYEVRRILKAFVDGQWLAEFDQRLGEYIEQLDDVEGAH

SEQ ID NO: 35465 - protein, 1130 aa, Nocardia farcinica
MNGLFSAVGLDSEESGLAGYRLERLEVYNWGTFDQRVWHFRPEGRNCLLTGDIGSGKSTIVDAITTLLLPAHRISYNKAAGADAKERDLRSYVLGYYKSERNEATGASRPVGLRDRRSFTVVLATFTNVGYDSTVTLAQVFWFRDTSVGQPDRFYVTADRSLTIAEDFAEFGGDIGTLKRRLRKQEARVHDHFPSYSKDFCRRLGIESEQAMELFHQTVSMKSVGNLNDFVRSHMLEPFDAADWTGRLVHHFEDLTKAHEAVLKARTQLTMLEPLLAECDSYDELDARIAAGKAEREALRFYCADRKVTLLVNRLSSLDVELGQQEAAGADAEAELKRLRRKERNLELERAGCGGDRIRQLEAEIVSEEAERARRRKRHDHYQSLLVAAELPAVVDAAQFAARRHAVCERQSGLDQEKAELQNRLTDLAVTRRTLDDEAREINTELLSLQQRRSNIPKSSLDMREQLCAATGVDSAALPFAGELIRIRADSAEWEGAAERLLRSFGLSMLVSSEHYDVVSEWINERHLGIKLVYYRVPERLSRTPSPALSEGSLFRRLEIKDSPFSEWLERELAHRADYECVHTMAEFRRVAKAVTRTGQIKGARGRHEKDDIRRIDDRRHYVLGWDNQAKIDALLGQASRLHDQTRDNDVRRQKVDDELTAKVRLGTTLSLLEQVDEFDEIDWQASVNRIAELADEKTQLEQQSDELQRLTSELATIATRIKEVEAVQKQAQTEFGNLDGQRRTTAGQLRDTKATLDEPAAASAKAWFAAVDTRVGDRNLVTPDDCDTCRIEVNDAITTEIDRLTGQQNKAAARAVARMGDFRREYPLETVEFDNSVQSAGEYRLLHKRISSDDLPRFESEFKTYLNTNTIRDIAGFHSQLTKQAELIKRRIETINDSLVDIDYNPGRFIRLEPHPTVNVEVRDFRKALRECTSGSLSGDDSNQYSEQKFLQVKALIERFKGREGHTESDRQWTRRVTDVRNWFAFSASERWRADDTEHENYTDSGGKSGGQKEKLAYTILAASLAYQFKLDWGVSRSKTFRFVVIDEAFGRGSDESTRFALDLFRRLGLQLLIVTPLQKIHVIEPYVSAVGFVDNKTGDGSRLQTLTIEEYQQRQLAHAIATASDQGG

SEQ ID NO: 35466 - protein, 387 aa, Nocardia farcinica
MTSTSWTVPDDVLGKLRRRWTRGEFLSQFATGMPWQPMAIGIRGPSVQDIVTDLDSARAWVEQWRRVRKLRVEMRPVGGRVVGSNTIPRRVWVDSYEQLWSVLGVQSAVESFTILLDATRRRAPAIAEWMSDKPMEVLEYLDEWPRLVDTALWIDAHARPGMYVRQIDVPGVDTKFVERFRPVLGALLDRLLPEERIDRSKSPSDFIGRYGFRPKPSYIRYRRLSDGPGFSELAVRVSELADMPLAERTVFVVENEITYLAFPQVEDAVVFFGEGYAASRLRTLTWLDQRNLVYWGDIDTHGFAILNSLRRSFAGARSMLMDRAILLAHEIHWITEPDPTSEHLEALTPEESSLYTDLVEGVIGRSVRLEQERISYAVIEDAIRQFR

SEQ ID NO: 35467 - protein, 237 aa, Pseudomonas aeruginosa; identical to SEQ ID NO: 35241

SEQ ID NO: 35468 - protein, 249 aa, Pseudomonas aeruginosa; identical to SEQ ID NO: 32506

SEQ ID NO: 35469 - protein, 1101 aa, Pseudomonas aeruginosa; identical to SEQ ID NO: 32507

SEQ ID NO: 35470 - protein, 393 aa, Pseudomonas aeruginosa; identical to SEQ ID NO: 32927

SEQ ID NO: 35471 - protein, 452 aa, Pseudomonas putida; identical to SEQ ID NO: 35085

SEQ ID NO: 35472 - protein, 213 aa, Pseudomonas putida; identical to SEQ ID NO: 35086

SEQ ID NO: 35473 - protein, 383 aa, Pseudomonas putida; identical to SEQ ID NO: 35087

SEQ ID NO: 35474 - protein, 219 aa, Methylophilus sp. TWE2
MSHYWDNLSARTNGQHTSEEFESAAYRLVVEQVIYYADRHSRATYWLIEGFERDFREALAPLGITLDVNRQLRYVYAKPQYAKAGTASVAQTLLALVLRALYDEGARLGQFTDDGEVVCDLVELEEKYRLMTGRELPGKGEFSELMRTMKRWGIAKKSDESLVQRGDSDQTLPYAVIIRPAIADILGEMALLRLAQWKELDHMPRIEDTESEDDHEVTE

SEQ ID NO: 35475 - protein, 365 aa, Methylophilus sp. TWE2
MFDDKLPERVTHCDKQRERAKDRMNDSIVRGMKEFGAFLTNYKEQTLTDTSEWRDAHKWLAELLQRLEKTELAGYSKEMDAAYRTSQETFRNDVAIALNDNLEWLGDTMSRLNEVLSKCPSFSNGERYRFRRVVKPHLASLLKFIKDVAAYGPTQDLLGGAGDLPQEFKELLNEKAAPGAAGIKSPLDDYREFYDFDIEILREDTITKENKVVGHLSKRLGPGSGGEHRSPLYVIAGAALASAYRLDRGNHDGLRLMLLDEAFNKMDITNIVATMRYLEQLGLQVFMASPGENLGILTAFLRRYYDILRDPENNTVRFEGHNVSEEIRIQFKEDLPEFNPNLVEQEIEVMRAEAIAMARQRELAE

SEQ ID NO: 35476 - protein, 389 aa, Methylophilus sp. TWE2
MDTLAHSLLSKLLSAAEMCNAGRRSRQAALTESTLAEYRGFSSLPKKESFEETMRAARAEGAVELVWDGKKSGEGFIKRINLVDRRNLAAFLGIRLSDDKVDEAREHLQPFVADYPVLEEVIDRWKKLRKVRSLGPEKYQDWMDAIRTIVACQNAPSTQTMSLPVRKFSSQLFKDSKRIEKLIAPLDVLLVGGLDGDIRPESGVLQELGLFREEHPARLAGNVIIERERVTACLDQPYSGLPAQTVLRLASTPSMVMTIENLTTFHSEARQRCDENVLLIYTAGMPSPAWRAMYRRLLGSLSNDVPLYHWGDVDEGGFRIAATLASDANSAGYKLLPWKMHPDDVPKNVRRKATQHTLAQIRHFSAVAGWSELGDAISEAEFVVEQESL

SEQ ID NO: 35477 - protein, 502 aa, Gordonia jacobaea
MVNSAVDGTLTLTDTFEANRSIQRSAAVRLFAASNSALYVTLMERHLDFGTRHTESELAIRLDRDIAALGTSDQPAGLDLIKSWAKQGWLHRVTDAASPSAPNVCFLSTEARSVIAYMRRLRREDSVATGGSIMGVAAGLHRVATQVTDDPERIREDIENQIDELDAELVELNEGRRRPFDLRGAEDEARAIAYQMEQIITDIGQYGAMLDRITTALLDDPHDSDLAYRDRQRQMFDDYESLLESSQSASYHAFTQMIQDPMQRARLISDIELVVDRLPSIDTGLRAVMENFFPLVSEQMAEVGRIRQRCARRIRRFVASGTLEQSRGVARQLNDALATANELLKDSLADRRLGYELPVATPQVTSIGRLAFEIRNPAPPEQARPADGRTNLASFASLAGQVDTVELADVVNDKLTSGPLSLSDAIAALDEPYLAHVIVLWSWALRQPREMPRQHGAGSSFVRFRSLEGEDRAIEVPTLLFSEPIPSQHSDTDSILSTEADA

SEQ ID NO: 35478 - protein, 288 aa, Gordonia jacobaea
MTSTDTTNTDTTDPNTPGATTNTSATSAPADEFAGYDDLPTAATHGRIDGPRAPRFDGDVSAMPDRACWALQNLLTRRHVSGDRNPQLWAWVTEYQDLLRSRLSELDLRLRLVDELQVAFVEQAGYESRWGRKILKRETIQTYDAILALHLAKFLRSSREETAIITREEIHEMFAGVTNTIDRDLALFDKRIERAIDKLEELDFLRRHRDDPDTFTVSPVITAVMTASVITDLQHQFEQFIGAGDTGDDLAVDADSVGAEGSSAPTGQSDSTDEYSTGEYSDDEGDQW

SEQ ID NO: 35479 - protein, 1105 aa, Gordonia jacobaea
MSRLQLINWGVFDGYHSIGFSPGGALITGSSGSGKSSLLDAISLAFLPDHRRNFNASGDTTAAGSSGGRRTVGKYVRGAWGERRDATGAHREIMYLRGSGPAWAAIAVTYTSTSGTAITGLVLKWLGAGKLTDAHSAYFIHDGDVDIVDACNEWAANGYSAARFRDRGWQGGPGEGKYLSTLYSLIGIRGSDAAQQLLGKAKSLKSVGGLAQFVREFMLDEPTSIAGISDALEQIDPLVEARELLDVSRRKRTILDNVEAMQERYAAESATFTVLDTIEPEVVRSYVTNLRLHNAEPEIADLDDQIARLDSDLAALNSQHDQLRQDHSHLLGRIATSTGDLAPLQEQLSTAQKASNEASIRRATYEHKISALGFDIPEDGEAFWELREHLMEEATRLDGQLEAGKPHFAETLATEVAARSQRDAARDELERVRHAGSALPRAEHEMRRIIASALQLDESELRYVAELVELEPSAERWRLAVEKVLRNAGLRLLVPDKHFAAALKFVNEHDMRGRIQLHHAETRPAPMVEPGTLGATLRAAEPDHPCTNEALTILAKLGNYVCVDSTADFVEHTKAVTDRGLRKDSAKLAIKDDRQQLRPSQYIFVGNVSAKITALQEELELENELYEQARARSAELDRERTAKEQRRDAYRRVCEQFAGWNEIDLDTADDRVDALTEQYELLMEENPDTEALQRKAEDIWEQVRAAISQAALVRDKIATHDKRRTQLLDLVDRLKIEPVSAHAEATLDRFREESAAVLDVLAPDPFRQDLLKAVGRERDRMRADTRRSRDELGRILDAYDKEFPDAIPNDSDDFDERVHDYVALCRRIDERELPAAYERMRRLITEQAPGAILSLHMAAEAEERRIVEQIERVNSGLGSVAFNRGTRLRLCPGRKTLAAVAELTDKARQISSRTAAVGFGDEEAILEQYADILLLRERLAGATPEDRQWTRDALDVRNRFDFYCEERDAETGETIRTYSNAGDNSGGEQEKLMAFCLAGALSFNLASPHGKGNRPIFAQLMLDEAFSKSDPQFAQQALAAFRKFGFQLIIVATVQNTSTIQPYIDNVVMVSKTEDVNSRPIATAISTSIQTFSDLRRTSSSRLPV

SEQ ID NO: 35480 - protein, 489 aa, Xanthomonas campestris pv. campestris
MKHQARIAGYRHLRDQPAWKLLAADHAPELIGLLQTLLMDGERRLPSAVLHARLQRQLDALRGDELSRELPRTAQAYLAHWLAQGWLERRLPEGAAEEEYELSRAATQAIRFIAGLRESGSSATESRLSLVIQQLVQLAGQTEADPGARLAALRAERERIDAEIERVAAGRVGALDGKRALERTRDLIHLSDELAEDFHRVRDDFEQLNRQFRERIIDDEGARGDVLEQLFNGVDVIADSEAGRTFEAFWSLLNDTQQSSQLDQALDALLARGFARKLDRRERAFLRGLTGTLLERGGEVHTVMQHFARSLRGFVQSRGYLEQRRLNQLLKQAQGEALHLRESLHATAATGYTQALSGSRLRSLSQWRLHDPRLTQVDGRVYAADAAEISLDSVGDLVAQSEIDVRSLRRDLHALLGEHPRLTIGDALQQRPAVQGLGSVIGYLSLGTRHGLVIDGHMETVQWEGGDGTLRRARIPLVWFTREKRNELV

SEQ ID NO: 35481 - protein, 235 aa, Xanthomonas campestris pv. campestris
MNWSEQAALDTHDDDDADAHASALRLPASDAASVAQGGALFLGDTGTLPFDARRALCQLLAGPSIDAQRHGGLWPALLRNEVAVRQVLCELFLELVLDREGGVAFTRQADTAELESPTLLRSAPLTFIESVLLLFLRQQLAEADTRGERAVVDEAQLVEALSVYEKNVSTDRAGFTRRVMTAIGKMRENQLLSRLRGSEERYEVSPVLKLLFSAEDVQALVVAYRELREGEVAAD

SEQ ID NO: 35482 - protein, 1337 aa, Xanthomonas campestris pv. campestris
MNSQSNLSPASPGASLFAETLAEQRAQQFRMRRLQVHNWGTFNGLTEVPIAEKGFLFVGRSGSGKSTLLDAMSALLTPPSIVDFNAAAREAERSGRDRSLVSYVRGAWADQQDSASGEIATQYLRKGATWTALVLEYRNAQGEAVSLVRLFWIAGSGNAAADVRRHYMVVPRAFDVASELEGFDLDLRKLKARLGEDVAHFDGFAGYAERFRHALGIGNDMALRLLHKTQSAKNLGDLNAFLRGFMLDEPRTFEAADRLVEDFAELDGAHHAVVTARRQVETLSPAREHHAALMALRRSVGELRELQLGVDSYREQQRLALLEARLQEVDSQDRGLAGEEGQRRESLDNHEQKLAGLEREQRAAGGEQIEELERERVRVERERDERLRRRAQIEQACRQLGTALAAGASGFAAQVAHAQGVLDGGKQHASTLDEAIAERMGERRDDERRFAEIRAELDALKKAPSSMPAPMQALRARLCDDTGIAESALPFVGELLQVREDQVAWRGAIERVLHGFAQSLLVDERHYAQVSEWVNRTYIGTRLVYFRVRRNDELHSRRVDPNALPGKLQLREHAFTEWLRNELTRRFDYACVDNAAALRNADRAITREGQVKHPGDRYEKDDRHAVNDRKRWLLGHDNRDKLKVFEREAQALAQRIASCDADVAALRKQREQDQEKRLAAHTLVERDWDEIDVGPKLQRLSDIDEQLQQLREGDSGLRALGQAIDTARTLRDQAKRTYEDVRLERAQLARERVRLEQQQAACAGRAGTAALTPTQLQGLQERLAALAPLSLDTLEAHFRVVERGLAEQLAESQGRDSRLSAQLLECFRRYCQQWPEDSGDFTVSLASADDFLARLDRLESDGLPRHEHRFFDLLQTQSKNNLLALQRHTAEAHKGIKQRMDEVNASLEQVPFNRDTILTIEVSDRRLAEVQEFQQQLRAVLSHQQTEDRALAEAQFATLRTLVARLGAQEPEARRWREQVLDVRLHVEFIGVELDAQTRAQVEIYRSGAGKSGGQRQKLATTCLAAALRYQLGGEDGELPRYCAVVLDEAFDKADNEFTALAMNIFENFGFQMVVATPLKSVMTLEPFIGGACFVEISGRHNSGVLLIEYDEQAQRLKLPERSRGEDAAVPAEQGGAVAPGERAERAPVIAVESGHPASVHLAESTAVPAQGDAVTDGQSRGSKRTRAAATASTAAPVPAPAGKRSTSAAATSATAAPATRTADASNARRKQAATPDTPPKPTKPASTRTGSSGKPAAKRTTTAKAAAVPKASNATPAVAAKRTGKAPKDVSKPASAQKVAKPVSRSKPTAKPATAASATSRAASTRGSAPKARSKR

SEQ ID NO: 35483 - protein, 489 aa, Xanthomonas campestris pv. campestris
MKHQARIAGYRHLRDQPAWKLLAADHAPELIGLLQTLLMDGERRLPSAVLHARLQRQLDALRGDELSRELPRTAQAYLAHWLAQGWLERRLPEGAAEEEYQLSRAATQAIRFIAGLRESGSSATESRLSLVIQQLVQLAGQTEADPDARLAALRAERERIDAEIERVAAGRVGALDGKRALERTRDLIHLSDELAEDFHRVRDDFEQLNRQFRERIIDDEGARGDVLEQLFNGVDVIADSEAGRTFEAFWSLLNDTQQSSQLDQALDALLARGFARKLDRRERAFLRGLTGTLLERGGEVHTVMQHFARSLRGFVQSRGYLEQRRLNQLLKQAQGEALHLRESLHATTATGYTQALSGSRLRSLSQWRLHDPRLTQVDGRVYAADAAEISLDSVGDLVAQSEIDVRSLRRDLHALLGERPRLTIGDALQQRPAVQGLGSVIGYLSLGTRHGLVIDGHMETVQWEGGDGTLRRARIPLVWFTREKRNELV

SEQ ID NO: 35484 - protein, 235 aa, Xanthomonas campestris pv. campestris
MNWSEQAALDAHDDDDAEAHASALRLPASDAASAAQGGALFLGDTGTLPFDARRALCQLLAGPSIDAQRHGGLWPALLRNEVAVRQVLCELFLELVLDREGGVAFTRQADTAELESPTLLRSAPLTFIESVLLLFLRQQLAEADTRGERAVVDEAQLVEALSVYEKNVSTDRAGFTRRVMTAIGKMRENQLLSRLRGSEERYEVSPVLKLLFSAEDVQALVVAYRELREGEVAAD

SEQ ID NO: 35485 - protein, 1338 aa, Xanthomonas campestris pv. campestris; identical to SEQ ID NO: 30401

SEQ ID NO: 35486 - protein, 488 aa, Mycobacterium goodii
MTDADVSRPSLPRLYELNREVAESRSVRLLVANNLAGYLTLMERHLDRGAKLTEPELVARLERDLADLGADGEQSGLALIKYWAGQGWLHRITEQAGDGERNVCYLTYEARAVLDFARRMRREDTIATGGSIAGIAAGLRRMAGQVSNDPERIRADIEAEIERLRAELDALDEGRRPEPDPLDVEDEARAIALQMEQIISDIGQYGAMLNRITTRLLDASADSDVGYRERQRQLFDDYESLFASRESASYTAFTRMIQDPEQRAALVADIELVTSRLPQLDPSLREVMSGFFTLVAAQTAEVGRTRQRCARRIKRFVASGTFEESRGVTRQLNDALAAANDLLSVSLADSRVGFEVPLARADFNSIGAVAFKIRDAVPPTPAQPSEGEVNLSAFGALAAQVDATELAELVNDTVASRPLPLDEAIGMLDSAYLGHVIVLWSWALKQPATGNGEPVRVRFRSLQGPDREIEVPKLVFTEPIPIVSESLL

SEQ ID NO: 35487 - protein, 240 aa, Mycobacterium goodii
MSDTSIDFDALPSIDAVERSAPERRAPRFDGDVSELPDRACWALQHLLSRRYISKHNQAELWSWVTRYRTELTVRLSELDLRLVVSDDHEIAYVEQAEYESHWRRKLLRRETLNTYDSILALHLAKLMRSASRDENVLITREDIHELFAAVNNDTDRDVASFDRRIDNAIERLTDIEILVRNREDENSFTISPVINAIMTASTITELTQQFEQLRRAASGDPDPEPDTAAAKDEVDADGI

SEQ ID NO: 35488 - protein, 1118 aa, Mycobacterium goodii
MASEPTNQFYLSRLQVINWGVFDGYHSIPFSPAGTLITGSSGSGKSSLLDAISLAFLPSHRRNFNASGDTTAAGSGTGKRTVDKYVRGAWGERRDGTSRQIMYLRGTGPAWSAVAVTYSDRAGRAVTGLVLKWLAAEKTSDPGSRYYLIDDDRDIFDLCNRWAAGGYDAAVFREAGWNGGRSESQYLAQLYSIIGIRASEAAQQLLGKAKSLKSVGGLEQFVREFMLDEPASLAGVEEALEQINPLVEARGMLDVARRKRNTLGNIEAVQARYADEAAKFGVIDTIDNAMVRDYVDRLRLQQAGPEIDNLDDQINQLGAQRDDFGAQQRQLKNEHNALMAQINSASVDLVPLQQRLSEAEKLSDEVARRRGAYEDKVTALQLTPPDTAEEFWSLRETLMEEADRLHRELFTGNQAYVEASAKEVRAREARDAVEAELERVRRLGSSLPKTEYEMRARIARAIGIPERDLVYVAELMELKPDEGRWRMAVEKVLRGAGLRLLVPEAHLDAALRFVNENDMRGRIQLQHVKHDAQLRAPAEATLAAKLQVVDPTHDSAVEALNVIASVGDYLCVDSPDEFTTHSRAVTDQGLRKDSGRLSIKDDRSRLRPSDYIFVGGTEAKVAALQADLTAAEDVYAAARKARERLDQHRAALQARERACRALCDQYMQWTDIDTDSADEALTRLQDELDLLVSDNPDVEKLQQRADECWERVEKVIQQIGSLNERETLLDNRRTALLELTERLKPGEISQHARDTLDSYAADIALPLDLLDSEPFRNELVRVISRERDRLRADRNRSHDELAGIMAAYDSSFPDAIPNDSDDFDERVHDYVALCRRIDERELPDAYERMQRLITEQAPGAILNLHMIADNEARRITEQIARVNTGLGAVEFNRGTRLTLHAGTRHLPAVDELNEMAQRISARVSLVSFGDETAMFEQYTDILQLRKLLAGNTPEDRQWTRDALDVRNRFVLYCEERDAETGEVIRTYSNSGDNSGGEQEKLMAFCLAGALSFNLASPGSTDTRPMFAQLMLDEAFSKSDPQFAQQALSAFRKFGFQLVIVATVQNTTTIQPYIDSVVMVSKSDASAPNARPVASVTAASIAEFGEIRRGAEPEAVPTA

SEQ ID NO: 35489 - protein, 486 aa, Mycobacterium abscessus; identical to SEQ ID NO: 30761

SEQ ID NO: 35490 - protein, 249 aa, Mycobacterium abscessus; identical to SEQ ID NO: 30762

SEQ ID NO: 35491 - protein, 1115 aa, Mycobacterium abscessus; identical to SEQ ID NO: 30763

SEQ ID NO: 35492 - protein, 503 aa, Olsenella sp. oral taxon 807
MSEVVAQFDSLDAVFADGAMRLLRSDYAQASVALLRTLFGDGTSRMESEILYAQVDALLDELDHAGRKVWRHEDGSRLDAREVVNDKWMREFRLLAKRILPSGMSEHSLRPEALAVLAAARDVGDDEIILSSPRIETIIEALTQLSTVVNPDKQARRADLVSKVERAQRALDAFDASGGEADVDANPVAMFRNALDLMSQIPADMSRIEGRMYEERNRLIDSFHKDERPGGELVADYLRRSDELFDGTDMGQVYNGAITMLSNSKLNADISSRVRMITRSDALASLDARERASLERSWKGLVSGMTGVLKLRKACSQTVSNAITQYDHETYREYTSLLKKLYDVVLARGLEGGPLARSPMHDSLDTTQLESLVFRLSARSDREAPPPLYAADTDTIPRIDIERLRYFGGARTEALLAALERQIPSGGSMALSHAFNALDPDIRREVELCGLMTFALGLGVAVEQAPHAVYECYDFIGDLRPWSAPEVMLVREDVSHGREAKDG

SEQ ID NO: 35493 - protein, 224 aa, Olsenella sp. oral taxon 807
MADDMVGQDGSGTEGAPVGVSPKGEPLFPEDTGTCPLVVRHAITALVKKRYIFAETDRVAWDGLMSAPELVRSRLADMLLGLRVDDVAGIAYSYQVQLEGGTVPNKVKSISYFNNLQSLLMTQLVTKYFSATAAGETLVWVEGDELREAMERMFEDMPDVALADSHMEQAIGAMVRNGYLREVVDGRYQVMPIVGVVYGIDEIKGVLSRYGIADGDDAQADVRQ

SEQ ID NO: 35494 - protein, 1128 aa, Olsenella sp. oral taxon 807
MPADQLQMDPLVERQWQLESMQLVNFGPFDGYHRLEFKTGFAQVPTTVISGDSGTGKSTIEDAFFEVMTRNGSYNSASNEGGRGGSLTSEKRSLIGYVRGKLEDVEDEEGRRQVQMLRDGHCNRWSAIVLGYRSDVKTTFSVAKLFWIAAGYTANSDIKQLRMTMFRDFDPRSLESIADANFTAERVRRVIGSDFRSFSQVDEFLTYVHRVLKVDEQGSGKEVMDLLGRIRSGSSFRSIDELFREQVLDRPATFEAASAAVASYREHHSAYERMREKQEKVSLLTEVREFSHERDEALEALDTGRAALAPALFDTWRRRVTLDLLKTRVGELTERKAQLERECEARRDERSRRDARLAELNAELAASGYTERLSQLDSMILRAQERLSSVRAASENLDREVTPHFGHLPTSEADFCALQERVSAFVEGYPQAHEECSAKHSSCVAQRVRLELQADELRSDLEYFQGHQSRIPRGLGEARERLAKASGIPAKSLPFVGELMEVVDEAWRLAIESVHGGLARTLLVDARDFERFSSSIDELRLRSRVTFRRVDVERSYDACAREGYLSEKLTFASDSPFGPWVRSVVCDEHHDALCVGSPRELGGEGRRVTINGQTRDGSRGAHGRDRSSEGIIGFDNSAQVERLTAELVKVSEEHQAAKAAEDAASKALSELVVRQASAERIARYDFREVDVASAHDELVHAQHQKDEFVRSSGRLERLAAQVKDARLQLEEAIKSLGGSERELQLVCDELTGVLGQRDELVAIEGAGERIEGTPPAFELLGRLGGKMLANHSAQDNLKSLGPIVEQVRRQVMELISRDVERERGLRARIERRLQEYQERWPDNRLGTEASSAPDYLVVLSQLEEEGFHLQKDAWFEHMLAWVKEDLIPLDVAFRDARESIDDRLEPINDILRTLPFGREGGRLEIVCRDSEKAEVREFRLLMRELLDYESHSDKAERDAYYRKAEQLIALIDPEDTRVEARRRRNDVLDRRRHVRLTARVIAPEHPDKPKAVYNMLASKSGGEVAEIVAFILGAALLYRLGQEGGSLPGFAPVLLDEGFIKADSRFTTRALSAWQGFGFQIIIAVPEEKFQSVVAKAQRVLHVVADPSRRSFVAQLDKVGPDLKERAG

SEQ ID NO: 35495 - protein, 166 aa, Olsenella sp. oral taxon 807
MACTGVDEVKDRLARHYRRVWAAELSGSAAGTGAWPFRVFLGRPSRADLERGFADIDGELSEVERWALGHGLHCERERRLVGSVAHSLPTHVCAASLDELAQATGMQGHLAQAKRRLGRLMRDFPKVGADTLLSVLKACDPKGMEETDFDLLCRAALWFSFHDARG

SEQ ID NO: 35496 - protein, 472 aa, Selenomonas sp. oral taxon 478
MELFDVLPERFFGLLAGKCRRIYAEAGLCLYEQYRLAQFGIEQEILRDKFQELIESWAEAGVAYEDDVFSEKDNAIEESRAKANHMIRRMKEFGWLDYEQRENFKIFILLPHYSSRLWGLFANLCEGRAVEYQRFAFTTYQVLSGDGAKVQPSMAVLEAERLAEEFVEELRILLNNIKSKMEQVSSQTSLQDVLSHHFVEYRADIVDRSYHRLKTSDHVSRYRIHILQEVQDIRQNKERFRSLCDDAVRRQLAESMDAAEYRMKASLQAIEEIYRGLDDMFAQIDRRHNQYVRASYERALYLQQEGSARTVSMIAGILMAVAEAHDQRRDIDELPCIFRLQTTNMLLPSSRYVPRKKRVLRPNTDTPVRSVDETLRERVRRESAERVARSISRQKIETWILNVLGQRSSMEIGELLALLRETESPDLLQLLYVYLYGYDDWAKYRLGKNKEIEEQDTVRYSNRTVRRKGKIK

SEQ ID NO: 35497 - protein, 199 aa, Selenomonas sp. oral taxon 478
MKLELLNEEERTRIRSVIQALLSCNFLTREHDAALYIAARRYREEIAEYFQVIGWEFRVDERYEIVWLLSTGMAHRRALTMEESIWLLVLRLIYEEKRTSLNLSAFPMTTLAEIRAKYLALHLPDLKKTAIQRLIQLTKQYRLADVLDRDLSEESRIRLFHTLALAVDGEELSALYSRLDVYRQRKEEDHEDAAENEGD

SEQ ID NO: 35498 - protein, 1106 aa, Selenomonas sp. oral taxon 478
MKTLRKMKVINWHYFDEEEIAFGAATMLSGHSGAGKSTLLDALQYLFIGSQTQTRFNAAATQEARRTLLHYLRGKIKAEGVQYLRADEFTSYIALEFYDDVKRNSFIVGYVVDVFHDDRMQEEFFLIDQHTLSDLDFRNTDGTLYTQETFHRRYAHGSSVFETGKKQWQKRLMNRLGQLSSRFLPAFSRAIAFRPIDQVRDFIYEYVLLPRDLKLDVLREVFYSYQKFERDLQDLRARKHELEMLKEHYDTYCKLRDTAYEQEFVLLSFRHKNAEEKLDVGHQQRQTCRDRLDDLQTKLHAQERLSKRRNQEQQEAYAAWQGNDEKRRRDELLETQKERVEKYRSLTDARQLMRKELMCEFEEVSALGAYPAGEFFRLPEGMPQALEELARTLKYAAEDTIQTTQIEQIQEQLKAGGEILAAVSDLWQRGNLLLEQAQSEAVQRWEELCSEIEGLKRRQRRYRPEMMRLKALLEERLAGRSKVYVLCEEIEILDEEWRDTLEGYLNTRRFDLLVEREFFREALHIYETEKRERNIEGVGLVNTEAEKKYLGQQENKSIAALLLTQNPLAQACIDHLLGNVMQADNEQDMLRYRSAATKSCMSYKGLVARQIPRRFYEIPYIGAGAIDRQLEIRERELAEVRRRLVMLAEEADHMKRISSVLHEPLHRYANAAKRMNVLAELDACKADLERISGELNAMDLSEAVRLKSVYEESKRRAEEAAHDCAETMRAQAHAESELDQAERSIPILERTAAAAAEAVESWRETYPDLCTGAEARLTSLMQEARGGRSMEERLQSYEISRRGNETRRDNMWQKLLVAREHYGLAHGDTGHVYDPDHSYYKEILERLSGTDIPSFEEKAREALAQSEMEFKAHFIFSMREAIESARYEFRELNYALNQFQFHKDKYSFLVTPSAKYKPFYDAVMMADWETAGGLFADADTAANEQAMELFDKLVKGTPEEQEEFSDYRRYLDYDIRITDTAGQNYLYSRVLRQTSGGETQTPFYIAILAAFQQIYNDKTIRLTVFDEAFNKMDEERIKSCIELIKRMKMQLIVAVPDEKLAAIAPLMDQSIIVTNVGNHCFTDELGDVATWEKGLNHGADASADAL

SEQ ID NO: 35499 - protein, 419 aa, Selenomonas sp. oral taxon 478
MELMPLQMHYEDIILTILLEKYENSKAAVGERGRRPQFRILKSALSADYTDEMDVDKREAIHAAACELERQRLIVVVWERHGTGRIERILLSANVSTLYQRMGKVMPLIRVKEYQTKLLALANARTPWVQNFYATMMESLADNVIPAILPKEQILYANLIRAILALPAEGESAIPRRVFSQRIFRNSKYFEQHIEFPLLRLLRRFVDEPCESDAEYLDAAGIAVTQGKVWIAGNLTFLLGDRRYFLADFPGGLMLTYDTITAMKIDVLPPEILTIENLTNAETLTRTVDTNHLLIYTAGFPNRTVQALLLKIAPLHRTFHIRHWGDIDYGGIRIFEFLRGRYFPTLGQYRMDVDTFRAYLPFAQSLTPAQRKRLSGLLEQKDFSTWHSLIRVMLAEGKWVEQEVMLWQDSSEMDSLNEE

SEQ ID NO: 35500 - protein, 489 aa, Luteipulveratus mongoliensis
MLDDHAAVSMLQKGNAGILITVLANTFSTERDSIPTDVFETEVESLLRTLNANDLETPKVREVHGSGRKLSDLCRDWVKADWLWRTDDENGTPCFTRTAEAHEAVAFVQRLGDSRRGTAAAAVGEMVASFGRMSARLSGDIERQIQQIDDEIEALTIRKGLLESGEAGGVGLDEFERWYDDTLNTQQRISLALRWMAQELPRTRRSLLEKVREDEVDGITHINAYAEAWDEVTDTPQGRATKEALAVLSDPSQRQSLTRNVAAISESELGGLLNDREKRALADTSVGLYTQIKPLIDIFNASLEDVTYAFKKRAVTSTDRTAWMAALREAAAALRATTQRKVPAGVIPFPVRVEINHAPPSYRVREAPAAPQTLDELEMSTATHTDPALLARWSGPHTNDVATHIATTLDALEPGQSMSTAEIWDLSPESLRRAVELVPYFERAHKVAEVGESSHYSDALEVIETLAPNGSIVRYEITRIVYRKPTEGN

SEQ ID NO: 35501 - protein, 213 aa, Luteipulveratus mongoliensis
MEPPLFDGDLGTEPSDIRELLTVLFKDHLLDGNQRVRLWNVLIEHEGHVRSRLHDFYLELVVAPGHRIAYQKQVDADQDYRILTPQRAMSRELAMAVLVLVDRYQRAAVANAPTVSVARREFADAWEQMWGEREKDRVARDKNAEAALKRLFETGLIMGRSPANGGESWKISPAVPVFYGPDVLQTITVSLLGEEQDNDREDEGRADGLDGDK

SEQ ID NO: 35502 - protein, 1112 aa, Luteipulveratus mongoliensis
MNDATLLPAQWYLASAQVFNWGPFTGYHRMDPAGVGEATLISGSTGTGKSSYLDATSALLHPGRMFNKASAGGGKARSIATYVRGVYDKEESLAGTRVFALRDKRATWSAIAHTWANLDGESLTVFSAYFMNTDDEKPSHEAHGRIEGFFDVRQLDAYTRPPHVPLHGKSLRAAFPDMVPAKTKTANLTWLADELGLSSNFTNLMDILYRIQASQEIPGVDWLFTNLVLDEPADLLASVREAREFWDKVREARKELYDRQRKAEILKDLLTYRQSFETNANADAFFQDLGYGDGRLQADTPFWRWVREREFSILDDLEPRLAQEARDATAAVSNFQIEKDTADAAALNAQIRYLKAGGAEAASLETDIRSAESRANEVRTARAYMSERVGTHLAPPLTLDDLTAQRAETTAFLGTVSRHLAYIADPLRKANGAEWDAQSRLTTLRKERAYYANRKDLIPQNMAARRDEWARLTGIPAADLKFVGELMDVEPEFEEWRDALEGAVGGWALTLLVPEETIKEFRRKVNHVKTPPIIHSQAVPSGTYNLVTGPEHQIAGRVFYAEHRYAGWLSHEVARRFAHKCVEDGEGLNQLTDGTWGVSKSGQVRGPKGTGKHGGAGRRNIGFSPQRLLEELDIKMAETDSEAVKANEEAQALKQAHLDLTQAQAAHEWFQEATREWHRYDLVAAEEHLDSLRRQRAALSSDDELDELEKAAKGRRAEADTAGRRFFEAQDAAEKAVLLRDKVIDDKEGAERSRDMLRGRGVEEPDMKRLDDEARSAFNVDELIHENLQPGSLGRLAQHLRKAQSGAAGQKGVALKNIRDVMVAFNREYTTVVPIGVSVENPHPETDYVEYARIRSQQTTYGLALAQEQFAQQVLDFTNVNVGGIADSYESQRRIIRDRINAINELLAPEPFGGDSTLSIQILRDEKPADTKDFLAQLGSLGSGATKGITYEAALERFPAFDAAMDMVATEKQVSDLFDVRRHMTIQARAEHKDGTATTYNHFSGEKSGGETQELTAFVLAAAVRYHVGTEGVSRPKFATVFLDEALIKADDQFTERAINVWLRFGFQPIIAAPVGKFEAATSATSLIYAVAKDDQHRSRLDFMRKVVGTKP

SEQ ID NO: 35503 - protein, 460 aa, Streptococcus pneumoniae
MKKLFEYIPENYFNLFTGKNREFYAEVAFLLYEQFHINRAGILYSLMKDEIQELIETKEELGECIDVEDEMEERVQDSAERANVVLRRLKKLKWIDVEIRDQFEEFIVLPVYSSRILAVLKEICENRTIEYQRYCFTTYQLLIGVEAEGRPASAIWESEKYSDQLYDELTILLHNMKNHMETIAAKDDIQQVLEHHFGEYKKDIIDKSYHRLRTSDHVSRYRNKILERIQTWFLDDEFMKRAAKDAVESGYSTSQEEAMDVLSKKMYKVEEIYSNLDEIYNQIDARHYQYLRAVLDRSRYLSTYNDSTDYKISYILEHIRQTDENILDSSPFRLVQFRQLQEASLLSPRKKKDVYEPEQHEVTEISEEMREELKAENVRRIEKVINRKKIRRFVLEAMKGRQEIEMSELDLQNEEDALYLIYVYLYGYSRNAGYTLSEESPEFITQRGYTFSNRTIKREN

SEQ ID NO: 35504 - protein, 197 aa, Streptococcus pneumoniae
MQNILDREREEMEVVINYLFSHNFLLKEFEREKYQLAVRNKEIIKRYLQVIGWDFIVDEKHGCIVIASPHYEHRLKLKKDETIWLLVLRLIYEEKRSSLSISQYPFTTLQEIKGKYETFRLTFVSKTKLRELVQMGKQNQLLRPIDNDIELDDCRFQLFHSCIHVLQQGDLNVLYEKIKSYSEGGDQIEMDEEATIN

SEQ ID NO: 35505 - protein, 1107 aa, Streptococcus pneumoniae
MKWMKKLRLINWHYYNDETIIFGKQTVISGHTGAGKSTIIDALQVLFISDERKIKFNSAAYEEAKRSLINYLRGKIGTEEKPFVREGYFTTYIVAEFYDEKVGESFVIGISIDVFKNDEKIKEYFIIPKSEINMISFFNTKNAKRYVETQADFSKKLRAQFPKAIIEKSSIQYQKALLHRFGGLHERFIKTFAKALSFKPIDNMRDFVYKNILDEKELKIDVMRSIFKTHEELQRELKELKERKEELERIDNIYMECVKLEADISIQEYVLRGLDYLLVEEEKSICQKSIEQREKELRKYELDQEKTAEQKDYARKKEIEYEIKIKDSAEQKRQKQLQEQIDQAKKECDDLERAKNVYVHSLEREEKDVSSLFNYQGNEYFTLSKDEKHALEIGRDCLAFLSRNDGTGGNREEQTLNKLGENLKRISGRFYKSTAELEHRSVELKTEEQKLLSDIENLKRKKRSYPMSVEKLRGLLEKHLEDQSKVWVLCEELEIKNDKWRNALEGYLNTQRFDILVEPHMFATALSIYEREKWNLGLEGVGLVDTEKEQTYLGKVEKGSLAEEIVGGNQIVQARIHHLLGRVIKADNEQELRKHKTAVTATCMSYQRLVARQIPKRVYETPYIGAHAIQRQLEIKEENLKGIQKELQMVGYYIKEFKKWIEILEGKQSHYKNYMLNFSLNDRILGFNRDIDKWHSELNTLDLSPLERLHQKLEEWKGKYNQFNREEGRLFEQIGKVKKELQGVKGELWKKEKDVTERLENLEKWKFEYEVELLQEAEQRYEQAIFTNKAYGAIRNKYENNKKENQNKYEEKWSFLESERKSYNEARTFQGIIQAKDNKQYEEALRKIANLDIPKFEQEIKETLQQAEEEFQSHFIYKMREAIQAARREFNQLNHALGRFKFRNDTYRFVIKPSEQYKKFYDVIMDERVQPEISLFDFGDEDRAEILKDLFGRLVVGEYGENEEFVDYRNYLDFDLSINNENGTRFMSNLLREQSGGETQTPFYIAILASFQHLYRNKNTIRLVVFDEAFNKMDEERIQISLRLIKQLDLQLIAAVPDEKMAHMAAEADTAIIINRVGHVCFADMLSYPREDEAIGLQEQDSFSLIE

SEQ ID NO: 35506 - protein, 406 aa, Streptococcus pneumoniae
MDYKSKILSVLLNKFENSKTVHTGERSAQRPQFSFRQKHELSKAYNDEMDYTNRLEINTALKDLLSKGIIEVKWEKWEENRIAEKVYLQYDFIPLAYSEAGIEPKFEKMNRILKVLEPLAIHSWSWVRQWYKEVQQSFQNKKTARVDLNDVKGYELLVKALSRLEGLEDSIPKRTFSQLVFGDTKLFETTIQNRLLIIYKRYGDIEYESDKEYLESIGILENIQPVYVKGNVDICVRGEKIALGSLPGGLGLMDETIKELEIQYVHDESIMLIENMTTYYEQIKKNNNILFIYTGGFPKKNVQQLLKKLNIYLKNHSIQVYHYGDLDYGGIQIFEYIKRAFFKELEPYMMDVSTYRQYVKYGMEFSEGYEGKLMKMLENERYSLWYELIKEMLKEGRRVEQEVIVR

SEQ ID NO: 35507 - protein, 486 aa, Mycobacterium abscessus; identical to SEQ ID NO: 31694

SEQ ID NO: 35508 - protein, 249 aa, Mycobacterium abscessus; identical to SEQ ID NO: 30762

SEQ ID NO: 35509 - protein, 1115 aa, Mycobacterium abscessus; identical to SEQ ID NO: 30763

SEQ ID NO: 35510 - protein, 486 aa, Mycobacterium abscessus; identical to SEQ ID NO: 31485

SEQ ID NO: 35511 - protein, 249 aa, Mycobacterium abscessus; identical to SEQ ID NO: 31486

SEQ ID NO: 35512 - protein, 1115 aa, Mycobacterium abscessus; identical to SEQ ID NO: 31487

SEQ ID NO: 35513 - protein, 486 aa, Mycobacterium abscessus; identical to SEQ ID NO: 30761

SEQ ID NO: 35514 - protein, 249 aa, Mycobacterium abscessus; identical to SEQ ID NO: 30762

SEQ ID NO: 35515 - protein, 1115 aa, Mycobacterium abscessus; identical to SEQ ID NO: 30763

SEQ ID NO: 35516 - protein, 486 aa, Mycobacterium abscessus; identical to SEQ ID NO: 31694

SEQ ID NO: 35517 - protein, 249 aa, Mycobacterium abscessus; identical to SEQ ID NO: 30762

SEQ ID NO: 35518 - protein, 1115 aa, Mycobacterium abscessus; identical to SEQ ID NO: 30763

SEQ ID NO: 35519 - protein, 486 aa, Mycobacterium abscessus; identical to SEQ ID NO: 31694

SEQ ID NO: 35520 - protein, 249 aa, Mycobacterium abscessus; identical to SEQ ID NO: 30762

SEQ ID NO: 35521 - protein, 1115 aa, Mycobacterium abscessus; identical to SEQ ID NO: 30763

SEQ ID NO: 35522 - protein, 486 aa, Mycobacterium abscessus
MNDLTVEELFAHNDDVQKSRAVRLLAAKNLAPYITLMERHLDRSAKVSEPQLVAKLDRDLSAVGLGEQSGLALIKSWASDGWLHRASDGTGPDAENVCSLTEDARSALAFVRRLRRADTVATGGSIAGIAAGLKRVATQLDGDPSRLRADIEAQIAELQTQLHAIDDGYRPEPDIVDLEDETRAIAYQMEQVITDIVRYGSMQNEITAGLIDAAEDSDSGFRDRARRMFADYDALFDSRERASYSAFTRTIQDPDQRAALRSDIACVAEGLPDLDPGLREVMKNFFKLVSQQITEVSRIEQRCAQRIRRFFAAGTTEQARGRARQLNDALAAGHALLKVSTADSPIDAELPIGRSAAAAIGALSFTIKDTAPPVLAQDAPSGPLDLSGFSALATQVDMAALADTVNSAVAGGPVSLPDMISHVEAPYLGDVIVLWSLALKQDNTADRESVKVKFRSLDGQDRVMEVPQLMFREPVLATLEEEGSTL

SEQ ID NO: 35523 - protein, 249 aa, Mycobacterium abscessus; identical to SEQ ID NO: 31554

SEQ ID NO: 35524 - protein, 1115 aa, Mycobacterium abscessus
MTTSDAATQQFWLSRLQVINWGVFDGYHSIEFSRRGTLITGSSGSGKSSLLDAISLAFLSSNRRNFNASSDTTAAGSSMGKRTVDKYVRGLWGELKNPGERPKQMFLRGKGGAWSAIAVTYSGTDGRVITGLVLKWLAPGSDTDSSSRYYLIDADADIRDLCNAWASKGYAGSVFEGAGWRGHKSERWYLEQLYAAVGIQGSSAAQQLLGKAKSLKSVGGLEQFVREYMLDEPESMAAISEALGQITPLVDARAALAIAQRQRQTLGDIEQIQQTYASDAAQLATVDVVDHHTVRDYVDQQRLALAGPEIDLLDTEITRLGGECDEIQSRQDILTGERDKLLGRIAAADSNLAPLKSELAHARARAEEVSRRRTAYDSALWDLGHEDDIESAEEFEAMRVESLRAVTRINAELEAGHDAYVMAAGALSTARDQLRAASAEFKRVEHLGTPVPPDEDRMRGEIAAALGLTAKDLPYVCELMDLRPGQERWRRSVEKVLRSTGLCLLVPDQHHRQVLRYVNENPMRGYLQIERVIPSGTPRRAEPGTLADCLRLTNPNHECASAAMNLVAGVGDYVLVDSPDEFSKHRRAVTDQGLRKDGDRRAVKDDRRELRASQYIYQGNAGDKRAALSDDVVEAQQAVSDAEKFIGEMDTKREELRSEVVRWSKLHSQYEYWSQIDTDSAEAAVARLQDQYDAMLEANPDLTGLQQQADSYLDEIKKLSERIGALRKQESEHDSRRTRLLDLLDNLNPREVGGHTRSGIEAYVPQLSSSLDVLEPDAYRLELWRQIEKDQSVLRESVTRSRNELNRILNAYDRDFPDSIPNDSENFDEKIHDYVALCRRIDERDLPAAYERMLRLITEQAPTAVLRLHQLAEEEAHRITDQIDRVNSGLGSVEFNRGTRLTLRAEPKALEAVGELNERARRISGRAVAVSMGDEKAIHDQYQDILQLRNLLAAETPEARQWTRDALDVRNRFVLYCEERDAGTGEPIRTYSNAGANSGGEQEKLMAFCLAGALSFNLANPETGDNRPVFAQLMLDEAFSKSDPQFAQQALSAFRKFGFQLVIVATVQNTTTIQPYIDSVVMVSKPDGPGVRPVASTRTVPIGELGDVRKAVSAR

SEQ ID NO: 35525 - protein, 486 aa, Mycobacterium abscessus; identical to SEQ ID NO: 31485

SEQ ID NO: 35526 - protein, 249 aa, Mycobacterium abscessus; identical to SEQ ID NO: 31486

SEQ ID NO: 35527 - protein, 1115 aa, Mycobacterium abscessus; identical to SEQ ID NO: 31487

SEQ ID NO: 35528 - protein, 486 aa, Mycobacterium abscessus; identical to SEQ ID NO: 31485

SEQ ID NO: 35529 - protein, 249 aa, Mycobacterium abscessus; identical to SEQ ID NO: 31486

SEQ ID NO: 35530 - protein, 1115 aa, Mycobacterium abscessus; identical to SEQ ID NO: 31487

SEQ ID NO: 35531 - protein, 486 aa, Mycobacterium abscessus; identical to SEQ ID NO: 31694

SEQ ID NO: 35532 - protein, 249 aa, Mycobacterium abscessus; identical to SEQ ID NO: 31486

SEQ ID NO: 35533 - protein, 1115 aa, Mycobacterium abscessus; identical to SEQ ID NO: 30763

SEQ ID NO: 35534 - protein, 486 aa, Mycobacterium abscessus; identical to SEQ ID NO: 31694

SEQ ID NO: 35535 - protein, 249 aa, Mycobacterium abscessus; identical to SEQ ID NO: 30762

SEQ ID NO: 35536 - protein, 1115 aa, Mycobacterium abscessus; identical to SEQ ID NO: 30763

SEQ ID NO: 35537 - protein, 486 aa, Mycobacterium abscessus; identical to SEQ ID NO: 31556

SEQ ID NO: 35538 - protein, 249 aa, Mycobacterium abscessus; identical to SEQ ID NO: 31486

SEQ ID NO: 35539 - protein, 1115 aa, Mycobacterium abscessus; identical to SEQ ID NO: 31838

SEQ ID NO: 35540 - protein, 486 aa, Mycobacterium abscessus; identical to SEQ ID NO: 31485

SEQ ID NO: 35541 - protein, 249 aa, Mycobacterium abscessus; identical to SEQ ID NO: 31486

SEQ ID NO: 35542 - protein, 1115 aa, Mycobacterium abscessus; identical to SEQ ID NO: 31487

SEQ ID NO: 35543 - protein, 486 aa, Mycobacterium abscessus; identical to SEQ ID NO: 31556

SEQ ID NO: 35544 - protein, 249 aa, Mycobacterium abscessus; identical to SEQ ID NO: 31486

SEQ ID NO: 35545 - protein, 1115 aa, Mycobacterium abscessus; identical to SEQ ID NO: 31487

SEQ ID NO: 35546 - protein, 486 aa, Mycobacterium abscessus; identical to SEQ ID NO: 31485

SEQ ID NO: 35547 - protein, 249 aa, Mycobacterium abscessus; identical to SEQ ID NO: 31486

SEQ ID NO: 35548 - protein, 1115 aa, Mycobacterium abscessus; identical to SEQ ID NO: 31487

SEQ ID NO: 35549 - protein, 486 aa, Mycobacterium abscessus; identical to SEQ ID NO: 31485

SEQ ID NO: 35550 - protein, 249 aa, Mycobacterium abscessus; identical to SEQ ID NO: 31486

SEQ ID NO: 35551 - protein, 1115 aa, Mycobacterium abscessus; identical to SEQ ID NO: 31487

SEQ ID NO: 35552 - protein, 486 aa, Mycobacterium abscessus; identical to SEQ ID NO: 31694

SEQ ID NO: 35553 - protein, 249 aa, Mycobacterium abscessus; identical to SEQ ID NO: 31486

SEQ ID NO: 35554 - protein, 1115 aa, Mycobacterium abscessus; identical to SEQ ID NO: 30763

SEQ ID NO: 35555 - protein, 486 aa, Mycobacterium abscessus; identical to SEQ ID NO: 31485

SEQ ID NO: 35556 - protein, 249 aa, Mycobacterium abscessus; identical to SEQ ID NO: 31486

SEQ ID NO: 35557 - protein, 1115 aa, Mycobacterium abscessus; identical to SEQ ID NO: 31487

SEQ ID NO: 35558 - protein, 486 aa, Mycobacterium abscessus; identical to SEQ ID NO: 30761

SEQ ID NO: 35559 - protein, 249 aa, Mycobacterium abscessus; identical to SEQ ID NO: 30762

SEQ ID NO: 35560 - protein, 1115 aa, Mycobacterium abscessus; identical to SEQ ID NO: 30763

SEQ ID NO: 35561 - protein, 486 aa, Mycobacterium abscessus; identical to SEQ ID NO: 31694

SEQ ID NO: 35562 - protein, 249 aa, Mycobacterium abscessus; identical to SEQ ID NO: 31486

SEQ ID NO: 35563 - protein, 1115 aa, Mycobacterium abscessus; identical to SEQ ID NO: 30763

SEQ ID NO: 35564 - protein, 486 aa, Mycobacterium abscessus; identical to SEQ ID NO: 31485

SEQ ID NO: 35565 - protein, 249 aa, Mycobacterium abscessus; identical to SEQ ID NO: 31486

SEQ ID NO: 35566 - protein, 1115 aa, Mycobacterium abscessus; identical to SEQ ID NO: 31487

SEQ ID NO: 35567 - protein, 486 aa, Mycobacterium abscessus; identical to SEQ ID NO: 31694

SEQ ID NO: 35568 - protein, 249 aa, Mycobacterium abscessus; identical to SEQ ID NO: 30762

SEQ ID NO: 35569 - protein, 1115 aa, Mycobacterium abscessus; identical to SEQ ID NO: 30763

SEQ ID NO: 35570 - protein, 486 aa, Mycobacterium abscessus; identical to SEQ ID NO: 35522

SEQ ID NO: 35571 - protein, 249 aa, Mycobacterium abscessus; identical to SEQ ID NO: 31554

SEQ ID NO: 35572 - protein, 1115 aa, Mycobacterium abscessus; identical to SEQ ID NO: 35524

SEQ ID NO: 35573 - protein, 486 aa, Mycobacterium abscessus; identical to SEQ ID NO: 31485

SEQ ID NO: 35574 - protein, 249 aa, Mycobacterium abscessus; identical to SEQ ID NO: 31486

SEQ ID NO: 35575 - protein, 1115 aa, Mycobacterium abscessus; identical to SEQ ID NO: 31487

SEQ ID NO: 35576 - protein, 486 aa, Mycobacterium abscessus; identical to SEQ ID NO: 31485

SEQ ID NO: 35577 - protein, 249 aa, Mycobacterium abscessus; identical to SEQ ID NO: 31486

SEQ ID NO: 35578 - protein, 1115 aa, Mycobacterium abscessus; identical to SEQ ID NO: 31487

SEQ ID NO: 35579 - protein, 486 aa, Mycobacterium abscessus; identical to SEQ ID NO: 31694

SEQ ID NO: 35580 - protein, 249 aa, Mycobacterium abscessus; identical to SEQ ID NO: 30762

SEQ ID NO: 35581 - protein, 1115 aa, Mycobacterium abscessus; identical to SEQ ID NO: 30763

SEQ ID NO: 35582 - protein, 486 aa, Mycobacterium abscessus; identical to SEQ ID NO: 31485

SEQ ID NO: 35583 - protein, 249 aa, Mycobacterium abscessus; identical to SEQ ID NO: 31486

SEQ ID NO: 35584 - protein, 1115 aa, Mycobacterium abscessus; identical to SEQ ID NO: 31487

SEQ ID NO: 35585 - protein, 486 aa, Mycobacterium abscessus; identical to SEQ ID NO: 31485

SEQ ID NO: 35586 - protein, 249 aa, Mycobacterium abscessus; identical to SEQ ID NO: 31486

SEQ ID NO: 35587 - protein, 1115 aa, Mycobacterium abscessus; identical to SEQ ID NO: 31487

SEQ ID NO: 35588 - protein, 486 aa, Mycobacterium abscessus; identical to SEQ ID NO: 35522

SEQ ID NO: 35589 - protein, 249 aa, Mycobacterium abscessus; identical to SEQ ID NO: 31554

SEQ ID NO: 35590 - protein, 1115 aa, Mycobacterium abscessus; identical to SEQ ID NO: 35524

SEQ ID NO: 35591 - protein, 486 aa, Mycobacterium abscessus; identical to SEQ ID NO: 31485

SEQ ID NO: 35592 - protein, 249 aa, Mycobacterium abscessus; identical to SEQ ID NO: 31486

SEQ ID NO: 35593 - protein, 1115 aa, Mycobacterium abscessus; identical to SEQ ID NO: 31487

SEQ ID NO: 35594 - protein, 486 aa, Mycobacterium abscessus; identical to SEQ ID NO: 31694

SEQ ID NO: 35595 - protein, 249 aa, Mycobacterium abscessus; identical to SEQ ID NO: 30762

SEQ ID NO: 35596 - protein, 1115 aa, Mycobacterium abscessus; identical to SEQ ID NO: 30763

SEQ ID NO: 35597 - protein, 486 aa, Mycobacterium abscessus; identical to SEQ ID NO: 31485

SEQ ID NO: 35598 - protein, 249 aa, Mycobacterium abscessus; identical to SEQ ID NO: 31486

SEQ ID NO: 35599 - protein, 1115 aa, Mycobacterium abscessus; identical to SEQ ID NO: 31487

SEQ ID NO: 35600 - protein, 486 aa, Mycobacterium abscessus; identical to SEQ ID NO: 30761

SEQ ID NO: 35601 - protein, 249 aa, Mycobacterium abscessus; identical to SEQ ID NO: 30762

SEQ ID NO: 35602 - protein, 1115 aa, Mycobacterium abscessus; identical to SEQ ID NO: 30763

SEQ ID NO: 35603 - protein, 486 aa, Mycobacterium abscessus; identical to SEQ ID NO: 31485

SEQ ID NO: 35604 - protein, 249 aa, Mycobacterium abscessus; identical to SEQ ID NO: 31486

SEQ ID NO: 35605 - protein, 1115 aa, Mycobacterium abscessus; identical to SEQ ID NO: 31487

SEQ ID NO: 35606 - protein, 486 aa, Mycobacterium abscessus; identical to SEQ ID NO: 31694

SEQ ID NO: 35607 - protein, 249 aa, Mycobacterium abscessus; identical to SEQ ID NO: 31486

SEQ ID NO: 35608 - protein, 1115 aa, Mycobacterium abscessus; identical to SEQ ID NO: 30763

SEQ ID NO: 35609 - protein, 486 aa, Mycobacterium abscessus; identical to SEQ ID NO: 31485

SEQ ID NO: 35610 - protein, 249 aa, Mycobacterium abscessus; identical to SEQ ID NO: 31486

SEQ ID NO: 35611 - protein, 1115 aa, Mycobacterium abscessus; identical to SEQ ID NO: 31487

SEQ ID NO: 35612 - protein, 486 aa, Mycobacterium abscessus; identical to SEQ ID NO: 35522

SEQ ID NO: 35613 - protein, 249 aa, Mycobacterium abscessus; identical to SEQ ID NO: 31554

SEQ ID NO: 35614 - protein, 1115 aa, Mycobacterium abscessus; identical to SEQ ID NO: 35524

SEQ ID NO: 35615 - protein, 486 aa, Mycobacterium abscessus; identical to SEQ ID NO: 31694

SEQ ID NO: 35616 - protein, 249 aa, Mycobacterium abscessus; identical to SEQ ID NO: 30762

SEQ ID NO: 35617 - protein, 1115 aa, Mycobacterium abscessus; identical to SEQ ID NO: 30763

SEQ ID NO: 35618 - protein, 486 aa, Mycobacterium abscessus; identical to SEQ ID NO: 31694

SEQ ID NO: 35619 - protein, 249 aa, Mycobacterium abscessus; identical to SEQ ID NO: 30762

SEQ ID NO: 35620 - protein, 1115 aa, Mycobacterium abscessus; identical to SEQ ID NO: 30763

SEQ ID NO: 35621 - protein, 486 aa, Mycobacterium abscessus; identical to SEQ ID NO: 31694

SEQ ID NO: 35622 - protein, 249 aa, Mycobacterium abscessus; identical to SEQ ID NO: 30762

SEQ ID NO: 35623 - protein, 1115 aa, Mycobacterium abscessus; identical to SEQ ID NO: 30763

SEQ ID NO: 35624 - protein, 486 aa, Mycobacterium abscessus; identical to SEQ ID NO: 31694

SEQ ID NO: 35625 - protein, 249 aa, Mycobacterium abscessus; identical to SEQ ID NO: 31486

SEQ ID NO: 35626 - protein, 1115 aa, Mycobacterium abscessus; identical to SEQ ID NO: 30763

SEQ ID NO: 35627 - protein, 486 aa, Mycobacterium abscessus; identical to SEQ ID NO: 31485

SEQ ID NO: 35628 - protein, 249 aa, Mycobacterium abscessus; identical to SEQ ID NO: 31486

SEQ ID NO: 35629 - protein, 1115 aa, Mycobacterium abscessus; identical to SEQ ID NO: 31487

SEQ ID NO: 35630 - protein, 486 aa, Mycobacterium abscessus; identical to SEQ ID NO: 31694

SEQ ID NO: 35631 - protein, 249 aa, Mycobacterium abscessus; identical to SEQ ID NO: 30762

SEQ ID NO: 35632 - protein, 1115 aa, Mycobacterium abscessus; identical to SEQ ID NO: 30763

SEQ ID NO: 35633 - protein, 486 aa, Mycobacterium abscessus; identical to SEQ ID NO: 31485

SEQ ID NO: 35634 - protein, 249 aa, Mycobacterium abscessus; identical to SEQ ID NO: 31486

SEQ ID NO: 35635 - protein, 1115 aa, Mycobacterium abscessus; identical to SEQ ID NO: 31487

SEQ ID NO: 35636 - protein, 486 aa, Mycobacterium abscessus; identical to SEQ ID NO: 30761

SEQ ID NO: 35637 - protein, 249 aa, Mycobacterium abscessus; identical to SEQ ID NO: 30762

SEQ ID NO: 35638 - protein, 1115 aa, Mycobacterium abscessus; identical to SEQ ID NO: 30763

SEQ ID NO: 35639 - protein, 486 aa, Mycobacterium abscessus; identical to SEQ ID NO: 35522

SEQ ID NO: 35640 - protein, 249 aa, Mycobacterium abscessus; identical to SEQ ID NO: 31554

SEQ ID NO: 35641 - protein, 1115 aa, Mycobacterium abscessus; identical to SEQ ID NO: 35524

SEQ ID NO: 35642 - protein, 486 aa, Mycobacterium abscessus; identical to SEQ ID NO: 31485

SEQ ID NO: 35643 - protein, 249 aa, Mycobacterium abscessus; identical to SEQ ID NO: 31486

SEQ ID NO: 35644 - protein, 1115 aa, Mycobacterium abscessus; identical to SEQ ID NO: 31487

SEQ ID NO: 35645 - protein, 486 aa, Mycobacterium abscessus; identical to SEQ ID NO: 31694

SEQ ID NO: 35646 - protein, 249 aa, Mycobacterium abscessus; identical to SEQ ID NO: 30762

SEQ ID NO: 35647 - protein, 1115 aa, Mycobacterium abscessus; identical to SEQ ID NO: 30763

SEQ ID NO: 35648 - protein, 486 aa, Mycobacterium abscessus; identical to SEQ ID NO: 31485

SEQ ID NO: 35649 - protein, 249 aa, Mycobacterium abscessus; identical to SEQ ID NO: 31486

SEQ ID NO: 35650 - protein, 1115 aa, Mycobacterium abscessus; identical to SEQ ID NO: 31487

SEQ ID NO: 35651 - protein, 348 aa, Mycobacterium abscessus
MARQLDNDPDRLLNDLDERIAELQRQREQVAAGNRPEPNFLDLEDEAKAIGMQMEHVVADIGRYATIQNRITTGLLSELGDSDAEFRDRHHKLFDDYLALDQSREQASYQAFTRMIQDPAAQLRLRRDIDLVAAGLPDLDAGVKDLLRGFLTSVSRQMSEVDRVRQRCAQRIRRFFAAGTAEQSRGFARQLNEAIAAGQALLNVSLTDSQLDCEIPIVTSEAETSLGALGFKIVDPTPPPLAQESVETLDIAGFAALAAQVDVEALAGAVNTALAAGPISLPEALMLVDDAYLGELLVLWTWAQAQPQGQSPVEAEATVQFRSMGGVDRQMRVPLLMFTEPVIEGDLL

SEQ ID NO: 35652 - protein, 240 aa, Mycobacterium abscessus
MTEQPQWQAMNFDALPSVQDLVVDTESSRVPRFDGDASELPDRACWALQNLLKNRYIRKNSDPELWAWTMLYRPGIECRLSELNLRLKVVDGVDTAFTEPVDDPSRWSRRLVRRETLGTYDAILALQLTKLMRVSHDEDAIFSRADLHELFSGVAHSTNTDRAKFEARINGAIGKLVGTSLLNKVGDDEDSFTVNPVITAIMSASLVAELDRKFEELKLAKLATVPAAEDGDIDDDDTNT

SEQ ID NO: 35653 - protein, 1124 aa, Mycobacterium abscessus
MTMTPTPDPPGSVDQFTLLRLQVINWGVFDGYHSVIFAPRGTLIAGRSGSGKSTLLDAISLGFLPSKRRNFNASSDIGQRTVDKYIRGQWGEQRAGTDDPKLMYLRGDGAAWSAVSLTYSSGAGKNVTGLVLKRLAADKISDPVSDYFLIDSAADIKDVCNTWVEKGFASAVLRDAGWRGGGKGNNETWYLSQLYAAIGIRASEAAQQLLGKAKSLKSVGGLERFVREYMLDEPESIKDIAGALAQIDPLVAARKDLEVAQQKHHTLDGIEDAYETFAAESARLDSVTTIDRPMISDFVDHLRKDKCGPEVERLDRELREAGDALDVLDGRKDTALKRLKLLISQEAEIGGGLISVEHALQAARTHAEGVSRNARSYEQLIFEVGYPPADNETDFAELRQLCWERSEQITAELKASSGKYHAAIQKERNAHDRVVFAEAELARVQANGSPIPPSESEMRARIVAAIGVSAKQLPYVAELMEIGHGKQRWQVAAEKALRSAGLNLLVPQRYFRDVLSFAHANNMRGYLNLHEVVPGVGAAEPRRDTLASMLQLADPSHECAASALAVISNAGDFVCVDAPAEFDQFNRAITDSGLMKIGAGRARKDDRRPPKASEYIFQGDIESKLDALAADVAEAQADQELARAEANDIEADREQQRAQHATALAVYKNFAAFSEIDTATADREVAQLDEQYQEMLKENPDLEKLQQQVEQQQKSYDDIMKEIALLRQTEEKTDNYRTALLDLSDVLQPAAVSDRVRRELEQYAASVFSVLDLLHPKQFRDELAQKVESEQTSLRESLRRSRQRVERIIGQFDERFRESIPNDSDDIDAKAADYVELWQRIENRDLPAAYDRMLKHITRDAPTALLNLRTKADNAAALIQAQIERVNTGLSSVEFNTGTRLKLRAPERNLAAVRELNERCTRISQRAAAVAAGDKDAIPAQYTEILELRTLLGSNEPEHRQWTRDALDVRHRFTMYCDELDANDPDTVIRSHSNSEDNSGGEQEKLMAFCLAGALSYNLADPESGDNRPVFAQLMLDEAFSKSDPVFARQALSAFGRFGFQLVIVATLQNSTVIEPHVGGVVLVSKPDRPGVRPVAAVQAQSIEEFVPFRRGLARQPNKASDHL

SEQ ID NO: 35654 - protein, 327 aa, Mycobacterium abscessus
MYTLPHKLVVPDLAAALAVAPAAARRYRRAMTRHQQAIANSSVRWTALDEISGDSLSRIEALDDHDWALALELAEYLTSTPVTGMMVRQITIDGLHSKWIEQHAVLVLDMICPPKIELPDGSPLTKLRHILGLRAKDLRINVALRCPQLRAVAAGMERFSTTISTLNDSALAPQNLLIIENDQPGYTLTRDIPNLAVLHGLGDSVTSLTPLRWFQTASQVLYWGDIDRAGLQAVASLRRAGIPAHSLLMDCITLDTHEDQAHKATKTQATDQNVPDGLTADERLLYERLNTHFQQTGEEWQLEQEHLPTQIVESALVSACQGPGNRK

SEQ ID NO: 35655 - protein, 486 aa, Mycobacterium abscessus; identical to SEQ ID NO: 31694

SEQ ID NO: 35656 - protein, 249 aa, Mycobacterium abscessus; identical to SEQ ID NO: 30762

SEQ ID NO: 35657 - protein, 1115 aa, Mycobacterium abscessus; identical to SEQ ID NO: 30763

SEQ ID NO: 35658 - protein, 486 aa, Mycobacterium abscessus; identical to SEQ ID NO: 31694

SEQ ID NO: 35659 - protein, 249 aa, Mycobacterium abscessus; identical to SEQ ID NO: 30762

SEQ ID NO: 35660 - protein, 1115 aa, Mycobacterium abscessus; identical to SEQ ID NO: 30763

SEQ ID NO: 35661 - protein, 486 aa, Mycobacterium abscessus; identical to SEQ ID NO: 35522

SEQ ID NO: 35662 - protein, 249 aa, Mycobacterium abscessus; identical to SEQ ID NO: 31554

SEQ ID NO: 35663 - protein, 1115 aa, Mycobacterium abscessus; identical to SEQ ID NO: 35524

SEQ ID NO: 35664 - protein, 486 aa, Mycobacterium abscessus; identical to SEQ ID NO: 31485

SEQ ID NO: 35665 - protein, 249 aa, Mycobacterium abscessus; identical to SEQ ID NO: 31486

SEQ ID NO: 35666 - protein, 1115 aa, Mycobacterium abscessus; identical to SEQ ID NO: 31487

SEQ ID NO: 35667 - protein, 486 aa, Mycobacterium abscessus; identical to SEQ ID NO: 31485

SEQ ID NO: 35668 - protein, 249 aa, Mycobacterium abscessus; identical to SEQ ID NO: 31486

SEQ ID NO: 35669 - protein, 1115 aa, Mycobacterium abscessus; identical to SEQ ID NO: 31487

SEQ ID NO: 35670 - protein, 486 aa, Mycobacterium abscessus; identical to SEQ ID NO: 35522

SEQ ID NO: 35671 - protein, 249 aa, Mycobacterium abscessus; identical to SEQ ID NO: 31554

SEQ ID NO: 35672 - protein, 1115 aa, Mycobacterium abscessus; identical to SEQ ID NO: 35524

SEQ ID NO: 35673 - protein, 486 aa, Mycobacterium abscessus; identical to SEQ ID NO: 35522

SEQ ID NO: 35674 - protein, 249 aa, Mycobacterium abscessus; identical to SEQ ID NO: 31554

SEQ ID NO: 35675 - protein, 1115 aa, Mycobacterium abscessus; identical to SEQ ID NO: 35524

SEQ ID NO: 35676 - protein, 486 aa, Mycobacterium abscessus; identical to SEQ ID NO: 31694

SEQ ID NO: 35677 - protein, 249 aa, Mycobacterium abscessus; identical to SEQ ID NO: 30762

SEQ ID NO: 35678 - protein, 1115 aa, Mycobacterium abscessus; identical to SEQ ID NO: 30763

SEQ ID NO: 35679 - protein, 486 aa, Mycobacterium abscessus; identical to SEQ ID NO: 35522

SEQ ID NO: 35680 - protein, 249 aa, Mycobacterium abscessus; identical to SEQ ID NO: 31554

SEQ ID NO: 35681 - protein, 1115 aa, Mycobacterium abscessus; identical to SEQ ID NO: 35524

SEQ ID NO: 35682 - protein, 486 aa, Mycobacterium abscessus; identical to SEQ ID NO: 31485

SEQ ID NO: 35683 - protein, 249 aa, Mycobacterium abscessus; identical to SEQ ID NO: 31486

SEQ ID NO: 35684 - protein, 1115 aa, Mycobacterium abscessus; identical to SEQ ID NO: 31487

SEQ ID NO: 35685 - protein, 486 aa, Mycobacterium abscessus; identical to SEQ ID NO: 31556

SEQ ID NO: 35686 - protein, 249 aa, Mycobacterium abscessus; identical to SEQ ID NO: 31486

SEQ ID NO: 35687 - protein, 1115 aa, Mycobacterium abscessus; identical to SEQ ID NO: 31838

SEQ ID NO: 35688 - protein, 486 aa, Mycobacterium abscessus; identical to SEQ ID NO: 31485

SEQ ID NO: 35689 - protein, 249 aa, Mycobacterium abscessus; identical to SEQ ID NO: 31486

SEQ ID NO: 35690 - protein, 1115 aa, Mycobacterium abscessus; identical to SEQ ID NO: 31487

SEQ ID NO: 35691 - protein, 486 aa, Mycobacterium abscessus; identical to SEQ ID NO: 31694

SEQ ID NO: 35692 - protein, 249 aa, Mycobacterium abscessus; identical to SEQ ID NO: 30762

SEQ ID NO: 35693 - protein, 1115 aa, Mycobacterium abscessus; identical to SEQ ID NO: 30763

SEQ ID NO: 35694 - protein, 486 aa, Mycobacterium abscessus; identical to SEQ ID NO: 31485

SEQ ID NO: 35695 - protein, 249 aa, Mycobacterium abscessus; identical to SEQ ID NO: 31486

SEQ ID NO: 35696 - protein, 1115 aa, Mycobacterium abscessus; identical to SEQ ID NO: 31487

SEQ ID NO: 35697 - protein, 486 aa, Mycobacterium abscessus; identical to SEQ ID NO: 35522

SEQ ID NO: 35698 - protein, 249 aa, Mycobacterium abscessus; identical to SEQ ID NO: 31554

SEQ ID NO: 35699 - protein, 1115 aa, Mycobacterium abscessus; identical to SEQ ID NO: 35524

SEQ ID NO: 35700 - protein, 486 aa, Mycobacterium abscessus
MNDLTVEELFAHNDDVQKSRAVRLLAAKNLAPYITLMERHLDRSAKVSEPQLVAKLDRDLSAVGLGEQSGLALIKSWASDGWLHRASDGTGPDAENVCSLTEDARSALAFVRRLRRADTVATGGSIAGIAAGLKRVATQLDGDPSRLRADIEAQIAELQTQLHAIDDGYRPEPDIVDLEDETRAIAYQMEQVITDIVRYGSMQNEITAGLIDAAEDSDSGFRDRARRMFADYDALFDSRERASYSAFTRTIQDPDQRAALRSDIACVAEGLPDLDPGLREVMRNFFKLVSQQIAEVSRIEQRCAQRIRRFFAAGTTEQARGRARQLNDALAAGHALLKVSTADSPIDAELPIGRSAAAAIGALSFTIKDTGPPVLAQDAPSGPLDLSGFSALATQVDMAALADTVNSAIAGGPVSLPDMISHVEAPYLGDVIVLWSLALKQDNTADRESVKVKFRSLDGQDRVMEVPQLMFREPVLATLEEEGSTL

SEQ ID NO: 35701 - protein, 249 aa, Mycobacterium abscessus; identical to SEQ ID NO: 30762

SEQ ID NO: 35702 - protein, 1115 aa, Mycobacterium abscessus; identical to SEQ ID NO: 30763

SEQ ID NO: 35703 - protein, 486 aa, Mycobacterium abscessus; identical to SEQ ID NO: 31485

SEQ ID NO: 35704 - protein, 249 aa, Mycobacterium abscessus; identical to SEQ ID NO: 31486

SEQ ID NO: 35705 - protein, 1115 aa, Mycobacterium abscessus; identical to SEQ ID NO: 31487

SEQ ID NO: 35706 - protein, 486 aa, Mycobacterium abscessus; identical to SEQ ID NO: 31485

SEQ ID NO: 35707 - protein, 249 aa, Mycobacterium abscessus; identical to SEQ ID NO: 31486

SEQ ID NO: 35708 - protein, 1115 aa, Mycobacterium abscessus; identical to SEQ ID NO: 31487

SEQ ID NO: 35709 - protein, 486 aa, Mycobacterium abscessus; identical to SEQ ID NO: 31485

SEQ ID NO: 35710 - protein, 249 aa, Mycobacterium abscessus; identical to SEQ ID NO: 31486

SEQ ID NO: 35711 - protein, 1115 aa, Mycobacterium abscessus; identical to SEQ ID NO: 31487

SEQ ID NO: 35712 - protein, 486 aa, Mycobacterium abscessus; identical to SEQ ID NO: 31485

SEQ ID NO: 35713 - protein, 249 aa, Mycobacterium abscessus; identical to SEQ ID NO: 31486

SEQ ID NO: 35714 - protein, 1115 aa, Mycobacterium abscessus; identical to SEQ ID NO: 31487

SEQ ID NO: 35715 - protein, 486 aa, Mycobacterium abscessus; identical to SEQ ID NO: 31485

SEQ ID NO: 35716 - protein, 249 aa, Mycobacterium abscessus; identical to SEQ ID NO: 31486

SEQ ID NO: 35717 - protein, 1115 aa, Mycobacterium abscessus; identical to SEQ ID NO: 31487

SEQ ID NO: 35718 - protein, 486 aa, Mycobacterium abscessus; identical to SEQ ID NO: 31485

SEQ ID NO: 35719 - protein, 249 aa, Mycobacterium abscessus; identical to SEQ ID NO: 31486

SEQ ID NO: 35720 - protein, 1115 aa, Mycobacterium abscessus; identical to SEQ ID NO: 31487

SEQ ID NO: 35721 - protein, 486 aa, Mycobacterium abscessus; identical to SEQ ID NO: 31485

SEQ ID NO: 35722 - protein, 249 aa, Mycobacterium abscessus; identical to SEQ ID NO: 31486

SEQ ID NO: 35723 - protein, 1115 aa, Mycobacterium abscessus; identical to SEQ ID NO: 31487

SEQ ID NO: 35724 - protein, 486 aa, Mycobacterium abscessus; identical to SEQ ID NO: 31485

SEQ ID NO: 35725 - protein, 249 aa, Mycobacterium abscessus; identical to SEQ ID NO: 31486

SEQ ID NO: 35726 - protein, 1115 aa, Mycobacterium abscessus; identical to SEQ ID NO: 31487

SEQ ID NO: 35727 - protein, 486 aa, Mycobacterium abscessus; identical to SEQ ID NO: 31485

SEQ ID NO: 35728 - protein, 249 aa, Mycobacterium abscessus; identical to SEQ ID NO: 31486

SEQ ID NO: 35729 - protein, 1115 aa, Mycobacterium abscessus; identical to SEQ ID NO: 31487

SEQ ID NO: 35730 - protein, 486 aa, Mycobacterium abscessus; identical to SEQ ID NO: 31485

SEQ ID NO: 35731 - protein, 249 aa, Mycobacterium abscessus
MTTQASGTALGNINFDDLPGVEPDASAPRTAKGPRFDGDTSELPDKACWALQNLVARRYLSKDGQPELWASMIEHRKVLAARLSELDLRLRVFDDLEVAYAEPAPLENPSVYGARVLRREPLGTYASIVALHLAKIARTAHDEHVLVSRDDIHELFANVSHDIDRDEAMLRDRVDEAIKRLSKAEILQRTRDDEHSYTISPVINALMSAQMIEALQRQYEQLQRGGAAPEDADGADPTDEVVGETDDDE

SEQ ID NO: 35732 - protein, 1115 aa, Mycobacterium abscessus; identical to SEQ ID NO: 31487

SEQ ID NO: 35733 - protein, 486 aa, Mycobacterium abscessus; identical to SEQ ID NO: 31485

SEQ ID NO: 35734 - protein, 249 aa, Mycobacterium abscessus; identical to SEQ ID NO: 31486

SEQ ID NO: 35735 - protein, 1115 aa, Mycobacterium abscessus; identical to SEQ ID NO: 31487

SEQ ID NO: 35736 - protein, 486 aa, Mycobacterium abscessus; identical to SEQ ID NO: 31694

SEQ ID NO: 35737 - protein, 249 aa, Mycobacterium abscessus; identical to SEQ ID NO: 30762

SEQ ID NO: 35738 - protein, 1115 aa, Mycobacterium abscessus; identical to SEQ ID NO: 30763

SEQ ID NO: 35739 - protein, 486 aa, Mycobacterium abscessus; identical to SEQ ID NO: 31485

SEQ ID NO: 35740 - protein, 249 aa, Mycobacterium abscessus; identical to SEQ ID NO: 31486

SEQ ID NO: 35741 - protein, 1115 aa, Mycobacterium abscessus; identical to SEQ ID NO: 31487

SEQ ID NO: 35742 - protein, 486 aa, Mycobacterium abscessus; identical to SEQ ID NO: 31694

SEQ ID NO: 35743 - protein, 249 aa, Mycobacterium abscessus; identical to SEQ ID NO: 31486

SEQ ID NO: 35744 - protein, 1115 aa, Mycobacterium abscessus; identical to SEQ ID NO: 30763

SEQ ID NO: 35745 - protein, 486 aa, Mycobacterium abscessus; identical to SEQ ID NO: 31485

SEQ ID NO: 35746 - protein, 249 aa, Mycobacterium abscessus; identical to SEQ ID NO: 31486

SEQ ID NO: 35747 - protein, 1115 aa, Mycobacterium abscessus; identical to SEQ ID NO: 31487

SEQ ID NO: 35748 - protein, 486 aa, Mycobacterium abscessus; identical to SEQ ID NO: 31485

SEQ ID NO: 35749 - protein, 249 aa, Mycobacterium abscessus; identical to SEQ ID NO: 31486

SEQ ID NO: 35750 - protein, 1115 aa, Mycobacterium abscessus; identical to SEQ ID NO: 31487

SEQ ID NO: 35751 - protein, 486 aa, Mycobacterium abscessus; identical to SEQ ID NO: 31485

SEQ ID NO: 35752 - protein, 249 aa, Mycobacterium abscessus; identical to SEQ ID NO: 31486

SEQ ID NO: 35753 - protein, 1115 aa, Mycobacterium abscessus; identical to SEQ ID NO: 31487

SEQ ID NO: 35754 - protein, 486 aa, Mycobacterium abscessus; identical to SEQ ID NO: 31485

SEQ ID NO: 35755 - protein, 249 aa, Mycobacterium abscessus; identical to SEQ ID NO: 31486

SEQ ID NO: 35756 - protein, 1115 aa, Mycobacterium abscessus; identical to SEQ ID NO: 31487

SEQ ID NO: 35757 - protein, 486 aa, Mycobacterium abscessus; identical to SEQ ID NO: 31485

SEQ ID NO: 35758 - protein, 249 aa, Mycobacterium abscessus; identical to SEQ ID NO: 31486

SEQ ID NO: 35759 - protein, 1115 aa, Mycobacterium abscessus; identical to SEQ ID NO: 31487

SEQ ID NO: 35760 - protein, 486 aa, Mycobacterium abscessus; identical to SEQ ID NO: 31485

SEQ ID NO: 35761 - protein, 249 aa, Mycobacterium abscessus; identical to SEQ ID NO: 31486

SEQ ID NO: 35762 - protein, 1115 aa, Mycobacterium abscessus; identical to SEQ ID NO: 31487

SEQ ID NO: 35763 - protein, 486 aa, Mycobacterium abscessus; identical to SEQ ID NO: 31485

SEQ ID NO: 35764 - protein, 249 aa, Mycobacterium abscessus; identical to SEQ ID NO: 31486

SEQ ID NO: 35765 - protein, 1115 aa, Mycobacterium abscessus; identical to SEQ ID NO: 31487

SEQ ID NO: 35766 - protein, 486 aa, Mycobacterium abscessus; identical to SEQ ID NO: 31485

SEQ ID NO: 35767 - protein, 249 aa, Mycobacterium abscessus; identical to SEQ ID NO: 31486

SEQ ID NO: 35768 - protein, 1115 aa, Mycobacterium abscessus; identical to SEQ ID NO: 31487

SEQ ID NO: 35769 - protein, 486 aa, Mycobacterium abscessus; identical to SEQ ID NO: 31485

SEQ ID NO: 35770 - protein, 249 aa, Mycobacterium abscessus; identical to SEQ ID NO: 31486

SEQ ID NO: 35771 - protein, 1111 aa, Mycobacterium abscessus
MTTSDAATQQFWLSRLQVINWGVFDGYHSIEFSRRGTLITGSSGSGKSSLLDAISLAFLSSNRRNFNASSDTTAAGSSMGKRTVDKYVRGLWGELKNPGERPKQMFLRGKGGAWSAIAVTYSGTDGRVITGLVLKWLAPGSDSDSSSRYYLIDADADIRDLCNAWASKGYAGSVFEGAGWRGHKSERWYLEQLYAAVGIQGSSAAQQLLGKAKSLKSVGGLEQFVREYMLDEPESMAAISEALGQITPLVDARAALAIAQRQRQTLGDIEQIQQTYASDAAQLATVDVVDHHTVRDYVDQQRLALAGPEIDLLDTEITRLGGECDEIQSRQDILTGERDKLLGRIAAADSNLAPLKSELAHARARAEEVSRRRTAYDSALWDLGHEDDIESAEEFEAMRVESLRAVTRINAELEAGHDAYVMAAGALSTARDQLRAASAEFKRVEHLGTPVPPDEDRMRGEIAAALGLTAKDLPYVCELMDLRPGQERWRKSVEKVLRSTGLCLLVPDQHHRQVLRYVNENPMRGYLQMERVIPSGTPRRAEPGTLADCLRLTNPNHECASAAMNLVAGVGDYVLVDSPDEFSKHRRAVTDQGLRKDGDRRAVKDDRRELRASQYIYQGNAGDKRAALSDDVVEAQQAVSDAEKFIGEMDTKREELRSEVVRWSKLHSQYEYWSQIDTDSAEAAVARLQDQYDAMLEANPDLTGLQQQADSYLDEIKRLSERIGALRKQESEHDSRRTRLLDLLDNLNPREVGGHTRSGIEAYVPQLSSSLDVLEPDAYRLELWRQIEKDQSVLRESVTRSRNELNRILNAYDRDFPDSIPNDSENFDEKIHDYVALCRRIDERDLPAAYERMLRLITEQAPTAVLRLHQLAEEEAHRITDQIDRVNSGLGSVEFNRGTRLTLRAEPKALEAVGELNERARRISGRAVAVSMGDEKAIHDQYQDILQLRNLLAAETPEARQWTRDALDVRNRFVLYCEERDARTGEPIRTYSNAGANSGGEQEKLMAFCLAGALSFNLANPETGDNRPVFAQLMLDEAFSKSDPQFAQQALSAFRKFGFQLVIVATVQNTTTIQPYIDSVVMVSKPDGPGGVRLLRRARCRSVNSVTYARP

SEQ ID NO: 35772 - protein, 486 aa, Mycobacterium abscessus; identical to SEQ ID NO: 31694

SEQ ID NO: 35773 - protein, 249 aa, Mycobacterium abscessus; identical to SEQ ID NO: 30762

SEQ ID NO: 35774 - protein, 1115 aa, Mycobacterium abscessus; identical to SEQ ID NO: 30763

SEQ ID NO: 35775 - protein, 486 aa, Mycobacterium abscessus; identical to SEQ ID NO: 31485

SEQ ID NO: 35776 - protein, 249 aa, Mycobacterium abscessus; identical to SEQ ID NO: 31486

SEQ ID NO: 35777 - protein, 1115 aa, Mycobacterium abscessus; identical to SEQ ID NO: 31487

SEQ ID NO: 35778 - protein, 486 aa, Mycobacterium abscessus; identical to SEQ ID NO: 31694

SEQ ID NO: 35779 - protein, 249 aa, Mycobacterium abscessus; identical to SEQ ID NO: 30762

SEQ ID NO: 35780 - protein, 1115 aa, Mycobacterium abscessus; identical to SEQ ID NO: 30763

SEQ ID NO: 35781 - protein, 486 aa, Mycobacterium abscessus; identical to SEQ ID NO: 31694

SEQ ID NO: 35782 - protein, 249 aa, Mycobacterium abscessus; identical to SEQ ID NO: 30762

SEQ ID NO: 35783 - protein, 1115 aa, Mycobacterium abscessus; identical to SEQ ID NO: 30763

SEQ ID NO: 35784 - protein, 486 aa, Mycobacterium abscessus; identical to SEQ ID NO: 31485

SEQ ID NO: 35785 - protein, 249 aa, Mycobacterium abscessus; identical to SEQ ID NO: 31486

SEQ ID NO: 35786 - protein, 1115 aa, Mycobacterium abscessus; identical to SEQ ID NO: 31487

SEQ ID NO: 35787 - protein, 486 aa, Mycobacterium abscessus; identical to SEQ ID NO: 30761

SEQ ID NO: 35788 - protein, 249 aa, Mycobacterium abscessus; identical to SEQ ID NO: 30762

SEQ ID NO: 35789 - protein, 1115 aa, Mycobacterium abscessus; identical to SEQ ID NO: 30763

SEQ ID NO: 35790 - protein, 486 aa, Mycobacterium abscessus; identical to SEQ ID NO: 31485

SEQ ID NO: 35791 - protein, 249 aa, Mycobacterium abscessus; identical to SEQ ID NO: 31486

SEQ ID NO: 35792 - protein, 1115 aa, Mycobacterium abscessus; identical to SEQ ID NO: 31487

SEQ ID NO: 35793 - protein, 486 aa, Mycobacterium abscessus; identical to SEQ ID NO: 31485

SEQ ID NO: 35794 - protein, 249 aa, Mycobacterium abscessus; identical to SEQ ID NO: 31486

SEQ ID NO: 35795 - protein, 1115 aa, Mycobacterium abscessus; identical to SEQ ID NO: 31487

SEQ ID NO: 35796 - protein, 486 aa, Mycobacterium abscessus; identical to SEQ ID NO: 31694

SEQ ID NO: 35797 - protein, 249 aa, Mycobacterium abscessus; identical to SEQ ID NO: 31486

SEQ ID NO: 35798 - protein, 1115 aa, Mycobacterium abscessus; identical to SEQ ID NO: 30763

SEQ ID NO: 35799 - protein, 486 aa, Mycobacterium abscessus; identical to SEQ ID NO: 31485

SEQ ID NO: 35800 - protein, 249 aa, Mycobacterium abscessus; identical to SEQ ID NO: 31486

SEQ ID NO: 35801 - protein, 1115 aa, Mycobacterium abscessus; identical to SEQ ID NO: 31487

SEQ ID NO: 35802 - protein, 486 aa, Mycobacterium abscessus; identical to SEQ ID NO: 31485

SEQ ID NO: 35803 - protein, 249 aa, Mycobacterium abscessus; identical to SEQ ID NO: 31486

SEQ ID NO: 35804 - protein, 1115 aa, Mycobacterium abscessus; identical to SEQ ID NO: 31487

SEQ ID NO: 35805 - protein, 486 aa, Mycobacterium abscessus; identical to SEQ ID NO: 31485

SEQ ID NO: 35806 - protein, 249 aa, Mycobacterium abscessus; identical to SEQ ID NO: 31486

SEQ ID NO: 35807 - protein, 1115 aa, Mycobacterium abscessus; identical to SEQ ID NO: 31487

SEQ ID NO: 35808 - protein, 486 aa, Mycobacterium abscessus; identical to SEQ ID NO: 31694

SEQ ID NO: 35809 - protein, 249 aa, Mycobacterium abscessus; identical to SEQ ID NO: 30762

SEQ ID NO: 35810 - protein, 1115 aa, Mycobacterium abscessus; identical to SEQ ID NO: 30763

SEQ ID NO: 35811 - protein, 486 aa, Mycobacterium abscessus; identical to SEQ ID NO: 31485

SEQ ID NO: 35812 - protein, 249 aa, Mycobacterium abscessus; identical to SEQ ID NO: 31486

SEQ ID NO: 35813 - protein, 1115 aa, Mycobacterium abscessus; identical to SEQ ID NO: 31487

SEQ ID NO: 35814 - protein, 486 aa, Mycobacterium abscessus; identical to SEQ ID NO: 31485

SEQ ID NO: 35815 - protein, 249 aa, Mycobacterium abscessus; identical to SEQ ID NO: 31486

SEQ ID NO: 35816 - protein, 1115 aa, Mycobacterium abscessus; identical to SEQ ID NO: 31487

SEQ ID NO: 35817 - protein, 486 aa, Mycobacterium abscessus; identical to SEQ ID NO: 31485

SEQ ID NO: 35818 - protein, 249 aa, Mycobacterium abscessus; identical to SEQ ID NO: 31486

SEQ ID NO: 35819 - protein, 1115 aa, Mycobacterium abscessus; identical to SEQ ID NO: 31487

SEQ ID NO: 35820 - protein, 486 aa, Mycobacterium abscessus; identical to SEQ ID NO: 31485

SEQ ID NO: 35821 - protein, 249 aa, Mycobacterium abscessus; identical to SEQ ID NO: 31486

SEQ ID NO: 35822 - protein, 1115 aa, Mycobacterium abscessus; identical to SEQ ID NO: 31487

SEQ ID NO: 35823 - protein, 486 aa, Mycobacterium abscessus; identical to SEQ ID NO: 31694

SEQ ID NO: 35824 - protein, 249 aa, Mycobacterium abscessus; identical to SEQ ID NO: 31486

SEQ ID NO: 35825 - protein, 1115 aa, Mycobacterium abscessus; identical to SEQ ID NO: 30763

SEQ ID NO: 35826 - protein, 486 aa, Mycobacterium abscessus; identical to SEQ ID NO: 31485

SEQ ID NO: 35827 - protein, 249 aa, Mycobacterium abscessus; identical to SEQ ID NO: 31486

SEQ ID NO: 35828 - protein, 1115 aa, Mycobacterium abscessus; identical to SEQ ID NO: 31487

SEQ ID NO: 35829 - protein, 486 aa, Mycobacterium abscessus; identical to SEQ ID NO: 31694

SEQ ID NO: 35830 - protein, 249 aa, Mycobacterium abscessus; identical to SEQ ID NO: 30762

SEQ ID NO: 35831 - protein, 1115 aa, Mycobacterium abscessus; identical to SEQ ID NO: 30763

SEQ ID NO: 35832 - protein, 486 aa, Mycobacterium abscessus; identical to SEQ ID NO: 35522

SEQ ID NO: 35833 - protein, 249 aa, Mycobacterium abscessus; identical to SEQ ID NO: 31554

SEQ ID NO: 35834 - protein, 1115 aa, Mycobacterium abscessus; identical to SEQ ID NO: 35524

SEQ ID NO: 35835 - protein, 486 aa, Mycobacterium abscessus; identical to SEQ ID NO: 31485

SEQ ID NO: 35836 - protein, 249 aa, Mycobacterium abscessus; identical to SEQ ID NO: 31486

SEQ ID NO: 35837 - protein, 1115 aa, Mycobacterium abscessus; identical to SEQ ID NO: 31487

SEQ ID NO: 35838 - protein, 486 aa, Mycobacterium abscessus; identical to SEQ ID NO: 31694

SEQ ID NO: 35839 - protein, 249 aa, Mycobacterium abscessus; identical to SEQ ID NO: 30762

SEQ ID NO: 35840 - protein, 1115 aa, Mycobacterium abscessus; identical to SEQ ID NO: 30763

SEQ ID NO: 35841 - protein, 486 aa, Mycobacterium abscessus; identical to SEQ ID NO: 31485

SEQ ID NO: 35842 - protein, 249 aa, Mycobacterium abscessus; identical to SEQ ID NO: 31486

SEQ ID NO: 35843 - protein, 1115 aa, Mycobacterium abscessus; identical to SEQ ID NO: 31487

SEQ ID NO: 35844 - protein, 486 aa, Mycobacterium abscessus; identical to SEQ ID NO: 31694

SEQ ID NO: 35845 - protein, 249 aa, Mycobacterium abscessus; identical to SEQ ID NO: 30762

SEQ ID NO: 35846 - protein, 1115 aa, Mycobacterium abscessus; identical to SEQ ID NO: 30763

SEQ ID NO: 35847 - protein, 486 aa, Mycobacterium abscessus; identical to SEQ ID NO: 31485

SEQ ID NO: 35848 - protein, 249 aa, Mycobacterium abscessus; identical to SEQ ID NO: 31486

SEQ ID NO: 35849 - protein, 1115 aa, Mycobacterium abscessus; identical to SEQ ID NO: 31487

SEQ ID NO: 35850 - protein, 486 aa, Mycobacterium abscessus; identical to SEQ ID NO: 31485

SEQ ID NO: 35851 - protein, 249 aa, Mycobacterium abscessus; identical to SEQ ID NO: 31486

SEQ ID NO: 35852 - protein, 1115 aa, Mycobacterium abscessus; identical to SEQ ID NO: 31487

SEQ ID NO: 35853 - protein, 486 aa, Mycobacterium abscessus; identical to SEQ ID NO: 31485

SEQ ID NO: 35854 - protein, 249 aa, Mycobacterium abscessus; identical to SEQ ID NO: 31486

SEQ ID NO: 35855 - protein, 1115 aa, Mycobacterium abscessus; identical to SEQ ID NO: 31487

SEQ ID NO: 35856 - protein, 486 aa, Mycobacterium abscessus; identical to SEQ ID NO: 31694

SEQ ID NO: 35857 - protein, 249 aa, Mycobacterium abscessus; identical to SEQ ID NO: 30762

SEQ ID NO: 35858 - protein, 1115 aa, Mycobacterium abscessus; identical to SEQ ID NO: 30763

SEQ ID NO: 35859 - protein, 486 aa, Mycobacterium abscessus; identical to SEQ ID NO: 31485

SEQ ID NO: 35860 - protein, 249 aa, Mycobacterium abscessus; identical to SEQ ID NO: 31486

SEQ ID NO: 35861 - protein, 1115 aa, Mycobacterium abscessus; identical to SEQ ID NO: 31487

SEQ ID NO: 35862 - protein, 486 aa, Mycobacterium abscessus; identical to SEQ ID NO: 31694

SEQ ID NO: 35863 - protein, 249 aa, Mycobacterium abscessus; identical to SEQ ID NO: 31486

SEQ ID NO: 35864 - protein, 1115 aa, Mycobacterium abscessus; identical to SEQ ID NO: 30763

SEQ ID NO: 35865 - protein, 486 aa, Mycobacterium abscessus; identical to SEQ ID NO: 31485

SEQ ID NO: 35866 - protein, 249 aa, Mycobacterium abscessus; identical to SEQ ID NO: 31486

SEQ ID NO: 35867 - protein, 1115 aa, Mycobacterium abscessus; identical to SEQ ID NO: 31487

SEQ ID NO: 35868 - protein, 486 aa, Mycobacterium abscessus; identical to SEQ ID NO: 31694

SEQ ID NO: 35869 - protein, 249 aa, Mycobacterium abscessus; identical to SEQ ID NO: 31486

SEQ ID NO: 35870 - protein, 1115 aa, Mycobacterium abscessus; identical to SEQ ID NO: 30763

SEQ ID NO: 35871 - protein, 486 aa, Mycobacterium abscessus; identical to SEQ ID NO: 31694

SEQ ID NO: 35872 - protein, 249 aa, Mycobacterium abscessus; identical to SEQ ID NO: 31486

SEQ ID NO: 35873 - protein, 1115 aa, Mycobacterium abscessus; identical to SEQ ID NO: 30763

SEQ ID NO: 35874 - protein, 486 aa, Mycobacterium abscessus; identical to SEQ ID NO: 31485

SEQ ID NO: 35875 - protein, 249 aa, Mycobacterium abscessus; identical to SEQ ID NO: 31486

SEQ ID NO: 35876 - protein, 1115 aa, Mycobacterium abscessus; identical to SEQ ID NO: 31487

SEQ ID NO: 35877 - protein, 486 aa, Mycobacterium abscessus; identical to SEQ ID NO: 35522

SEQ ID NO: 35878 - protein, 249 aa, Mycobacterium abscessus; identical to SEQ ID NO: 31554

SEQ ID NO: 35879 - protein, 1115 aa, Mycobacterium abscessus
MTTSDAATQQFWLSRLQVINWGVFDGYHSIEFSRRGTLITGSSGSGKSSLLDAISLAFLSSNRRNFNASSDTTAAGSSMGKRTVDKYVRGLWGELKNPGERPKQMFLRGKGGAWSAIAVTYSGTDGRVITGLVLKWLAPGSDTDSSSRYYLIDADADIRDLCNAWASKGYAGSVFEGAGWRGHKSERWYLEQLYAAVGIQGSSAAQQLLGKAKSLKSVGGLEQFVREYMLDEPESMAAISEALGQITPLVDARAALAIAQRQRQTLGDIEQIQQTYASDAAQLATVDVVDHHTVRDYVDQQRLALAGPEIDLLDTEITRLGGECDEIQSRQDILTGERDKLLGRIAAADSNLAPLKSELAHARARAEEVSRRRTAYDSALWDLGHEDDIESAEEFEAMRVESLRAVTRINAELEAGHDAYVMAAGALSTARDQLRAASAEFKRVEHLGTPVPPDEDRMRGEIAAALGLTAKDLPYVCELMDLRPGQERWRRSVEKVLRSTGLCLLVPDQHHRQVLRYVNENPMRGYLQIERVIPSGTPRRAEPGTLADCLRLTNPNHECVSAAMNLVAGVGDYVLVDSPDEFSKHRRAVTDQGLRKDGDRRAVKDDRRELRASQYIYQGNAGDKRAALSDDVVEAQQAVSDAEKFIGEMDTKREELRSEVVRWSKLHSQYEYWSQIDTDSAEAAVARLQDQYDAMLEANPDLTGLQQQADSYLDEIKKLSERIGALRKQESEHDSRRTRLLDLLDNLNPREVGGHTRSGIEAYVPQLSSSLDVLEPDAYRLELWRQIEKDQSVLRESVTRSRNELNRILNAYDRDFPDSIPNDSENFDEKIHDYVALCRRIDERDLPAAYERMLRLITEQAPTAVLRLHQLAEEEAHRITDQIDRVNSGLGSVEFNRGTRLTLRAEPKALEAVGELNERARRISGRAVAVSMGDEKAIHDQYQDILQLRNLLAAETPEARQWTRDALDVRNRFVLYCEERDAGTGEPIRTYSNAGANSGGEQEKLMAFCLAGALSFNLANPETGDNRPVFAQLMLDEAFSKSDPQFAQQALSAFRKFGFQLVIVATVQNTTTIQPYIDSVVMVSKPDGPGVRPVASTRTVPIGELGDVRKAVSAR

SEQ ID NO: 35880 - protein, 486 aa, Mycobacterium abscessus; identical to SEQ ID NO: 31485

SEQ ID NO: 35881 - protein, 249 aa, Mycobacterium abscessus; identical to SEQ ID NO: 31486

SEQ ID NO: 35882 - protein, 1115 aa, Mycobacterium abscessus; identical to SEQ ID NO: 31487

SEQ ID NO: 35883 - protein, 486 aa, Mycobacterium abscessus; identical to SEQ ID NO: 31694

SEQ ID NO: 35884 - protein, 249 aa, Mycobacterium abscessus; identical to SEQ ID NO: 31486

SEQ ID NO: 35885 - protein, 1115 aa, Mycobacterium abscessus; identical to SEQ ID NO: 30763

SEQ ID NO: 35886 - protein, 486 aa, Mycobacterium abscessus; identical to SEQ ID NO: 31485

SEQ ID NO: 35887 - protein, 249 aa, Mycobacterium abscessus; identical to SEQ ID NO: 31486

SEQ ID NO: 35888 - protein, 1115 aa, Mycobacterium abscessus; identical to SEQ ID NO: 31487

SEQ ID NO: 35889 - protein, 486 aa, Mycobacterium abscessus; identical to SEQ ID NO: 31694

SEQ ID NO: 35890 - protein, 249 aa, Mycobacterium abscessus; identical to SEQ ID NO: 31486

SEQ ID NO: 35891 - protein, 1115 aa, Mycobacterium abscessus; identical to SEQ ID NO: 30763

SEQ ID NO: 35892 - protein, 486 aa, Mycobacterium abscessus; identical to SEQ ID NO: 31556

SEQ ID NO: 35893 - protein, 249 aa, Mycobacterium abscessus; identical to SEQ ID NO: 31486

SEQ ID NO: 35894 - protein, 1115 aa, Mycobacterium abscessus; identical to SEQ ID NO: 31487

SEQ ID NO: 35895 - protein, 486 aa, Mycobacterium abscessus; identical to SEQ ID NO: 31485

SEQ ID NO: 35896 - protein, 249 aa, Mycobacterium abscessus; identical to SEQ ID NO: 31486

SEQ ID NO: 35897 - protein, 1115 aa, Mycobacterium abscessus; identical to SEQ ID NO: 31487

SEQ ID NO: 35898 - protein, 486 aa, Mycobacterium abscessus; identical to SEQ ID NO: 31485

SEQ ID NO: 35899 - protein, 249 aa, Mycobacterium abscessus; identical to SEQ ID NO: 31486

SEQ ID NO: 35900 - protein, 1115 aa, Mycobacterium abscessus; identical to SEQ ID NO: 31487

SEQ ID NO: 35901 - protein, 486 aa, Mycobacterium abscessus; identical to SEQ ID NO: 31485

SEQ ID NO: 35902 - protein, 249 aa, Mycobacterium abscessus; identical to SEQ ID NO: 31486

SEQ ID NO: 35903 - protein, 1115 aa, Mycobacterium abscessus; identical to SEQ ID NO: 31487

SEQ ID NO: 35904 - protein, 486 aa, Mycobacterium abscessus; identical to SEQ ID NO: 35522

SEQ ID NO: 35905 - protein, 249 aa, Mycobacterium abscessus; identical to SEQ ID NO: 31554

SEQ ID NO: 35906 - protein, 1115 aa, Mycobacterium abscessus; identical to SEQ ID NO: 35524

SEQ ID NO: 35907 - protein, 486 aa, Mycobacterium abscessus; identical to SEQ ID NO: 35522

SEQ ID NO: 35908 - protein, 249 aa, Mycobacterium abscessus; identical to SEQ ID NO: 31554

SEQ ID NO: 35909 - protein, 1115 aa, Mycobacterium abscessus; identical to SEQ ID NO: 35524

SEQ ID NO: 35910 - protein, 486 aa, Mycobacterium abscessus; identical to SEQ ID NO: 31694

SEQ ID NO: 35911 - protein, 249 aa, Mycobacterium abscessus; identical to SEQ ID NO: 30762

SEQ ID NO: 35912 - protein, 1115 aa, Mycobacterium abscessus; identical to SEQ ID NO: 30763

SEQ ID NO: 35913 - protein, 486 aa, Mycobacterium abscessus; identical to SEQ ID NO: 31485

SEQ ID NO: 35914 - protein, 249 aa, Mycobacterium abscessus; identical to SEQ ID NO: 31486

SEQ ID NO: 35915 - protein, 1115 aa, Mycobacterium abscessus; identical to SEQ ID NO: 31487

SEQ ID NO: 35916 - protein, 486 aa, Mycobacterium abscessus; identical to SEQ ID NO: 31485

SEQ ID NO: 35917 - protein, 249 aa, Mycobacterium abscessus; identical to SEQ ID NO: 31486

SEQ ID NO: 35918 - protein, 1115 aa, Mycobacterium abscessus; identical to SEQ ID NO: 31487

SEQ ID NO: 35919 - protein, 486 aa, Mycobacterium abscessus; identical to SEQ ID NO: 31485

SEQ ID NO: 35920 - protein, 249 aa, Mycobacterium abscessus; identical to SEQ ID NO: 31486

SEQ ID NO: 35921 - protein, 1115 aa, Mycobacterium abscessus; identical to SEQ ID NO: 31487

SEQ ID NO: 35922 - protein, 486 aa, Mycobacterium abscessus; identical to SEQ ID NO: 31485

SEQ ID NO: 35923 - protein, 249 aa, Mycobacterium abscessus; identical to SEQ ID NO: 31486

SEQ ID NO: 35924 - protein, 1115 aa, Mycobacterium abscessus; identical to SEQ ID NO: 31487

SEQ ID NO: 35925 - protein, 486 aa, Mycobacterium abscessus; identical to SEQ ID NO: 31485

SEQ ID NO: 35926 - protein, 249 aa, Mycobacterium abscessus; identical to SEQ ID NO: 31486

SEQ ID NO: 35927 - protein, 1115 aa, Mycobacterium abscessus; identical to SEQ ID NO: 31487

SEQ ID NO: 35928 - protein, 486 aa, Mycobacterium abscessus; identical to SEQ ID NO: 31485

SEQ ID NO: 35929 - protein, 249 aa, Mycobacterium abscessus; identical to SEQ ID NO: 31486

SEQ ID NO: 35930 - protein, 1115 aa, Mycobacterium abscessus; identical to SEQ ID NO: 31487

SEQ ID NO: 35931 - protein, 486 aa, Mycobacterium abscessus; identical to SEQ ID NO: 31485

SEQ ID NO: 35932 - protein, 249 aa, Mycobacterium abscessus; identical to SEQ ID NO: 31486

SEQ ID NO: 35933 - protein, 1115 aa, Mycobacterium abscessus; identical to SEQ ID NO: 31487

SEQ ID NO: 35934 - protein, 486 aa, Mycobacterium abscessus; identical to SEQ ID NO: 31485

SEQ ID NO: 35935 - protein, 249 aa, Mycobacterium abscessus; identical to SEQ ID NO: 31486

SEQ ID NO: 35936 - protein, 1115 aa, Mycobacterium abscessus; identical to SEQ ID NO: 31487

SEQ ID NO: 35937 - protein, 486 aa, Mycobacterium abscessus; identical to SEQ ID NO: 35700

SEQ ID NO: 35938 - protein, 249 aa, Mycobacterium abscessus; identical to SEQ ID NO: 30762

SEQ ID NO: 35939 - protein, 1115 aa, Mycobacterium abscessus; identical to SEQ ID NO: 30763

SEQ ID NO: 35940 - protein, 486 aa, Mycobacterium abscessus; identical to SEQ ID NO: 31485

SEQ ID NO: 35941 - protein, 249 aa, Mycobacterium abscessus; identical to SEQ ID NO: 31486

SEQ ID NO: 35942 - protein, 1115 aa, Mycobacterium abscessus; identical to SEQ ID NO: 31487

SEQ ID NO: 35943 - protein, 486 aa, Mycobacterium abscessus; identical to SEQ ID NO: 31485

SEQ ID NO: 35944 - protein, 249 aa, Mycobacterium abscessus; identical to SEQ ID NO: 31486

SEQ ID NO: 35945 - protein, 1115 aa, Mycobacterium abscessus; identical to SEQ ID NO: 31487

SEQ ID NO: 35946 - protein, 486 aa, Mycobacterium abscessus; identical to SEQ ID NO: 31485

SEQ ID NO: 35947 - protein, 249 aa, Mycobacterium abscessus; identical to SEQ ID NO: 31486

SEQ ID NO: 35948 - protein, 1115 aa, Mycobacterium abscessus; identical to SEQ ID NO: 31487

SEQ ID NO: 35949 - protein, 486 aa, Mycobacterium abscessus; identical to SEQ ID NO: 31485

SEQ ID NO: 35950 - protein, 249 aa, Mycobacterium abscessus; identical to SEQ ID NO: 31486

SEQ ID NO: 35951 - protein, 1115 aa, Mycobacterium abscessus; identical to SEQ ID NO: 31487

SEQ ID NO: 35952 - protein, 486 aa, Mycobacterium abscessus; identical to SEQ ID NO: 31485

SEQ ID NO: 35953 - protein, 249 aa, Mycobacterium abscessus; identical to SEQ ID NO: 31486

SEQ ID NO: 35954 - protein, 1115 aa, Mycobacterium abscessus; identical to SEQ ID NO: 31487

SEQ ID NO: 35955 - protein, 486 aa, Mycobacterium abscessus
MNDLTVEELFAHNDDVQKSRAVRLLAAKNLAPYITLMERHLDRSAKVSEPQLVAKLDRDLSAVGLGEQSGLALIKSWASDGWLHRASDGTGPDAENVCSLTEDARSALAFVRRLRRADTVATGGSIAGIAVGLKRVATQLDGDPSRLRADIEAQIAELQTQLHAIDDGYRPEPDIVDLEDETRAIAYQMEQVITDIVRYGSMQNEITAGLIDAAEDSDSGFRDRARRMFADYDALFDSRERASYSAFTRTIQDPDQRAALRSDIACVADGLPDLDPGLREVMRNFFKLVSQQIAEVSRIEQRCAQRIRRFFAAGTTEQARGRARQLNDALAAGHALLKMSTADSPIDAELPIGRSAAAAIGALSFTIKDTAPPVLAQDAPSGPLDLSGFSALATQVDMAALADTVNSAIAGGPVSLPDMISHVEAPYLGDVIVLWSLALKQDNTADRESVKVKFRSLDGQDRVMEVPQLMFREPVLATLEEEGSTL

SEQ ID NO: 35956 - protein, 249 aa, Mycobacterium abscessus; identical to SEQ ID NO: 31486

SEQ ID NO: 35957 - protein, 1114 aa, Mycobacterium abscessus
MTSDAATQQFWLSRLQVINWGVFDGYHSIEFSRRGTLITGSSGSGKSSLLDAISLAFLSSNRRNFNASSDTTAAGSSMGKRTVDKYVRGLWGELKNPGERPKQMFLRGKGGAWSAIAVTYSGTDGRVITGLVLKWLAPGSDSDSSSRYYLIDADADIRDLCNAWASKGYAGSVFEGAGWRGHKSERWYLEQLYAAVGIQGSSAAQQLLGKAKSLKSVGGLEQFVREYMLDEPESMAAISEALGQITPLVDARAALAIAQRQRQTLGDIEQIQQTYASDAAQLATVDVVDHHTVRDYVDQQRLALAGPEIDLLDTEITRLGGECDEIQSRQDILTGERDKLLGRIAAADSNLAPLKSELAHARARAEEVSRRRTAYDSALWDLGHEDDIESAEEFEAMRVESLRAVTRINAELEAGHDAYVMAAGALSTARDQLRAASAEFKRVEHLGTPVPPDEDRMRGEIAAALGLTAKDLPYVCELMDLRPGQERWRKSVEKVLRSTGLCLLVPDQHHRQVLRYVNENPMRGYLQMERVIPSGTPRRAEPGTLADCLRLTNPNHECASAAMNLVAGVGDYVLVDSPDEFSKHRRAVTDQGLRKDGDRRAVKDDRRELRASQYIYQGNAGDKRAALSDDVVEAQQAVSDAEKFIGEMDTKREELRSEVVRWSKLHSQYEYWSQIDTDSAEAAVARLQDQYDAMLEANPDLTGLQQQADSYLDEIKRLSERIGALRKQESEHDSRRTRLLDLLDNLNPREVGGHTRSGIEAYVPQLSSSLDVLEPDAYRLELWRQIEKDQSVLRESVTRSRNELNRILNAYDRDFPDSIPNDSENFDEKIHDYVALCRRIDERDLPAAYERMLRLITEQAPTAVLRLHQLAEEEAHRITDQIDRVNSGLGSVEFNRGTRLTLRAEPKALEAVGELNERARRISGRAVAVSMGDEKAIHDQYQDILQLRNLLAAETPEARQWTRDALDVRNRFVLYCEERDARTGEPIRTYSNAGANSGGEQEKLMAFCLAGALSFNLANPETGDNRPVFAQLMLDEAFSKSDPQFAQQALSAFRKFGFQLVIVATVQNTTTIQPYIDSVVMVSKPDGPGVRPVASTRTVPIGELGDVRKAVSAR

SEQ ID NO: 35958 - protein, 481 aa, Mycobacterium abscessus
MDLTELLKVNRGLQKDSPTLKLFAADTFAAVLALMEQHLDRGVKIAETELVARFERDMPAVGLTSQTPAQLISIWAERGWLHRIADDVAPGARRVCWLSSEAQTVLDIARRIRNDDSVATGGSIIGISDRLKRVARQLDNDPDRLLNDLDERIAELQRQREQVAAGNRPEPNFLDLEDEAKAIGMQMEHVVADIGRYATIQNRITTGLLSELGDSDAEFRDRHHKLFDDYLALDQSREQASYQAFTRMIQDPAAQLRLRRDIDLVAAGLPDLDAGVKDLLRGFLTSVSRQMSEVDRVRQRCAQRIRRFFAAGTAEQSRGFARQLNEAIAAGQALLNVSLTDSQLDCEIPIVTSEAETSLGALGFKIVDPTPPPLAQESVETLDIAGFAALAAQVDVEALAGAVNTALAAGPISLPEALMLVDDAYLGELLVLWTWAQAQPQGQSPVEAEATVQFRSMGGVDRQMRVPLLMFTEPVIEGDLL

SEQ ID NO: 35959 - protein, 240 aa, Mycobacterium abscessus; identical to SEQ ID NO: 35652

SEQ ID NO: 35960 - protein, 1124 aa, Mycobacterium abscessus; identical to SEQ ID NO: 35653

SEQ ID NO: 35961 - protein, 408 aa, Mycobacterium abscessus
MITVEQARDKVVSVVENRWRQWIRLGSTWPITVALHPPSGGQLAAHLIDVQNWAGTWQAAEQAGSLPGQVVWTDRRVLGMGMYTLPHKLVVPDLAAALAVAPAAARRYRRAMTRHQQAIANSSVRWTALDEISGDSLSRIEALDDHDWALALELAEYLTSTPVTGMMVRQITIDGLHSKWIEQHAVLVLDMICPPKIELPDGSPLTKLRHILGLRAKDLRINVALRCPQLRAVAAGMERFSTTISTLNDSALAPQNLLIIENDQPGYTLTRDIPNLAVLHGLGDSVTSLTPLRWFQTASQVLYWGDIDRAGLQAVASLRRAGIPAHSLLMDCITLDTHEDQAHKATKTQATDQNVPDGLTADERLLYERLNTHFQQTGEEWQLEQEHLPTQIVESALVSACQGPGNRK

SEQ ID NO: 35962 - protein, 486 aa, Mycobacterium abscessus
MNDLTVEELFAHNDDVQKSRAVRLLAAKNLAPYITLMERHLDRSAKVSEPQLVAKLDRDLSAVGLGEQSGLALIKSWASDGWLHRASDGTGPDAENVCSLTEDARSALAFVRRLRRADTVATGGSIAGIAAGLKRVATQLDGDPSRLRADIEAQIAELQTQLHAIDDGYRPEPDIVDLEDETRAIAYQMEQVITDIVRYGSMQNEITAGLIDAAEDSDSGFRDRARRMFADYDALFDSRERASYSAFTRTIQDPDQRAALRSDIACVADGLPDLDPGLREVMRNFFKLVSQQIAEVSRIEQRCAQRIRRFFAAGTTEQARGRARQLNDALAAGHALLKVSTADSPIDAELPIGRSAAAAIGALSFTIKDTGPPVLAQDAPSGPLDLSGFSALATQVDMAALADTVNSAIAGGPVSLPDMISHVEAPYLGDVIVLWSLALKQDNTADRESVKVKFRSLDGQDRVMEVPQLMFREPVLATLEEEGSTL

SEQ ID NO: 35963 - protein, 249 aa, Mycobacterium abscessus; identical to SEQ ID NO: 31486

SEQ ID NO: 35964 - protein, 1115 aa, Mycobacterium abscessus; identical to SEQ ID NO: 31487

SEQ ID NO: 35965 - protein, 486 aa, Mycobacterium abscessus; identical to SEQ ID NO: 35522

SEQ ID NO: 35966 - protein, 249 aa, Mycobacterium abscessus; identical to SEQ ID NO: 31554

SEQ ID NO: 35967 - protein, 1115 aa, Mycobacterium abscessus; identical to SEQ ID NO: 35524

SEQ ID NO: 35968 - protein, 486 aa, Mycobacterium abscessus; identical to SEQ ID NO: 31485

SEQ ID NO: 35969 - protein, 249 aa, Mycobacterium abscessus; identical to SEQ ID NO: 31486

SEQ ID NO: 35970 - protein, 1115 aa, Mycobacterium abscessus; identical to SEQ ID NO: 31487

SEQ ID NO: 35971 - protein, 486 aa, Mycobacterium abscessus; identical to SEQ ID NO: 31556

SEQ ID NO: 35972 - protein, 249 aa, Mycobacterium abscessus; identical to SEQ ID NO: 31486

SEQ ID NO: 35973 - protein, 1115 aa, Mycobacterium abscessus; identical to SEQ ID NO: 31487

SEQ ID NO: 35974 - protein, 486 aa, Mycobacterium abscessus; identical to SEQ ID NO: 31485

SEQ ID NO: 35975 - protein, 249 aa, Mycobacterium abscessus; identical to SEQ ID NO: 31486

SEQ ID NO: 35976 - protein, 1115 aa, Mycobacterium abscessus; identical to SEQ ID NO: 31487

SEQ ID NO: 35977 - protein, 486 aa, Mycobacterium abscessus; identical to SEQ ID NO: 30761

SEQ ID NO: 35978 - protein, 249 aa, Mycobacterium abscessus; identical to SEQ ID NO: 30762

SEQ ID NO: 35979 - protein, 1115 aa, Mycobacterium abscessus; identical to SEQ ID NO: 30763

SEQ ID NO: 35980 - protein, 486 aa, Mycobacterium abscessus; identical to SEQ ID NO: 31694

SEQ ID NO: 35981 - protein, 249 aa, Mycobacterium abscessus; identical to SEQ ID NO: 30762

SEQ ID NO: 35982 - protein, 1115 aa, Mycobacterium abscessus; identical to SEQ ID NO: 30763

SEQ ID NO: 35983 - protein, 486 aa, Mycobacterium abscessus; identical to SEQ ID NO: 31485

SEQ ID NO: 35984 - protein, 249 aa, Mycobacterium abscessus; identical to SEQ ID NO: 31486

SEQ ID NO: 35985 - protein, 1115 aa, Mycobacterium abscessus; identical to SEQ ID NO: 31487

SEQ ID NO: 35986 - protein, 486 aa, Mycobacterium abscessus; identical to SEQ ID NO: 31694

SEQ ID NO: 35987 - protein, 249 aa, Mycobacterium abscessus; identical to SEQ ID NO: 30762

SEQ ID NO: 35988 - protein, 1115 aa, Mycobacterium abscessus; identical to SEQ ID NO: 30763

SEQ ID NO: 35989 - protein, 486 aa, Mycobacterium abscessus; identical to SEQ ID NO: 31485

SEQ ID NO: 35990 - protein, 249 aa, Mycobacterium abscessus; identical to SEQ ID NO: 31486

SEQ ID NO: 35991 - protein, 1115 aa, Mycobacterium abscessus; identical to SEQ ID NO: 31487

SEQ ID NO: 35992 - protein, 486 aa, Mycobacterium abscessus; identical to SEQ ID NO: 31485

SEQ ID NO: 35993 - protein, 249 aa, Mycobacterium abscessus; identical to SEQ ID NO: 31486

SEQ ID NO: 35994 - protein, 1115 aa, Mycobacterium abscessus; identical to SEQ ID NO: 31487

SEQ ID NO: 35995 - protein, 486 aa, Mycobacterium abscessus; identical to SEQ ID NO: 31485

SEQ ID NO: 35996 - protein, 249 aa, Mycobacterium abscessus; identical to SEQ ID NO: 31486

SEQ ID NO: 35997 - protein, 1115 aa, Mycobacterium abscessus; identical to SEQ ID NO: 31487

SEQ ID NO: 35998 - protein, 486 aa, Mycobacterium abscessus; identical to SEQ ID NO: 31485

SEQ ID NO: 35999 - protein, 249 aa, Mycobacterium abscessus; identical to SEQ ID NO: 31486

SEQ ID NO: 36000 - protein, 1115 aa, Mycobacterium abscessus; identical to SEQ ID NO: 31487

SEQ ID NO: 36001 - protein, 486 aa, Mycobacterium abscessus; identical to SEQ ID NO: 31485

SEQ ID NO: 36002 - protein, 249 aa, Mycobacterium abscessus; identical to SEQ ID NO: 31486

SEQ ID NO: 36003 - protein, 1115 aa, Mycobacterium abscessus; identical to SEQ ID NO: 31487

SEQ ID NO: 36004 - protein, 486 aa, Mycobacterium abscessus; identical to SEQ ID NO: 31485

SEQ ID NO: 36005 - protein, 249 aa, Mycobacterium abscessus; identical to SEQ ID NO: 31486

SEQ ID NO: 36006 - protein, 1115 aa, Mycobacterium abscessus; identical to SEQ ID NO: 31487

SEQ ID NO: 36007 - protein, 486 aa, Mycobacterium abscessus; identical to SEQ ID NO: 31485

SEQ ID NO: 36008 - protein, 249 aa, Mycobacterium abscessus; identical to SEQ ID NO: 31486

SEQ ID NO: 36009 - protein, 1115 aa, Mycobacterium abscessus
MTTSDAATQQFWLSRLQVINWGVFDGYHSIEFSRRGTLITGSSGSGKSSLLDAISLAFLSSNRRNFNASSDTTAAGSSMGKRTVDKYVRGLWGELKNPGERPKQMFLRGKGGAWSAIAVTYSGTDGRVITGLVLKWLAPGSDSDSSSRYYLIDADADIRDLCNAWASKGYAGSVFEGAGWRGHKSERWYLEQLYAAVGIQGSSAAQQLLGKAKSLKSVGGLEQFVREYMLDEPESMAAISEALGQITPLVDARAALAIAQRQRQTLGDIEQIQQTYASDAAQLATVDVVDHHTVRDYVDQQRLALAGPEIDLLDTEITRLGGECDEIQSRQDILTGERDKLLGRIAAADSNLAPLKSELAHARARAEEVSRRRTAYDSALWDLGHEDDIESAEEFEAMRVESLRAVTRINAELEAGHDAYVMAAGALSTARDQLRAASAEFKRVEHLGTQVPPDEDRMRGEIAAALGLTAKDLPYVCELMDLRPGQERWRKSVEKVLRSTGLCLLVPDQHHRQVLRYVNENPMRGYLQMERVIPSGTPRRAEPGTLADCLRLTNPNHECASAAMNLVAGVGDYVLVDSPDEFSKHRRAVTDQGLRKDGDRRAVKDDRRELRASQYIYQGNAGDKRAALSDDVVEAQQAVSDAEKFIGEMDTKREELRSEVVRWSKLHSQYEYWSQIDTDSAEAAVARLQDQYDAMLEANPDLTGLQQQADSYLDEIKRLSERIGALRKQESEHDSRRTRLLDLLDNLNPREVGGHTRSGIEAYVPQLSSSLDVLEPDAYRLELWRQIEKDQSVLRESVTRSRNELNRILNAYDRDFPDSIPNDSENFDEKIHDYVALCRRIDERDLPAAYERMLRLITEQAPTAVLRLHQLAEEEAHRITDQIDRVNSGLGSVEFNRGTRLTLRAEPKALEAVGELNERARRISGRAVAVSMGDEKAIHDQYQDILQLRNLLAAETPEARQWTRDALDVRNRFVLYCEERDARTGEPIRTYSNAGANSGGEQEKLMAFCLAGALSFNLANPETGDNRPVFAQLMLDEAFSKSDPQFAQQALSAFRKFGFQLVIVATVQNTTTIQPYIDSVVMVSKPDGPGVRPVASTRTVPIGELGDVRKAVSAR

SEQ ID NO: 36010 - protein, 486 aa, Mycobacterium abscessus; identical to SEQ ID NO: 31694

SEQ ID NO: 36011 - protein, 249 aa, Mycobacterium abscessus; identical to SEQ ID NO: 30762

SEQ ID NO: 36012 - protein, 1115 aa, Mycobacterium abscessus; identical to SEQ ID NO: 30763

SEQ ID NO: 36013 - protein, 488 aa, Xanthomonas arboricola pv. juglandis
MKPQLYASAYERLRGEAAWSLLTAHLAPVVLALLQHLLYANERVLPASVLIERLHTELGELRAKGRDLTGSASYYVDSWRREGWIERRLIEGADEEEFELTAAALAALKLVSALQTTRAVATESRLALVIGQLAQLAEQTDTNAATRMERLLAERARIDQEIARVSGGQVDVLSDARAAEKLAEIVALASELSDDFRRVRDDFARLNRDFRERIIHDESQRGELLTDLFNDVDVISQSAQGQSFEAFWSLLVDPEESARLEAGLREVAARPFAEQLGRSERRLLRHLTRTLLDGAGSVHSTRTRFARSLRGFVQSKEYREQRRLSQLLRDAKARALEVAPLFSPSQKIGFELELSSATYRSISRLRPHDPVQAMEQPDLGAAGEAEVDLLAIANAVAESDIDFRSLAANIKSMLTEVAQCSIGDAMAVFAPQQGLGTVIGYLALGVKHGDVAPLDTERVSWQGGDGAHRSADIPLIYFLAERVDELPG

SEQ ID NO: 36014 - protein, 219 aa, Xanthomonas arboricola pv. juglandis
MNSLDDPGDAVVVDKTLFVGDAGTLPVDARRALCKLLSGPFLDDTHGAWPALLREEAVLRSRLSDLFLELVIDRERKVAFARQADTGEVDAPVLMRAQALSFMESVLLLHLRHALVEAEGQDQRAVVSQSDLTEVLSVYLEQGVSDTVGAAAKVNSAIEKLRTAGILRILRGGERRFEVSPVLRLLFTAEDVEALGKLYASSAQAGGAPEDMEEEGEDA

SEQ ID NO: 36015 - protein, 1119 aa, Xanthomonas arboricola pv. juglandis
MHSSAEVFHLSDLPDPQDEQFRMRQLSVLNWGTFTGLHRMPVSPEGTLIIGPSGAGKSTLLDAISALTVSPRTVRFNAAADESGKRDPDRTLMSYVRGAWAERADDQSARSLAKQYLRTNATWTAVALEYANALGRVMSIVRVLWVRGAGSNAKVESHFLVVDAPFDLSEIGEFTGERKALTKRFSDPPYRSHESFTAFSEHWCRVVGIVEPNALNLLHQTQSTKNLSDLNGFLRDYMLAEPKTFEIADSLVSEFVDLDEAHRAVVVAREQIDVLAPSRDAYRDREVAEGRVQHVRSLIVSLPQFQAQETARLLRDEDVRLESVISTTRIEAEEAHRHQHALSEALENLRRAADAGGGGDLAQLEAARGQLLLDKERVERRRTSAGGWAGALGLTLADDQATFAAQLLAARSEQARAEERLAGAEGERDTLLVDESRLREELSLLRKEIETLEGSTSSIPRDKQEIRAWMCRDLGIPKSRVPFAGELISVKPEHKDWEGAANRLLGGFGTSLLVDVNDYRQVAAWVDKNHLRSRWSYYQVEPTPSTGNRDRRPGLLLNCLDVSESPYRQWVWKELWHQADFECVEKASDLMKGQRRITRAGQIRFSGGLHQKDDRFRVDDESRWVLGDNRAKLDRLKRNAADTAGALAKISQRRSEAVQSADGIRLRAQAAAHLVEVEWPSIDLTGALRRIEENQEAQRALLERTPGLIDLQGQLVQKQDEAKRALADATRLTLDIEALERQRAENAGELEAASIRALGLPPEADAGLTARCGPWTPTLKTIHGELARVREVLDREKDVLSEAISAHVQSILQCFQTFLHRWPEERGSLQPNLPSATDFFAKLERLETDGLPKHEARFQELLRKQSMQRLAELSQHLHEARSEIENGMDDVNRALRPVPYNPDTYLYIRTEDRGLDEPREFRRRLGTLFAQRGELTEETAEAQFEGLRRLIQDLRADDAAGRQWRDLVLDVRKHVEFIADECDRISGVVVENYGGAGGKSGGQRQKLTATCLAAALRFKLGGSDGGVPSYAAVVLDEAFTKTDNEFTATCMRIFTGMGFQMIVATPMKSVMTLEEFVGGATYVSIKDRKVSSLLHIAYDADQRRLRLPEGARRGMELAE

SEQ ID NO: 36016 - protein, 406 aa, Xanthomonas arboricola pv. juglandis
MKAIHEAREQLGRAWENRWLGWLAGTGTWPLTLALGPPSQKEALSDWTRFVAWRDGWLMSGVAVSSVNRAWPSLGGAQVLPAHVSFDGPETLAHFLGTDKLAAWKQARARLLSWQARWPGSTPGGRGLRWLIEAREDDFTRMQALLEWLKDNPDADLFIRQVPVPGIDTKWAQKSGTVALELSRTTASKEEAGLGTFKQDLPRIRMRLLDPLLRAKLGGLDDISAPIASISALSLPVRCAVVVENLQTFLAFDDIPGVALFFGQGFGARSLSKIAWLRELPIVYWGDIDTAGFEILNAVRSELPNASSFSMDEATLSNNRALCVPDPKQRRAELKRLTAAEQATYYLLLNDQFFAGMRLEQERLAWGQQWPRVLEAVARIAARHPLHNSGHPLLAAPVTTDSIDKE

SEQ ID NO: 36017 - protein, 489 aa, Xanthomonas arboricola pv. juglandis; identical to SEQ ID NO: 33214

SEQ ID NO: 36018 - protein, 233 aa, Xanthomonas arboricola pv. juglandis
MNWTEDTRLDADEDSGASADAGRTPPTETTPAQPRGELFLGDTGTLPFDARRALCQLLAGPSIDAQRHGALWPALLRNEAAIRQVLCELFLELVLDREGGVAFTRQADTAELESPTLLRSAPLTFIESVLLLFLRQQLAEADTRGERAVVDEAQLVEALSVYEKNVSTDRAGFARRVLTAIGKMRENQLLSRLRGSEERYEVSPVLKLLFSAEDVQALVVAYRGLREGDVALD

SEQ ID NO: 36019 - protein, 1360 aa, Xanthomonas arboricola pv. juglandis
MNSQSNLSPAQPGASLFTDSLAEQRAQQFRMRRLQVHNWGTFNGLTEVPIAEKGFLFVGRSGSGKSTLLDAMSALLTPPSIVDFNAAAREAERSGRDRSLVSYVRGAWADQQDSASGEIATQYLRKGATWSALVLEYRNAHGETVSLIRLFWIAGSGNAAADVRRHYMVAPRSFDVASELDGFDLDLRRLKARLGEEVAHFDGFAGYAERFRHTLGIGNEMALRLLHKTQSAKNLGDLNVFLRGFMLDEPRTFEAADRLVEDFAELDGAHHAVVTARRQVETLSPAREHHAALMALRHSVGELRELQLGVDSYREQQRLALLETRLHELDSQDRGLAGEEGQRRESLDNHEQKLAGLEREQRAAGGEQIEELERERARVERERDERLRRRVQIEQACRQLGTALAAGASGFAEQIAHAQTVLENGKHDASALDEAIAERMGARRDDERRFAEIRAELDALKRAPSSMPAPMQALRARLCEDTGIAEAALPFVGELVQVREDQSAWRGAIERVLSGFAQSLLVDDRHYAQVSEWVNRTQLGTRLVYFRVRRNDALHARTPDARALPGKLQLREHAFTEWLRNELMRRFDYECVDNAAALRNADRAITREGQVKHPGDRYEKDDRHAVNDRKRWLLGHDNRDKLKVFEREAQTLAQRIASCDADVAALRKQREQDQERQLAAHTLVERDWDEIDVGPKLQRLSDIDEQLQQLREGNSGLRALGQAIETARTLRDQAKRTYEDVRLERAQLARERVRLEQQHAACASRAGTAALTPTQLQGLRERLAALSPLSLDNLEAHFRVVERGLAEQLAESQGRDSRLSAQLLDCFRKYCQQWPEDSGDFTVSLASADDFLARLDRLESDGLPRHEHRFFDLLQTQSKNNLLALQRHTAEAHKGIKQRMDEVNASLEQVPFNRGTLLTIEVSDRRLGEVQEFQQQLRAVLSHQQTEDRALAEAQFSTLRALVARLGAQEPDARRWREQVLDVRQHVEFIGVELDAQTRAQVEIYRSGAGKSGGQRQKLATTCLAAALRYQLGGEDGELPRYCAVVLDEAFDKADNEFTALAMNIFENFGFQMVVATPLKSVMTLEPFIGGACFVEISGRHNSGVLLIEYDEQAQRLQLPERSRGDEAAAAVTEQAVSAAQREDAPRSTQGETRMDSTGPVSGAEGAALQDVPAQDDVAAKASRRASKVAPASTPAVQAAPKPSKTAAASARAGSGTSAAAKPAAGKAASVKTAPAKPASARRASPAAGTARKPATPTKPAKTPANTGTASRRATASVKPTARPNKAATTAAAPKKPAAKSTVATRRATTSLGGATKATKTTAARSAARPVPTKPVPTKTAAKARPASTRGSAGKPRGKR

SEQ ID NO: 36020 - protein, 482 aa, Arthrobacter sp. ZBG10
MPRSARSSADAISARLRDLELLTKGPAWALTRSAPWVIAVLQASFTRTRPQLPLEEFHADVDSFLEELRRQDPGLGGGANGKAFGDEWTRRQFLTRRNQSGRIVYEVTEPAARVLAFLDSLSSERSTLNGSRLGTLLGDVEKLANETNPDQSARLESLEEEIGERRQLIQDISSGDFDGVLDDDDAVEAAGNILDLAASLPADYKKMRDRIEELVGGLRNQIIEESLTKGATMAQVLAADKRLRQSPEGRTFRSFTAFLEDPQQQVRFRSAIGEVLSRQFADDLSADDRETLKNLVAELRQQHSQIQRIYGKLSESLNTYVQSDDFRQSVRLRRVLREAEQAIRSLPYERERPGLVRGPVLFNAGFESLSMVKLYDPDGFAAPPKLADPIAFSDSDRVRSPRTGKANPAAIRSAMAGAATLADAWEQLPPGEQHINTIRGLLSQALQDGADFDRGAWAGLDFEQIDGTRRRAYLPVVTLAKD

SEQ ID NO: 36021 - protein, 285 aa, Arthrobacter sp. ZBG10
MTEPSAETGTEPSESVAAAAGPAAVARAGADAEPAAGRSRAAGPRDTFIDGAALFPGDTGVLPMRVRQALVKLLKGPYIDGGRDEKLWTVLLDNRVIIRSRLSELFLTMELDHDRKIAVLRPVDPDAIGGSTRSSILRQQRALSRVETIVLLRLRLLLDRHVTAQTDPTITREEIADLVAHYQPSGQQDALRDSDVVTRAITKLLARQLLLATGLDDVYTISNALPLALPFENIGDIPAQIEALVAASADPSGTEPLLDLDAETATDEDAADDADGTTNPEGGTK

SEQ ID NO: 36022 - protein, 1148 aa, Arthrobacter sp. ZBG10
MSIASMLPLGEETNPGQMRLALVQVVNWGTFHGAHTMHVDRNGTLLTGNSGVGKSTLFDAMLRVFDARPRSNEAAAQRSGGAVEDKRTTFTYMRGKVGDKAVGEGSASAFQRPGATWSAVALTFDNAAGTRVTVSALFDLPKNGTESSVGRFYLIDSSPLDLPALEDIADKRFTKAALETVFPDAQVFDVHKAFAERFRRLLGINSDQALPLLRVIQAGKGLGGSVNTFFRDQVLDAPATLAAADDVVEEFSNLMSIRQRLEDVRQQRDQLAPVPGLNREYAQALLDANRLRDLAGGEFEAYRQQLAVTVHEKTLTRFRELAQAKAQDLGAERTVRDALAKDLRQLETDYNTQGGNAISAIEQSLENARVSLKLREQVEEAARAALADAGLQLAWTAAGWDQAHEQAAARSAELKDDSQALQELRFEAFDAHATRKRELAAAEQELVSLKTRKSLLPPSSIENRTAIAAATGVPEDQMPFAGELMDLLEGEERWRPAAERALRSLATTLLVPGEHFGAVTRYLNANNIRGALRAVDVSKPLPGGALAVEDVNDGDLLRKLDILTAGGAAEAGAWVRERIALDFAFPCVEDPDELAALDKGLSLGGVVKRNRHTVEKDDRFTSRQDYVLGFDNAAKLELVASQVADLRQEVAKAAELAQSREESHQGMGRQLEALRRVAADDRPWDQVSAAVAAEDLARIEQRLKDALAAQADLEPLRANIEQARQKHQSSTESAAVLQSEYKALDRQLTTADSLLHAARGRLAEAPPSDATVEALAPYFDGFGDITELHELDNLANRVRSTLLGELHAAESRGQGTAERLTRIFEGFVREWGSAISADHGTSIGAAADFETRYHAIVSDGLPAQEAEFRQFFNQRTHESFSTLLHLLDEERRSITSRILPLNGILSQVNFHEGSFLELDIKQTLPPTAKAFKDAIQNALKARHTRPARPEAGQERDEDAELTARYKSLEALVRRLGSQAPEDRRWRAEVLDVRGHLFIQCKEHRDVTGPRGGKRSEVFMHADTGSMSGGERQRFTAFIMAAALSYQLGIAEQGFTTYGTVMMDEAFVLASEEFAGAGIKALHEFGFQLLLAAPENVIDLSRHLGSVTEILRDKRTNRSGVLTAPVIRPTAGAEGAWRSEANPVDIVLR

SEQ ID NO: 36023 - protein, 488 aa, Mycobacterium neworleansense
MPDAGTGGSSLDQLYQLNREVADSRSARLLVTNNLATYLTLMERHLDRGAKLTEIELVVRLERDLAELGSETEQSGLALIKYWASQGWLHRITEQSGDTERNVCYLTYEARAVLDFARRMRREDTIATGGSITGIAAGLRRVAGQVSNDPDRIRADIEAEIAKLRDELDALDQGQRPEPDLIDVEDEARAIALQMEQIVSDIGQYGSMLNRITTRLLDTSADTDLGYRERQRQLFDDYESLFASRESASYTAFTRMIQDPEQRAALVADIEAVTRELPHLDPGLREVMTGFFSLVSAQTAEVGRTRQRCARRIKRFVASGTLEHSRGVTRQLNDALASAHELLSISLADSRIGIEVPLVRTDFNSIGAVAFKIRDAIPPSQAESAEGEVNLSAFSALASQVDAAELADLVNGAVAAGPLSLPDAIGMLDSAYLGHVIVLWSWALKQPAADGAESVRVRFRSLEGADREIEIPRLIFTEPIPTASESML

SEQ ID NO: 36024 - protein, 250 aa, Mycobacterium neworleansense
MTDTPDTSSVPDTTIDFDALPSIDAVERSTDQRRAPRFDGDVSELPDRACWALQHLLSRRYVSKDNHSELWSWVTRYRSELTVRLSELDMRLCISDDHDIAYVEQADYESQWRRRLLRRETLNTYDSILALHLAKLMRAASRDENVLISRDEIHELFAGVNNDTDRDTASFDKRIDNAIERLTDIEMLSRNREDEDSFTISPVVNAIMTASMITELQQQFEQLKRAATGTGDDDIDDLSERLSDEVDAHG

SEQ ID NO: 36025 - protein, 1120 aa, Mycobacterium neworleansense
MAEPTNQFSLSRLQVINWGVFDGYHSIPFSQHGTLITGSSGSGKSSLLDAISLAFLPSHRRNFNASGDTTAAGSGTGKRTVDKYVRGAWGERREGTSRQIMYLRGTGPAWSAVAVTYSDRTGRSVTGLVLKWLAAEKTSDPGSRYYLIDDDRDIFGLCNRWASNGYDAAVFRDDGWTGGRSESQYLAQLYSSIGIRASEAAQQLLGKAKSLKSVGGLEQFVREFMLDEPASLSGVEEALEQINPLVEARGLLDVARRKRNTLGNIAAVQARYADEAAKFGVIDTIDNAMIRDYVDHLRLAQAGPEIANLDDQITQLGAQRDEFGTQQRQLKNEHNSLMAQINTVTVDLVPLQQRLTEAERISEEVSRRRSTYEDKVTSLGLTPPDNGEEFWSLRETLMEEADRLHRELFTGNQPYVEASAKEVRAREARESVEAELERVQRLGSPLPRTEYEMRARIARALDISERDLVYVAELMELKPDESRWRLAVEKVLRGAGLRLLVPDAYMERALRFVNENDMRGRIQLQHVQHGSQLRTPPPNTLATKLQLADPTHDSAVEALNVIASVGDYVCVDGPGEFTEQSRAVTDQGLRKDSGRLSIKDDRSRLRPSDYIFLGGTAAKVEALQDDLTAAQDVYQVARTARERLDEHRGQLQSRERACRALCDQYMQWSDIDTDSVDEMLERLQDEHDLLVSDNPDAERLQQRADECWERVEKVIQQIGSLNERETTLDRRRTALLELSELLTERIGSGEFPSHARDTIDGYAADIALSLELLEPEPYRNELIRVISRERDRLRADRNRSHDELAGIMSAYDSSFPDAIPNDSDVFDERVHDYVALCRRIDERELPDAYERMQRLITEQAPGAILNLHMIADNEARRITEQIARVNTGLGAVEFNRGTRLTLHAGTRHLAAVDELNEKAQRISARVSLVSFGDETAMFEQYTDILQLRKLLAGNTPEDRQWTRDALDVRNRFVLYCEERDAETGEVIRTYSNSGDNSGGEQEKLMAFCLAGALSFNLASPDSNDTRPLFAQLMLDEAFSKSDPQFAQQALSAFRKFGFQLVIVSTVQNSTTIQPYIDNVVMVSKSDASAPNARPVASVTSASISEFADLRRTSGDAVPSA

SEQ ID NO: 36026 - protein, 490 aa, Corynebacterium striatum
MSVEARALSLRRLMRDSAAIRLLAADNAPVILALIAEYFPRGTRARPAAEVYELMVTDFEVLASEFSMPRTPQNYCNDWVKAGWLIRKSGKSSHGETLEPSEEALSALEAIERWEAPVTTVTASRVESISSALQRLARDTNEDIASRVASLEEERARIDREIEKARSGQFERLTAAEAEERVQDVLNMAMAVPSDFARVRHELEALNHQLRRQLLDPEGYRGEVLEEIFNGVDHIAESDAGRSFRGFYSLLMDRERSAWLDQWITEVLDSEAGQALAPDRRQQLRRLFRDMEETSFEVNQTMTGLARSLRNYVSSEQFAEDRRMIELLREARGMAIDAAQYSELKAFHRMETPLQRIGMSIHSVSRIRLANPGREVVEETPVAYQPEAEDPLALYELVRESEIDFEELHEAIRATVAQSGPCTVGQVLQAHPPTQGLASVVGLVHIADQHPVPVLRQSREKVTWTEEDGTVRSAHIPTLYFDHTTVKELQ

SEQ ID NO: 36027 - protein, 212 aa, Corynebacterium striatum
MTAAHTPRVDSAHEPPLWEHDKGSLTYHSRRALVQLLQGPLIRAQKEPVLWAAIISDEENLRARLHDVFLELVVDETEGFAFTRMVEEETLTIPQVLRTDKLKHIDTAILLNLRQELGLALPGERVIVDVEDLREGIGYVRAVDNRDEAGFNRRFNAAIKRIQNDYSLLSATETEGRLEVSPVLRQLFDASTVTAIRDEYARLAQAEEEQGR

SEQ ID NO: 36028 - protein, 1122 aa, Corynebacterium striatum
MTSNTSVYPGQFRISRIQLINWGTFHGYFSIPVARKGFLITGGSGSGKSTLLDAMSAVLVPQSHLKFNAASQQDLGRHNGRSLVSYVRGAWRQQENAQTGEIAPEYLREGATNSVVALTYDNGAGKQHTLIAIFRLNGGENAVGQIKKLYGLVPGDEDVDKLSPLLSRSLDTRKIKALYKGPGASFTPTYATFADRFRKRLGIKNVEGQLLLHRTQSAKSLSSLDQLFRDYMLDRPSTFSRAEEAVEQFEDLRQAYLRVEDVKAQIDTLAPLPQLHAQRATAEADKHKAEAMSEALPAVRARMVAEELDSLIRALGAQEVEAQSEVASLEADVAHLDDAERRAAMAVSQLSAGELDALCAKMETADKEIEHRLKEFQRLAAAAGQWTEHYELSPQGFAELQANAQLRLSDFEIDSADLTNQQQEAGVAARDAATACARLDSELRSFSSRRTNIDKALVELRSQLARDTGYAESELPFAGELIDISPQQADWEPVIQKLLHGFAATLLVPEEARKAINQWVNSRNVGTRLEYRTIPEFTSAPASARSPRQLIHKLEFQDHPMTAWVRQHISRRFNYECVESVTELDKVTTTPAVTRDGLESRPKDKDGSTRFIKDDRSRFSGTAWYRVGSTNTAKIELLRSQLAQAKATASATARQVHDLNRKMDILRTQRDKAQQVLETSFQDIDTASAEARRQDLQEQYDSLASSPEAQALAAAHEQAKAKLKAARARLNAAQKNLGNVEGELERSTERRRSIGIVPDIKDQDIAKAVEDALHKGKRKLTIDDIDARRDEVQASLQNTARTATRRIEDANAKIVSVLHTYLAQWPAEAADLEPQASFAGEGIEKLKFLRADRLADFRARFLELLNGSTVRNLSHLTTDLRRARSDIERRMEFINKSLERSPFNGERTLRIDVKDARGQVVQDFQRDLDAATSHSLGEFGSDDTEAALARYHALDKILSRLGSSQPEDSRWRNVVLDTRRHVSFIGRELYADGTTANTYQDSASLSGGQAQKLVFFCLAAALRFRLAEPDQDVPTYGSIILDEAFDRADPTFTRTAMSVFTSFGFHMILATPFKLIQTLSPYVDGTIVVKYDEPTINGRPRARTGYSLIDASTYQDPDYAQP

SEQ ID NO: 36029 - protein, 378 aa, Corynebacterium striatum
MRSPKDLQAHASKYLRNHFAEALADPDSVRVDWPLHPPTATAAARDIDATQGFIRAWQRWPHQEDVIYESRNWSRAGLGTNNIPARITINGAERIATAAGLNLEYARARERAHSIAAVFPDSPDFAHTVRRSYTQWKDLSAYDLECLGPCLTWLRANPDSGEWERAVPVEGVDGKWIGTHRRLLLTLLAPFGITDLGLRRSDTRVRLRYLNHAPALSDIEIPLAHAATLFPHTPPRVLIVENKQTFLALPTLSDTSPPTVALLGAGTAAHQLHALDWLNRIDITYWGDLDAAGFAILNAVRAHFPHTTSLLMDTATVTEFQHLAVPDPGDGSATLTHLTTEEQRAYRLLFTAGRLRIEQERIPFAHVNAVIHATLAAA

SEQ ID NO: 36030 - protein, 456 aa, Methylobacterium sp. ARG-1
MLFAQLPDELFKPLASPSRGFNAALLLHLHRRVLGAEPVRKAELLAEIGDFAAGWSDPEILGDEPISADPAERRNALYRRLLDTGWLIERRERYVPVVEFDPEARLLLEELSRLERGETRSYGGAVLEVLGGLESAVSDPANRSEALSNAARASAAFLAHVRGLAAGMRKVEERILREPDRAKTFRLFFEDFVERHLISDYRTLHTRFNPFRFRASVVREAGRALRDALTVRALAEGLIREGRSPDLDTAQRAVRADLAQILSVFEGLDNHLDAVDAVVARLERRIGAALHAMDRPDPTGIERTAAMLRAVGAAEVAPDVPPVVSLLRPPIGQAHLQTPRARRSAIDVEPLPDVDYDPAVDAFALAKAEFRRRTTVTPETMTAFVEARLGKAVSLRGSQITIEGVDDFVVFQRLREIDVLFDARLRDRYAVVRLPERLANGWLDCPDFVLERRVGA

SEQ ID NO: 36031 - protein, 208 aa, Methylobacterium sp. ARG-1
MLEGFRAIIDGDEPPPPGARAPDAEELCRALQVMLKGQVIYADTPGIGRSYELARHYAPFFADYFACLGYALTVSHRDQMVSLSPAADAPRHDIASERLRKDETLVLLALRLLYEEGLRDNRAGTDGIVECTTDEIVEKIRAAARNEPPEEGRLADILRLYARRGGLRMGERDRVERVTPLSLLPGLAVLASDAWLERLRAWSEAGEL

SEQ ID NO: 36032 - protein, 1145 aa, Methylobacterium sp. ARG-1
MYVLTDIAISNWYLIRREQIRLRGAAALVGPTGAGKSTIFDAVGTVLAGNNASRLALNASASGRSARTVRDYCLGWISDPAEGGRPTRESCETVLALVFENPASGRTVTVGLALAARAVEPRETVLSRFIAVAHRFEIADYTRTAPGGSYTAPWSEIAADLRARAASFTEYRTSGERFTADILATLREGAPSPEPRHFLRSFANAVAFKPIFDTSAFVRAFVLDPEPLDVERVRLSIANWRRLLETIGELESRLARLRRLRDRYDAWSEAVLAAATHDLRAACAELRRRSLDLTAVRLRLREGADTLRIARERVAASRGHVREIDGEIAEKKALLAGSAAEGRLAASTLGLSMLERDRKELAARVSDLVGLVGQMGKLQPVAPILRQACPPAARLAESCARAGLRRESSPEEILRPDGPLAELIDGLARLPEFDEALERAAEDAALKARAQESEAERTAPRTGGGSAARLSSDTVAFRGELERRGIEALPICELAEIVDPTWGPALEGLLGRAREALVVSPDRLSEALGVLQSGRDRFHRCILVKTTDTAKQRSRRYDDGPLTVIETSDPHAEAFLGVRLGGYDLARDDAELARLSRAVAPSGRTTAGMAYSVTRNVDLLMTRGHRGPTVDSRRAHEAAVAEARRLRGEAAVLREAARTAAAVRARIARGLDDIDALRSELDGLEGRRRTLQTEREGIEKRDNAGLTAEIAALTTERVGYLRELSEELEPKLDRLLADEAALRARLGPVREAARAALAARRSALRQVMGGDAARVRLARSESFSVGVIAEARGALAGLDAKAAGTRAATERGLAREAAEAARSHGRIAERELTEACSAWRVENPLNAGDAPAIDGYAWVRREYEAVEGHELRRYRAQAERAEVEMRRLMTEDLLTRLADRFERVHARLAALNERLSVRSFTGQTYAFEAAVDRRYAAVHALATETARSPEAAQALLAGETEGPMAAALEEITALIAGQEDAARLADYRNYFVYEIGMKDAAGNRTTMSARALRGSGGEAQAPFYVAIAASLASAYYPGDRPGDENPGLGLCLLDEAFSKLDVRNSQALVDLYRAWGLQLLIAAPEDKRTTLTEVMDTIVTVYKSPDLTSVRIEAEHPLEAARRALHAINPEQVGIEGYRRSDAAE

SEQ ID NO: 36033 - protein, 482 aa, Pseudobacteroides cellulosolvens ATCC 35603 = DSM 2933
MKVFDVIPGQFFRILTGKNRNVYVEILLSLRKAFKNELYIDKESLVNIFAECLGDLMIPIDIEAELEEALSDLSDINIEGPQSITWSSMAHLILRRLRDTNWIEIEYKQRSYDEIVTIPPYSVSMIEFLHSITQENTQSYKSYAFNTYSSLKTVLSDDSEDYLFTALESAYTNCNLLRDSLKVLLNNIRRYHQILNNSAAANDILKNHFEGYQVLVNERIFHPLVTRDSVLRFKVPIMTMIDKIRSNEELRKRIVALGIKERQYNDPESGMEELSQKLYEIYDTFEGIDRLMQEIQNKNSAYTKASIDKMIYLLNYDQSVKTKLADILMKYSDLDEDKKEVVSSSLKLFKQSYIDEKSPYCRSNRKIRSFEPPEKIKITKTEHPENELSDFLKSVKSLYSQQQVAEYMEKEFGSRKVLNSRDLYIKDDRSFVMMLLAAMRSGEKRIFYDVEFLEGYIENKGYRYPNMRFIRKDEENNDKPLD

SEQ ID NO: 36034 - protein, 244 aa, Pseudobacteroides cellulosolvens ATCC 35603 = DSM 2933
MTNLWIEEFEKLSISEQNMFRKCVNSILAKTFTISETYDEDTGMMKSNPEYRFIDRNFEIINTYLSYAGWNLLKDRNLGVIYIESEYEYNRLHLNSITTLFIYTLRLLYDEEREKLTLRSTIPVTTYDVVSRLMTFNTLKRKPSDKDLSDTFKLLSRFNIIQKLSGDWTEPDCKLIIFPSILMVLPNDSIGRIFSSLQEDLASDLQPNGDERNEIDETYEIGETYENDDVDDIDPDVIRGEENQ

SEQ ID NO: 36035 - protein, 1135 aa, Pseudobacteroides cellulosolvens ATCC 35603 = DSM 2933
MKKLTRLLLVNWHYYSLEVIEFDDINFLTGKTGAGKTTIIDAMQLVLLGDTNGQHFFNKAANDRSRRTLKGYLRGEYGDDGQTGFLSLREGPFSSYIVCEFFDTEKDRYLTLGVVFDCNFSVQDESTYFILKEPIPENYFIVDESPLSIKDLKAYLRKNYDKNLFEFSESGRAYQSKIKSLFGGLRDNYFSLLKKAVSFSPIVDIEEFITSNICDAKDNVDITAMQENLRHYRKLEQEANLMKSRITDLENISRNYKALQDERQKLDIYQYLIDRSELEKNLLEINKIKDNIENLENQYAEKAGNQAKLAAEIMEKSTSRDSLIEQRGKDNLYQNQQALESEKKTIEEKIRSFESTINELVNRFHIYGLNWSSAAEDTENLIGHVGRLSNKDSINDELNELYTSLTSFKHGIGKLLDIRDYNLSSLSSDQYHKLMESGDSFKTSLSNLGHMLSKLLDSKSLVLKECEEKIIALKRNIKPFDRTVQTLKEELQLRLSLKYKKDIAVNILADLLEIPDARWVNTIEGYMNRQKQYILVAPEYYPEALKCYEQIKLDKGIYDIGLIDGEKALSSNPVCLKGSLAEEVFTDDPYARAYVDFLLGRVIKCDSVTDLRKNDRSVTDTGMLYQGYVASQISPSLWQKPLIGKKSIQEQIARLELEKNELEEDYKLIKSSFDMFKKIRHIDTMNQNEAQDNDRKLQESMAIPNLQSRKQEILDKLSQLDLAWIHDISNEINALGIEIEELKSLERDCISKCGVLKERIDNLRDVQLPNEIAQSEIKNKQITANYSKEWISETGEPRFIEELSNKKNPNSIIADHRSSLGARRNQLEKHLELLLNLRSEYNRKYGYSYDIGARDNQKYDKTLLELREEKLPQYLEKITGAKSMAYEQFVSHFLAELKANIDDVTERIAELNNSLKKHRWGSEQFSFSVVPNPDYKPFYDMITDPMLMSGYNITSHVFIEKHGPVIDELFSKIMDYGSGMDADSRLEMEKNIKLYTDYKTYLRFDMYSYDQDNNRQRLSKTLLKKSGGETQTPFYIAMLASFAQLYHVNDRNWNCIRLIIFDEAFSKMDGERIRESILLLRSIGFQCILSAPPEKIGDIAPLVDRNIVAIKKGRQSFTRFFAGSKLSQEFASSLE

SEQ ID NO: 36036 - protein, 393 aa, Vulgatibacter incomptus
MSRLVQVLEDDERAQRVAAIRALLASPLLSASSDPEIFRTVVRQRAYLTEWFASHPGWRLVIDPSGGYARLHKVPGRSDTTKPARRADGTPFDRRRYALLCLTLAALDDAPVQTTVGRIAALVEEASADDEEGVAFDPSLAAERRAFVDALRLLVSLGVLRVRDGDADRYAHTREGDALLDVNERVLGQLLAAPIPPVFAGTPEGMLDEQLPDTDEGQRLSARYRVIRRLLEDPVLYYDDLDARAFDWLDHSRGFLYALLEDDVGMPIERRREGLAAIDPEGLVTDERFPDGGSTVRHAALLLASHLAKQGERDVAVERGALVEVVTALQADHSERWSKQYSADEQGAAQLCEEAVALLEAFGLVRHEGDGRLRVRPAVARFSPGEPKKKRAR

SEQ ID NO: 36037 - protein, 687 aa, Vulgatibacter incomptus
MKVPLDLPVASTGRWQLLRAGIQNLWEYDDQRFVFHRGRLLLRGQNESGKTKALEVLLPFLLDANLQPSRLDPFGSTSRSMRWNLIGDWNPEANTSIGYVWLELGRVENGETRYCTVGAGLRARRASTDTDAWYFRTSQRIDVDLLLVEDRLPLERPALTKAIDARGQVYQQAAEYRRAVNDEIFGMEEEQYGSLIDALLQLRRPQLSKKLDPEELSQILSASLPPLDRTVVASLAEGFERLDKHRLERDDVSATLQTLRRFRKVYERYVASAVKAAAKDLTTGESSYHIARESLRKAEEELEALYGERKALAGEIAALDAERQELAARLAALRSSDGFRAVEHLADAERLAQQEETRAQREGVLAAKDREAERVATARLGEAEKERVDQGKRAEAARRSTARAAEDASLGQDHAGIDELFDRGELEAAASAIESLHGRREQHLARLRKLEDAALDARKRRDRAAQAFSDATDRAADFRDRLDRAEKQAQAVRSELEDSIGRWSRGLRVLLLDPDDVRELAPLETPERVRRAEEATRKALGDHLTAARLELEKVKEELEDRRREHDELAALTHRPPSAPAWRAPRPTDRPGAPLYLLCDFDDGVDETVRGAIEGALEAAGLLDAWVEPSGGLLDADTFDLVLSPAPLEGRTLLDVLRPMEGPVPAPVVETLLSSIALTDDGPGGEES

SEQ ID NO: 36038 - protein, 416 aa, Vulgatibacter incomptus
MSADREKIRTLLGGPRYETLFREARKRREEDGREARAFTLRRANVDERRAAADLFGWPLVPNGTIRISLDELDRQLRASAVEAGLDEVLEALGGPLVNRRALRAATAIERELLWEGAARAVGERPELRAWLDDLRRHGLVSRAAHALSVGEEVVLERAIAAASRLPASGLALAVLAAETTGDAHALDAGSPLGGLVLRAAARIAGWHEPPSTAAPRRALWGEVGIVCDPLSAQVLVLGLCLQGEGRLSRRLRDAALDGEPQRLTLREIGGRDLRPDPAGEIFVCENPSVVAAAADRLGARSGPLVCTEGVPSTAALGLLRELARGGARLRVRGDFDWAGLRIGGQVLREAGGQPWRFCADDYLASLGTGAGRELEGAAGASPWDPALASAMARHGTAVYEEQLLDLLLRDLEVGSS

SEQ ID NO: 36039 - protein, 222 aa, Arthrobacter sp. Hiyo6
MDRPFTSRLSPTQVRTLRRILPTLQDRSSEIHAVMTAFSRSLRRFVQSQEFEQDRLINQRLRSALRQAMETSQSVKPFVKTELSLDLTSVPLNSVAALNLHNPADFEAAGEIAQHDADTVDIEELRALARASEIDMVELTGNLNAVLARQSSATIADVLAEYPATQGVASVVGLLVLAEEHATALAGRENISWQYPANTTDGPGIIRRGTVGRYLFTERILP

SEQ ID NO: 36040 - protein, 224 aa, Arthrobacter sp. Hiyo6
MSESGVPGPVGGEGPESDVALWGGDKGTLREPSRRVLVQLLRGPYLSASRHGNLWTALLSDEDAVRSRLADLFLDLVTDHAAQVAFVRNTSADVDAPKVMRTATLTFLDTALLLHLRQALLQESGGRKTIMGADEAADQLQVYRGKDNADIAGFAKRINSSWQKMVKYGLLAATSTEGRFEVSPVLRLVFGTEEIAAVQAEYQRLAAEAEPGSAELPDTGEETE

SEQ ID NO: 36041 - protein, 426 aa, Arthrobacter sp. Hiyo6
MSITTAAAAPGIRTGQWRLERVELINWGTFQGHHGLDISRKGFLLTGHSGSGKSSLVDAVSAVLTPRGKLHFNAAAQDTSARGEDRTIVSYIRGAWRRSADDETGEVRAEYLRTGATFSGILLRYSDGTGAKPVLLLKLYHLRRGSNTPADVSELSILLQEDAKLTDFVDYLRNGIETRRIKSNWPAAFATDKHSAFASRFCRVLGISGENAVLLLHKTQSAKSLGSLDDLFRQFMLDRPKTFDMADTAVAQFGELSEAHRLVVEAREQVEHLRGMEEPAVAFRLNSGRAAEAAALSSALPSFKDEWKLKLSVEAKAAAESAVLTAQHDFELAASVTAELEEAHSAAAGKWTAMAGRRCATSRLRWTWLRNAKALSWGARRVGFKVGSGRHYLPRQLQRVRGTSGRGPHRTQWPGCRPGGQQAGHQ

SEQ ID NO: 36042 - protein, 59 aa, Arthrobacter sp. Hiyo6
AWSQLPPEERHINSIRALLTHALHDGAGFDRDGWEAVDFEQIDGTTRTAYLPVVTLKKD

SEQ ID NO: 36043 - protein, 284 aa, Arthrobacter sp. Hiyo6
MTEEITTTTDRVTAAPGSASGAGRPLAVTPRDTFVDGAALFPGDTGVLSMKVRQALVKLLKGPYIDGGRDEKLWTTLLDNQIILRSRLSELFLTLQLDHERKIAVLRPVDPESIGGSTRSSILRQQRALSRVETIVLLRLRLLLDRHVTAQTDPTIRREEIAELVAHYQPSGQQDALRDSDVVNRAITKLLARQLLLATGLDDVYTISNALPLALPFENIGDIPAQIEALVAATADQSGTEPLIELDGEDTVRSDDDSEDDDSVTDSSGGAAEGDQTDEVEAAK

SEQ ID NO: 36044 - protein, 101 aa, Arthrobacter sp. Hiyo6
MSIATMLPIGELTNPGQMRLALVQVVNWGTFHGAHTMRVDRNGTLLTGNSGVGKSTLFDAMLRVFDARPRSNEAAAQRSGGAWRTSGPRSRTCAARWVTKP

SEQ ID NO: 36045 - protein, 488 aa, Corynebacterium riegelii
MALQARALTFKRQKEQSAAVRLLHADNAPVVLAMIAEYFPRGAEPRPAGEVYELMAADFALLRDTFDLPKSPQSYCNDWVKAGWLVRKSGTQVTGETLEPSEDGLVALQMMDRVGGPYSAVTASRVASISNALQDLARDTDPDISTRLKHLRRQRDRVDEMIADVERGVFELPSDASVQERVGDILGMASAIPSDFARVRHQLEVLNLDLRRQLLDPEGSRGDVLAEIFAGVDVISESDAGRSFNGFYRLVVDSEHGAWVESWIGEILQRVGPEVMDSKTRSQFRNLFRNLEDAGYEVNRMMTRLARNLRNYVSSEQFAEDRRMIELLRDTRRLAAEAAEAEELSPTKRMETPLQRIGMAVSSVAQMKLADPGAEVITSDVERFEASEGDAEALLELVRESEIDLEELSAAVADAVAELGKPSIADVLEHHPATQGLASVVGLVYLAMRFGVQLDGRESVRFEEDDGAVRLATLPLFTFDTTSVEEMR

SEQ ID NO: 36046 - protein, 207 aa, Corynebacterium riegelii
MTEALWSGDTGTLSYESRRALVDLLKGPLISADRKKDTWNAILSDKEALRSWLHDVFLELVIDEEAGIAFTRHVRPDNDDVHVPPVLRTDSLTHLQTAVLLQLRHELGMSTPGERVVVGEDELYTAIGYVRAVDNRDEAGFKRRFDAAINAIKNKYSLLTETETEGRYVVSPVLRHIFDADTVYALREEYLRLAGANAGNEPEGEEQ

SEQ ID NO: 36047 - protein, 1098 aa, Corynebacterium riegelii
MTEQFKLARVQLVNWGTFHGYFDIPVGQKGFLITGASGSGKSTLIDAFSTILVPQSKIRYNAAAQQDSTRDKGRSRVSYIRGAWRRSEDPTTGEIRSQYLREGATATVVAMTYHSPSETYTLVAIFRLNAGQNSEAQVRTLYGIFPDEVDVDAFMPHLVNSLDKRKLEQKFKTPSNGVTFTDQYSVFANRFRARLGIDSEDAQMLLHRTQSAKSLSSMDELFRDYMLEQPITFDLAREAVATHGDLRYAYERLEDLNRQIEALAPLPGLQASLEEAQATRGHAEALAAALPSVRRAIEAAELRDAITTHQAQREAVKVQESSLTQRKQAQQEAVQRAYAKLEGLTGDAVTPLRQRIQREEQELAARTAKAKELQRILGVDELTTETFAELKAQARREIEEAPAERELLDATWSDARAQKQQCEQQERAIQQELEGLSARSSNIDQGFIDLRAQMCADINLTTQGLPFVGELIDVLKQEEEWEPVIQRLLSNFAITLLVPEEHERAVNSWVNSCRLGRRLEYRTVPAGATPPRRPKNSASLFHKVAVVDSPMRPWLEQMLTSTFDYALVRTVEELEQQTQRAATIDGLERNVRDRTRSTRYIKDDRRPLGQHRDYRLGSSNNKKVELLRGSLKEARQATTAAHNRERELQRKRVSLQHRLDQVKLIASTGWVEVDYVGVEKQLAQLQAELELVTSSPEVRELSRAYEDACDSLQATEEELREVQRQITVAETSIAADQARLAEVERASVAVDQALFDELEAKLKSRKRRLTRENIGSLADEVQSELDATIKHNAQVITSANTKIGNILTSYLAGWPSESAELRAEPEFAGEAINRLEALRADRLPEFRGRFLELLNGQSVMHLSHISTQLARAKGDIETNLGPINASLMRSKYTPEGGGRYLQIEVRDNRGPEVREFQQDLREATAGSLSAADETEAIARYHRLAKIMDRLASSERADTRWRNLVLDTRRHVKFVGNEIDADGEVYNTHVDSASLSGGQAQKLVFFCLAAALRYRLAGVDADVPTYATVVLDEAFDRADPTFTRTAMDVFTRFGFHMILATPMKLIKTLSPYVDGTIVVNYAETPQARSTFEFIDTHGG

SEQ ID NO: 36048 - protein, 386 aa, Corynebacterium riegelii
MRLPDQLPLRLDIERALLGSALPESIPLHPPTAKKVLAEPLVATEFVRAWQAYEPQVEVEWVTRRWAHLGQQRVPARVHIGSWERVAELTGQSSALALARSRFAELVGLFPCSPGFPGFRVTVARTHSTWLSLDNLDFTRLTNTLTWMYTHPASGLRPRAVPVEGVDTKWVESHQSLLLRLLKPLGLATLGLSLTDATLRLRFLDPSLAPTPNLLDIAVPFNALPLPLGLTVVIVENKETFLALPQAPVGSNAVLVFGAGYSGAQLASLDWVRGGKVLYWGDADADGYAILNALRSHMSAGADGASGADAEFGCVESVAMDSVTVAKFLHLSVDDPGDATRHLPFLTEEEENARRLLITRGNRRLEQERVSLEWALAQEAFTAIWG

SEQ ID NO: 36049 - protein, 524 aa, Bifidobacterium animalis subsp. animalis MCC 1489; identical to SEQ ID NO: 31717

SEQ ID NO: 36050 - protein, 269 aa, Bifidobacterium animalis subsp. animalis MCC 1489; identical to SEQ ID NO: 31718

SEQ ID NO: 36051 - protein, 1165 aa, Bifidobacterium animalis subsp. animalis MCC 1489; identical to SEQ ID NO: 31719

SEQ ID NO: 36052 - protein, 406 aa, Bifidobacterium animalis subsp. animalis MCC 1489; identical to SEQ ID NO: 31720

SEQ ID NO: 36053 - protein, 524 aa, Bifidobacterium animalis subsp. animalis MCC 0499
MADVRSELAQLRPVYETGVLRMLLHKYSDIYIAMLRACFDPLTAEVPQERLLARMREAIGELAADGTYTPREGEDDMMAARRILKELKAEDAGDYAWVADSIDRRQHRLMCRLTQRAHRAIEALATLQQRTVSLSGAQVNSIIMEIESARKQLTVNVEERIELLEREIDERQHQIDNLKAHGIGRRPTREQVSDIINVVYNTLRGVPVDLRELVITERDNGDALRRRIDDGSMSSNDMLTFYHEEYERTYRLSDEGRRFNDAFQVMYAPQSREELNEALQDISNSEWLHGEADDLMSVVNREFEDIYDGIDDVRHQIRVTDESVKLLVRQQTDMQFRTMSRQLAKLFTQLGESVHAKGRYDIGTATTSLLTLPTRARETPVKTAAPELQMQVDDGIAQVDLNGIVAAGGPRIHHMIELVAAHPVLIDDAGGALADSVVDIAASFNELAADERRESEIVGFLSYLGSASPTDAAGNSDGGQIPVPRESLWHCVTTDGRTRVWRTCALFVPGQVLKDFLDDTMVED

SEQ ID NO: 36054 - protein, 269 aa, Bifidobacterium animalis subsp. animalis MCC 0499
MAMDDSTGQGIAGDANLGMVSKVLSDEYEEGVADEAGMADLANVHALFDGDIGDMPAPAREAAIALKRNRSISGDMYHQALDYMDHVRRSLNNDMLVPVIDTYYEVMYAEPIAADEYGIRSLKTRASLSAREAVMLASLRRKVLDYENVGAAAADWLISKEEIVNTMSTGAGPLAGRNSEEAVQAQVDRLIGSAKNNGFLAPVEDDEGMYVITKLVPVVLNPERIAAWLGADDASTAQPEPDGTGDDSDGSGHTDQDEYPEDDDMEALF

SEQ ID NO: 36055 - protein, 1165 aa, Bifidobacterium animalis subsp. animalis MCC 0499
MSETSDIYASIELMPPHWALASRQLVNWGSYDGYHVFEPSTAGDDTVTLLTGQSESGKSTLVDAQVSLLYPANAVFNKASNAGRSDRSDYSYLLGLRGIRSNNGHDEPVYLRGRSGKGEPYAVWGAIVDHYVDTANSGALWIAKFMYLPAEGTPESMVKLYVVSSYAIDPRLMDAHREERFSVPLIKQVYPGVTVYNYAKQFHEDIWKRFGLTESACRLLHRMQASDAPSQLDDIFRKGVLNEPRAIEFGKLAIDDYEQFAENFSSMERTRKRVRQLEAIASEFAEYESAERGVRELSAIAPQQGDSARIRTQWLDDRIHADITEVLPEYEQYATECSASAQAAKERAEQMREQVDSLNRQLQGMGGDEIGRLEDRIRDAQRRQREVLGRRELLASRFSASGEALPESRGQWDALVAEYTQLESEYQQRKTELHGLQYPLIDAQKKAEQRIKALEKDLERKRQSKTRISSDMDEARNMIARATGLSPQELPYAAELMDVGEENEEWRTAMNVAYRSLATVILVDSRHENGFAAKVSQISQEALPRRNWRFVDTSVHVEAEEREGWLSSKLTFNVESPFVDWLRARVTEARYDAWCVEAIDDTNETTRQVQRDGQIKEGRKGSHGTKNMPAVIGFVTDAYLRDLEADIAEAHKTRDAATRDLEQYDVQLNALEQRHSLAQTLQDHAWNDIDAYGVEEEIASLQQRVDELEQNPELAQLNATLKVQQQEMAKANSACYAAEDKLKRANAAVRSTRQWLEAYDRRTQSVERRHLNEACGRLLEQGYLAYFGESTQSANERMGRILGLDGQSGTSLGGHVRENEACAKHVRELLGTLAQTVGRQVKELATQRDNRKRSCEASMRSYLDQYASGDERVSADVENERYFRKDLEELKPGVIGDEATNVEYMNSLDKMLQDLVQLQTMLKLDQQRITEQIGKINHLLERYPFGARGGRLSIVVQVHRPDAKFTTALTGQIGRINAFKANDEHDVERCRKLFAGLAGLIEMLRGSFDEYAGNGRGNANLDPRKRSRFFGSVTNPDGVVESINSTGGGSGGYLQELTSFAYGAALMYLLANDNATEPSYATVFLDEALIKADGQYTRRALSVLPGLGFQVIVSAPESKTGEIMGSASKVIVAHKDQASGRTTLMQGDLLGDADGDESSMGERSE

SEQ ID NO: 36056 - protein, 406 aa, Bifidobacterium animalis subsp. animalis MCC 0499
MTDTATLKTPADVRGDVARIVQRELFADESPWPRTIRIPWPKETQLVADVAGVHAANNALKEFAARFGCRTDFISRKMGTAVPLVAYIHVPDEATALAIAGPTLRRPREQALARAAQLEQRCRVDHALAMDVVRRLNNETDVDFGLFVEAAQWFGRHWAEVPGLTAREIPLPGFSAKWLAGSRSHRRAAICTVLGVHRMPLRERPGEVRYRYMDQRFAAEPDRVATSVQCVPERPVSLAVIVENKDTYQAMGPIDGAVCVFGAGFAVNRVPELLPWLANDAVRVVYWGDIDAAGFEILSGLRASGVACESILMDRMTYAEYERFGTTRDAMSHEIRCGEPKHGLHLSSEEYSLYRDLCTGELAVPRIEQERIPIAEFMRLISAGRSDGSDGARADQCHSQSPRTPK

SEQ ID NO: 36057 - protein, 524 aa, Bifidobacterium animalis subsp. animalis MCC 0483; identical to SEQ ID NO: 36053

SEQ ID NO: 36058 - protein, 269 aa, Bifidobacterium animalis subsp. animalis MCC 0483; identical to SEQ ID NO: 36054

SEQ ID NO: 36059 - protein, 1165 aa, Bifidobacterium animalis subsp. animalis MCC 0483; identical to SEQ ID NO: 36055

SEQ ID NO: 36060 - protein, 406 aa, Bifidobacterium animalis subsp. animalis MCC 0483
MTDTATLKTPADVRGDVARIVQRELFADESPWPRTIRIPWPKETQLVADVAGVHAANNALKEFAARFGCRTDFISRKMGTAVPLVAYIHVPDEATALAIAGPTLRRPREQALARAAQLEQRCHVDHALAMDVVRRLNNESDVDFGLFVEAAQWFGRHWAEVPGLTAREIPLPGFSAKWLAGSRSHRRAAICTVLGVHRMPLRERPGEVRYRYMDQRFAAEPDRVTTSVQCVPERPVSLAVIVENKDTYQAMGPIDGAVCVFGAGFAVNRVPELLPWLANDAVHVVYWGDIDAAGFEILSGLRASGVACESILMDRMTYAEYERFGTTRDAMSHEIRCGEPKHGLHLSSEEYSLYRDLCTGELAVPRIEQERIPIAEFMRLISAGRSDGSDGARADQCHSQSPRTPK

SEQ ID NO: 36061 - protein, 524 aa, Bifidobacterium animalis subsp. lactis ATCC 27536; identical to SEQ ID NO: 30666

SEQ ID NO: 36062 - protein, 269 aa, Bifidobacterium animalis subsp. lactis ATCC 27536; identical to SEQ ID NO: 30689

SEQ ID NO: 36063 - protein, 1165 aa, Bifidobacterium animalis subsp. lactis ATCC 27536; identical to SEQ ID NO: 30668

SEQ ID NO: 36064 - protein, 406 aa, Bifidobacterium animalis subsp. lactis ATCC 27536; identical to SEQ ID NO: 30669

SEQ ID NO: 36065 - protein, 524 aa, Bifidobacterium animalis subsp. lactis ATCC 27674; identical to SEQ ID NO: 30666

SEQ ID NO: 36066 - protein, 269 aa, Bifidobacterium animalis subsp. lactis ATCC 27674; identical to SEQ ID NO: 30689

SEQ ID NO: 36067 - protein, 1165 aa, Bifidobacterium animalis subsp. lactis ATCC 27674; identical to SEQ ID NO: 30668

SEQ ID NO: 36068 - protein, 406 aa, Bifidobacterium animalis subsp. lactis ATCC 27674; identical to SEQ ID NO: 30669

SEQ ID NO: 36069 - protein, 524 aa, Bifidobacterium animalis subsp. lactis ATCC 27673; identical to SEQ ID NO: 30666

SEQ ID NO: 36070 - protein, 269 aa, Bifidobacterium animalis subsp. lactis ATCC 27673; identical to SEQ ID NO: 30689

SEQ ID NO: 36071 - protein, 1165 aa, Bifidobacterium animalis subsp. lactis ATCC 27673
MSETSDIYASIELMPPHWALASRQLVNWGSYDGYHVFEPSTAGNDTVTLLTGQSESGKSTLVDAQVSLLYPANAAFNKASNAGRSDRSDYSYLLGLRGIRNNNGHDEPVYLRGRSGNGEPYAVWGAIVDHYVDTANSGALWIAKFMYLPADGAPESMVKLYVVSGYAIDPRLMDAHREERFSVPLIKQVYPGVTVYNYAKQFHEDIWKRFGLTESACRLLHRMQASDAPSQLDDIFRKGVLNEPRAVEFGKLAIDDYEQFAENFSSMERTRKRVRQLEAIASEFAEYESAERGVRELSTIAPEQGDSARIRTQWLDDRIHADITEVLPEYEQHATDCSASAQAAKERAEQMREQADSLNRQLQGMGGDEISRLEDRIRDAQRRQREVLGRRELLASRFSASGEALPESRGQWDALVAEYTQFESEYQQRKTELHGLQYPLIDAQKKAEQRTKALEKDLERKRQSKTRISSDMDEARNMIARATGLSPQELPYAAELMDVGEENEEWRTAMNVAYRSLATVILVDSCHENGFAAKVSQIPQEALPRRNWRFVDTSVHVEAEEREGWLSSKLTFNVESPFADWLRARVTEARYDAWCVEAIDDTNETTRQVQRDGQIKEGRKGSHGTKNMPAVIGFVTDAYLRDLEADIAEARKTRDAATRDLEQYDVQLNALEQRHSLAQTLQDHAWNDIDAYGVEEEIASLQQRVDELEQNPELAQLNATLKVQQQEMAKANSACYAAEDKLKRANAAVRSTRQWLEAYDRRTQSVERRPLNEACGRLLERGYLAYFGESTQSANERMGRILGLDGQSGTSLGGHVRENEACAKHVRELLGTLAQTVGRQVKELATQRDNRKRSCEASMRSYLDQYASGDERVSADVENERYFRKDLEELKPGVIGDEATNVEYMNSLDKMLQDLVQLQTMLKLDQQRITEQIGKINHLLERYPFGARGGRLSIVVQVHRPDAKFTTALTGQIGRINAFKANDEHDVERCRKLFAGLAGLIEMLRGSFDEYAGNGRGNANLDPRKRSRFFGSVTNPDGVVESINSTGGGSGGYLQELTSFAYGAALMYLLATDNATEPSYATVFLDEALIKADGQYTRRALSVLPGLGFQVIVSAPESKTGEIMGSASKVIVARKDQASGRTTLMQGDLLGDADGDESSMGERSE

SEQ ID NO: 36072 - protein, 406 aa, Bifidobacterium animalis subsp. lactis ATCC 27673; identical to SEQ ID NO: 32865

SEQ ID NO: 36073 - protein, 523 aa, Bifidobacterium animalis subsp. animalis ATCC 27672
MADVRSELAQLRPVYETGVLRMLLHKYSDIYIAMLRVCFDPLTAEVPQERLLARMREAIGELAVDGTYTPREGEDDMMAARRILKELKAEDAGDYAWVADSIDRRQHRLMCRLTQRAHRAIEALATLQQRTVSLSGAQVNSIIMEIESARKQLTVNVEERIDLLEREIEERQHQIDNLKAHGIGQRPTREQVSDIINVVYNTLRGVPVDLRELVITERDNGDALRRRIDDGSMSSNDMLTFYHEEYERTYRLSDEGRRFNDAFQVMYAPQSREELNEALQDISNSEWLHGEADDLMSVVNREFEDIYDGIDDVRHQIRVTDESVKLLVRQQTDMQFRTMSRQLAKLFTQLGESMHAKDRYDIGTATTSLLTLPTRARETPVKTVAPELQMQADDGIAQVDLNGIVAAGGPRIHHMIELVAAHPVLIDDAGGALADSVIDIAASFNELPADERRESEIVGFLSYLGSTSPDAAGSGDGGQIPVPRKSLWHCVTTGGRTRVWRTCALFVPRQVLKDFLDDTMVED

SEQ ID NO: 36074 - protein, 269 aa, Bifidobacterium animalis subsp. animalis ATCC 27672
MAMDDSTGQGIAGDANLGMVSKVLSAEYEEGVADEAGMADLANVHALFDGDIGDMPAPAREAAIALKRNRSISGDMYHQALDYMDHVRRSLNNDMLVPVIDTYYEVMYAEPIAADEYGIRSLKTRASLSAREAVILASLRRKVLDYENVGAAAADWLISKEEIVNTMSTGAGPLAGRNSEEAVQAQVDRLIGSAKNNGFLAPVEDDEGMYVITKLVPVVLNPERIAAWLGADDASTAQPEPEGTGDDSDGSGHTDQDEYPEDDDMEALF

SEQ ID NO: 36075 - protein, 1165 aa, Bifidobacterium animalis subsp. animalis ATCC 27672
MSETSDIYASIELMPPHWALASRQLVNWGSYDGYHVFEPSTAGDDTVTLLTGQSESGKSTLVDAQVSLLYPANAVFNKASNAGRSDRSDYSYLLGLRGIRNNNGHNEPVYLRGRSGNGEPYAVWGAIVDHYVDTANSGALWIAKFMYLPAEGTPESMVKLYVVSSYAIDPRLMDAHREERFSVPLIKQVYPGVTVYNYAKQFHEDIWKRFGLTESACRLLHRMQASDAPSQLDDIFRKGVLNEPRAVEFGKLAIDDYEQFAENFSSMERTRKRVRQLEAIASEFAEYESAERGVRELSAIAPQQGDSARIRTQWLDDRIHADITEVLPEYEQYATDCSASAQAAKERAEQMREQVDSLNRQLQGMGGDEIGRLEDRIRDAQRRQHEVLGRRELLASRFSASGEALPESRRQWDALVAEYTQLESEYQQRKTELHGLQYPLIDAQKKAEQRIKALEKDLERKRQSKTRISSDMDEARNMIARATGLSPQELPYAAELMDVGEENEEWRTAMNVAYRSLATVILVDSRHENGFAAKVSQIPQEALPRRNWRFVDTSIHVEAEEREGWLSSKLTFNAESPFVDWLRARVTEARYDAWCVEAIDDTNETTRQVQRDGQIKEGRKGSHGTKNMPAVIGFVTDAYLHDLEADIAEARKTRDAATRDLEQYDVQLNTLEQRHSLAQTLQDHAWNDIDAYGVEEEIASLQQRVDELEQNPELAQLNATLKVQQQEMAKANSACYAAEDKLKRANAAVRSTRQWLEAYDRRTQSVERRPLNEACGRLLEQGYLAYFGESTQSANERMGRILGLDGQSGTSLGGHVRENEACAKHVRELLNTLAQTVGRQVKELVAQRDNRKQSCEASMRSYLDQYAPGDERVNADVENERYFRKDLEELKPGVIGDEATNVEYMNSLDKMLQDLVQLQTMLKLDQQRITEQIGKINHLLERYPFGARGGRLSIVVQVHRPDAKFTTALTGQIGRINAFKANDEHDVERCRKLFAGLAGLIEMLRGSFDEYAGNGRGNANLDPRKRSRFFGSVTNPDGVVESINSTGGGSGGYLQELTSFAYGAALMYLLANDNATEPSYATVFLDEALIKADGQYTRRALSVLPGLGFQVIVSAPESKTGEIMGSASKVIVAHKDQASGRTTLMQGDLLGDADGDESSMGEQSE

SEQ ID NO: 36076 - protein, 406 aa, Bifidobacterium animalis subsp. animalis ATCC 27672
MTDTATLKTPADVRGDVARIVQRELFADESPWPRTIRIPWPKETQLVADVAGVHATNNALKEFAARFGCRTDFISRKMGTAVPLVAYIHVPDEATALAIAGPTLRRPREQALARAAQLEQRCHVDHALAMDVVRRLNNESDVDFGLFVEAAQWFGRHWAEVPGLTAREIPLPGFSAKWLAGSRSHRRAAICTVLGVHRMPLRERPGEVRYRYMDQRFAAEPDRVTTSVQCVPERPVSLAVIVENKDTYQAMGPIDGAVCVFGAGFAVNRVPELLPWLANDAVRVVYWGDIDAAGFEILSGLRASGVACESILMDRMTYAEYERFGTTRDAMSHEIRCGEPKHGLHLSSEEYSLYRDLCTGELAVPRIEQERIPIAEFMRLISAGRSDGSDGARADQCHSQSPRTPK

SEQ ID NO: 36077 - protein, 489 aa, Xanthomonas campestris
MKHQARIAGYRQLREQPVWKLLAADHAPELIGLLQTVLLDGERRLPSAVLHERLQRQLDALRADELSRELPRTAQAYLAHWLAQGWLERRLPEGAAEEEYELSRAATQAIRFIVGLRESSSSATESRLSLVIQQLVQLAGQTEADPELRLAALREERARIDAEIERVASGRVAALDGKRALERARDLIHLSDELAEDFHRVRDDFEQLNRQFRERIIDDEGARGDVLEQLFNGVDVIADSEAGRTFEAFWSLLNDTQQSSQLDQALDALLARGFARKLDRRERAFLRGLTGTLLERGGEVHTVMQHFARSLRGFVQSRGYLEQRRLNQLLKQAQGEALQLRDSLHATTATGYTQALSAARLRSLSQWRLHDPRLTQVDGRVQAADAADISLDSVGDLVAQSEIDVRSLRRDLHELLGQRPRLTIGDALQQRPAAQCLGSVIGYLSLGTRHGVVIDGQMETVQWEGGDGALRRARIPLVWFTREKRNELD

SEQ ID NO: 36078 - protein, 233 aa, Xanthomonas campestris; identical to SEQ ID NO: 36018

SEQ ID NO: 36079 - protein, 1360 aa, Xanthomonas campestris; identical to SEQ ID NO: 36019

SEQ ID NO: 36080 - protein, 488 aa, Xanthomonas campestris; identical to SEQ ID NO: 36013

SEQ ID NO: 36081 - protein, 219 aa, Xanthomonas campestris; identical to SEQ ID NO: 36014

SEQ ID NO: 36082 - protein, 1119 aa, Xanthomonas campestris; identical to SEQ ID NO: 36015

SEQ ID NO: 36083 - protein, 406 aa, Xanthomonas campestris; identical to SEQ ID NO: 36016

SEQ ID NO: 36084 - protein, 488 aa, Xanthomonas campestris; identical to SEQ ID NO: 36013

SEQ ID NO: 36085 - protein, 219 aa, Xanthomonas campestris; identical to SEQ ID NO: 36014

SEQ ID NO: 36086 - protein, 1119 aa, Xanthomonas campestris; identical to SEQ ID NO: 36015

SEQ ID NO: 36087 - protein, 406 aa, Xanthomonas campestris; identical to SEQ ID NO: 36016

SEQ ID NO: 36088 - protein, 489 aa, Xanthomonas campestris; identical to SEQ ID NO: 36077

SEQ ID NO: 36089 - protein, 233 aa, Xanthomonas campestris; identical to SEQ ID NO: 36018

SEQ ID NO: 36090 - protein, 1360 aa, Xanthomonas campestris; identical to SEQ ID NO: 36019

SEQ ID NO: 36091 - protein, 489 aa, Xanthomonas campestris; identical to SEQ ID NO: 33214

SEQ ID NO: 36092 - protein, 233 aa, Xanthomonas campestris; identical to SEQ ID NO: 36018

SEQ ID NO: 36093 - protein, 1360 aa, Xanthomonas campestris; identical to SEQ ID NO: 36019

SEQ ID NO: 36094 - protein, 488 aa, Xanthomonas campestris; identical to SEQ ID NO: 36013

SEQ ID NO: 36095 - protein, 219 aa, Xanthomonas campestris; identical to SEQ ID NO: 36014

SEQ ID NO: 36096 - protein, 1119 aa, Xanthomonas campestris; identical to SEQ ID NO: 36015

SEQ ID NO: 36097 - protein, 406 aa, Xanthomonas campestris; identical to SEQ ID NO: 36016

SEQ ID NO: 36098 - protein, 489 aa, Xanthomonas campestris; identical to SEQ ID NO: 36077

SEQ ID NO: 36099 - protein, 233 aa, Xanthomonas campestris; identical to SEQ ID NO: 36018

SEQ ID NO: 36100 - protein, 1360 aa, Xanthomonas campestris; identical to SEQ ID NO: 36019

SEQ ID NO: 36101 - protein, 488 aa, Xanthomonas campestris; identical to SEQ ID NO: 36013

SEQ ID NO: 36102 - protein, 219 aa, Xanthomonas campestris; identical to SEQ ID NO: 36014

SEQ ID NO: 36103 - protein, 1119 aa, Xanthomonas campestris; identical to SEQ ID NO: 36015

SEQ ID NO: 36104 - protein, 406 aa, Xanthomonas campestris; identical to SEQ ID NO: 36016

SEQ ID NO: 36105 - protein, 488 aa, Xanthomonas campestris; identical to SEQ ID NO: 36013

SEQ ID NO: 36106 - protein, 219 aa, Xanthomonas campestris; identical to SEQ ID NO: 36014

SEQ ID NO: 36107 - protein, 1119 aa, Xanthomonas campestris; identical to SEQ ID NO: 36015

SEQ ID NO: 36108 - protein, 406 aa, Xanthomonas campestris; identical to SEQ ID NO: 36016

SEQ ID NO: 36109 - protein, 489 aa, Xanthomonas campestris; identical to SEQ ID NO: 33214

SEQ ID NO: 36110 - protein, 233 aa, Xanthomonas campestris; identical to SEQ ID NO: 36018

SEQ ID NO: 36111 - protein, 1360 aa, Xanthomonas campestris; identical to SEQ ID NO: 36019

SEQ ID NO: 36112 - protein, 488 aa, Xanthomonas campestris; identical to SEQ ID NO: 36013

SEQ ID NO: 36113 - protein, 219 aa, Xanthomonas campestris; identical to SEQ ID NO: 36014

SEQ ID NO: 36114 - protein, 1119 aa, Xanthomonas campestris; identical to SEQ ID NO: 36015

SEQ ID NO: 36115 - protein, 406 aa, Xanthomonas campestris; identical to SEQ ID NO: 36016

SEQ ID NO: 36116 - protein, 489 aa, Xanthomonas campestris; identical to SEQ ID NO: 36077

SEQ ID NO: 36117 - protein, 233 aa, Xanthomonas campestris; identical to SEQ ID NO: 36018

SEQ ID NO: 36118 - protein, 1360 aa, Xanthomonas campestris; identical to SEQ ID NO: 36019

SEQ ID NO: 36119 - protein, 489 aa, Xanthomonas campestris; identical to SEQ ID NO: 36077

SEQ ID NO: 36120 - protein, 233 aa, Xanthomonas campestris; identical to SEQ ID NO: 36018

SEQ ID NO: 36121 - protein, 1360 aa, Xanthomonas campestris; identical to SEQ ID NO: 36019

SEQ ID NO: 36122 - protein, 488 aa, Xanthomonas campestris; identical to SEQ ID NO: 36013

SEQ ID NO: 36123 - protein, 219 aa, Xanthomonas campestris; identical to SEQ ID NO: 36014

SEQ ID NO: 36124 - protein, 1119 aa, Xanthomonas campestris; identical to SEQ ID NO: 36015

SEQ ID NO: 36125 - protein, 406 aa, Xanthomonas campestris; identical to SEQ ID NO: 36016

SEQ ID NO: 36126 - protein, 489 aa, Xanthomonas campestris; identical to SEQ ID NO: 36077

SEQ ID NO: 36127 - protein, 233 aa, Xanthomonas campestris; identical to SEQ ID NO: 36018

SEQ ID NO: 36128 - protein, 1360 aa, Xanthomonas campestris; identical to SEQ ID NO: 36019

SEQ ID NO: 36129 - protein, 488 aa, Xanthomonas campestris; identical to SEQ ID NO: 36013

SEQ ID NO: 36130 - protein, 219 aa, Xanthomonas campestris; identical to SEQ ID NO: 36014

SEQ ID NO: 36131 - protein, 1119 aa, Xanthomonas campestris; identical to SEQ ID NO: 36015

SEQ ID NO: 36132 - protein, 406 aa, Xanthomonas campestris; identical to SEQ ID NO: 36016

SEQ ID NO: 36133 - protein, 489 aa, Xanthomonas campestris; identical to SEQ ID NO: 33214

SEQ ID NO: 36134 - protein, 233 aa, Xanthomonas campestris; identical to SEQ ID NO: 36018

SEQ ID NO: 36135 - protein, 1360 aa, Xanthomonas campestris; identical to SEQ ID NO: 36019

SEQ ID NO: 36136 - protein, 488 aa, Xanthomonas campestris; identical to SEQ ID NO: 36013

SEQ ID NO: 36137 - protein, 219 aa, Xanthomonas campestris; identical to SEQ ID NO: 36014

SEQ ID NO: 36138 - protein, 1119 aa, Xanthomonas campestris; identical to SEQ ID NO: 36015

SEQ ID NO: 36139 - protein, 406 aa, Xanthomonas campestris; identical to SEQ ID NO: 36016

SEQ ID NO: 36140 - protein, 489 aa, Xanthomonas campestris; identical to SEQ ID NO: 33214

SEQ ID NO: 36141 - protein, 233 aa, Xanthomonas campestris; identical to SEQ ID NO: 36018

SEQ ID NO: 36142 - protein, 1360 aa, Xanthomonas campestris; identical to SEQ ID NO: 36019

SEQ ID NO: 36143 - protein, 488 aa, Xanthomonas campestris; identical to SEQ ID NO: 36013

SEQ ID NO: 36144 - protein, 219 aa, Xanthomonas campestris; identical to SEQ ID NO: 36014

SEQ ID NO: 36145 - protein, 1119 aa, Xanthomonas campestris; identical to SEQ ID NO: 36015

SEQ ID NO: 36146 - protein, 406 aa, Xanthomonas campestris; identical to SEQ ID NO: 36016

SEQ ID NO: 36147 - protein, 489 aa, Xanthomonas campestris; identical to SEQ ID NO: 36077

SEQ ID NO: 36148 - protein, 233 aa, Xanthomonas campestris; identical to SEQ ID NO: 36018

SEQ ID NO: 36149 - protein, 1360 aa, Xanthomonas campestris; identical to SEQ ID NO: 36019

SEQ ID NO: 36150 - protein, 488 aa, Xanthomonas campestris; identical to SEQ ID NO: 36013

SEQ ID NO: 36151 - protein, 219 aa, Xanthomonas campestris; identical to SEQ ID NO: 36014

SEQ ID NO: 36152 - protein, 1119 aa, Xanthomonas campestris; identical to SEQ ID NO: 36015

SEQ ID NO: 36153 - protein, 406 aa, Xanthomonas campestris; identical to SEQ ID NO: 36016

SEQ ID NO: 36154 - protein, 488 aa, Xanthomonas campestris; identical to SEQ ID NO: 36013

SEQ ID NO: 36155 - protein, 1119 aa, Xanthomonas campestris; identical to SEQ ID NO: 36015

SEQ ID NO: 36156 - protein, 406 aa, Xanthomonas campestris; identical to SEQ ID NO: 36016

SEQ ID NO: 36157 - protein, 489 aa, Xanthomonas campestris; identical to SEQ ID NO: 36077

SEQ ID NO: 36158 - protein, 233 aa, Xanthomonas campestris; identical to SEQ ID NO: 36018

SEQ ID NO: 36159 - protein, 1360 aa, Xanthomonas campestris; identical to SEQ ID NO: 36019

SEQ ID NO: 36160 - protein, 489 aa, Xanthomonas campestris; identical to SEQ ID NO: 33214

SEQ ID NO: 36161 - protein, 233 aa, Xanthomonas campestris; identical to SEQ ID NO: 36018

SEQ ID NO: 36162 - protein, 1360 aa, Xanthomonas campestris; identical to SEQ ID NO: 36019

SEQ ID NO: 36163 - protein, 488 aa, Xanthomonas campestris; identical to SEQ ID NO: 36013

SEQ ID NO: 36164 - protein, 219 aa, Xanthomonas campestris; identical to SEQ ID NO: 36014

SEQ ID NO: 36165 - protein, 1119 aa, Xanthomonas campestris; identical to SEQ ID NO: 36015

SEQ ID NO: 36166 - protein, 406 aa, Xanthomonas campestris; identical to SEQ ID NO: 36016

SEQ ID NO: 36167 - protein, 487 aa, Microbacterium sp. CGR1
MTGSRAEAAYARAVTAFSTPTLDLLHGRFAPFVVASLTLLFTADRASVAVADAHAELGEVLDELRAAGYDDDRRLPSGSGRDVCRNWVRLGWLIQQIDDDVEVYRLSAHAVAALEISGRTGGGRTRVSNSRVRTLLDAVDHLSVSAEVDPVRRLARLYDERDLLDAEIARIQETGHADPADDEELLEEAENVLHLARELPADFTRVAESLRSMQRDVVAHLRRDERPTSEVLREYLQRAQDVMQSTPEGRAFAGALRLIGDPDRIDALTEQLRGLLGRPFARMLDGAQRAELDAIGRRVEQGVEEVLAAQRRASHVITGQVKTHDPLRDRQIDDLLRDVIAGLHGWSGPATVVDPVRSMPLIDLGHLRQTTSDIRPPRAPAPLADADDVDFLDHDTRAWGGPRYAELEEYVAGLGTDFDLADAFRSVPDAARRPVDLLGLLEIAHRNGLTEGDGISTVEALRPDGTSRRFAFGAVTARSTKEDSDDE

SEQ ID NO: 36168 - protein, 219 aa, Microbacterium sp. CGR1
MSDDDLTTAGADEGFIAPTAMEDDLEAHFPGDRGTLDPEIRRVLVHLLQRRFISMERNRREWTLLLEHQQVIESRLNDIYLRLIIDHARGFAYKQQLRSDEVEMPVLLKDSPYSRAETLVLVHLRTVYQRESASGEGSVRIDIEDVEQTVLSYFADVDGGTAKQQRAIRSALDRLDREGIVQEETSGRYRITALVEVVLSAETLKELREWLRSQAVVAR

SEQ ID NO: 36169 - protein, 1117 aa, Microbacterium sp. CGR1
MTMMDTLFGMIPASSRGQQWVAEELQLINWGGYDGGPHRVRFSPDATLLCGGSGSGKSTLMDGYIALMMPHTTPFNGASNGGVTGRPRGDEQRNILSYGRGKIDESRTEEGTKLRVLRGDGEDTWSAVSMTWLDHDGSRFTAVRGWYIPADARTLEDTTRLRATIDGAFDLSQLERAAVQRLSDASVRAVGLEPVATDREFSARLHAVLGIGAAGSGAKAISLLARIQAGQQITTVDDLYKKLVLEEPETMATADAVVAHFDELESTRTRMLVAKQQVAALEPIREISQRIEAASARMSVVDEVGVFSEPTSLASLWSAERRLDLLREVEADLRDRTQALQLAVREKNALIAAAEVEREGLLDVLRQSGGDRLETAQRELRGVERRLEDVQRERARFDSVARELGAEVRTASDFEELLARVGRELPQSGLRGARAAFADAESSRRAVESELSRARAEQDRTRELRGSIPAHLHEARTLLAQAAGLTPTDLPFVGELIEVRTEFEPWRDAFNLALGGFARTLLVDVADLGRFRAAIESVRIAERISYEGVPTGVAESRTADPRTLPGRLDHRSTPFTGWLQQRLRERFEYVCVDSSTELAEHPRALTLAGQVSHGDRGSHGGHGRANMLGFSNARRLRELDEQISQLESRRDAATQAAADAEADLDWIEATSKAHAKIEDLTWDQIDVEAVTAERARWVAVEAEVTDENPKIAELKSQAEELRKRVGRLRDESSRLGGDLTLAQDRWVEVTDQVDDCQRIVDAAEAAEIALEERHRSFLDARFLGADAAVSVTASERLAHLDAALRTAATRLLEDRTSAAAAHAEQREQMRRLMTGFLERWDTLTILPDPDESVAEFESILVALETNGLHELESEWRDSLLKLSGNDLTSLDSTLGRALREIKNRIDPINRIMEELPFYDDDHRLQITPRENQSEARRRFRKELREVRSLIDAAETDVDRESVYRRMSRLIGRMRRTAPDFAELIDVRNHVRVSAERVHATTREHVALYDHIGEKSGGESQELVAFIVGAALRYQLGDAGAERPRYAPVFMDEALIKADAHFTKRAIGAWRGLGFQLVIGAPNDKYSAIEPHVDVEYDILKDTRGRSWARPKVGLPAE

SEQ ID NO: 36170 - protein, 498 aa, Marinobacter sp. CP1
MDEQTHLRTRSYLVARHQHPAWKLLSATRGPLVLSCLQALMETNREEILFEDAQQMLTDILREHANSDDLKLSPDDPAADARKELRSWIRKGLIVERDGRLMATDALQKALAFVEGLDEKIMTSTASRLATVQREIENLETRLNPNAQSRADHIRRKIRDLEHELADVEAGRFKVLEGAEAAEGIREVYNLATSLRADFRQVEDSYRDADRQLRQSIVSEQHHRGEIVDRLLDGHDTLLETAEGKVFHNFSEQLSRSIELDNMKHRLRTILKNPATRHALSRQQQDELRWLVIRLIQESAAVIRARARSEKDVKGFLKTGLAAENHRVGELLNGILNTALNIDWSSHKVRKGDTPLPPIAVAVSSLPLVERLRFKSATEEQAQGLELTDQGVNLDDVDEEFWRAFDGLDREALYQETVELLKVTDRPMSIGDLAAHLPPTHDLETIALWLAMSREAEVEITDDREAVDITDSNGHRLRFHVPQLALTRQDAEAIDWEL

SEQ ID NO: 36171 - protein, 220 aa, Marinobacter sp. CP1
MAHVDQQTPLTEASHYTPGNVKATAQELLKYGLLEADRKPNLYQVATTQTAAINQILEPFDLRLKVDDVRGLAFLVVSDRLFSEGQENDDEWSHPLVRRQRLTMEQSLLVAILRQHFIAHEQETGLGAGEATVELDELLPQLQLYLGDTGSDTRDQKRLRSLLDNLKSHGIVSDIDANDQVVVRPIITHLANPENLQNLLHHFRQMAGQSAPQDADGEDV

SEQ ID NO: 36172 - protein, 1107 aa, Marinobacter sp. CP1
MSLPQTDLFAADILPPTAYILTHLDLYNWGPFGGRHCAEIDPKGTAIIGPTGSGKTTLVDALMTLLTHQPRYNLASTGGHESDRDLISYIRGVSGAGNNTGDNSHIARAGKTVTAVSARFSNGNNAIRIGALFWIDGSSSAASDLKRLWLFSERDDQSLDNWLAIHHEGGARELKQHAGDNPGLQANDSKKAYLAQVRRFFEVGENAFTLLNRAAGLKQLNSIDEIFRELVLDDHSAFDRAAEVASEFDDLAAIHSELETARKQHQSLLPIAETYEKHQSATRELDQQLLLKDILPIWFAQTGYELWSTRKQDLERQLDKGRETLESLSSNVKQLNSKADTLKDIYLQAGGASIEQLKEQISQQKRWVGERGRHARDYQTLTGKLDLDSTLSSEALARNRQLGESKLAELSELADTQDEFLLDLRFRHGKLNETLTEITEEIDRIKARPGSNIDGRYQEFRSELAQDLNLDESILPFVAELVEVKAEERDWRGAIERAIGGHRLRLLVPPAAMQSALDRVNSRDNRLHVRLLEAQAPQATAQFMKDGFTRKLNFKDHPHREALKQLLAEIDRHCVDSPETLRQTPHGMTQQGLMSGKKGYFEKRDNQRLDKGWMTGFNNRDRLSALNNELSETRKKADALGRQLESARRNLRDTNDQIRLYELLGETEFRTINLPSAQRELDALQSRLEALTAPDSDVEKARGEFEAVRQQLEEGRQQLSNQETALALLKEKRNQATDRCTELLDRLGDGLTDDQQSLATRHFRTPKADQYERLEALERDQREQLDKVIGKLGKQIQSFELSLTQLMEKALTIDTGALIETGSNIQDIPEYLERLRVLEEEALPQKLERFLSYLNQSSDQGVTQLLAQIQNQVAIIEERIADLNATLRRVDFHPGRYLRLEPRRVTHESLRRLERAQRQLRADALKGDQGESHFKALQNMVALLRDAADNKRTVGARALLDPRYRLQFEVSVLERESGSVIETRTGSQGGSGGEKEIIASYILTASLSYALCPDGATQPLFGTILLDEAFSKSSHAVAGRIISALNEFGLHPLFVTPNKEMRLLRAHTRSAILVHRKDLRATLTSLSWEELEAHAEKMTRKAHEIPG

SEQ ID NO: 36173 - protein, 384 aa, Marinobacter sp. CP1
MKSPAELASRLARQWQNADLREQRLLRPQSWPLTLPIGKPTGATVREKVTQVREHLRQWREVTTGQVQWQLVRFKSTSEAIDIPTHWTLDTPSQWVQAAGSSEVRREYDTLSRLASVLDPRFHSLVIRRRSLVMDKPESDVIRSGKVALQLQPGCAEGKPLRALSIAGTDSKFFERNRQLVTLMLDILFDGQASETGLEAFLGAEDDGHHWLLVADLDGSLLPFTQMRVRAHELQSTPLPGERLILVENERCLHQLPRVSGTVSVLGSGLNLSWLNATWLKDRATAYWGDIDTWGLTMLASARKHLPLLTPLLMDRITFDTFADASGVEEPQPAPSITPPGLTGSEAKLYQRLRQADRGRLEQEFLPVCVVHRAIGDWVDRSAE

SEQ ID NO: 36174 - protein, 485 aa, Moorella thermoacetica; identical to SEQ ID NO: 30485

SEQ ID NO: 36175 - protein, 203 aa, Moorella thermoacetica; identical to SEQ ID NO: 30486

SEQ ID NO: 36176 - protein, 1207 aa, Moorella thermoacetica; identical to SEQ ID NO: 30487

SEQ ID NO: 36177 - protein, 425 aa, Moorella thermoacetica; identical to SEQ ID NO: 30488

SEQ ID NO: 36178 - protein, 485 aa, Moorella thermoacetica; identical to SEQ ID NO: 30485

SEQ ID NO: 36179 - protein, 203 aa, Moorella thermoacetica; identical to SEQ ID NO: 30486

SEQ ID NO: 36180 - protein, 1207 aa, Moorella thermoacetica; identical to SEQ ID NO: 30487

SEQ ID NO: 36181 - protein, 425 aa, Moorella thermoacetica; identical to SEQ ID NO: 30488

SEQ ID NO: 36182 - protein, 455 aa, Limnohabitans planktonicus II-D5
MVSACLRALFERLHGPAADYVHNLNREALKELIAPVVREHQSELDTDAEQDEFNTTDAVDPQQLTVTVIRALLRDGWLEQYPDRNGLVTAFRFSRPGKLFAEAFWALHRPSRSRQRNMRGCRNALEAALSERGDAHDLVDAYEYAEKVIEDLTEGIDYLQERIRHLMQEATVHSQWDDFVEFLDRFQRDYSKQLTADSATLNRQGIRQKIEMLRVSLDSQKYKRVEEQLQDIAQWAVKEHTGSSVFEWLLDRIDDIVNAACDTKQPTFVRAMDTYIRRITGLVQQSMMLRTGQNRHAYLNAISKLAERDKAGQDKLLQTIGEQISCVEIRLLDPSSFKLRSATQRRKAATISIQPRASRAARLESFMKRAESEAFAVANEELASKLRGDLRLFQHPIHLSSLPPETARDLISNMQAVEAVRNTKGRDLAATRLPGRVENEFYSGYDYEFDFKRDL

SEQ ID NO: 36183 - protein, 223 aa, Limnohabitans planktonicus II-D5
MSLTTELREKLAKTTVTMERFREIATRLLSYGVLVRDEDRTEQALYDETRQVESLLSEYFEVVGMYLHHDVNAQFFRLYAPGAVVDGIREDTFSPVPSLKARVSTDFVAAAIALRFLYQEKLNQGLIDTQAEALISVDDLALTLITQLKRQLPERDGERMGLLAELKRHRLLRYSSTFSVSDEDAYLAIRPTILGVVSNEALAVAMDADGEIEPVMQVEEPQE

SEQ ID NO: 36184 - protein, 1219 aa, Limnohabitans planktonicus II-D5
MKLDRLILVNWGQLRPGNFEMGDMTLLTGETGSGKSTMLDALQTVMTAANKGVMNYNPGQDEVTQGQRRGKTKRTLESYVVGAEYNNFSRKDGAQGYMAAVFRQSKGEEHLKPFTALVAASARVEGSTADTRQAKLESLQLVIVDDAALTFEDFMKDVETNECIAVDRIARHLQSKFSRVHDFNEKKMDYLCALYGRFRGKSSVTKDEATNAAKAWVQSIAYRPIGSVHELVRDEILDFDERQLQQDIERISGLMKQVSNLRQEGVRLKDSVVRLATLQAAIDQTAKAHEAHVMQGMLVAKLQLSNDDVAIEAKKKLISKADEAIKEENGKITSWNARLAVIDDQRVQLTAQLQGIPVHNQKMELDSNLAKATATARASLDELSLSLIAAGLLEQRSKELISKPIPESFKELQKAVDRVAKAYGQVDFPRLAACRDSVAEATKGEELNVWKLYSVVSALSGINQGIDNLHVALVGTDESVAMAISAEATTVSQIKTKADDKVRDLGSQKSRLLQGKVSYPPYVQRGLDLLHEQFRDANAQVLCDLVEPKSETWQTAIEGYLGNARFNIIVSPEWERRCVDFLKSRAISAKIIQGAMCLKDAEGKVLPTDSIVRELTAANPIAWAYLVEQYGGVVKVADTEALRYTKRGITLDGIGSGSRSMFTAEKKSNNVFGIKAREQALVKVTKELEIAEAEALALGNTQAFLDSIKSALLGLKAPRFDANALRDAANLIEKTRASLETLDITELNVMQETLLRIQGEIRDFYLSISAANQRVGEHNSAMANAEAAIKGIQASKQDHLKALEGQIQKLKKLVASNPAFTYPALVAGIDERLSQAPVTLEVAKNALGDLAVKPGNLLVDAREALTHYNSQAKPDERFVVTLTAWHDTQSFDATYYALIEMAKVVVKTLDGLRSIGLYNNSRELDKAEKSFHDVFTKQFCVEIKSRVDDGIRTLRQMNGELKNLKFGSDSFSIDWSRWEPEFEDYLSFFGEVTKLADSAESMDLFGDGTFSERHANIRDKLVKLLLDDNQERATKDLMRIADYRNYRHYDIINDTSSGGRVKLSEWGTGSGGQLETPAYIVRAAVVTNRLKLFEKSPSLKLLVNDESFAKMDEPRARAVLSFLRDKLDLQIISAMPTMKAGALKDEFNREYSFTRLAVPNGELDFISECDERIFKEDKMRDLWERQRVLAREKAKQLFDLANPEEDTDDAPDEVAVVGK

SEQ ID NO: 36185 - protein, 235 aa, Limnohabitans planktonicus II-D5
MAEVVERLNGLRALADTHMLLREVSAKLFWGMSKVLDNRTGLVAALLGVEECPFSESPVQLQVYLPIGGFSGVLFVENLMSFEQAMRSKGQAFSKLALVYASGFKGSAARLRTPEAVSLFFSHRGELGGDRIDYFDSWLFGKDIALPVSFWGDLDWSGMRILAAMRNNFPVMQAWEPGYQPMLQSLLAGQGHSPEASDKKGQRPMVAFGCPYADAHLVPALTAHGRFVDQEQFTL

SEQ ID NO: 36186 - protein, 566 aa, Cellulosimicrobium cellulans F16
MQHDDVDSLRRSSAAWRLLRADTAPLVLSFLGSLFVEDNVRAIPESELVARLDDHLWAVDGRSARASGSEPRYPRAPQAYVDHWAHPDQGWLRAWYPPGSGEPHYDATPAVEQAVRWVASVRGRGFVGTESRLNTVFELLRQLAVGTQTDPAERLRELEERRAAIDEEIAQVRAGRVAVLDAAAQRDRYQQLTQTAADLLSDFREVEANFRSLDRELRERITGWDGAKGELLEEVVRSRTAIAESDQGRSFHAFYDFLLDRRRQEEFAALVERVQSLDAIAPDVVRPAPGAPGPVPDAAATDAAAREQEHRRLRRVHYDWLDAGERTQATVRTLSEQLRRFLDDQVWLENRRVMDILRGVEAKALAARDVRHGPGGPPGMAIDAVAPDVVLPTERPLFTPRPTARLDSDHVEAGDDDFEVDALYDQVHVDPERLARTVRATLTAPGGPGEVALVDLLEAAPLEHGLAELVTYLSLEDPRFVVVHDDERTDEVRWEGEAPSGPVADDGAPDPVVRVARLPRVTYARRTGAGGGVPPAPRDPVPHRPPATPRDEHLHDTADPAPEETP

SEQ ID NO: 36187 - protein, 254 aa, Cellulosimicrobium cellulans F16; identical to SEQ ID NO: 34894

SEQ ID NO: 36188 - protein, 1222 aa, Cellulosimicrobium cellulans F16
MEGLFSAVELHDPAADLDARAGFRLERLEVLNWGTFDQRVWAFDLDGRNALLTGDIGSGKSTIVDAVTTLLVPSHRISYNKAAGAGARERSLRSYVAGHYKSERDEATGTTRHVGLRERGTYSVVLGRFSNRGFDQEVTLVQVFWLAPGQSGQPDRFFVTADRPLTITEDFAGFGGDVAALRRRLRESGAQVRDHFPEYGRDFRRLLGIPSEQAMDLFHQTVSMKSVGDLGEFVREHMLEPFDADRWTDRLVAHFDDLTSAHDAVVRATAQIERLAPLLADCDAHDALGERSAALVARRDALRAFTASRRVADLDGLIGALDERVADGESRRQRVGDELGLLAAERQRLELDRAGHGGDRLAAIEGEVARREVERAARERRVTQLAGYAAAAGLTLGGADGAEPGVTAPRGAEPGDVPGFGGRGDDDPGFGGGAAAVAAALVDAEAFAALRRRADDAAVRVRDDLARAEERVSEVAAELRAVEQETADVKAELASLADRRSNLPRTHLEVRDRLCAAVGLAPGDVPFVGELLAVRPEHADWEGAAERVLRGFALSLLVPAAHYEAVAAWVDREHLGLRLVYHRVPERVPAARPAPRDDVPLLADLLDVRRLDDAPSLTAWVEAELERRADHACAPDLDAFRRLPRAITRAGQVKHSPDHHEKNDTRAVDDRRGYVLGWSTQAKIDALLEQAAEVTARRDTLARRRDEAAAVRGELQARSAALGRLDVYRDWDELDRGAETARIAELAEEKRRLEQASDELGRIAGLLDDNARRHGELEAERDRVVATLGADRHALDEARTARERARAVLDGAGETLDEETTAALAAEFDRELAAVGPADGDGATGPTRAADLDAVENAVRSRLTAEAEQAQRERADLGTRVAGQMASFRSAYPVETAELDADVRSADGYREIHDRLVRDDLPRFEADFKAYLNTNAIRDIAGFAAELAKQADVIRDRIDTINDSLRAIDYNPGRYIRLEMSRTPNLEVREFQQDLRACTDGDGILAEDDRALAEGDGSVAGDTDALSYSEDRFLRVKALVERFRGREGMTDLDEAWRRRVTDVRNWFVLSASERSRADDSEHEHYSDSGGKSGGQKEKLAYTVLAASLAYQFKLDWGAVRSTAFRFVVIDEAFGRGSDESTRFALELFRRLGLQLLIVTPLQKIHVIEPYISAVGFVDNPSGRSSRLRTLSIAAYRDGRTAGEAPPSDAGLETAAEPEPAAR

SEQ ID NO: 36189 - protein, 489 aa, Stenotrophomonas maltophilia; identical to SEQ ID NO: 31432

SEQ ID NO: 36190 - protein, 233 aa, Stenotrophomonas maltophilia
MSWHEDPIDAPQADVAEDAYEAEPVATVAQPRRGNDVYYLGDTGRLPLDARRALCQLLIGPSIDQLRHAKLWPALIRSEAAIRSALADLFLELVLDRDSGVAFTRQADTEDVDAPVLLRTSPLTFIDSVLLLYLRQQLAEADARGNRAVVADAEMAEALAIYEKNLSTDRAGFNRRVASAVQKMKDNHILTRLSGQEDRHEVSPALKLLFSAEDVSQLSAVYRQLRETPAAEA

SEQ ID NO: 36191 - protein, 1126 aa, Stenotrophomonas maltophilia
MAISKHTPALFNEGLPDPRLQQFRMRRLQVHNWGTFNGLTEVPIAERGFLFVGRSGSGKSTLLDAMSALLTPPAIVDFNAAAREAERSGRDRNLVSYVRGAWADQQDSGTGEIATQYLRKGATWTALVLEYRAGDGRVVSLVRLLWISGNGTSAGDVRKHYMIAERPFDIAKDLGGFDLDLRKLKQKLSDLHHFDTFSGYAERFRDLLGIDNEMALRLLHKTQSAKNLGDLNVFLRDFMLDTPKTFDAAERLVSDFAELDGAHQAVVTARRQVETLLPARAYYNDLKEMHRQRGDDEALKLGVDSFRESRRQALIEARLREMDVRDRGLLGEEAQRRAALDNHTERLAELELQRRQQGGERIEELEREQGRAEAERDRRQAKRDQAQEAAQQLQAELPGDAHGFAELVERAQNELQDRQRASAALDDAISDRLGGKRDDERRFGEVRSELEAMQRTPSNIPAPMQKLRARLAEETGIAEAALPFVGELIQVRSEEQGWQGAIERVLGGFALSLLVDDKHYNDVAEWVNRTHLGMRFTYYRVRRNDDAFAREPSAKSLLHKLELREHVFESWLRRELGKRFDYECVDAKQLRNVDRGITREGQVKHPGDRFEKDDRSAVGDRRRWILGFNNHDKVGAFEREAQELAKRIASCETDIARLRGQRDRDNERRLACHELVSISWNEIDIAAPQQRLSDIEATLRDLREGNADLAKLAKQIDAVRADIEQSRRTYEDVRVERGQLVKERDRLDRARQQSRALVLPSLAQEQEAGLAERLQEQGPLSLETLEAHMRQVSNALNEQLSSSQQDLNRIENQLIGCFRRFIQQWPEESGDFTVSVASAEDFLARLERLERDGLPQHEERFFDLLQNQSKNNLLALQRHSAEARKSIGQRLDEVNASLEQVPFNRGTLLTIELSDRRLPEVGEFHLQLREVLSQQQTEQRELAESQFTVLRQLVNRLGSQEGEDKRWRELVLDVRMHVEFIGVELDAETRQQVEIYRSGAGKSGGQRQKLATTCLAAALRYQLGGADSQLPSYAAVVLDEAFDKADNEFTALAMNIFDNFGFQMVVATPLKSVMTLEPFIGGACFVEISGRHDSGVLLIEYDEEGKRLKLPERSRQQANEPEEAEA

SEQ ID NO: 36192 - protein, 489 aa, Stenotrophomonas maltophilia; identical to SEQ ID NO: 31707

SEQ ID NO: 36193 - protein, 233 aa, Stenotrophomonas maltophilia; identical to SEQ ID NO: 31708

SEQ ID NO: 36194 - protein, 1126 aa, Stenotrophomonas maltophilia; identical to SEQ ID NO: 31709

SEQ ID NO: 36195 - protein, 489 aa, Stenotrophomonas maltophilia; identical to SEQ ID NO: 31707

SEQ ID NO: 36196 - protein, 233 aa, Stenotrophomonas maltophilia; identical to SEQ ID NO: 31708

SEQ ID NO: 36197 - protein, 1126 aa, Stenotrophomonas maltophilia; identical to SEQ ID NO: 31709

SEQ ID NO: 36198 - protein, 489 aa, Stenotrophomonas maltophilia
MKHRERISRYRHLREQPQWKLLAADHAPEIIGLLQGLLMDGERTLPSSVLNERLQRALDQLNGDELSRELPRTAQAYIAHWLAQGWLERRLPEGADQEQYELSTAALQAIRFADGLEQARVAATESRLALVIEQLSQLAAQTESDPDARLSALRDERDRIDAEIARVGAGRVIALDGKRALERARQIIGLADELTEDFRRVRDDFEQLNRDFRERIIDDEGERGDVLSQLFEGVDVIGESDAGRSFQAFWRLLNDAEQSAQLDAALEAVLARGFARRLDRNERNFLRGFTSTMLERGGQVHDVLQNFARSLRGFVQSRGYLEQRRLNQLLKQAQSEALSLRDEFPAQRGIGRDLQLTTSRLRSWSQWKLHDPRSAQVDGNVEYNDAAAISLESVGDLVASSEIDFRTLRRDLHDLLDAQPRLSIAQALSQREAPQGLGSVIGYLSLGTRFGNVIAGEQELAEWRGGDGQVRRARIPLVWFTQERRHELA

SEQ ID NO: 36199 - protein, 233 aa, Stenotrophomonas maltophilia; identical to SEQ ID NO: 31708

SEQ ID NO: 36200 - protein, 1126 aa, Stenotrophomonas maltophilia; identical to SEQ ID NO: 33311

SEQ ID NO: 36201 - protein, 489 aa, Stenotrophomonas maltophilia
MKHRERIARYRHLREQPQWKLLAADHAPEIIGLLQGLLMDGERTLPSSVLNERLQRALDQLAGDELSRELPRTAQAYIAHWLAQGWLERRLPEGADQEQYELSTAALQAIRFADGLEQARVAATESRLALVIEQLSQLAAQTESDPDARLSALRDERDRIDAEIARVGAGRVIALDGKRALERARQIIGLADELTEDFRRVRDDFEQLNREFRERIIDDEGERGDVLSQLFEGVDVIGESDAGRSFQAFWRLLNDAEQSAQLDAALEAVLARGFARRLDRNERNFLRGFTSTMLERGGQVHDVLQNFARSLRGFVQSRGYLEQRRLNQLLKQAQSEALALRDEFPAQRGIGRDLQLTTSRLRSWSQWKLHDPRSAQVDGNVEYNDAAAISLESVGDLVASSEIDFRTLRRDLHDLLDAQPRLSIAQALSQREAPQGLGSVIGYLSLGTRFGNVIAGEQELAQWRGGDGQIRRARIPLVWFTQERRHELA

SEQ ID NO: 36202 - protein, 233 aa, Stenotrophomonas maltophilia; identical to SEQ ID NO: 30657

SEQ ID NO: 36203 - protein, 1126 aa, Stenotrophomonas maltophilia
MAISKHTPALFNEGLPDPRLQQFRMRRLQVHNWGTFNGLTEVPIAERGFLFVGRSGSGKSTLLDAMSALLTPPAIVDFNAAAREAERSGRDRNLVSYVRGAWADQQDSGTGEIATQYLRKGATWTALVLEYRAGDGRVVSLVRLLWISGNGTSAGDVRKHYMIAERPFDIAKDLGGFDLDLRKLKQKLSDLHHFDTFSGYAERFRDLLGIDNEMALRLLHKTQSAKNLGDLNVFLRDFMLDTPKTFDAAERLVSDFAELDGAHQAVVTARRQVETLLPARAYYNDLKEMHRRRGDDEALKLGVDSFRESRRQALIEARLREMDVRDRGLLGEEAQRRAALDNHTERLAELELQRRQQGGERIEELEREQGRAEAERDRRQAKREQASLAAQQLGAELPDDAHGFAELVERAQNELQDRQRASSALDDAISDRLGGKRDDERRFGEVRAELEAMQRTPSNIPAPMQKLRARLAEETGIAEAALPFVGELIQVRSEEQGWQGAIERVLGGFALSLLVDDKHYNDVAEWVNRTHLGMRFTYYRVRRNDDAFAREPSAKSLLHKLELREHVFESWLRRELGKRFDYECVDAKQLRNVDRGITREGQVKHPGDRFEKDDRSAVGDRRRWILGFNNHDKVGAFEREAQELAKRIASCETDIARLRGQRDRDNERRLACHELVSISWNEIDIAAPQQRLSDIEATLRDLREGNADLAKLARQIDAVRADIEQARRTYEDVRVERGQLVKERDRLDRARQQSRALVLPSLAQEQEAGLAERLQEQGPLSLETLEAHMRQVSNALNEQLSSSQQDLNRIENQLIGCFRRFIQQWPEESGDFTVSVASAEDFLARLERLERDGLPQHEERFFDLLQNQSKNNLLALQRHSAEARKSIGQRLDEVNASLEQVPFNRGTLLTIELSDRRLPEVGEFQLQLREVLSQQQTEQRELAESQFTVLRQLVNRLGSQEGEDKRWRELVLDVRMHVEFIGVELDAETRQQVEIYRSGAGKSGGQRQKLATTCLAAALRYQLGGADSQLPSYAAVVLDEAFDKADNEFTALAMNIFDNFGFQMVVATPLKSVMTLEPFIGGACFVEISGRHDSGVLLIEYDEEGKRLKLPERSRQQANEPEEAEA

SEQ ID NO: 36204 - protein, 489 aa, Stenotrophomonas maltophilia
MKHRERISRYRHLREQPQWKLLAADHAPEIIGLLQGLLMDGERTLPSSVLNERLQRALDQLNGDELSRELPRTAQAYIAHWLAQGWLERRLPEGADQEQYELSTAALQAIRFADGLEQARVAATESRLALVIEQLSQLAAQTESDPDARLSALRDERDRIDAEIARVGAGRVTALDGKRALERARQIIGLADELTEDFRRVRDDFEQLNREFRERIIDDEGERGDVLSQLFEGVDVIGESDAGRSFQAFWRLLNDAEQSAQLDAALEAVLARGFARRLDRNERNFLRGFTSTMLERGGQVHDVLQNFARSLRGFVQSRGYLEQRRLNQLLKQAQSEALALRDEFPAQRGIGRDLQLTTSRLRSWSQWKLHDPRSAQVDGNVEYNDAAAISLESVGDLVASSEIDFRTLRRDLHDLLDAQPRLSIAQALSQREAPQGLGSVIGYLSLGTRFGNVVAGEQELAQWRGGDGQIRRARIPLVWFTQERRHELA

SEQ ID NO: 36205 - protein, 233 aa, Stenotrophomonas maltophilia
MSWHEDPIEAPQAEAAEDAYDAEPVATVAQPRRGNDVYYLGDTGRLPLDARRALCQLLIGPSIDQLRHAKLWPALIRSEAAIRSSLADLFLELVLDRDSGVAFTRQADTEDVDAPVLLRTSPLTFIDSVLLLYLRQQLAEADARGNRAVVADAEMAEALAIYEKNLSTDRAGFNRRVASAVQKMKDNHILTRLSGQDDRHEVSPALKLLFSAEDVSQLSAVYRQLRETPAAEA

SEQ ID NO: 36206 - protein, 1126 aa, Stenotrophomonas maltophilia
MAISKHTPALFNEGLPDPRLQQFRMRRLQVHNWGTFNGLTEVPIAERGFLFVGRSGSGKSTLLDAMSALLTPPAIVDFNAAAREAERSGRDRNLVSYVRGAWADQQDSGTGEIATQYLRKGATWTALVLEYRAGDGRVVSLVRLLWISGNGTSAGDVRKHYMIAERPFDIAKDLGGFDLDLRKLKQKLPDLHHFDTFSGYAERFRDLLGIDNEMALRLLHKTQSAKNLGDLNVFLRDFMLDTPKTFDAAERLVSDFAELDGAHQAVVTARRQVETLLPARAYYNDLKEMHRRRGDDEALKLGVDSFRESRRQALIEARLREMDVRDRGLLGEEAQRRAALDNHTERLAELELQRRQQGGERIEELEREQGRAEAERDRRQAKREQARQAAQQLGSELPDDAHGFAELVERAQNELQDRQRASSALDDAISERLGGKRDDERRFGEVRAELEAMQRTPSNIPAPMQKLRARLAEETGIAEAALPFVGELIQVRSEEQGWQGAIERVLGGFALSLLVDDKHYNEVAEWVNRTHLGMRFTYYRVRRNDEAFAREPSAKSLLHKLELREHVFESWLRRELGKRFDYECVDAKQLRNVDRGITREGQVKHPGDRFEKDDRSAVGDRRRWILGFNNHDKVGAFEREAQELAKRIASCETDIARLRGQRDRDNERRLACHELVSISWNEIDVAAPQQRLTDIEATLRDLREGNADLARLAKQIDAVRADIEQARRTYEDVRVERGQLVRERDRLDRARQQSRALVLPTLAQEQEAGLAERLQEQGPLSLETLEAHMRQVSNALNEQLSSSQQDLNRIENQLIGCFRRFIQQWPEESGDFTASVASAEDFLARLERLERDGLPQHEERFFDLLQNQSKNNLLALQRHSAEARKSIGQRLDEVNASLEQVPFNRGTLLTIELSDRRLPEVVEFHQQLREVLSQQQTEQRELAESQFTVLRQLVNRLGSQEGEDKRWRELVLDVRMHVEFIGVELDAETRQQVEIYRSGAGKSGGQRQKLATTCLAAALRYQLGGADSQLPSYAAVVLDEAFDKADNEFTALAMNIFDNFGFQMVVATPLKSVMTLEPFIGGACFVEISGRHDSGVLLIEYDEEGKRLKLPERSRQQANEPEEAEA

SEQ ID NO: 36207 - protein, 472 aa, Burkholderia pseudomallei; identical to SEQ ID NO: 34321

SEQ ID NO: 36208 - protein, 223 aa, Burkholderia pseudomallei; identical to SEQ ID NO: 30855

SEQ ID NO: 36209 - protein, 1210 aa, Burkholderia pseudomallei; identical to SEQ ID NO: 33056

SEQ ID NO: 36210 - protein, 230 aa, Burkholderia pseudomallei
MTEVVEQLNRLPALAEKSMLLREVSSQLFWGMSKVLDKRQGLVAAILGMDDCPFPESPIQLHVFLPAGGHRGVLFIENSVSFECAMREPRGVFGELALVYASGFKGSAQRLRTTEGCSLFYAAGGGLERDLRATFEGWLFGRQEIPSYFWGDLDFAGMRILAAMRATFSGLTAWVPGYAPMLTVLKGGGGHPPEAADKQGQKPIASTGCEYADEQLMPALQTFRRFVDQE

SEQ ID NO: 36211 - protein, 543 aa, Bifidobacterium longum subsp. longum; identical to SEQ ID NO: 31042

SEQ ID NO: 36212 - protein, 224 aa, Bifidobacterium longum subsp. longum; identical to SEQ ID NO: 31043

SEQ ID NO: 36213 - protein, 1181 aa, Bifidobacterium longum subsp. longum
MQATDVQMIADRWMLESRRLINWGSYEGYHEFRPSTDHKLPVTLLAGASESGKSTLVDAQISLLYPTGTPFNKASNSGRSERSDYTYLRGMVGVGSTETGDEPLYLRGRDENGAPQPVWGAIVDTYRNQTTGQVLSCAKFLYLMPGDGRGDVRRQYVVWGKPVDPRRMDQYRDAPFTPAQLKATYPDCLTFPSAEAFHTHIWSAMGLSEAACRLLHKIQSADAPSRLDDIFKQGVLGVPEALDLARTTVEDYERYDENFHAMDEKTRRMDTLRGIQQAYGEYAAARGKARAFEPVKPAVDGTVPAVLRDWALARMRGEVAVQLPADRAEQQNSEAEAKLLRRRTEDLHTRLDMIRGQMQGLDGGNLTRLELELDQARRTLEDVQANRTRIEQTFASIGETLPGDEQAWNERRINAVNFKREYNKRDGECEEALTAAINARAGARGDLERLQRDFDRQRSQRTRISQQMDETRAMLCRATGLTPAELPYVAELMDVNEHEEDWRLAMNVAYAPIAQTILVDKRHEQGFAAKVSTIDPRTMPRRTWQFVDTARHYDDTGAHANILTGEQDGDWLSGKLRYRDDSPFADWLRSQTQDERFDALCVTAIDDTDRTNRQVQADGQIKSGARGQHGTKDRAQVIGFVNETYLNALAAQVDAARNALSQADTDYTAAKTQSDNLHRELELANQLAYTSWERIDIAGAQRTITDTQDAIASIKNDPKLAELAKQRDELNAELDRVERQRIESDQAAARAGSAVEAALIWLRDHADTGTTDAAGATADNDDDAASGPLPDEVTAALAESYDNRFAGLADAAMRAHMIIGAGAAGTQAPGESFPERTIAGIGKDMASRINLLNGQADAARTGVESKMSTYIALYAADDDSLTASVEDYRYYLDELASLTQLAAVAATDAEYRRCLEQLLRSFLTIKRAIDTDASDIHDQLDRINAMLKGQQFGPKHGSLSLHADVRRPERTFWAQLIRVIGTLNDWKSADVNDSDASRKAFAACAPMVGLLRAELAQVKDANGVKSYGARNLDPRCRSSFYAIVHHADGPDERITSTGGRSGGALQELTSFVYGAALIYLLGGGLTSEPSYTTLFLDEALIKADGRYTQRALTVLPRLGFQVIVSAPESKTGEILEVSTKAYVTYKDPDTGLTSLREAVLHQNDMDDESSSDILKDDGVAE

SEQ ID NO: 36214 - protein, 348 aa, Bifidobacterium longum subsp. longum
MRLRCMTTTEIRQWASKNGCEIITKHRTIGTSVELISKVVVPDESIAMRVVGRTLAAECREARRRIACLVAACDVAPETIESAARMTGHEQPDDFDLLVSAVRYFRHHDVTGMTPRQIPLTGFSGKWLNESKTNRRKAICRLLGVETLGLSKRPTELRFRYLDPVRDDAELERIIWCPWEGEALSGIKYAVIVENKDTYQTMPPIAQGICIWGSGRAVSDAVPAVPALRDMRIVYWGDMDADGLEILSTLRESGIECDSILMDCDAYDRYHRFGTDRTERSAKIVMREPKPTPGLQSAERRLYERLCADKTIAYRRIEQERIPMRDAVDELRKLGIPVESIENQDLPI

SEQ ID NO: 36215 - protein, 487 aa, Achromobacter xylosoxidans
MSSLKKIAQLRQLREQPLWKLLASDKAPLVLGVLQDLLLGDEKVIPASVLLEKLQRELQDLRQSGEEMAQTAQAYVALWLSEGWLTRRLPPGAQEELYELTTDSLTAIRFLQGILQPRAMATESRLATVMQQLMKLAEDTNSDPTSRRAALVAERARIDRELEQVGRGVVEILPPERALERARDIIGLADELVADFRRVREDFDQLNRQLRADLLNNEGSRGQVLEQLFAGMDLIGETPAGKTFYAFWRLLTDIEQSTIFSESLSEVVARDFASQLGITERRFLRNLTSRLLEEGGNVHEVLQTFSRSLRTFVQSREYLEQRRFNAVLRESQREALAIKEQLRPNQDVGFSLWIPNAQLRSASQWRLFDVAGQAPPGGMEDAPESSMSLEAIASMVRNSEIDFGSLRQNIYERLQHSQVVGIEELLRIYPATQGLGSIVGYIYLALRHGHITSNNVQVNWTGMDSVARSAVVPAVYFLKEKEREFAR

SEQ ID NO: 36216 - protein, 218 aa, Achromobacter xylosoxidans
MDSSSEDQGDAALESEARFAGDTGTLPVPARRVLVRLLQGPSLDARRHEKLWEVFKRYEKDLKSRLHDIFLELVVDNEAKVAFTRQVVSDEVDVPILLRKQSLSFIESVLLLFLRQKLTHSDAQAERAVVDLMEMTEYLKAYERSDNVDMSRFGRQMEGAIEKAKKLGVLLKLSGADDRFEISPSLRLLFPAEEIQALTEAFRRHLPVDVLPGQEEDH

SEQ ID NO: 36217 - protein, 1150 aa, Achromobacter xylosoxidans
MDATNIAATSEPGGARQTILAARPGRELQFQLRRIQTYNWGTFDKLREIHIAAEGHLVLGPSGSGKSTLLDGHTSLLTPPRWLDFNTAARNSEKGAGDRSLATYVRGAWATQTGDEGEKVKRYLRAGTTWSALSETYQDGAGRTVVLGRVLWIKGNGSAESDVHRLFFIAERDFKLRELEFFQDEGSGFEVRRLKAKLADVHFTDEFSAYQTRFTRLFDIKSDRALRLLHKTQSAKDLGDLNKFLRDFMLDPPETFAVAETLVNEFQVLNGAHEAVLTARNQIEALRPVRDRLTEYDQTQSLLSLLAEEKVGVDYWREQNRRDLLQAYIAELAMRAEGLAARIEELKTKEEREAREFNSLLAIRAGAGGNVLADLQAQVERAERVRLPDASANNSRLVSSCKALGWALPASPEAFAQIQAEARIIFDDRDSMAERHEKLLDRLKDEKRALDDRFAALLKEIRAMEGRTSNMPSRLLEIRERMCRDLGIVEDELPFVGELLQVKAKEGQWTGAIERVLGGFARDLLVEERYYREVAAWVDQTHLGLRLGYRRMTTRANQSAATQPATNSLLRKLDVAPRHKDWVSEELRRFDYACVDSSDDLRLVERGVTLAGQVKHNRSLHEKNDSRRVDDRGNWVLGFSNAEKLQTYKVEFETLQVAVAKAEKALEQAREMTRNESRQVEHCQNLVNVTWENSNVAALLDDIQSLKDRIAQELRSRPQLSELDNKVDRQRKTWDRAVDARQTAQGEAADMDRERSKAQKRLDELPPEQLRFPLSPTQKERLAARFEATGKKMTVEQLDSACMAMVRAIGDEENAATSKTAEIKQKIEHGLFVFCQRWPAEAQGLDPKMDSAPDFMAKLARLETDGLHEYVARFKALLREQSDQNLAVLHAKLDQERRNIGERMEQVNDSLRRCAFNENTYLEINYDDRPTQEVVEFRSLLKAALSHSFKEDDDEEMERRFSVLNAVVQRLGSQQPADVKWRSLVLDVRQHVVFSATEFDDTSIEVETYDSGAGKSGGQRQKLTTTVLAAALRYQLAGEEGVWPTYSTVVMDEAFDRADNEFTAMVMNIFKSFGFQVVAATPVKNVMALEPFIGGGTFVSIRDRKHSEALAITYVDQTGRLDLPREAHEVLAEELAADTTGTAEGGLQSE

SEQ ID NO: 36218 - protein, 403 aa, Achromobacter xylosoxidans
MNEPKRLTQQQVRTLVRKKWDTYHASWLVSPHEATWPFVVVLHNMTERNVFSSLGSTREWVQTWRAWDPGCCEVEWAIRKWPSGDQELPMRLIVPSADAAAAMLGERMAWERAKKRYAQWCERFPHLEGSRAAARQCDAVLVDYSEEDFERFGSLLQWLLENPRSGLYLRQLPVPDVDTKWVERRRGAVTDFARHLLGASQGASLHETCGLRTEPSRMRIRILCPLLRAQVGGLCDIEAPGGELALLPIRPCLCIIVENQNTGIALPDIEGAVVFMRLGLAVEQLEAIGWIREAALQVYWGDLDTHGFAALARARRRFPSMISVLMDQDTLLSHRSMWVREEKPSKVESLENLTAAEFDVYDGIRGNRWGVQVRLEQERVAWPIALQHLQSVCGVRTELVSSR

SEQ ID NO: 36219 - protein, 487 aa, Achromobacter xylosoxidans; identical to SEQ ID NO: 36215

SEQ ID NO: 36220 - protein, 218 aa, Achromobacter xylosoxidans; identical to SEQ ID NO: 36216

SEQ ID NO: 36221 - protein, 1025 aa, Achromobacter xylosoxidans
MDATNIAATSEPGGARQTILAARPGRELQFQLRRIQTYNWGTFDKLREIHIAAEGHLVLGPSGSGKSTLLDGHTSLLTPPRWLDFNTAARNSEKGAGDRSLATYVRGAWATQTGDEGEKVKRYLRAGTTWSALSETYQDGAGRTVVLGRVLWIKGNGSAESDVHRLFFIAERDFKLRELEFFQDEGSGFEVRRLKAKLADVHFTDEFSAYQTRFTRLFDIKSDRALRLLHKTQSAKDLGDLNKFLRDFMLDPPETFAVAETLVNEFQVLNGAHEAVLTARNQIEALRPVRDRLTEYDQTQSLLSLLAEEKVGVDYWREQNRRDLLQAYIAELAMRAEGLAARIEELKTKEEREAREFNSLLAIRAGAGGNVLADLQAQVERAERVRLPDASANNSRLVSSCKALGWALPASPEAFAQIQAEARIIFDDRDSMAERHEKLLDRLKDEKRALDDRFAALLKEIRAMEGRTSNMPSRLLEIRERMCRDLGIVEDELPFVGELLQVKAKEGQWTGAIERVLGGFARDLLVEERYYREVAAWVDQTHLGLRLGYRRMTTRANQSAATQPATNSLLRKLDVAPRHKDWVSEELRRFDYACVDSSDDLRLVERGVTLAGQVKHNRSLHEKNDSRRVDDRGNWVLGFSNAEKLQTYKVEFETLQVAVAKAEKALEQAREMTRNESRQVEHCQNLVNVTWENSNVAALLDDIQSLKDRIAQELRSRPQLSELDNKVDRQRKTWDRAVDARQTAQGEAADMDRERSKAQKRLDELPPEQLRFPLSPTQKERLAARFEATGKKMTVEQLDSACMAMVRAIGDEENAATSKTAEIKQKIEHGLFVFCQRWPAEAQGLDPKMDSAPDFMAKLARLETDGLHEYVARFKALLREQSDQNLAVLHAKLDQERRNIGERMEQVNDSLRRCAFNENTYLEINYDDRPTQEVVEFRSLLKAALSHSFKEDDDEEMERRFSVLNAVVQRLGSQQPADVKWRSLVLDVRQHVVFSATEFDDTSIEVETYDSGAGKSGGQRQKLTT

SEQ ID NO: 36222 - protein, 487 aa, Achromobacter xylosoxidans; identical to SEQ ID NO: 36215

SEQ ID NO: 36223 - protein, 218 aa, Achromobacter xylosoxidans; identical to SEQ ID NO: 36216

SEQ ID NO: 36224 - protein, 1150 aa, Achromobacter xylosoxidans; identical to SEQ ID NO: 36217

SEQ ID NO: 36225 - protein, 403 aa, Achromobacter xylosoxidans; identical to SEQ ID NO: 36218

SEQ ID NO: 36226 - protein, 487 aa, Achromobacter xylosoxidans; identical to SEQ ID NO: 36215

SEQ ID NO: 36227 - protein, 218 aa, Achromobacter xylosoxidans; identical to SEQ ID NO: 36216

SEQ ID NO: 36228 - protein, 1150 aa, Achromobacter xylosoxidans; identical to SEQ ID NO: 36217

SEQ ID NO: 36229 - protein, 403 aa, Achromobacter xylosoxidans; identical to SEQ ID NO: 36218

SEQ ID NO: 36230 - protein, 487 aa, Achromobacter xylosoxidans; identical to SEQ ID NO: 36215

SEQ ID NO: 36231 - protein, 218 aa, Achromobacter xylosoxidans; identical to SEQ ID NO: 36216

SEQ ID NO: 36232 - protein, 1150 aa, Achromobacter xylosoxidans; identical to SEQ ID NO: 36217

SEQ ID NO: 36233 - protein, 403 aa, Achromobacter xylosoxidans; identical to SEQ ID NO: 36218

SEQ ID NO: 36234 - protein, 487 aa, Achromobacter xylosoxidans; identical to SEQ ID NO: 36215

SEQ ID NO: 36235 - protein, 218 aa, Achromobacter xylosoxidans; identical to SEQ ID NO: 36216

SEQ ID NO: 36236 - protein, 1150 aa, Achromobacter xylosoxidans; identical to SEQ ID NO: 36217

SEQ ID NO: 36237 - protein, 403 aa, Achromobacter xylosoxidans; identical to SEQ ID NO: 36218

SEQ ID NO: 36238 - protein, 489 aa, Stenotrophomonas maltophilia; identical to SEQ ID NO: 36204

SEQ ID NO: 36239 - protein, 233 aa, Stenotrophomonas maltophilia; identical to SEQ ID NO: 36205

SEQ ID NO: 36240 - protein, 1126 aa, Stenotrophomonas maltophilia
MAISKHTPALFNEGLPDPRLQQFRMRRLQVHNWGTFNGLTEVPIAERGFLFVGRSGSGKSTLLDAMSALLTPPAIVDFNAAAREAERSGRDRNLVSYVRGAWADQQDSGTGEIATQYLRKGATWTALVLEYRAGDGRVVSLVRLLWISGNGTSAGDVRKHYMIAERPFDIAKDLGGFDLDLRKLKQKLPDLHHFDTFSGYAERFRDLLGIDNEMALRLLHKTQSAKNLGDLNVFLRDFMLDTPKTFDAAERLVSDFAELDGAHQAVVTARRQVETLLPARAYYNDLKEMHRRRGDDEALKLGVDSFRESRRQALIEARLREMDVRDRGLLGEEAQRRAALDNHTERLAELELQRRQQGGERIEELEREQGRAEAERDRRQAKREQARQAAQQLQAELPDDAHGFAELVERAQNELQDRQRASSALDDAISERLGGKRDDERRFGEVRAELEAMQRTPSNIPAPMQKLRARLAEETGIAEAALPFVGELIQVRSEEQGWQGAIERVLGGFALSLLVDDKHYNEVAEWVNRTHLGMRFTYYRVRRNDEAFAREPSAKSLLHKLELREHVFESWLRRELGKRFDYECVDAKQLRNVDRGITREGQVKHPGDRFEKDDRSAVGDRRRWILGFNNHDKVGAFEREAQELAKRIASCETDIARLRGQRDRDNERRLACHELVSISWNEIDVAAPQQRLTDIEATLRDLREGNADLARLAKQIDAVRADIEQARRTYEDVRVERGQLVRERDRLDRARQQSRALVLPTLAQEQEAGLAERLQEQGPLSLETLEAHMRQVSNALNEQLSSSQQDLNRIENQLIGCFRRFIQQWPEESGDFTASVASAEDFLARLERLERDGLPQHEERFFDLLQNQSKNNLLALQRHSAEARKSIGQRLDEVNASLEQVPFNRGTLLTIELSDRRLPEVAEFHQQLREVLSQQQTEQRELAESQFTVLRQLVNRLGSQEGEDKRWRELVLDVRMHVEFIGVELDAETRQQVEIYRSGAGKSGGQRQKLATTCLAAALRYQLGGADSQLPSYAAVVLDEAFDKADNEFTALAMNIFDNFGFQMVVATPLKSVMTLEPFIGGACFVEISGRHDSGVLLIEYDDEGKRLKLPERSRQQANEPEEAEA

SEQ ID NO: 36241 - protein, 489 aa, Stenotrophomonas maltophilia; identical to SEQ ID NO: 33309

SEQ ID NO: 36242 - protein, 233 aa, Stenotrophomonas maltophilia; identical to SEQ ID NO: 31708

SEQ ID NO: 36243 - protein, 1126 aa, Stenotrophomonas maltophilia; identical to SEQ ID NO: 33311

SEQ ID NO: 36244 - protein, 487 aa, Achromobacter xylosoxidans; identical to SEQ ID NO: 36215

SEQ ID NO: 36245 - protein, 218 aa, Achromobacter xylosoxidans; identical to SEQ ID NO: 36216

SEQ ID NO: 36246 - protein, 1150 aa, Achromobacter xylosoxidans; identical to SEQ ID NO: 36217

SEQ ID NO: 36247 - protein, 403 aa, Achromobacter xylosoxidans; identical to SEQ ID NO: 36218

SEQ ID NO: 36248 - protein, 489 aa, Stenotrophomonas maltophilia
MKHRERISRYRHLREQPQWKLLAADHAPEIIGLLQGLLMDGERTLPSSVLNERLQRALDQLNSDELSRELPRTAQAYIAHWLAQGWLERRLPEGADQEQYELSTAALQAIRFADGLEQARVAATESRLALVIEQLSQLAAQTESDPDARLSALRDERDRIDAEIARVGAGRVIALDGKRALERARQIIGLADELTEDFRRVRDDFEQLNREFRERIIDDEGERGDVLSQLFEGVDVIGESDAGRSFQAFWRLLNDAEQSAQLDAALEAVLARGFARRLDRNERNFLRGFTSTMLERGGQVHDVLQNFARSLRGFVQSRGYLEQRRLNQLLKQAQSEALALRDEFPAQRGIGRDLQLTTSRLRSWSQWKLHDPRSAQVDGNVEYNDAAAISLESVGDLVASSEIDFRTLRRDLHDLLDAQPRLSIAQALSQREAPQGLGSVIGYLSLGTRFGNVIAGEQELAQWRGGDGQIRRARIPLVWFTQERRHELA

SEQ ID NO: 36249 - protein, 233 aa, Stenotrophomonas maltophilia; identical to SEQ ID NO: 31708

SEQ ID NO: 36250 - protein, 1126 aa, Stenotrophomonas maltophilia; identical to SEQ ID NO: 35451

SEQ ID NO: 36251 - protein, 489 aa, Stenotrophomonas maltophilia
MKHRERISRYRHLREQPQWKLLAADHAPEIIGLLQSLLMDGERTLPSSVLNERLQRALDQLNGDELARDLPRTAQAYIAHWLSQGWLERRLPEGADQEQYELSTQALQAIRFADSLEQARVAATESRLALVIEQLSQLAAQTESDPDARLSALRDERDRIDAEIARVSAGRVVALDGKRALERARQIIGLADELTEDFRRVRDGFEQLNREFRERIIDDEGERGDVLSQLFEGVDVIGESDAGRSFQAFWRLLNDAEQSAQLDAALEAVLARGFARRLDRNERNFLRSFTSTMLERGGQVHDVLQNFARSLRGFVQSRGYLEQRRLNQLLKQAQSEALALRDEFPAQRTIGRDLQLTTSRLRSWSQWKLHDPRSAQVDGNVEYNDAASISLESVGDLVASSEIDFRTLRRDLHDLLDAQPRLSIAQALSQREAPQGLGSVIGYLSLGTRFGSVVAGEQELAEWRGGDGQLRRARIPLVWFTQERRHELA

SEQ ID NO: 36252 - protein, 233 aa, Stenotrophomonas maltophilia
MSWHEDPIEAPSADQAEDAYEAEPAMLEAQPRRGNSVYYLGDTGRLPLDARRALCQLLIGPSIDQLRHAKLWPALVRSEAGIRSALSDLFLELVLDRESGVAFTRQADTEDVDAPVLLRTSPLTFIDSVLLLFLRQQLAEADARGNRAVVADAEMAEALAIYEKNLSTDRAGFNRRVASAVQKMKDNHILTRLSGQDDRHEVSPALKLLFSAEDVSQLSAVYRQLRETPAAEA

SEQ ID NO: 36253 - protein, 1126 aa, Stenotrophomonas maltophilia
MAISKHTPALFNEGLPDPRLQQFRMRRLQVHNWGTFNGLTEVPIAERGFLFVGRSGSGKSTLLDAMSALLTPPAIVDFNAAAREAERSGRDRNLVSYVRGAWADQQDSGTGEIATQYLRKGATWTALVLEYRAGDGRVVSLVRLLWISGNGTSAGDVRKHYMIAERPFDIAKDLGGFDLDLRKLKQKLADVHHFDTFSGYAERFRDLLGIDNEMALRLLHKTQSAKNLGDLNVFLRDFMLDTPKTFDAAERLVSDFAELDGAHQAVVTARRQVETLLPARAYYADLKEMHRQRGDDEALKLGVDSFRESRRQALIEARLREMDVRDRGLLGEEAQRRAALDNHSERLAELELQRRQQGGERIEELEREQGRAEAERDRRKAKRDQAQEAARKLQAELPDDAHGFAELVERAQNELQDRQRASASMDDAISERLGGKRDDERRFAEVRLELDAMQRTPSNIPAPMQKLRARLAEETGISEVALPFVGELIQVRSEEQGWQGAIERVLGGFALSLLVDDKHYNAVADWVNRTHLGMRFTYYRVRRNDEAFAREPSAKSLLHKLELRDHVFESWLRRELGKRFDYECVDARQLRNVDRGITREGQVKHPGDRFEKDDRSAVGDRRRWILGFNNHDKVGAFEREAQELAKRIASCETDIASLRGQRDRDNERRLACHELAGIQWNEIDVAAPQQRLTDIEASLRDLREGNADLARLAQQIDAVRADIEQARRTYEDVRVERGQLVRERDRLDRARQQSRALVLPTLAEAQESGLAERLQQQGPLSLETLEAHMRQVSNALNEQLSSSQQDLNRIENQLVGCFRRFIQQWPEESGDFTASVASAEDFLARLDRLERDGLPQHEERFFDLLQNQSKNNLLALQRHSAEARKSIGQRLDEVNASLEQVPFNRGTLLTIELSDRRLPEVLEFQLQLREVLSQQQTEQRELAESQFTVLRQLVNRLGSQEGEDKRWRELVLDVRMHVEFIGVELDAETRQQVEIYRSGAGKSGGQRQKLATTCLAAALRYQLGGADSQLPSYAAVVLDEAFDKADNEFTALAMNIFDNFGFQMVVATPLKSVMTLEPFIGGACFVEISGRHDSGVLLIEYDEEGRRLKLPERSRQQANEPEEAEA

SEQ ID NO: 36254 - protein, 489 aa, Stenotrophomonas maltophilia; identical to SEQ ID NO: 31432

SEQ ID NO: 36255 - protein, 233 aa, Stenotrophomonas maltophilia
MSWHEDPIDAPQADVAEDAYEAEPVASVAQPRRGNDVYYLGDTGRLPLDARRALCQLLIGPSIDQLRHAKLWPALIRSEAAIRSALADLFLELVLDRDSGVAFTRQADTEDVDAPVLLRTSPLTFIDSVLLLYLRQQLAEADARGNRAVVADAEMAEALAIYEKNLSTDRAGFNRRVASAVQKMKDNHILTRLSGQEDRHEVSPALKLLFSAEDVSQLSAVYRQLRETPAAEA

SEQ ID NO: 36256 - protein, 1126 aa, Stenotrophomonas maltophilia; identical to SEQ ID NO: 36191

SEQ ID NO: 36257 - protein, 478 aa, Pseudomonas stutzeri; identical to SEQ ID NO: 30501

SEQ ID NO: 36258 - protein, 196 aa, Pseudomonas stutzeri; identical to SEQ ID NO: 30502

SEQ ID NO: 36259 - protein, 1127 aa, Pseudomonas stutzeri; identical to SEQ ID NO: 30503

SEQ ID NO: 36260 - protein, 394 aa, Pseudomonas stutzeri; identical to SEQ ID NO: 30504

SEQ ID NO: 36261 - protein, 490 aa, Xanthomonas campestris
MKHRARIARYRVLREQPLWKLLAADQSPEVIGLLQTLLLDSERGLPAAVLHERLQRMLDDLNIDQLSRELPRTAQAYVAHWLAQGWLERRLPEGAQQEQYELSTQAMQAIRFADGLEQARGAATESRLALVMQQLSQLAALTETNPDARLSALRDERDRIDAEIARVAAGKVASLDGKRALERARQVIALADELTEDFRRVRDDFEQLNRQFRERIIDDEGERGEVLTRLFEGVDVIGDSEAGRSFQAFWALLNDAEQSAQLDAALETVLARAFARKLDRRERSFLRGLTGTMLERGGQVHDVMQHFARSLRGFVQSRGYLEQRRLNQLLKQAQAEALGLREHLRAQRSVGHDLNLTTSRLRSLSQWRLHDPRQTQVDGSIQRNDAAAISLDSVGDLVAQSEIDFRSLRRDLYELLGEHAQLSIAQVLAQRQAEQGLGSVIGYLSLGTRHGQVDAQRSEIARWRGGDGQWRGARIPLVWFSQEKRNELAG

SEQ ID NO: 36262 - protein, 232 aa, Xanthomonas campestris
MNWQADNAETDAHAPSAHADAAAPEADAATGLFPGDSGALPVDARRVLCQLLAGPSVDVQRHSKLWPALLRHEAAVRSRLADLFLELVLDRDAGVAFTRQADTGELEAPVLLRSLPLTFIDSVLLLHLRQQLAEADARGVRAVVEDAPLSEALAVYEKNLSTDRAGFMRRVGNAIQKMKDNHVLTRLRGEDNRYEVSPTLKLLFSAEDVSALAQIYRQLREQPGTVGDAERA

SEQ ID NO: 36263 - protein, 1143 aa, Xanthomonas campestris
MKSSSSSLFADDLPDPRVQQFRMRRLQVHNWGTFNGLTDVPIAAKGFLFVGRSGSGKSTLLDAMSALLTPPNLVDFNAAAREAERTGRDRNLVSYVRGAWADQQDSASGEIATQYLRKGSTWTALVLEYRNGEGRVISLIRLFWIAGSGAAAADVRKHYMVAERSFDIASELVGFDLDLRKLKARLGDDIAHFDNFSGYAERLRHQLGIANEMALRLLHKTQSAKNLGDLNVFLRGFMLEAPKTFDASERLVGDFAELDGAHRAVVTARRQVETLLPARAHYDDLQSVQRQRGRLQELKLGLDPYREQRRLALLDARLHALDVNDRGLAGEEGQRRAAVDNHQQRLSDLEAQRRSQGGERIDALEREQLQVQGELARRSDKRAKAEQACRQLDQSLADNAHGFAEQSAQARAALEDGQRLAAEQDEAIGERIAGKREDTQRFAQVRAEIEALTRNPSNIAAPMQGLRARLSEETGIPEAALPFVGELIQVREEDAAWRGAIERVLHSFAQSLLVDERHYPELAEWVNRTHLGSRLVYYRVRNNEQAFAGREPGSASLLHKLQLREHPFAGWLRRELGKRFDYDCLESAKALRTAERAITREGQVKHPGERYEKDDRHAVGDRRRWLLGFDNRDKLALYEREAIELAQRIAACDADVAELRARRERDASRRLAQHTLANLAWEEIDVAAQLQRRDDIASALRQLREGDANLRALGEAIERTRGDLEQAKRTFDGVREERIALGVERTRLEKQRLHCADADARVVTPLQREGLEERLANLGALSLDNLEAHFRQIGNAIAEQTSASDSEHNRLEQLLLGCFRRYSQQWPEDSGDFIISLAGAEDFLARLQRLERDGLPQHEARFFELLQSQSKNNLLALQRHTAEARKSIAQRLDEVNASLEQVPFNHGTLLTIELSDRRLPEVIDFHQRLRDVLGHHQTEQRDVAEQQFAVLRELVRKLGSADGEDKRWRELVLDVRLHVEFVGVELDAATRQQVEIYRSGAGKSGGQRQKLATTCLAAALRYQLGGEDGELPRYAAVVLDEAFDKADNEFTALAMNIFENFGFQMVVATPLKSVMTLEPFIGGACFVEISGRHDSGVLLIEYDEQARRLKLPERSRSAAAAGAARATEPSADAVGGASVDELH

SEQ ID NO: 36264 - protein, 393 aa, Xanthomonas campestris
MAAAAPMMLPAAALLALRGQWQRARGQWLIGEGAPQAIGLRAPTQAQAIARFDAFGAWLQEWSRTGLPGRVEYRAVSWTQLGPQRLPQTWVLDDAGQAAGALGEGERWARARQRSAALQARWPQAVALAARLRRQFDLLADWPEAEFARLVAVVEWLHQHRDSGLFLRQLPIAGIDSKWIEPHRGVIADWLAGLRGIAEPRSFASLSGLRNAPDRVRLRLLDPALRHHLGGLEDITAPIAQIAALRLPARRVLIVENRETGLACESLPGTLVLMARGYAIEYVSNIAWLRGLPLYYWGDIDTHGLAILHRLRTHAPHTTAVLMNEATLQATPRALWGHERRPHRAQRLAALSIQEQRLYADLRGGRFGPSPRLEQERIAWDYAWPRIQAALAD

SEQ ID NO: 36265 - protein, 490 aa, Xanthomonas oryzae
MKHRARIARYRALREQPLWKLLAADQSPEVIGLLQTLLLDSERGLPAAVLHERLQRMLDDLNVDQLSRELPRTAQAYVAHWLAQGWLERRLPEGAQQEQYELSTQAMQAIRFADGLEQARGAATESRLALVMQQLSQLAALTETNPDARLSALRDERDRIDAEIARVAAGKVASLDGKRALERARQVIALADELTEDFRRVRDDFEQLNRQFRERIIDDEGERGEVLTRLFEGVDVIGDSEAGRSFQAFWALLNDAEQSAQLDAALETVLARAFARKLDRRERSFLRGLTGTMLERGGQVHDVMQHFARSLRGFVQSRGYLEQRRLNQLLKQAQAEALGLREHLRAQRSVGHDLNLTTSRLRSLSQWRLHDPRQTQVDGSIQRNDAAAISLDSVGDLVAQSEIDFRSLRRDLYELLGEHAQLSIAQVLAQRQAEQGLGSVIGYLSLGTRHGQVDAQRSEIARWRGGDGQWRGARIPLVWFSQEKRNELAG

SEQ ID NO: 36266 - protein, 232 aa, Xanthomonas oryzae
MNWQADNAETDAHAPSAHADAAAPEADAATGLFPGDSGALPVDARRVLCQLLAGPSVDVQRHSKLWPALLRHEAAVRSRLADLFLELVLDRDVGVAFTRQADTGELEAPVLLRSLPLTFIDSVLLLHLRQQLAEADARGVRAVVEDAPLSEALAVYEKNLSTDRAGFMRRVGNAIQKMKDNHVLTRLRGEDNRYEVSPTLKLLFSAEDVSALAQIYRQLREQPGTVGDAERA

SEQ ID NO: 36267 - protein, 1143 aa, Xanthomonas oryzae
MKSSSSSLFADDLPDPRVQQFRMRRLQVHNWGTFNGLTDVPIAAKGFLFVGRSGSGKSTLLDAMSALLTPPNLVDFNAAAREAERSGRDRNLVSYLRGAWADQQDSASGEIATQYLRRGSTWTALVLEYRNGEGRVISLIRLFWIAGSGAAAADVRKHYMVAERSFDIASELVGFDLDLRKLKARLGDDIAHFDNFSGYAERLRHQLGIANEMALRLLHKTQSAKNLGDLNVFLRGFMLEVPKTFDASERLVGDFAELDGAHRAVVTARRQVETLLPARAHYDDLQSVQRQRGRLQELKLGLDPYREQRRLALLDARLHALDVNDQGLAGEEGQRRAAVDNHQQRLSDLEAQRRSQGGERIDALEREQLQVQGELARRSDKRARAEQACRQLDQSLADNAHGFAEQSAQARAALEDGQRLAAEQDEAIGERIAGKREDSQRFAQVRAEIEALTRNPSNIAAPMQALRARLSEETGIPEAALPFVGELIQVREEDAAWRGAIERVLHGFAQSLLVDERHYAELAEWVNRTHLGSRLVYYRVRNNEQAFAGREPGSASLLHKLQLREHPFAGWLRRELGKRFDYDCLESAKALRTAERAITREGQLKHPGERYEKDDRHAVGDRRRWLLGFDNRDKLALYEREAIELAQRIAACDADVAELRARRERDASRRLAQHTLANLAWEEIDVAAQLQRRDDIASALRKLREGDANLRALGEAIERTRGDLEQAKRTFDGVREERIALGVERTRLEKQRLHCADADARVVTPLQREGLEERLANLGALSLDNLEAHFRQIGNAIAEQTSASDSEHNRLEQLLLGCFRRYSQQWPEDSGDFIISLAGAEDFLARLQRLERDGLPQHEARFFELLQSQSKNNLLALQRHTAEARKSIAQRLDEVNASLEQVPFNHGTLLTIELSDRRLLEVIDFHQRLRDVLGHHQTEQRDVAEQQFAVLRELVRKLGSADGEDKRWRELVLDVRLHVEFVGVELDAATRQQVEIYRSGAGKSGGQRQKLATTCLAAALRYQLGGEDGELPRYAAVVLDEAFDKADNEFTALAMNIFENFGFQMVVATPLKSVMTLEPFIGGACFVEISGRHDSGVLLIEYDEQARRLKLPERSRSAAAAGAARATEPSADAVGGASVDGLH

SEQ ID NO: 36268 - protein, 393 aa, Xanthomonas oryzae
MAAAAPMMLPAAALRALRGQWQRARGEWLIGEGAPQAIGLRAPTQAQAIARFDAFGAWLQEWSRTGLPGRVEYRAVSWTQLGPQRLPQTWVLDDVGQAAGALGEGERWARARQRSVALQARWPQAVALAARLRRQFDLLADWPEVEFARLVAVVEWLHQHRDSGLFLRQLPIAGIDSKWIEPHRGVIADWLAGLRGIAEPRSFASLSGLRNAPDRVRLRLLDPALRHHLGGLEDITAPIAQIAALRLPARRVLIVENRETGLACESLPGTLVLMARGYAIEYVSNIEWLRGLPLYYWGDIDTHGLAILHRLRTHAPHTTAVLMNEATLQATPRALWGHERRPHRAQRLAALSIQEQRLYADLRGGRFGPSPRLEQERIAWDYAWPRIQAALAD

SEQ ID NO: 36269 - protein, 490 aa, Xanthomonas oryzae; identical to SEQ ID NO: 31050

SEQ ID NO: 36270 - protein, 232 aa, Xanthomonas oryzae; identical to SEQ ID NO: 31051

SEQ ID NO: 36271 - protein, 1142 aa, Xanthomonas oryzae; identical to SEQ ID NO: 34946

SEQ ID NO: 36272 - protein, 393 aa, Xanthomonas oryzae; identical to SEQ ID NO: 34947

SEQ ID NO: 36273 - protein, 490 aa, Xanthomonas oryzae
MKHRARIARYRVLREQPLWKLLAADQSPEVIGLLQTLLLDSERGLPAAVLHERLQRMLDDLNVDQLSRELPRTAQAYVAHWLAQGWLERRLPEGAQQEQYELSTQAIQAIRFADGLEQARGAATESRLALVMQQLSQLAALTETNPDARLSALRDERDRIDAEIARVAAGKVASLDGKRALERARQVIALADELTEDFRRVRDDFEQLNRQFRERIIDDEGERGEVLTRLFEGVDVIGDSEAGRSFQAFWALLNDAEQSAQLDAALETVLARAFARKLDRRERSFLRGLTGTMLERGGQVHDVMQHFARSLRGFVQSRGYLEQRRLNQLLKQAQAEALGLREHLRAQRSVGHDLNLTTSRLRSLSQWRLHDPRQTQVDGSIQRNDAAAISLDSVGDLVAQSEIDFRSLRRDLYELLGEHAQLSIAQVLAQRQAEQGLGSVIGYLSLGTRHGQVDAQRSEIARWRGGDGQWRGARIPLVWFSQEKRNELAG

SEQ ID NO: 36274 - protein, 232 aa, Xanthomonas oryzae; identical to SEQ ID NO: 36262

SEQ ID NO: 36275 - protein, 1143 aa, Xanthomonas oryzae
MKSSSSSLFADDLPDPRVQQFRMRRLQVHNWGTFNGLTDVPIAAKGFLFVGRSGSGKSTLLDAMSALLTPPNLVDFNAAAREAERTGRDRNLVSYVRGAWADQQDSASGEIATQYLRKGSTWTALVLEYRNGEGRVISLIRLFWIAGSGAAAADVRKHYMVAERSFDIASELVGFDLDLRKLKARLGDDIAHFDNFSGYAERLRHQLGIANEMALRLLHKTQSAKNLGDLNVFLRGFMLEAPKTFDASERLVGDFAELDGAHRAVVTARRQVETLLPARAHYDDLQSVQRQRGRLQELKLGLDPYREQRRLALLDARLHALDVNDQGLAGEEGQRRAAVDNHQQRLSDLEAQRRSQGGERIDALEREQLQVQGELARRSDKRAKAEQACRQLDQSLADNAHGFAEQSAQARAALEDGQRLAAEQDEAIGERIAGKREDSQRFAQVRAEIEALTRNPSNIAAPMQALRARLSEETGIPEAALPFVGELIQVREEDAAWRGAIERVLHGFAQSLLVDERHYAELAEWVNRTHLGSRLVYYRVRNNEQAFAGREPGSASLLHKLQLREHPFAGWLRRELGKRFDYDCLESAKALRTAERAITREGQVKHPGERYEKDDRHAVGDRRRWLLGFDNRDKLALYEREAIELAQRIAACDADVAELRARRERDASRRLAQHTLANLAWEEIDVAAQLQRRDDIASALRQLREGNANLRALGEAIERTRGDLEQAKRTFDGVREERIALGVERTRLEKQRLHCADADARVVTPLQREGLEERLANLGALSLDNLEAHFRQIGNAIAEQTSASDSEHNRLEQLLLGCFRRYSQQWPEDSGDFIISLAGAEDFLARLQRLERDGLPQHEARFFELLQSQSKNNLLALQRHTAEARKSIAQRLDEVNASLEQVPFNHGTLLTIELSDRRLPEVIDFHQRLRDVLGHHQTEQRDVAEQQFAVLRELVRKLGSADGEDKRWRELVLDVRLHVEFVGVELDAATRQQVEIYRSGAGKSGGQRQKLATTCLAAALRYQLGGEDGELPRYAAVVLDEAFDKADNEFTALAMNIFENFGFQMVVATPLKSVMTLEPFIGGACFVEISGRHDSGVLLIEYDEQARRLKLPERSRSAAAAGAARATEPSADAVGGASVDELH

SEQ ID NO: 36276 - protein, 393 aa, Xanthomonas oryzae
MAAAAPMMLPAAALLALRGQWQRARGQWLIGEGAPQAIGLRAPTQAQAIARFDAFGAWLQQWSRTGLPGRVEYRAVSWTQLGPQRLPQTWVLDDAGQAAGALGEGERWARARQRSAALQARWPQAVALAARLRRQFDLLADWPEAEFARLVAVVEWLHRHRDSGLFLRQLPIAGIDSKWIEPHRGVIADWLAGLRGITEPRSFASLSGLRNAPDRVRLRLLDPALRHHLGGLEDITAPIAQIAALRLPARRVLIVENRETGLACESLPGTLVLMARGYAIEYVSNIAWLRGLPLYYWGDIDTHGLAILHRLRTHAPQTTAVLMNEATLQATPRALWGHERRPHRAQRLAALSIQEQRLYADLRGGRFGPSPRLEQERIAWDYAWPRIQAALAD

SEQ ID NO: 36277 - protein, 483 aa, Microbacterium chocolatum
MPAVAQVLELAQLAERDAAWKLLRADSAPVVAGLLGTHLGGDERRVDAEELYERIDADLERLRAQGLILPLTAKGYCGEWRSAGFLVRRPSSEARGETLELSPDAIAGIRFLQGRAAPRSSVTESRLASLAAQVRRLAIDTDPDVSARIALLEEEIESIERRIESLRSGDESAIDEDRALERVRDVLAQAADVPDDFARVRAEFETLNASLRAKIVESDVSQASVVDEVFRGIDHISDSDAGRSFAAFSQLVLDPALGAAFEADIRRILDRRFARDLTSDERRALRAFLATLKGRSAEIHDVITLFARALRRYVQSQDYQRDRVLRTLLREAQHAGVEAAAHTRPWHPTSLTLDLSAVALSSVGAIDLHDPAEFAATEEIVTQATSLASLEELRAIARETEIDFDELTRNVNDLLAEVPSCTVADVLARYPATQGVGSVIGLLSIAAEQGTVDDEPEVLAWQGADGVPRAAIVAAHRFTGAVA

SEQ ID NO: 36278 - protein, 219 aa, Microbacterium chocolatum
MTESTTADVAPDEHGGLWRGDAGELPDRTRRVLLRLVRGPYLSGAREAQLWAVLLTDEAVLRSRLADLFLELVIDRDNEFAFVRNAPSEDAPKAVRSEALTFLDTAMLLVLRQTLLSEEGRGRVIVGQAEVFEQLAVFRTPDRDEKDFASRVNSSWNKMQNKLRVLHAVGDDRAEISPVLRLLVDADQIRAITSEYHRIAREGGGESAAPSTDAEDDTE

SEQ ID NO: 36279 - protein, 1117 aa, Microbacterium chocolatum
MTMLSFPTDEPEVDPTRPGQWRLSQIELVNWGTFAGHVSVDVARAGHLFTGASGSGKSSLLDAIAAVLTPDRWLRLNAAAQDGASRQSDRTLMSYVRGAWSKEADETADRATTTYLRSKATWSGILLRYENLRDEPVVLLRVFHAPGTRTEPTALKDARIFTRGHVKLLDVKPHVEGGIDARRMSKAFPDALITTGGRHGRFHERIIRQFGFRGDATLQLLHKTQSAKNLGTLDALFRGFMLDQPGTFARAETAVEQFTELDAAHKHVVDLRKQADALRKVDEAITAFDLAGAEMAAISDLHDGVEPFTAGLKLRLAKEAAGPARAALARAESDLSDAAREQRLAAGALETAKARVRDEGGARVELLQERIDSAQRAEDVTRQYRAQLTAELMRIGAPMPEDPEQFAELLAAAVTEVARDIPAVSYEVRDAASQARKALDEVTRQIQALRDHRSNLDEKLLSARRFLADAVGVPASTFPFAGELISVAEQHSAWRGAAERVLAPFASTLLVRDEHLVAARRAADSRTLGVRLVIEAVPHAVDEPRRPKDARSLVHRLAVSDGPFASYVRKRMASEFDYACVSHPDELDDVERGVTIGGLVKRNSRRYEKDDRHEVGDATRWVLGGDTHARLEALLERRRDAMAAMEEASARDAEADSFRQDAVSRRDVFTRVSTFSWDQVDLATAMAVTAAQRDDLRVLTSESGTLREAQEAAERATQRLDETNAKHARALGAHAVARNHVESIAAHVAELEATPYAPVEERIADALEGRFRAERRSVSLETVDEVARKVQSALSKEKDASASRAADAEASFAGRAAEFRLGWPAASAELTADIRDRYGYRELREGILARGLPEKETEFRKLLRERSQDVVAHLLSDLRDAPGFIRERILPVNASLGRSPFEGTDRFLEIDVKTTRTPEVDEFLTDLRRIVEGNWADESAAGAEQRFGVLQRVIGRLGSKDRIDIDWRNRVLDTRLHVSFLAREKDLTGRVVRVYDSAEGLSGGQRQKLVIFCLAAALRYQLTEEEDEVPRFGSIVLDEAFDKADSRYTRNAMEVFREFGFHMILATPQKLLQTLEPYVGAITSVSNPDRNTSRLANVVFAVGDPEATSTPHAESRA

SEQ ID NO: 36280 - protein, 364 aa, Microbacterium chocolatum
MRARAKKLFDRDARTWAAEQQTGVVLDVPLRPPTEREALSDLNRVREWVKSWRGVSEASGIELEWAVRNWSRVGSQEVPVRAIVRSPEVIAGVAGEAAVWRRLVERLDELRALVGPDAQVVLRTYAHSIADLDDADFHRLVDVLTWLRDNPASDRLIRELPIRGIDSKWIESRRGVVEALHRAGTGASGLGLREPSPLVRIRVLDPSLSFQRLTDVSAPVDELASIPLRPQRVFVFENLATVLAMPNVPDAVAVHGGGHRVDLVARLPWAQTVTYWGDLDSHGFAILNRLRARGVEATSALMDSGTLFDHRDLWGTDPEPNVGVLELLTPGERATLQSLSAEGNIRLEQERIPWSYALARLGVS

SEQ ID NO: 36281 - protein, 456 aa, Asanoa ferruginea; identical to SEQ ID NO: 30615

SEQ ID NO: 36282 - protein, 225 aa, Asanoa ferruginea
MSTAGWTARTSCWSAVPVLEGFRAIIDGDEPPPPGARAPDAEELCRALQVLLKGQVIYAETQGIGRSYELARHYAPFFTDYFACLGYALTVSHRDQMVSLSPAADAPRHDIVSERLRKDETLVLLALRLLYEEGLRDHRAGTDGIVDCTTDEIVEKIRAVARNEPPEEGRLADILRLYAKRGGLRLGERDRVERVTPLSLLPGVTVLASDAWMERLRAWSEAGEA

SEQ ID NO: 36283 - protein, 1132 aa, Asanoa ferruginea
MIRREQIRLRGAAALVGPTGAGKSTIFDAVGTVLAGNNASRLALNASASGRSARTVRDYCLGWISDPAEGGRPTRESCETVLVLVFENPDSGRVVSVGLALAARAVEPKETVLSRFIAVGHRFEVADYARTAPGGTYTAPWSEIAADLRARASSFTEYRTSGERFTADVLATLREGAPAPEPRHFLRSFANAVAFKPIFDTSAFVRAFVLDPEPLDVERVRHSIANWRRLLETIAELESRLGRLRRLRDRYEAWGEAVLAAATHELRAASAELRRRSLDLIAVRSRLREGADTLRIARERVTASRGYVREIDGEIAEKKALAAASAAEGRLAASTLGLSMLERDRKELIGRIGDLVGLVGQMAKLQPVAPLLRQSCPQAARLAEACARAGLRRESSPEEILRPEGPLAELADGLARLPDFDEALERAAEDAALKARAQESEAERTAPRTGGGPAARLSSDTVAFRGELERRGIDALPICELAEIVDPTWGPALEGLLGRAREALVVAPDRLSEALGVLQSGRDRFSRCILVKTTDTAKQRSRRYDDGPLTVIETSDPHAEAFLGVRLGGYDLARGDAELARLSRAVAPSGRTTAGMAYTVTRNVDLLMTRGHRGPTADSRRAHEIAVAEARRLRGEAAVLREAARTAAAIRARVARGLDDVEALRAELDGLEGRRRTLQTEREGIEKRDTAGLTAEIAALTTERVGYLRELSEELEPKLDRLLADEAALRARMGPVREAVRAALSARRAALRQLSGGDAARVRLARAEPFDLGAVAEARRSLAGLDAKAAGARVSAERGLARDSAEAARSHGRIAERELAEACAAWRVENPLASGDAPAIDGFAWVRREYEAVEGHELRRYRAQAERAEAEMRRLMTEDLLTRLADRFERVHARLAALNERLSARSFTGQTYAFEAAVDRRYAAVHALATETARSPEAAQALLAGEAEGPMAAALEEITALIAGEEDAARLADYRNYFVYEIGMRDRAGNRTTMSARALRGSGGEAQAPFYVAIAASLASAYYPGDRPGDENPGLGLCLLDEAFSKLDVRNSQALVDLYRAWGLQLLIAAPEDKRTTLTEVMDTIVTVYKSPDLTSVRIEAEHPLEAARRALHAINPDQIGIEGFRRSDAAE

SEQ ID NO: 36284 - protein, 456 aa, Streptomyces purpurogeneiscleroticus; identical to SEQ ID NO: 33757

SEQ ID NO: 36285 - protein, 208 aa, Streptomyces purpurogeneiscleroticus; identical to SEQ ID NO: 33758

SEQ ID NO: 36286 - protein, 1132 aa, Streptomyces purpurogeneiscleroticus
MIRREQIRLRGAAALVGPTGAGKSTIFDAVGTVLAGNNASRLALNASASGRSARTVRDYCLGWISDPAEGGRPTRESCETVLVLVFENPDSGRVVSVGLALAARAVEPKETVLSRFIAVGHRFEVSDYARTAPGGTYTAPWSEIAADLRARAASFTEYRTSGERFTADVLATLREGAPSPEPRHFLRSFANAVAFKPIFDTSAFVRAFVLDPEPLDVERVRHSIANWRRLLETIAELESRLGRLRRLRDRYEAWGEAVLAAATHELRAASAELRRRSLDLIAVRSRLREGADTLRIARERVAASRGYVREIDGEIAEKKALATASAAEGRLAASTLGLSMLERDRKELIGRIGDLVGLVGQMAKLQPVAPILRQSCPQAARLAEACARAGLRRESSPEEILRPEGPLAELADGLVRLPDFDEALERAAEDAALKARAQESEAERTAPRTGGGPTARLSSDTVAFRGELERRGIDAVPICELAEIVDPTWGPALEGLLGRAREALVVPPDRLNEALGVLQSGRDRFHRCILVKTTDTAKQRSRRYDDGPLTVIETSDPHAEAFLGVRLGGYDLARDDAELARLARAVAPSGRTTAGMAYSVTRSVDLLMTRGHRGPTADSRRAHEIAVAEARRLRGEAAVLREAARTAAAIRARVARGLDDVEALRAELDGLDGRRRTLQTEREGIEKRDTAGLAAEIAALTTERVGYLRELSEELEPKLDRLLADEAALRARMGPVREAVRAALSARRAALRQLSAGDAARVRLARGEPFDLGVVAEARRALAGLDAKAAGSRVTAERGLARESAEAARSHGRIAERELAEACAAWRVENPLASGDAPAIDGFAWVRREYEAVEGHELRRYRAQAERAEVEMRRLMTEDLLTRLADRFERVHARLAALNERLSARSFTGQTYAFEAAVDRRYAAVHALATETARSPEAAQALLAGEAEGQMAAALEEITALIAGEEDAARLADYRNYFVYEIGMRDRAGNRTTMSARALRGSGGEAQAPFYVAIAASLASAYYPGDRPGDENPGLGLCLLDEAFSKLDVRNSQALVDLYRAWGLQLLIAAPEDKRTTLTEVMDTIVTVYKSPDLTSVRIEAEHPLEAARRALHAINPDQIGIEGFRQPDAAE

SEQ ID NO: 36287 - protein, 221 aa, Bradyrhizobium japonicum
MGAGSTVATAEERVVAELEKIKSVFEDVGPFMDKIEDFRDRLERRIRTTVHYMDVMGEGSAERIVRLIEQLSKIGRDEVEIRLGSPDVGLPITSLALYTPPPPKAPPERTRFKVPKQDPYLRAYVEATTEFDRMVRVSDQRLLEFARRQMQGRDAVSSAEIEIESIPDLFAYRALPNLAAVGRSVRLGEFTIRLDEGRSANDWIDVTAFRIERTRTTADAA

SEQ ID NO: 36288 - protein, 213 aa, Bradyrhizobium japonicum; identical to SEQ ID NO: 30448

SEQ ID NO: 36289 - protein, 1166 aa, Bradyrhizobium japonicum; identical to SEQ ID NO: 33380

SEQ ID NO: 36290 - protein, 401 aa, Bradyrhizobium japonicum; identical to SEQ ID NO: 33381

SEQ ID NO: 36291 - protein, 518 aa, Bradyrhizobium japonicum; identical to SEQ ID NO: 30451

SEQ ID NO: 36292 - protein, 212 aa, Bradyrhizobium japonicum; identical to SEQ ID NO: 30452

SEQ ID NO: 36293 - protein, 1144 aa, Bradyrhizobium japonicum
MMELRHLTMVNWHLFDVADIDVRGHVGVLGENRSGKSTILDMAQVVLTGGSRRFLRLNAVAGDSGKSRSGSKRSVVDYCLGTLGEDQRRRDEARTYIALGFEDTEGARSPVTIGMALEARKSDSRETVLALFVAVGTVLSSKDFIEQRGKSQFPAQWEDVRARIVAAVGEGNFVNHRDRASDYVREYMRHLLPHSSFGEQNASALQKSIVNAMTLDHNQTATQFVRNYILEDSPIGIKELRESIQTYRNISETIRKMRLRLEALRALRGVLAALEEALETKFREEWVAKRATWLAARATNLDFKTKRRTEMARRDAAAKELEFIDDDVKAIDKEIERLTAAIAEHDAKTGRKSLQQTADVAGQAAHRASADFKARMENIRRLEPLRAMCADGFEDFVPALERLLTATAGADIGGVSDEVTAAEKSFAASGAKWLPKIDEARQRIIAELSGLRGRRDEVLERIRQHAAGGARAYLGDDTELLCRRLRQGGMVPRVLCDIIEVAEPEWVGAAEALLGRDREAVFVDRADISAATSIFKEGRREFRHASLVSLNKLEQFRAKPERGTFPSIFRSQDPDAMAFIMRRYGNVRLADTLDQFNRPGRAIMKDGLYDDGLVRSHRWIESSQYKIGKAAQANALRSLQDQAEELGRILIDKGKEAHAAEQAFAALKNICEGRNDLGACAAAFAAAQTEVAEAQARLDALDGAGDGGLRDKKRAQQKLKEKRLEERKTQQKAFGEHDGEVRSAERRLGEGENVPGSELNLRVARSIYRKFFPLYSTAKGRAVYRDRLDAAAQKGFAEKHRAIAEKALKDANVSDNERARIERRVRELLYDYFDQFGMSSQVGAESEPLREVKPWMEQLISDIESNELRQYERQARDAAEKASTLLRGEFINALTARIGKMERELQSLNRSLYAHPFHNERYSFHRTQMVEFQPILKIIEIAKTSPEALDMLFRGDVPDDFPHKDTIVALEALLEDPDKDFTQFEDYRNFYTFEIHMEDVATGRSTRWEQRRGTGSGAEQQVPIYVAIGASLAAVYGSAERRAGKPAGFALAMFDEAFSKMDGKNQRQMMSFYKNLGLQFVIAAPFEKRVAVLEHMDTIVEVDRIGEQSRATVVELKEKAKRELMAIDPDLMSEDELATRLAAE

SEQ ID NO: 36294 - protein, 389 aa, Bradyrhizobium japonicum; identical to SEQ ID NO: 30454

SEQ ID NO: 36295 - protein, 486 aa, Arthrobacter sp. LS16; identical to SEQ ID NO: 34883

SEQ ID NO: 36296 - protein, 230 aa, Arthrobacter sp. LS16
MTYTDSYAAPITDPLFDGDTGSFPLPLRQLLVRLLRGPYLDGSVDAAAWQLLLDSQGAVTKYFSEIFLALSLDMDRKIAMLAPVDIEQAHTAPIAPRRPLKRDETLLALRLRLLLEQQSGTGADAVISRAGMHEILAEHRAAADRDDKRFAESCDAAIARLGSLRLLTNTELADEFRISPALAMALPLASIQDIPRYIAAIDANEGVLTLAEAEPDEADASEQTDALVQE

SEQ ID NO: 36297 - protein, 1107 aa, Arthrobacter sp. LS16
MSIEMTLPLGGEINPGQHRLSRVQLVNWGTFHGLHDLGVDRAGTLVTGHPGVGKSTLFDAMGHVFFASPRLNESANDAATREDRRTTYSYMRGRKFKTSSGTVFQRPGATWSAVLLSYQDGMGNTVSAGAVFDLPDAGLEGQVSKHYLLCEGALDIAQLENHGPRRFTVSSLSKALAPAEAFDTHKAFIDRLRRRLGVESDKAFALLRTLQNGKGLAKGVNQFFRHEVLEEPATLKAAAAAVEDFAHLRGIYRQLDTARAQRDVLAAVPEQDRAYRSLAERIGETRQLLETELAQLETQVRQLVLRNDLAAHRAEHAQLTARQAELGERKAKLDDQLQSLEAAHDSAGSASLMLLEREADAARKALSEKERMLHALQEQADQAGLAFEFSATGLDELRANAARTLQQLDSITKDAQTVEYEAMASLVNLRKRADTLAEQIRSYQRRSTNIDDRSVAARRAIASACSLREEQLPFAGELMDVSADCAMWRLAAEKALHSVARTILVPGEFLAQVTHAIDKLDGLGRVRWADISLAPREAEAGPADLVTKLDFAPGEAGAWLRAKITADYPLACVENDGAMHIHPKAITPAGTIKTGTGIFERDTRTLPASEYLLGFTNEAKISELQSKAARLEIKVQDAKKAADDRSAAKAKVLAKAQLLGALIEDERTFAQLDAAPALQALRRSEQKLGDALTLSGDSSRVRAQIEAAKAESEQLVGDLALVRSRAGELGLQIERAEKVLAAGPADSGDWLERVPAALRGHELLGGLLETIGAGSSPASEEISSAFAEARLQLAGQLSELTARRQEIGGALSETFRRFAREFGGSHAQTHGTSPEAAEHYAQLHEQIVADGLPHHEAQFREYFANRSYERFSDLLQLLDEERRMISERIKPLNQILGEVAFEHGSLLRLEVESSIPVEAATFRKDLKNALQDAYTTKDEGTLASSYQALEALVSALSDPGLSAWRSTVLDVRQHVVISCNEHKPNGEVETGLEPGTLSGGEGQRFTSFIMGAALAYQLGFATAGFTSFGTVMIDEAFIQANSEYAAAGIRALQEFGFHLVLAAPEDKIDLSRHLGSITDIIKHPGSNISGFVTTGRSPAMATTITLR

SEQ ID NO: 36298 - protein, 543 aa, Bifidobacterium longum subsp. infantis
MADVMRELERLRPVYETGVLRLLLRQNAMLYVSLLRSTFDPLTGELPRETVEERFAQSLNALADAGEYAPREDQTFAEAAHQILADLTREGEGDYAWLANSHDAATHRFLYRLTARAHRAIEALSRLEDESRALSGAQANSIIMEIEHARMQLTADPGERIKLLNREIKERKHEIKRIQQGKQHATLSEAQVEDVIAVIHNTLRGVPIDLRELVLDERDNGDALRRRMQAGDISVDENLTRYHDEYRRSFSESDSGRRFEDAFQVIITDEGRQQIDEALRAIAKTPYLAGESGLLLGQIRDELARIYDGIEAVRRQMRVSDEAISRLMRQQTDTRYRTMLTRLNRLYARLNADAKTHMGDASRPCDTATADALFAPLPMRPAKSMTRATAPGLSDLAAEAPQATPVADLRDMVNSGGPRLLRMVSLIRRNPVTVDRSDDRSGATLVDIAASFNRLPESERRESEIVGFLGGLGAVSGSAIADEPSTDGVGIDSDSDIATEPAPAQRGDTATWHCVSIDGEPRNWITRPVLADMDELNIIVEEG

SEQ ID NO: 36299 - protein, 221 aa, Bifidobacterium longum subsp. infantis
MTVAEEHEEHMDNANPYALFEGDTGDMPAEARMAAIALKRDRYISGPTYDTVLDNRDAVVRSLNNDLLDLVINERYRIMYATPVAGDDVTLRSLKTRVSLKREEAALLAFLRIRVLEYENVHADPADWLVSFEEIRAALATGAGYLAARNDEEGVAKQIGAIVSAMITYGYLVRLDDEAMYQITPLVPVVLDRELADTWLDVVEHGDGDTEDDDDDEKGAE

SEQ ID NO: 36300 - protein, 1184 aa, Bifidobacterium longum subsp. infantis
MMQATDVQMIADRWMLESRRLINWGSYEGYHEFRPSTDHKLPVTLLAGASESGKSTLVDAQISLLYPTGTPFNKASNSGRSERSDYTYLRGMVGVGSTETGDEPLYLRGRDENGAPQPVWGAIVDTYRNQTTGQVLSCAKFLYLMPGDGRGDVRRQYVVWGKPVDPRRMDQYRDAPFTPAQLKATYPDCLTFPSAEAFHTHIWSAMGLSEAACRLLHKIQSADAPSRLDDIFKQGVLGVPEALGLARTTVEDYERYDGNFHAMDEKTRRMDTLRGIQQAYGEYAAARGKARAFEPVKPAVDGTVPAVLRDWALARMRGEVAVQLPADRAEQQNSEAEAKLLRRRTEDLRTRLDMIRGQMQGLDGGNLTRLELELDQARRTLEDVQANRTRIEQTFASIGETLPGNEQAWNERRINAVNFKREYNKRDGECEEALTAAINARAGARGDLERLQRDFDRQRSQRTRISQQMDETRAMLCRATGLTPAELPYVAELMDVNEHEEDWRLAMNVAYAPIAQTILVDKRHEQGFAAKVSTIDPRTMPRRTWQFVDTARHYDDTGAHANILTGEQDGDWLSGKLRYRDDSPFADWLRSQTQAERFDALCVTAIDDTDRTNRQVQADGQIKSGARGQHGTKDRAQVIGFVNETYLNALAAQVDAARNALSQADTDYTAAKTQSDNLHRELELANQLAYTSWERIDIAGAQRTITDTQDAIASIKNDPKLAELAKQRDELNAELDRVERQRIESDQAAARAGSAVEAALIWLRDHADAGTTDAAGVIADSGDDDNATAGPLPDEVTAVLTESYDNRFAGLADAAMRAHMIIGAGVAGTRAPGESFPERTIAGIGKDMTSRINLLNGQADAARTGVESKMSTYIALYAADDDSLTASVEDYRYYLDELASLTQLAAVAATDAEYRRCLEQLLRSFLTIKRAIDTDASDIHDQLDRINAMLKGQQFGPKHGSLSLHADVRRPERAFWTQLIRVIGTLNDWKSADVNDSDASRKAFAACAPMVGLLRAELAQVKDANGVKSYGARNLDPRCRSSFYAIVHHADGPDERITSTGGRSGGALQELTSFVYGAALIYLLGGGLTSEPSYTTLFLDEALIKADGRYTQRALAVLPRLGFQVIVSAPESKTGEILEVSTKAYVTYKDPDTGLTSLREAVLHQNDMDDESSSDILKDDGVAE

SEQ ID NO: 36301 - protein, 124 aa, Bifidobacterium longum subsp. infantis
MAGMKDIAAITTCVKKHMRSHMYDIEPAWPFPVPVGLPDQAFLETNAIAVHDNNNEIRQWASKNGCEIITKHRTIGTSVELISKVVVPDESIAMRVVGRTLAAEYREAHRRTDSTDRIQRQMAE

SEQ ID NO: 36302 - protein, 485 aa, Arthrobacter sp. ERGS1:01
MRSTENAVAHWHTQKQLRHGPAWKLMQAAPWTVAFLRAEFTAARQRITLEEFHADLAAFIKELRHENLNLNDAWQASNYADSWVRSQFLARPMVDGRFVYEPTAATARVLAFLDTFTVERTNLNSSRLNTLLTSLETLSFQTDPNPDSRIAMLEAEIAERQGEIAALKNGQSPAVLSDDSAVAATRSVLDLASSLPADFKRMRDGVELMLHTIRTEIMESSVTKGVAVGQVLEGDKALRNTAEGATFQGFTEFLNDPVQQARFRQSVNEVLERNFTEQLSSEERSNLATLVKEMRRQAADVHTIYGRLSESLHTYVQSDEFKESVLLRKAIHAAEQAVAAAALGTRTPVTAPLLYAPEFETLAGLGIFNPDDHVPPPKLAAPPVLSDADIHRTPVTPAPDMPALHAAVGLARRSRNGSASLADVYAELPAELRHINTIRGLILAARSTDQGLDEGGTETLRFTQIDGTERTARVPLITFTKDTAP

SEQ ID NO: 36303 - protein, 239 aa, Arthrobacter sp. ERGS1:01
MTQSSELDPETYDAGPAPTPGSDAYRTERALFAGDTGSFPLDIRQALVRLLRGPYIDGTVDAALWTTLLTHRASLQQYLSEIFLFLTVDTDRKIAMLTPAEIDAVHTQPIVARKPLRREETLLALRLRMLLDRHAGTGTDVTITRSGAREILAEHRRPGAVDDKRLDEQTDASLARLLALKLLLPTELATEFRVSNALALALPFDSIEAIPAYLDALDKSNDDELDLDMPESNDRESVQ

SEQ ID NO: 36304 - protein, 1100 aa, Arthrobacter sp. ERGS1:01
MSIATPLPFGEEINPGQYRLSQIQIINWGTFHGRHSMYVDRAGTLLTGHPGVGKSTLFDGIQHIFYAAPRLNESAHEASNRKDRRTTFSYMRGRKIKTADGTVYQRPSATWSATALVFEDGLGRHVTIAALFDLPANGLEGQVGKHYLILDKPLDTAALENHGSRRFSPSSLHAALPAAEAFDVHKTFAERFRRKLGIDNDKAFSLLRTLQNGKGLDKGVNRFFRYEVLDKPATITAAKAAVEDFSHLRGIYRQLEDARGQRDALTQVPELHGKLRELRESLSRTTELKNKQLPLLRQQFQAELLTAKSLSLGDRRTAMRGDIEAAVAAKDALTDAVAALDEQHANHGGNAIEGLEKDIRTTVREHQERARIEAAARGDLDAAGLAYDWSPAGLSAARQSAVDGVARQQEETESARTREYEAVAASMNTKAQEKKLRAEIASYERRGSNIDGRSAAARRAICAETGLDPADMPFAGELVDIGSDHLPWRPAAEKVLRSLATTLLVRGEDIKTVTAAINALDGHGKLRWINIATPPRQGEPGEDHLVTKLEFQNSDAGTWLRAKITGDFGFRCVDNDAELHQHDRAISRAGTLKVNSATFERDTRSVSPSDYLLGFNNVDKILQLQAQADDLAAAYESSAALAEQRSKAKDELTGRLDALKRVAADTRAFEQLDSAALAAALETLRATLAATIDSSASLAQIRASRSDAKAELEAAVGRVAVLHNDLAGIEKELHGVQATAVATGEQARLNPPSDWAVDAFAPYLADGEPASLEELEQLFGRAAVDLGERLTTIKERVFRTEGALSDTFKAFAREFGPAVSSSLGTGAEAVEQYEELYERIVADGLPQRQDEFREYFNNRSYERFSDLLQLLEEERRAIEERILPLNQILEDVPFEKGSRLRLEVKTTIPEEARAFRTELKEALGNAYAKATEEKMAASYQQLERLVDALSDSSLQHWADTVLDVRQHVTISCNEHRPNGEVELGLEPGTLSGGEGQRFTSFIMGAALAYQLGIDTQGYSTYGTVMIDEAFIQANSEYAGAGINALQEFGFQLLLAAPEDKVDLSKHLGSVTDIIKHPQANVSGFVSTGRSPATATDIILR

SEQ ID NO: 36305 - protein, 506 aa, Bifidobacterium bifidum; identical to SEQ ID NO: 30917

SEQ ID NO: 36306 - protein, 340 aa, Bifidobacterium bifidum
MSDLTNDTAQPDADMDMIDDDMTGTGSADTDSASTGVDDMGAADVEYDGADAEGAVNPYALFEGDTGDMTADARMVAIMLKRERYISGRFYDLALDNRAAVIRSLNNDLLDLVVNEHYRVMYATAVSGPDMTLRALKTRASLKREEAALLAFLRIRVLEYENAHVAPDEWLVSFEEIRAALATGAGYLASRNDEEGVLRQVGAIVSVMCTYGYLRQLDDDETMYRITPLVPVVLDRQLADSWLAVADRDDDDEPAGDMAPAGSRSAAGDTSNADASGADDDGDSDDAGPDAELFEAPLFDDDADADAAEDIRGADDANGANDSGIDDETASDGGTAREGE

SEQ ID NO: 36307 - protein, 1196 aa, Bifidobacterium bifidum
MTMSGKDMQMIADRWMMESRRLVNWGSYEGYHEFRPSTDSQLPVTLLAGASESGKSTLVDAQISLLYPTGTPFNKASNSGRSERSDYTYLRGMIGVGGSDGVDEPMYLRGRDESGVPRSIWGAIVDTYRNFTTGQILSCGKFLYLMPGDGRGDVRRLYLAWDKPIDPRRMDVFRESSFTPTQLKSTYPGCVTFPNAEAFHTHIWDVMGLSAEACRLLARIQSADAPSRLDDIFKQGVLGVPEALDLARATVEDYERYDANFRSMEEKTRRMGKLRAITASYGDYESARDAVHSFDAVNPATKSGSATIRAWAIRRMIGEVNERQPLDRRLRDERRSEARAAGKRIESLRTRIDAVRERMRGLDGGDLTRLDAEMRQAERALADITAGRQRIGRMFEAAGEEFPKDEHAWDERRIEAVTFMRSYEQRKGLLDDMRNQTYAAHASVKQTLQRLNDDYERQKSQRTRISRQMDETRAMLCRATGLGPSELPYVAELMDVREDQEHWRLAMNAAYGSMAQTILVDKRHERGFAAKVSAIDPHAMARRTWQFVDIERGGAGNGPGGANTGATGGTAGEVWLSSKLRYREDSPFAGWLREQTSSERLDALCVDGIDDSDHAVRQVQADGQIKSGKRGQHGIKDRQQVIGFVNESYLAQLRTRIQDAQRQCDETAQSYASAKEQADRLQRERELADQLAYTAWEKIDENSAKAAIADIERTIASVRNNPKLAELDTLQESLSKELDRSQRQRIDIERQAELADQAVNAAQTWLDEHAAQPQPQTRPLDGEAADVSPKAVTNGRTLLTDEVEEALAESYEQRLSGLGDATTRAHMIIGAGAPQRMAQGDTFADRVIAGIGKDLEARVSMLEGRAASARTAVEARMGAYIEMYAGGDDTIAASVDDYRYYQDELESLSKLATVEATAVEYHNCLDKLLMSFLTIKRAIDTDAGDIHDQLERINAMLDGQQFGPRHGSLSLHADVRRPERAFWSALTRVIGTLNDRKAAQTDDDLDGARCAFASCAAMIDMLRREIGQIRDVNGVKSYGARNLDPRCRSSFYALVRHSDGQVERITSTGGRSGGALQELTSFVYGAALIYLLGGGMDNKLKPSYTTLFLDEALIKADGRYTRRALSVLPRLGFQVIVSAPESKTGEILEVSTKAYVTRKDPDTGYTTLHEARLDGIDEMDGADEPEGTVESDDAAE

SEQ ID NO: 36308 - protein, 489 aa, Xanthomonas translucens pv. poae
MKHRARIARYRSLREQPLWKLLAADQAPEVIGLLQSLLLDSERRLPAAVLHERLQRMLDELNAEQLSRELPRTAQAYVAHWLAQGWLERRLPDGAQQEEYELSTQATQAIRFADGLEHARGAATESRLALVMQQLAQLAALTETNPDARLSALRDERDRIDAEIARVSKGKVAALDGKRALERARQVIALADELTEDFRRVRDDFEQLNRDFRERIIDDEGERGEILGKLFEGVDVIGDSDAGRSFQAFWALLNDAEQSAQLDAALETVLARSFARKLDRRERGFLRGLTGTMLERGGQVHDVMQHFARSLRGFVQSRGYLEQRRLNQLLKQAQAEALALRDHIPAQRGIGRDLNLTTSRLRSLAQWRLHDPRQQQVEGGIQRNEAAAISLDSVGDLVAQSEIDFRSLRRDLFDLLAEQPQLSIAQVLTQREASQGLGSVIGYLSLGTRHGVVAAGQHEIAQWRGGDGQWRRARIPLVWFTQEKRHELA

SEQ ID NO: 36309 - protein, 234 aa, Xanthomonas translucens pv. poae
MNWHEHEWDAEQERLPDAADNAAPDAGSGLFPGDSGRLPVEARRALCQLLSGPSVDAQRHSKLWPALLRSEAAIRSALADLFLELVLDREAGIAFTRQADTGELEAPVLLRSSPLTFIDSVLLLYLRQQLAEADARGLRAVVEEAQLGEALAVYEKNLSTDRAGFLRRVGNAVQKMKDNHILTRLRGEDERYEVSPALKLLFSAEDVAALAQVYRQLREGPDSGEDAAAAAQDA

SEQ ID NO: 36310 - protein, 1191 aa, Xanthomonas translucens pv. poae
MKSSASTPGLFAGDLPDPRLQQFRMRRLQAHNWGTFSGLTEIPIAARGFLFVGRSGSGKSTLLDAMSALLTPPSIVDFNAAAREAERSGRDRNLVSYVRGAWADQQDSESGEIATQYLRKGATWTALVLEYRNGEDRVVSLVRLFWIAGNGTAAADVRKHYMVAERAFDIAADLDGFDLDLRKLKQRLHDVHHFDSFAGYAERFRHQLGIGNEMALRLLHKTQSAKNLGDLNAFLRGFMLEEPKTFDAAERLVGDFAELDGAHQAVVTARRQVETLLPARAHHAELMAVRRQRSELDELKLGIDSYREQRRLALLDARLQELDTQDRGLAGEEGQRRAALENHQRRLDDLEAQRRAQGGERIDALERERGQQETERDRRAAKRSQAEQACRQLEHVLAGSAQGFAEQAAQARAALEDGTRAAAELDEAIGQRIAGKAEDARRFAEVRAEIDALKRNPSNIPAPMQALRARLSADTGVPEAALPFVGELLQVRSEDADWRGAIERVLHGFAQSLLVDERHYADVADWVNRTHLGIRLVYYRVRDNEHALPGRAPAAGSLLHKLELREHAFAGWLRRELGKRFDYDCVDSAKALRHAERAITREGQVKHPGERYEKDDRHAVNDRRRWLLGFDNRDKLALFEEEGLALAQRIAACDADVAALRARRERDGARRLAQHTLANLAWDEIDVATPLQRLDDIATALRQLREGDANLRALGEAIDHARADIKQAERTYQDVRSERMSLSRERTSLEEERLECADADARVLTPIQRQGLSDRLDALGKLSLKNLSDLFRTVERGIEAQLGASQQEHNRLEQQLLGCFRRYCQQWPEDSGDFTVGLGSAEDFLARLQRLERDGLPQHEARFFELLQSQSKNNLLALQRHTAEARKSIAQRLDEVNASLEQVPFNRGTLLTIELGDRRLPEVIEFHQRLRDVLGHHQTEQRELAEQQFAVLRELVRRLGSQDGEDKRWRELVLDVRLHVEFVGVELDAATRQQVEIYRSGAGKSGGQRQKLATTCLAAALRYQLGGEDGELPRYCAVVLDEAFDKADNEFTALAMNIFENFGFQMVVATPLKSVMTLEPFIGGACFVEISGRHDSGVLLIEYDEQARRLKLPERTRGANAADATAATPDAQEAREAEQVQPAPQRLRAAPAVRSIAADPAVVDAAAMAATPQRTPPKSKSKSKPKSKPKA

SEQ ID NO: 36311 - protein, 402 aa, Xanthomonas translucens pv. poae
MARANAMLLPDAALAALRGQWRLHRGAWLLGDAAPQPISLRMPTQAQASAGFDAFGAWLRAWRTTPLPGHVEWRDVKWSQLGLQCLPHAWQPNADEAALALGEHARWQRARQRSAALVARWPQALGFAARLRRQFDLLADAPEAEFLRLLAVVEWLHAHRDSGLFLRQLPIAGIDSKWIEPRRGVIADWLAGLRGIVEPRGFDSVSGLRRAPDRVRLRLLDPDLRARLGGLEDVQVPIAQIAALQLPVRQVLIVENRETGLACEDLPGTLLLMARGYAVDYVRAIDWLQALPLYYWGDIDTHGLAILHRLRRHAPRTVALLMDEATLRATPSELWGHERRQHRAQRLDALTAAEQALYTDLRTGRFGPAPRLEQERIAWNYAWPRIRAALAEERAEPCAIVR

SEQ ID NO: 36312 - protein, 489 aa, Xanthomonas translucens pv. arrhenatheri LMG 727
MKHRARIARYRSLREQPLWKLLAADHAPEVIGLLQSLLLESERRLPAAVLHERLQRMLDELNAEQLSRELPRTAQAYVAHWLAQGWLERRLPDGAQQEEYELSTQATQAIRFADGLEHARGAATESRLALVMQQLAQLAALTETNPDARLSALRDERDRIDAEIARVSKGKVAALDGKRALERARQVIALADELTEDFRRVRDDFEQLNRDFRERIIDDEGERGEILGKLFEGVDVIGDSDAGRSFQAFWALLNDAEQSAQLDAALETVLARSFARKLDRRERGFLRGLTGTMLERGGQVHDVMQHFARSLRGFVQSRGYLEQRRLNQLLKQAQAEALALRDHIPAQRGIGRDLNLTTSRLRSLAQWRLHDPRQQQVEGGIQRNEAAAISLDSVGDLVAQSEIDFRSLRRDLFDLLAEQPQLSIAQVLTQREASQGLGSVIGYLSLGTRHGVVAAGQHEIAQWRGGDGHWRRARIPLVWFTQEKRHELA

SEQ ID NO: 36313 - protein, 234 aa, Xanthomonas translucens pv. arrhenatheri LMG 727
MNWHEHEWDAEQERLPDAADNAAPDAGSGLFPGDSGRLPVEARRALCQLLSGPSVDAQRHSKLWPALLRSEAAIRSVLADLFLELVLDREAGIAFTRQADTGELEAPVLLRSSPLTFIDSVLLLYLRQQLAEADARGLRAVVEEAQLGEALAVYEKNLSTDRAGFLRRVGNAVQKMKDNHILTRLRGEDERYEVSPALKLLFSAEDVAALAQVYRQLREGPGSGEDAAEAAQDA

SEQ ID NO: 36314 - protein, 1191 aa, Xanthomonas translucens pv. arrhenatheri LMG 727
MKSSASTPGLFAGDLPDPRLQQFRMRRLQVHNWGTFSGLTEIPIAARGFLFVGRSGSGKSTLLDAMSALLTPPSIVDFNAAAREAERSGRDRNLVSYVRGAWADQQDSESGEIATQYLRKGATWTALVLEYRNGEDRVVSLVRLFWIAGNGTAAADVRKHYMVAERAFDIAADLDGFDLDLRKLKQRLHDVHHFDSFAGYAERFRHQLGIGNEMALRLLHKTQSAKNLGDLNAFLRGFMLEEPKTFDAAERLVGDFAELDGAHQAVVTARRQVETLLPARAHHAELMAVRRQRSELDELKLGIDSYREQRRLALLDARLQELDTQDRGLAGEEGQRRAALENHQRRLDDLEAQRRAQGGERIDALERERGQQETERDRRAAKRSQAEQACRQLEQVLAGSAQGFAEQAAQARAALEDGTRAAAELDEAIGQRIAGKAEDARRFAEVRAEIDALKRNPSNIPAPMQALRARLSADTGVPEAALPFVGELLQVRSEDADWRGAIERVLHGFAQSLLVDERHYADVADWVNRTHLGIRLVYYRVRDNEHALPGRAPAAGSLLHKLELREHAFAGWLRRELGKRFDYDCVDSAKALRHAERAITREGQVKHPGERYEKDDRHAVNDRRRWLLGFDNRDKLALFEEEGLALAQRIAACDADVAALRARRERDGARRLAQHTLANLAWDEIDVAAPLQRLDDIATALRQLREGDANLRALGEAIDHARADIKQAERTFDGVRTERITLGAERARLEKQRLSCADADARVVTPLQRQGLDERLAGLGVLSLDNLEAHFRQIGNAIVEQTSASDKEHNRLEQLLLGCFRRYCQQWPEDSGDFTVSLSSAEDFLARLQRLERDGLPQHEARFFELLQSQSKNNLLALQRHTAEARKSIAQRLDEVNASLEQVPFNRGTLLTIELGDRRLPEVIEFHQRLRDVLGHHQTEQRELAEQQFAVLRELVRRLGSQDGEDKRWRELVLDVRLHVEFVGVELDAATRQQVEIYRSGAGKSGGQRQKLATTCLAAALRYQLGGEDGELPRYCAVVLDEAFDKADNEFTALAMNIFENFGFQMVVATPLKSVMTLEPFIGGACFVEISGRHDSGVLLIEYDEQARRLKLPERTRGANAADATAATPDAQEAREAEQVQPAPQRLRAAPAVRSIAADPAVVDAAAMAATPQRTPPKSKSKSKPKSKPKA

SEQ ID NO: 36315 - protein, 392 aa, Xanthomonas translucens pv. arrhenatheri LMG 727
MARANAMLLPDAALAALRGQWRLHRGAWLLGEAAPQPVALRMPTQAQASAGFEAFGAWLRAWRTTPLPGHVEWRDVKWPQLGPQCLPQAWQPNADEAALALGEHARWQRARQRCAALVARWPQALGFAARLRRQFDLLADAPEADFVRLLAVVEWLHAHRDSGLFLRQLPIAGIDSKWIEPRRGVIADWLAGLRGIAEPRGFDSLSGLRRAPDRVRLRLLDPALRARLGGLDDIQVPIAQVAALRLPVRQVLIVENRETGLACEDLPGTLLLMARGYAVDYVRAIDWLQGVPLYYWGDIDTHGLAILHRLRRHAPRTVALLMDEATLRDTPAALWGHERRQHRAQRLDALSAAEQALYTDLRSGRFGPAPRLEQERIAWDYAWPRIRAALAG

SEQ ID NO: 36316 - protein, 489 aa, Xanthomonas translucens pv. phlei
MKHRARIARYRTLREQPLWKLLAADQAPEVIGLLQSLLLDSERRLPAAVLHERLQRMLDELNAEQLSRELPRTAQAYVAHWLAQGWLERRLPNGAQQEEYELSTQATQAIRFADGLEHARGAATESRLALVMQQLAQLAALTETNPDARLLALRDERDRIDAEIARVSKGKVAALDGKRALERARQVIALADELTDDFRRVRDDFEQLNRDFRERIIDDEGERGEILGKLFEGVDVIGDSDAGRSFQAFWALLNDAEQSAQLDAALETVLARSFARKLDRRERGFLRGLTGTMLERGGQVHDVMQHFARSLRGFVQSRGYLEQRRLNQLLKQAQAEALALREHIPAQRGIGRDLNLTTSRLRSLAQWRLHDPRQQQVEGGIQRNEAAAISLDSVGDLVAQSEIDFRSLRRDLFELLAEQPQLSIAQVLTQREASQGLGSVIGYLSLGTRHGVVAAGQHEIAQWRGGDGHWRRARIPLVWFTQEKRHELA

SEQ ID NO: 36317 - protein, 234 aa, Xanthomonas translucens pv. phlei
MNWHDHEWDAEQERLPDAADSVAPDAGSGLFPGDSGRLPVEARRALCQLLSGPSVDAQRHSKLWPALLRSEAAIRSALADLFLELVLDREAGIAFTRQADTGELEAPVLLRSSPLTFIDSVLLLYLRQQLAEADARGLRAVVEEAQLGEALAVYEKNLSTDRAGFLRRVGNAVQKMKDNHILTRLRGEDERYEVSPALKLLFSAEDVAALAQVYRQLREGPDSGEDAAEAAQDA

SEQ ID NO: 36318 - protein, 1165 aa, Xanthomonas translucens pv. phlei
MRRLQVHNWGTFSGLTEIPIAARGFLFVGRSGSGKSTLLDAMSALLTPPSIVDFNAAAREAERSGRDRNLVSYVRGAWADQQDSESGEIATQYLRKGATWTALVLEYRNGEDRVVSLVRLFWIAGNGTAAADVRKHYMVAERAFDIAADLDGFDLDLRKLKQRLHDVHHFDSFAGYAERFRHQLGIGNEMALRLLHKTQSAKNLGDLNAFLRGFMLEEPKTFDAAERLVGDFAELDGAHQAVVTARRQVETLLPARAHHAELMAVRRQRSELDELKLGIDSYREQRRLALLDARLQELDTQDRGLAGEEGQRRAVLENHQRRLDDLEAQRRAQGGERIDALERERGQQETERDRRAAKRSQAEQACRQLEQVLAGSAQGFAEQAAQARAALEDGTRAAAELDEAIGQRIAGKAEDARRFAEVRAEIDALKRNPSNIPAPMQALRARLSADTGVPEAALPFVGELLQVRSEDADWRGAIERVLHGFAQSLLVDERHYADVADWVNRTHLGIRLVYYRVRDNEHALPGRAPAAGSLLHKLELREHAFAGWLRRELGKRFDYDCVDNAKALRHAERAITREGQVKHPGERYEKDDRHAVNDRRRWLLGFDNRDKLALFEEEGLALAQRIAACDADVAALRARRERDGARRLAQHTLANLAWDEIDVVAPLQRLDDIATALRQLREGDANLRALGEAIDHARADIKQAERTFDGVREERIALGVERSRLEKQRLSCADADARVVTPLQRQGLDERLAGLGVLSLDNLEAHFRQIGNAIVEQTSASDKEHNRLEQLLLGCFRRYCQQWPEDSGDFTVSLSSAEDFLARLQRLERDGLPQHEARFFELLQSQSKNNLLALQRHTAEARKSIAQRLDEVNASLEQVPFNRGTLLTIELGDRRLPEVIEFHQRLRDVLGHHQTEQRELAEQQFAVLRELVRRLGSQDGEDKRWRELVLDVRLHVEFVGVELDAATRQQVEIYRSGAGKSGGQRQKLATTCLAAALRYQLGGEDGELPRYCAVVLDEAFDKADNEFTALAMNIFENFGFQMVVATPLKSVMTLEPFIGGACFVEISGRHDSGVLLIEYDEQARRLKLPERTRGANAADATAATPDAQEAREAEQAQPAPQRLRAAPAVRSVAADPAVFDAAAMAATPQRRPPKSKPKPKSKPKA

SEQ ID NO: 36319 - protein, 392 aa, Xanthomonas translucens pv. phlei
MARANAMLLPDAALAALRGQWRLHRGAWLLGEAAPQPVALRMPTQAQASAGFDAFGAWLRAWRTTPLPGHVQWREVKWPQLGAQCLPHAWQPNADEAALALGEHARWQRARQRSAALVARWPQALGFAARLRRQFDLLADAPEAEFLRLLAVVEWLHAHRDSGLFLRQLPIAGIDSKWIEPRRGVIADWLAGLRGSAEPRSFDSLSGLRRAPDRVRLRLLDPELRARLGGLDDIQAPIAQIAALQLPVRQVLIVENRETGLACEDLPGTLLLMARGYAVDYVRAIDWLQGVPLYYWGDIDTHGLAILHRLRRHAPRTVALLMDEATLRETPSELWGHERRQHRAQRLDALSAAEQALYTDLRTGRFGPAPRLEQERIAWDYAWPRIRAALAG

SEQ ID NO: 36320 - protein, 489 aa, Stenotrophomonas maltophilia
MKHRERISRYRHLREQPQWKLLAADHAPEIIGLLQGLLMDGERTLPSSVLNERLQRALDQLNGDELSRELPRTAQAYIAHWLAQGWLERRLPDGADQEQYELSTAALQAIRFADGLEQARVAATESRLALVIEQLSQLAAQTESDPDARLSALRDERDRIDAEIARVGAGRVIALDGKRALERARQIIGLADELTEDFRRVRDDFEQLNREFRERIIDDEGERGDVLSQLFEGVDVIGESDAGRSFQAFWRLLNDAEQSAQLDAALEAVLARGFARRLDRNERNFLRGFTSTMLERGGQVHDVLQNFARSLRGFVQSRGYLEQRRLNQLLKQAQSEALALRDEFPAQRGIGRDLQLTTSRLRSWSQWKLHDPRSAQVDGNVEYNDAAAISLESVGDLVASSEIDFRTLRRDLHDLLDAQPRLSIAQALSQREAPQGLGSVIGYLSLGTRFGNVVAGEQELAQWRGGDGQIRRARIPLVWFTQERRHELA

SEQ ID NO: 36321 - protein, 233 aa, Stenotrophomonas maltophilia; identical to SEQ ID NO: 31708

SEQ ID NO: 36322 - protein, 1126 aa, Stenotrophomonas maltophilia; identical to SEQ ID NO: 35451

SEQ ID NO: 36323 - protein, 450 aa, Pseudomonas aeruginosa; identical to SEQ ID NO: 32505

SEQ ID NO: 36324 - protein, 220 aa, Pseudomonas aeruginosa; identical to SEQ ID NO: 33036

SEQ ID NO: 36325 - protein, 979 aa, Pseudomonas aeruginosa; identical to SEQ ID NO: 33037

SEQ ID NO: 36326 - protein, 393 aa, Pseudomonas aeruginosa; identical to SEQ ID NO: 32927

SEQ ID NO: 36327 - protein, 543 aa, Bifidobacterium longum; identical to SEQ ID NO: 31042

SEQ ID NO: 36328 - protein, 224 aa, Bifidobacterium longum
MTVAEEHEEHEEHMDNANPYALFEGDTGDMPAEARMAAIALKRDRYISGPTYDTVLDNRDAVVRSLNNDLLDLVINERYRIMYATPVAGDDVTLRSLKTRVSLKREEAALLAFLRIRVLEYENVHADPADWLVSFEEIRAALATGAGYLAARNDEEGVAKQIGAIVSAMITYGYLVRLDNEAMYQITPLVPVVLDRELADTWLDVAEHGDGDTEDDDDDEKGAE

SEQ ID NO: 36329 - protein, 1182 aa, Bifidobacterium longum; identical to SEQ ID NO: 33523

SEQ ID NO: 36330 - protein, 391 aa, Bifidobacterium longum
MKDIAAITTCVKKHMRSHMYDIEPAWPFPVPVGLPDQAFLETNAIAVHDNNNEIRQWASKNGCEIITKHRTIGTSVELISKVVVPDESIAMRVVGRTLAAECREARRRIACLVAACDVAPETIESAARMTGHEQPDDFDLLVSAVRYFRHHDVTGMTPRQIPLTGFSGKWLNESKTNRRKAICRLLGVETLGLSKRPTELRFRYLDPVRDDAELERIIWCPWEGEALSGIKYAVIVENKDTYQTMPPIAQGICIWGSGRAVSDAVPAVPALRDMRIVYWGDMDADGLEILSTLRESGIECDSILMDCDAYDRYHRFGTDRTERSAKIAMREPKPTPGLQSAERRLYERLCAGKTIAYRRIEQERIPMRDAVDELRKLGIPVESIENQDLPI

SEQ ID NO: 36331 - protein, 489 aa, Xanthomonas campestris pv. campestris; identical to SEQ ID NO: 35483

SEQ ID NO: 36332 - protein, 235 aa, Xanthomonas campestris pv. campestris; identical to SEQ ID NO: 35484

SEQ ID NO: 36333 - protein, 1338 aa, Xanthomonas campestris pv. campestris; identical to SEQ ID NO: 30401

SEQ ID NO: 36334 - protein, 507 aa, Pseudomonas coronafaciens pv. oryzae
MGYQVRLATSRDAAAHYYWRGAMSLYEKQARYRRLHSEQSAWRLLRADSAPIILAFIDSLFADEQEVLFARAKAALEAELPTWQGAYGMQDNANSHLRNWIHAGWMREHDDHLTRTDAFHQALRFVEGLESRDTTTSATHLRRVQDAVRDLAVALNPSAEERLLVLRERMAELSEEVMRLEAGIVPELSSAEQRERVRGVYQMASGLTGDFRRVEDDIRQLDQSIRVQMIESEGGRGLVIQNLLDNEDALLQTDAGQAFDGFFRLLCDENRSVEFREQIRSILNRPTARSHLNAQEIRFLTHLVRELSSESQRVISIRRRTQESLRAFVEAGAQSERRAVEQVLRQLEKLAVTFKDQDIGPRTSLKVYVASGPFSVSSPSSIRLMQPQASLDTSKVVPQSNQTTVSDTILECLEAVQIQEVAEAMRDLLKSQGPMSLAQIAELRPIQGGLEELVALVRIAKAIEAVSLEGVEHLVVADRQGQTIRAKIPVLLLSADQFPENLESLPL

SEQ ID NO: 36335 - protein, 119 aa, Pseudomonas coronafaciens pv. oryzae
MPLYDTLVLLVLRKYYQEREVIGENKVMIDVDTIAELMTPFLKLTNSSALERKTLNGSIAKLREKRLLANVRGDGERLEITPVIRYVVNADFLNTLLSEYQLLAERGSVMGQQEVEDDV

SEQ ID NO: 36336 - protein, 1129 aa, Pseudomonas coronafaciens pv. oryzae
MSDTTNTSFGDLFSTGQIRLAEISAYNWGSFHGLHTAVIDPEGTLITGDNGAGKSTLIDAHMALLNRPGQTSFNIAASQGDRSDRNLMSYIRGNYGTAHDGSQTLNLMKRDGATMTALRALYRADDGSEITLVSMFWIRQAGASMTDLKRFYLVGKRNVSLEVLLQQFGSNNVRQLKQYVDDDPMLKHFDNNFSAYQEYFTRLLRMENSNAPALLQRALGLKKIDDLTALIRELVLEPSKVRDLATGVVKEFDDLIAVHNELDTAKQQKEVLSILPDHNRNYESSLEEQGQVNSEAAGLTAFFGEQGNRLWGLRCEDLDRSLDDLTSDGKRLAESVSQNEERVTSLLHAYQQQGGDRLDSLRREVEDAERGFQTTTNKAHDYQKDTRDLGLAETLTASAVRDNIASAKAVLVDLPAQIDDAKNAFGESRGALSGITQQIKNLQAQISEIEKRPNSNIDAAFQCLRDEMVESLQLNKDGVVFIGELLDVRSTEARWRGAIERALGGRRTTLLVPEDKFRMVTGWVNSRHTGLHVRVQVVSKTERNPEFLGGGFLRKLEWKEHPYRDWLKRHLARFDLHCVDSTEVLNDTPYSMTREGLVHMEKGRFEKKDGTRVDDKKNWHLGFNNLSRLAALQEEGERLREGLDSARSDESVKRQEMDILVASEAIWKRVAQTLWDQIDVTLAKQHLDTLKNDLAALNAPDSDLSKAKALLELAKKELLEIRTAQNQNARAVGGFELEIRQANKSRQVSALAASAGLADAVRQSLSLRVGILTLEHLDKLNQLEKTQREFLDDALNSIGKRANHYNGRMIAIINSFKTKWPLVANDWLTTIEGRQDYIDYLDKLNNEGLPDLVERFQQRLNNNTTQSLGRMQRAIDDEREDIQDRIATINEVLERTEFNHGTFLRLKHEDEHYAHVKEFTALLGSVLKHASSVDHEARFLELCSLISKLEKATNSATAINLESQRLLDSRYRMTFYANEIVKETGAVRDVLRSSSGKSGGEKESFAGIIVAASLAYVLTPDGAPHPMYCTVFLDEAFSNTADKVSRRVLRVFRELKIHVNLITPYKNLNLARDSARSLIIAERKIDGHESRLSQITWDQLDQQSAERREAKQTQLAGVAEGLGIQMEQL

SEQ ID NO: 36337 - protein, 398 aa, Pseudomonas coronafaciens pv. oryzae
MRSWGRLPTDVMREVERLEWDNATNLRGRLQGTRRFPISLTLKPPAAGDALMDIDHFHNWVNAWRQWSKQSQVKWVTRRYRVVGDVEVPERLDLGNVKELIEAIGPAAVKRSHIWAALMEPLLAVDRNLYDTLIRQILVVEQMSHRTAQQMANVLPQLRKGIGAGYFLRGVPVQGIDTKFLETYNPLLTTLLDVIHSGELSEAGGLDAWLGCLPTPSNWLYIRPLCPEVRQQMGGFSVIQIPLEQFLEQPLPGRRVLVVENTKPGYALPELPETVAIFGGGRNTQWRMAPWLSERDVAYWGDIDSWGLTILAHARQALPGITALMMDHETLMAHMDFAVEEPRSTNLPAVGLLSEERLLFESLIKSAQSIIRLEQEYLAQNYVLSKLYSWAKCCTTKS

SEQ ID NO: 36338 - protein, 480 aa, Arthrobacter alpinus
MDYFSINSLRENHAGWSLLRAQNAPLALTFFMTAFTDPNQRNLGRQDLIDVLDDVLFSLRDSLGEDRFPRTAGEYLDDWAEPDKAWLRKFYAENRDEPVYDLTAATEDVIRWVESLRGRDFVPTQSRLSSIFNLLKALVHGSETDPEARLAELQRQRDDIDVQMEQIRSGTIPVMTGPEAVDHFHQLTTQAKDLLSDFREVETNFRRLDRNLREQISMWEGGQGDLLESIFSSQQDISGSLQGRTFQGFWDYLMSPQLRSELHELLERATQIQALATQDGLNSITSMQKDWLPAVEQTQSTVRQLSAQIRRLLDDKVFLENKRIMALIRNIESGAVAVRATPPTGVFAELTGHDVPVALPFERPLYEPSRQVAIDDAVSVAEDLDVDAKALFDQFYVDQQRLEANIDAVLADAEQATLADVTDAYPLSQGLAEIVSYFQLATESTSAVIDPDTEQTLSWTLPDGSLREATVEKIIFVRPS

SEQ ID NO: 36339 - protein, 225 aa, Arthrobacter alpinus
MTTISLEECGELQEPASRTPDGLPLVVTKLFKGVVYRDGDERLWQRLMELSAQTRDYVAVLGLELVLDDAEGYAFLRSNPDADAGLPRLIPRRQLTFHVSLLLALLRARLAEFDQQNSETRLIMTSGQIGDMVSVFLPESSNEARILDQLASNIKKVTELGFLRKLRGQDDTYEVARILKAYVDAQWLEEFDARLADYRATLDGDGSAVGPSSGKSSKTAKAATA

SEQ ID NO: 36340 - protein, 1112 aa, Arthrobacter alpinus
MTIDDAGTRPGFRLHRLELLNWGTFNKDVRTFRLDGENSLLTGDIGSGKSTVVDAITTLLLPANKIEYNKAAGAQKKERSLMSYVRGFHKSARSGIGDTSRPVALRGPGTYSVVLGVFHNATLDKTVTLAITLWATQEAGQPTRFYSIAEGEQSIKGDFSDFGADIAKLKRRLRNDGTAIFDVFEKYGASFKRHFGIGSSQAMDLFHRTVSMKQVENITHFVRTNMLEEDDVETRIKNLLHHFEDLKKAHDAVLRAKDQIRMLEPVRDNAARHASLTVDYENAHQQREQLSPWFTTRKLELSEAHLLELERASAKVEEQQTAMTAEVGRLNLELADLRDDIRNSGGGRIAAIEGELARLSIESGAQRGRYSSYSEAAKVLGLFEPEDQVVFDANAAALPGVEKHLAEANAELQEQRTALDRQRSEATEQAAEYKEELKSLLNRQNLLPGWLISLRQRLCDGTGITEAELPFAGELLKVRDSEAAWEGAAERTLHGFALSLLVTGKHYAAVSNWVDSNNLRARLVYLKVPDISSPRTASAGTLAAKLNIKPGTPLREFLLDELGHRFDHQCCEAMDEFRRYPKALTINGQLKGGGGRHEKDDRKALTDRSTYVLGWDNHDKIARLRSALDQAEGQVRTAADGLGRIDAQLGNLGRQQQHIGTVTAVGSFAGLDWRTTVRTMENLAQEKAVLESSSDILRELTERETATKARLDKASKKLSNLAERIGATKNSIQGITEQIADCRDSLAEAPLTSDAGLLAEVGRLAQAALESETLTYKNTSKIESKVRDKLTASIDALNRQVIRAAETTIRFMSDFCNKYPSETTELDASLESAGEFNKILGQLVDNDLPRFAERFKESLTQNTIHEIVAFNAFLDARKQDIVSRIGEINESLARIEYNPGRHIQLEPQPTSDPEVREFGTELRACSEGSIGAQEQYSEQKFLQVEALVERFRGREGRTSLDERWTAKVTDVRNWFTFSASEKWTETGEEHEHFTDSGGKSGGQKEKLAYTILAAALAFQFGIAAGPGNQRSFRFVVIDEAFGRGSDDSAKYGLELFKRLKLQLLIVTPLQKIHVIEPFVANVGFVANEAGDDSQLRNMTIHEYRAERDKRGS

SEQ ID NO: 36341 - protein, 387 aa, Arthrobacter alpinus
MVAKPPDWTTPADIRAASLRSWNSGELLREAALPMGLYPRRRALKYPSATALRTDYALAAAWAHAWEPAPRGCSLEYVSVGANTIGANTLPSAAVFGTAADEIAFLGMGREAARFSVLAGRIAELDAGLLAWSLRRPLELLKHGEVALTAARVAVWLAANPAPGIYLRQLSLPGVHTKFVETHRRLIDGMLAVLVPDRPLAGKNYARRHGFLAAPERVRIRYLDPSLSPVPGMADVEMTATAFAALEVDADTIITTENLVNFLALPPAPRTLAVFGGGYGFLALREAAWLGTKEVLYWGDIDTHGFGILDQLRSHHPHVRSILMDEQTLLSHQDFWGREDAPTHAMLNHLSPAESALYAQLQAGTYRPGLRLEQELLRWDFVLERLP

SEQ ID NO: 36342 - protein, 485 aa, Arthrobacter alpinus
MRPTDNAVDQWRAQKQLRHSPAWKLMQSAPWTVAFLRTEFTPSRQRVALEEFHADLAAFMKELRYENLSLNDAWQASNYADSWVRSQFLARPMVDGRFMYEPTAATARVLAFLETFTVERTNLNSSRLNTLLTSIETLSFQTDPNPESRISALEAEIAARRSEIEALKSGHNPAVLSDDSAVAATRSVLDLAASLPADFKRMRDGVEQMLHTIRQEIMESSVTKGVAVGQVLEGDKALRNTAEGETFQGFTEFLNDPAQQARFRQSVNEVLERDFTEQLSSEERANFATLVKEMRRQAADVHTIYGRLSESLHSYVSSDEFKDSILLRKAIHAAEQAVAAAALRPRTPVVAPLLFAPALETLAGLGIFDPDDHIPPPRLAAPPTLSGADIHRTPVTPQADMAAVHAAVARTRATRKGTATLSEVYAELPPELRHINTIRGLILAARGADESVDPEHTQTLRFTQIDGTERTALVPLITFTKDTAP

SEQ ID NO: 36343 - protein, 226 aa, Arthrobacter alpinus
MSGGTDAYRAERALFTGDTGAFPLEIRQALVRLLRGPYIDGTVDAHLWTTIQTHRASLQQYLSEIFLLLTIDADRKIAMLTPAEIEAVHTQPIVARKPLRREETLLALRLRVLLDRHASTGNDVTITRSGARELLAEHRQPGAVDDKRLDEQTDSSLARLLALKLLLPTELGGEYRVSNALALALPFDSIEQIPAYLAALDSSPDDDTLELGTGHDVAATAPEENL

SEQ ID NO: 36344 - protein, 1100 aa, Arthrobacter alpinus
MSIAVTLPIGEELNPGQYRLSQIQIINWGTFHGRHSMYVDRAGTLLTGHPGVGKSTLFDGIQHIFYAAPRLNESAHEASNRKDRRTTFSYMRGRKIKNAEGTVYQRPSATWSATALVFEDGLGRQVSIAALFDLPANGLEGQVGKHYIIHDKPLDTEALENHGSRRFSPSSLHAALPGAEAFDVHRTFAERFRRRLGIDNDKAFSLLRTLQNGKGLDKGVNRFFRYEVLDIPGTLAAAKSAVEDFSHLRGIYRQLQDARGQRDALAPVPELHRKLREFKANHARTAELKNVQLPLLRQQFQAELLAAKAVSLAGQHAEKAMQIEAATAAKETLSESLSSLEEHHANHGGRAIDGLEKDIRTAKRELEERLRRETSVRDELDAAGLDYNWSAQGLAAARLEAADGVEHQQAETEAARTREYEAVAASINTKVDEKKLRAEIASYQRRGSNIDGRNAAARRAICATTGLDPALMPFAGELVDIASEHSSWRPATEKVLRSLATTLLVRDEDIKAVTGAINSLDDHGKLRWINIGTHIPAQSAGPHDLVTKLEFQTSDAGDWLRAKITRDFGFRCVESDSELHAHNRAISMAGTLKVNAATYERDTRSVSPSDYLLGFNNVEKIAQLEAQAAELAAAYQSATALADQRSHAKDALTGRLEALLRVSRDQRPFEELDSGSLSAALTSLQASLQATIESSATLAQIRASLTAAKAELEACVGKLAILQHDLSRIDSELTTAHSSGERLSGEAAQNPAADWARSEFDPYLLDTWPTSLDELEKVFTTATVDLGERLATVKERVFRTEAALSETFRAFAREFGPVVSASHGTGAEAVEAYEALHERILADGLPQRQVEFREYFNNRSYERFSDLLQLLEEERRGIEERILPLNQILEDVPFEKGSRLRLEVKTAIPDEARSFRTELKEALGNAYTTASEETIASSYLQLERLVDALSDTSRQHWADTVLDVRQHVTISCNEHRPNGEVELGLEPGTLSGGEGQRFTSFIMGAALAYQLGIDTQGYSTYGTVMIDEAFIQANSEYAGAGINALQEFGFQLLLAAPEDKVDLSKHLGSVTDIIKHPQANVSGFVSTGRSPATATAIILR

SEQ ID NO: 36345 - protein, 486 aa, Mycobacterium immunogenum; identical to SEQ ID NO: 34318

SEQ ID NO: 36346 - protein, 246 aa, Mycobacterium immunogenum; identical to SEQ ID NO: 34319

SEQ ID NO: 36347 - protein, 1115 aa, Mycobacterium immunogenum; identical to SEQ ID NO: 34320

SEQ ID NO: 36348 - protein, 486 aa, Mycobacterium immunogenum; identical to SEQ ID NO: 34318

SEQ ID NO: 36349 - protein, 246 aa, Mycobacterium immunogenum; identical to SEQ ID NO: 34319

SEQ ID NO: 36350 - protein, 1115 aa, Mycobacterium immunogenum; identical to SEQ ID NO: 34320

SEQ ID NO: 36351 - protein, 486 aa, Mycobacterium immunogenum; identical to SEQ ID NO: 34318

SEQ ID NO: 36352 - protein, 246 aa, Mycobacterium immunogenum; identical to SEQ ID NO: 34319

SEQ ID NO: 36353 - protein, 1115 aa, Mycobacterium immunogenum; identical to SEQ ID NO: 34320

SEQ ID NO: 36354 - protein, 486 aa, Mycobacterium immunogenum; identical to SEQ ID NO: 34318

SEQ ID NO: 36355 - protein, 246 aa, Mycobacterium immunogenum; identical to SEQ ID NO: 34319

SEQ ID NO: 36356 - protein, 1115 aa, Mycobacterium immunogenum; identical to SEQ ID NO: 34320

SEQ ID NO: 36357 - protein, 486 aa, Mycobacterium immunogenum; identical to SEQ ID NO: 34318

SEQ ID NO: 36358 - protein, 246 aa, Mycobacterium immunogenum; identical to SEQ ID NO: 34319

SEQ ID NO: 36359 - protein, 1115 aa, Mycobacterium immunogenum; identical to SEQ ID NO: 34320

SEQ ID NO: 36360 - protein, 486 aa, Mycobacterium immunogenum; identical to SEQ ID NO: 34318

SEQ ID NO: 36361 - protein, 246 aa, Mycobacterium immunogenum; identical to SEQ ID NO: 34319

SEQ ID NO: 36362 - protein, 1115 aa, Mycobacterium immunogenum; identical to SEQ ID NO: 34320

SEQ ID NO: 36363 - protein, 486 aa, Mycobacterium immunogenum; identical to SEQ ID NO: 34318

SEQ ID NO: 36364 - protein, 246 aa, Mycobacterium immunogenum; identical to SEQ ID NO: 34319

SEQ ID NO: 36365 - protein, 1115 aa, Mycobacterium immunogenum; identical to SEQ ID NO: 34320

SEQ ID NO: 36366 - protein, 486 aa, Mycobacterium immunogenum; identical to SEQ ID NO: 34318

SEQ ID NO: 36367 - protein, 246 aa, Mycobacterium immunogenum; identical to SEQ ID NO: 34319

SEQ ID NO: 36368 - protein, 1115 aa, Mycobacterium immunogenum; identical to SEQ ID NO: 34320

SEQ ID NO: 36369 - protein, 486 aa, Mycobacterium immunogenum; identical to SEQ ID NO: 34318

SEQ ID NO: 36370 - protein, 246 aa, Mycobacterium immunogenum; identical to SEQ ID NO: 34319

SEQ ID NO: 36371 - protein, 1115 aa, Mycobacterium immunogenum; identical to SEQ ID NO: 34320

SEQ ID NO: 36372 - protein, 486 aa, Mycobacterium immunogenum; identical to SEQ ID NO: 34318

SEQ ID NO: 36373 - protein, 246 aa, Mycobacterium immunogenum; identical to SEQ ID NO: 34319

SEQ ID NO: 36374 - protein, 1115 aa, Mycobacterium immunogenum; identical to SEQ ID NO: 34320

SEQ ID NO: 36375 - protein, 486 aa, Mycobacterium immunogenum; identical to SEQ ID NO: 34318

SEQ ID NO: 36376 - protein, 246 aa, Mycobacterium immunogenum; identical to SEQ ID NO: 34319

SEQ ID NO: 36377 - protein, 1115 aa, Mycobacterium immunogenum; identical to SEQ ID NO: 34320

SEQ ID NO: 36378 - protein, 489 aa, Stenotrophomonas maltophilia
MKHRERIARYRHLREQPQWKLLAADHAPEIIGLLQGLLMDGERTLPSSVLNERLQRALDQLAGDELSRELPRTAQAYIAHWLAQGWLERRLPEGADQEQYELSTAALQAIRFADGLEQARVAATESRLALVIEQLSALAAQTEADPDARLSALHDERDRIDAEIARVGTGRVVALDGKRALERTRQIIGLADELTEDFRRVRDDFEQLNRDFRERIIDDEGERGDVLSQLFEGVDVIGESDAGRSFQAFWRLLNDAEQSAQLDAALEAVLARGFARRLDRNERNFLRGFTSTMLERGGQVHDVLQNFARSLRGFVQSRGYLEQRRLNQLLKQAQSEALALRDEFPAQRGIGRDLQLTTSRLRSWSQWRLHDPRSAQVDGNVEYNDAAAISLESVGDLVASSEIDFRTLRRDLHDLLDAQPRLSIAQALSQREAPQGLGSVIGYLSLGTRFGNVVAGEQELAEWRGGDGQIRRARIPLVWFTQERRHELA

SEQ ID NO: 36379 - protein, 233 aa, Stenotrophomonas maltophilia; identical to SEQ ID NO: 31708

SEQ ID NO: 36380 - protein, 1126 aa, Stenotrophomonas maltophilia
MAISKHTPALFNEGLPDPRLQQFRMRRLQVHNWGTFNGLTEVPIAERGFLFVGRSGSGKSTLLDAMSALLTPPAIVDFNAAAREAERSGRDRNLVSYVRGAWADQQDSGTGEIATQYLRKGATWTALVLEYRAGDGRVVSLVRLLWISGNGTSAGDVRKHYMIAERPFDIAKDLGGFDLDLRKLKQKLSDLHHFDTFSGYAERFRDLLGIDNEMALRLLHKTQSAKNLGDLNVFLRDFMLDTPKTFDAAERLVSDFAELDGAHQAVVTARRQVETLLPARAYYNDLKEMHRQRGDDEALKLGVDSFRESRRQALIEARLREMDVRDRGLLGEEAQRRAALDNHTERLAELELQRRQQGGERIEELEREQGRAEAERDRRQAKREQARQAAQQLQAELPDDAHGFAELVERAQNELQDRQRASSALDDAISDRLGGKRDDERRFGEVRAELEAMQRTPSNIPAPMQKLRARLAEETGIAEAALPFVGELIQVRSEEQGWQGAIERVLGGFALSLLVDDKHYNDVAEWVNRTHLGMRFTYYRVRRNDDAFAREPSAKSLLHKLELREHVFESWLRRELGKRFDYECVDAKQLRNVDRGITREGQVKHPGDRFEKDDRSAVGDRRRWILGFNNHDKVGAFEREAQELAKRIAGCETDIARLRGQRDRDNERRLACHELVSISWNEIDIAAPQQRLSDIEATLRDLREGNADLAKLAKQIDAVRADIEQSRRTYEDVRVERGQLVKERDRLDRARQQSRALVLPSLAQEQEAGLAERLQEQGPLSLETLEAHMRQVSNALNEQLSSSQQDLNRIENQLIGCFRRFIQQWPEESGDFTVSVASAEDFLARLERLERDGLPQHEERFFDLLQNQSKNNLLALQRHSAEARKSIGQRLDEVNASLEQVPFNRGTLLTIELNDRRLPEVGEFHLQLREVLSQQQTEQRELAESQFTVLRQLVNRLGSQEGEDKRWRELVLDVRMHVEFIGVELDAETRQQVEIYRSGAGKSGGQRQKLATTCLAAALRYQLGGADSQLPSYAAVVLDEAFDKADNEFTALAMNIFDNFGFQMVVATPLKSVMTLEPFIGGACFVEISGRHDSGVLLIEYDEEGKRLKLPERSRQQANEPEEAEA

SEQ ID NO: 36381 - protein, 450 aa, Pseudomonas sp. RIT-PI-q
MDDALHSLADTLANYADEELYQVEAGTELQQANRELGEWIKRRLIVERNGRLYATDALESAIRFTESLDNRVMTSTASRLSVVQREIENLETHLNSDPKSRALSLKRRIRELQIELDQAKAGHIPIFDEEKAIEGIREVYALAISLRADFRRVEDSWSNADRLLRQSIISEQCHRGEIVDNLLDGQDALLNTPEGRVFDSFQQQLRAPIELDRMRTRLRNIMHHPAVPLALLRPQQNELLRLVPRLLQESEAVLRARARSERDVKGFLKTGLIAEHHRVGHLLNEFLSLAVNINWQRQAVRRLPVPIPAVGMALAKVPAIERLRFKGIADESAPDLDLSRHATALDQIEEEFWQSFDGLDREAFVTETLRILEEQGRPLSLAELGALLPPTHDLECFTLWITMAREAGIAINDKEIEAFDLADAEDCRWRFHLPFTQLESQKLRDIKWEL

SEQ ID NO: 36382 - protein, 235 aa, Pseudomonas sp. RIT-PI-q
MQEGLNEDSEQESDSEESQIEPFEAQDDDLRTTRVVREAVQQLYKNGDIEESEDPRLYRAAVANAELIERILEPFDLNVRFDEIRGLAFVVVRQQPDDTADGWTHPLVRRHTFSLEQTLLIALLRQHLIAIEMESGVGAGIAQMTVDDVITQLHAYLGDPGSDLKDRARAVNLLEQLKNHHLVTTIDGSDRFTIRPLIAHVANPENLSALIQWLETYGVSLDRLTPAGDDGEDLS

SEQ ID NO: 36383 - protein, 986 aa, Pseudomonas sp. RIT-PI-q
MAALFSFEGTSSAATEMEKCWILTHHPEQTLESCLLAYHDEGKRGLGRIEKNVQNFWLHGTRKEYLARVRALFQVGDNAFSLLNRAAGIKQLTDIDSIFRELVLDDRSAFGRAAEVVKSFEDLSEIHQELEIARAQQKSLKPIAECWEAFKKQAESLQELKAVEAIAPVWFAEQSHQLWLAEKSRLDVAAEDSALLLKQLADQRIEWKQQCDMHLQAYLQKGGASIDQLRKRVEEWENVRETRVNYSAQYQRLVRKLGLPEELSSDALTLNKAHAAKQGVALANEMKGQRSETFQRGIVESDVRTQLLTLNQEIDEIKRRPGSNIPGEYHQFRGQLAAYLEVNEAELPFVAELVQVKPDEHIWRGAIERAIGWHRLRVLVSPEKVRAALQWINSRDNHLHVRVLEVALDVEPRRFFEDGYARKLEFKSHPFRKAVESLIADNDRHCVADPAVLLSTPHAMTKEGLMSGKPHLYEKRDQSLLNAHWFTGFDNQDRLAYLSQEVATVDLKLAAAVNAVRAAQDRLGSLEDANTACLLLRDVEFNLIDLPGADNQLIDLKGQLDYLTRPDTDVALAKRLLDEAMAKRDAVEDAHVNANVTYALCVKGRDNAAVMVEKTFSRAELGMTNAERSAANKYLRRLDTHELQDLNDIERQSYETLSKRINNNNDQLVELQSDLVRKMSDAKSRDTGALADVGRDLIDVPAYIERLRVLTEEALPQKVERFLTYLNRSSDDGVTQLLSYIDQEVLLIEERIDELNSTLRRVEFQSGKYLRLVTSKVVHESLRSLHASQRKLTSARFVNDTGETHYRALKSLIEVLKEACEKSRNVSARAMLDPRFRLAFSVFVVDSASGMATEGRKGSQGDSGGEKEIVASYVLTASLGYALCPTGESRPLFGTIVLDEAFSKSSPSVAARIIAALKEFGLHAIFITPNKELRLLRLHTRSAIVVHKKDGLSTMVSMSWEALENYYRARKGKGDTAVDSTPSEPQ

SEQ ID NO: 36384 - protein, 387 aa, Pseudomonas sp. RIT-PI-q
MKSPEELRQKLARQWDLPSVRLNQLLNPLAWPMVLNIGKPSAQCFNSHTSKVQRHVEAWREVKVGTIEWADIAYRCGAETVSVPMKWCLRNPSEWVAAASRRSVSDEYAALGYLVERVPAHFRQLLISRRNLWRDKPKEEVIQAAVLASQLSPGCAQGLPLRLLSGYGVDTKFFERNELLLRKMLDVMFEGEASVQGLCGFLDAYDDTSHWVLVTPLESGLLPFNRQQVTTSELAQVALPGTRLLIVENQKCLHQLLELPETIAVLGCGLDLEWLCSGQLRDKSVAYWGDIDTWGLRMLARARVKHGKVTSLLMSEDVYDAHKSRSAVREPVRAQDTPPAGLTSAEAALFVRLVASRKGRLEQEFIPRQEVRAVLERWVSSQGEAKL

SEQ ID NO: 36385 - protein, 568 aa, Frigoribacterium sp. RIT-PI-h
MNHPSGHDDALSRDDVRAAYEDDPTWALLRGYNARWMLPLFSRHLEHAEGPVSADWFHRQVADALEQNAAEQAASEQAASEPAVSEPATTSRPPEEARPASPTPVATPTPTEQKTTPAEYCRSWVESRWLVRTRASGPDARAEYRLSPHALKALRLVRDLVERDNAVSEARLGSIAHAVGQLAGLADPSRESQLARLDEQIAELERRKAEIERHGTEPTAPDVLRRQVREVVRLTASLPEDFRQLGAMVEQRHREVARRASSEDVGKGALVDQYLRDNDLLEQTPEGRAYRGFAQMLSSRGIDVMRADIEKVLAQPDAAAQLTERQRAQLESLISSLLAEEQSVQETYGRWTSSLRRFLSRSGSDQQQRLLTLADRALHAGGVWAERRPGHAMLPAEHGDGLGLGALDVRDVSQVQLHTDRARPTVDVQVTIGDATLPEADRAALRLTSGTSTAAVSATIDRLLADRDEVTSADVYRATEPEFRRLGLVLSMLDLALERGVVGDDTETVELAGGPTGLGASSDASPGGAGRQVTLPRLVFRRDPASPPDAAPAAANLTTRTTTTKDLA

SEQ ID NO: 36386 - protein, 326 aa, Frigoribacterium sp. RIT-PI-h
MSPAAPSDETGVDEATRASFAEATAPSVDESARASRDAFDDGDADDDGAAGVPDAPPLAGRKALVTLLTHRFVSRARQQEAWAGLLAHEPEIRARLEEMFLVRVVAHDHEVAFKRQGGEDDVPVLLRREKPLSRDASLLMVFARREHAFTDGLDEAVVISKDAVAEFLGRYHDDSGSDEVRARRRVDAAIAALVARDLLTAEPDDPELFVVSPAIVPLMTADRLVHLERVYLEAAGVEGDATGEGEADSPADTDAETETDDTVEPEVEADPVDDDDSAVPADDDAPETEPDPTAVPLDLDLEPPHDSDTNTDTGTDTDTDPEAPQA

SEQ ID NO: 36387 - protein, 1154 aa, Frigoribacterium sp. RIT-PI-h
MSIADTSPDLGMFHSGQYRIEQVQLLNWGSYAGLHRMPVGRGGIAILGPTGRGKSTVLDAMAAVIMPNPQEFNRAARDDSRQRSERTVYSYARGKTDEVRDAASDRTTTRFLRPLGQAFPSGAAITWSTELGQTVTAVRVAWIGEDTASQDDVTQASVYLLVQGRFDLSRLSEVTREGTSQNPLTRGSLARLLDPAHDPATSSQPELRVQLCGQLGIGGSDESQLKALTLLRRAQASKGVFSIDDLFKQFVLVQPQALSRWETTLATYREASALYDVFETTRKKLDVLEGVPTLADRYELAGRDGSAKRRLLADADGPSRLRVWLAERVGSWVSGEVDRVTTEKREQGERRRRAQADEQLAFRSREQALARISELGGDPTQSLREHVAAAEAELAAVERTRGRLAAALDGTGESLPRNDEQLVALGQRADRLAADDAAARAATADARSDLAARLGETKRALAALEKQKRSFEPRRSNVPDDAIERRRRIAEGAGVPVSSLPYAGELFEVAPEHTGWAVAIERVLGDLATHLLVDRAHFDAVRRWVDENDVRGRVTLVPATAGAEPTLTPVDHTVPAMVRLDPASPFRGWLHDELVADRSVLCVEGPDDLDDPRPAGTRGAVTRRGLRTGSRDRVIKDDRSTRSWIGLDNAARIAELGDEIVDLEAALARVRGEYDAIEAEAADRRRAADAVARAKEFTWDELDTAPAQTRLDDLRAQLDRIAVERPELATLQAEATQHDDDRSAATRRLAEIDQVLAQLDEKHATLADIEDEFADAADAEPLTDDERALLAPLPFAAPREATDVARLHRDAASPLRAQVDAHDRDRANAESTLVVVFERYLELDRTAGIDATIESLPSVRAIHRQLVEDDLPHAKQRRLEKAGSDVGDSLRALLVQIEEDGHVIRRGVRPISQALRSIEFRQGSTLDIEPRPVSNGDLLEFKRTLREHTGGAEGTAEARSSDGRSSQAQSPEARDASEGERRFLRLRRDLAHLEEKSKVGDAWRRRVLDAREHYQFRAIETRADGTQIVHEGVAGKSGGEGQELIAFVLGAALRFRLGDGTDRVPTYAPIVLDEGFVKADAEYTGRALAALTSLGFQLVVGAPRDKVNAFEQHVESVAYISSDPSNPELSRIYPLTIRQAIQVEQHGLDPAALA

SEQ ID NO: 36388 - protein, 490 aa, Actinobacteria bacterium OK074
MEYDDVVRLRKHHPAWRLLRAENAALILSFFDKVFVEQGIRSISGVELADRLDDELYTLNDRLGEQTFPKSAKAYLDDWSATQAGWLRKYYPPDSEEPHYDATPAVEKAVAWVHSLEARSFIGTESRLNTVFELLRQMKFGAESDPEARLEELKRRRLELDEEMARVEHGNVSVLDRAGLRDRYQQVTATAHELLADFREVEANFRDLDRELRQRIAVWNGAKGELLDDVLGSRESIAESDQGRSFQAFYDFLLSYRRQEELKQLLAEVEAMDAIGEPDPRMRRMPHAWLDAAERTQATVRQLSEQLRRFLDDRVWSEDRRVMELMSGIEARAATLRDMPVDLVTEIDAMAPTFTLPMERPLYTPVTRTPIDSSDIQAGDEEFAASALYEAVYVDPARLTATVERALEDQAQVSLSELVRVVPLEQGLAELVAYLALSSDTFTVVFDDVRTENITWTDPDGIEHTALAPIATFVRASGSATLAHAVSEEP

SEQ ID NO: 36389 - protein, 206 aa, Actinobacteria bacterium OK074
MTTPPTPKSGQTHNPSLPVNQLLKGPVFRNQHERAWEALLHLRARVQDHVDVMGLTVVIDETEGYAFLRSKPDDEHDDPRSAPPRLMHRRSLSYPVSLLIVLLRKRLAEFDAGSGDTRLMITRDEIVEMIRMFLPASSNEARLVDQIDTHIGKVVELQFLRRSKQQEQLYEVQRIIKAYVDGQWLADFEQNLARYTAALTSTEPTQ

SEQ ID NO: 36390 - protein, 1138 aa, Actinobacteria bacterium OK074
MIPTQTGPLGSTSSLAPHLPGFRLDRLEVYNWGTFNHRVWTFTVGGANALLTGDIGSGKSTLVDAITTLFMPANRIAYNRAAGAETRERNLRSYVLGHYKSERNETTGSTRPVALRKPGNYSVILAVFTNPGYDATVTLAQVFWMADANATQPERLFLTADRALSVTEDFADFGTDVRALKKRLTASGVRVHPSFPTYSKDFRRRMGIESEQALDLFHQTVSMKSVGSLDEFVRTHMLEPFDAAALTDTIVSHFDALTSTYDAVQRARAQIEALTPLLADCDQHDELGRRMADAAAQQSALPYFFAHRTSTLLETERATLEKTLLDKQREEREAKERTNDLRQQQQTLELRRAGLGGERLGELERQIAEGARLRDVRRGRADTYAQFLGQVGLDPVDSAQLFSVRRAEIASARDATHTAQQQSQDELADIAVEVDRLRRAADELNSELVSLRSRRGNIPRKQLDLRSRLCQELGIDEAELPFAGELVQVREDEQEWAGAAERLLHGFALSMLVPVNRYSVVSDWINDHHLRARLVYFRVPTSSAARRPAHTTAPLLSAKLEIKSDSPFAHWLLGELDRRAGYECAETMAAFKQADLAITRQGLIKGVRGRHEKNDTTRIDDRSTYVLGWSNQAKIDALIEQAATVQREQQQTAGTKKVLTTTQAKHIARGETLAQLQQTTDYADIDWQGAVNRLGQLEAEKRLLEKSSAELDDLSQRIDACAKEIEEAEHARDAAVRSIGRLNRDVEDTIRRLGTALSLLDSSESNTASTHFASLAERLAQARLSCATVDACATAEKRLGDDLSAAKERWAQRQNRLGQSIASRMGAFRRDHQVETNELDDSVASARGYRELHQRLVADDLPRFQEQFKTYLETNVIRDIAGFHAQLAGQAEQIHDRVTTINNSLADIDYNPGRYITLKTDRTPNIDVRDFITELRACTDGVVSEGQSDVYSEEKFHQVRRLIERFKGREGHTDADRAWTKRVTDVRNWFVFSASERRREDDAEYEVYSDSGGKSGGQKEKLAYTILAASLAYQFKLDPDATRSKTFRFVVIDEAFGRGSEESARFALGLFQRLGLQLLIVTPLQKIHVIEPYVSAVGFVENPNDCDSRLRNLTITQYRQERAAHTLSALKTTAGRRA

SEQ ID NO: 36391 - protein, 393 aa, Actinobacteria bacterium OK074
MATRPQQHWTAPDDVITRLRKRWDKGTYLTALAEQTPWEPFCIPLTGPKPGDITSDFTAVLAWSRSWATDAGPLRVAYRRLGGRIAGTNNIPHQAWIDRPEHLWELLGVEEDVNQYRALIDSAARTAPQLLTWMSANPLKVLALSSEWPRIQATVGWITDYRGPALHVRQIDVPGVDTKFIERHRAVLSTLLDISLPPERINSTVQRANFTERFRFLRKPTYIRFRILDGESRLCGFSELTVRAEEFTEAPRGITNVYVVENETTYLAFPSVSGSVVVHGGGYAVTQLASLPWLHNMRVIYWGDLDTHGFAILNRLRNHFPHTESMLMDRSTLTAHRDHWARETVPTHEHLELLSVDEADLYRSLVDDEFGHFIRLEQERIHFSALESALSEK

SEQ ID NO: 36392 - protein, 504 aa, Mesorhizobium plurifarium
MLFGQLNPDIFALFAGSNRFLYERILIGLYEGFYRSDLHFPSQGEVLHLIYGLLGEHAEFWREDEAPVLLDQLAARRGRRIRRRKLEAADPQASNEAMIRARHIYYRLVATGWMEESRYGLKVTVDMPAGAMRLAEFLCNLKEGLAEQLGGLVIQVKNELDALQLNARENALGLHKAARDAAAFGRYLRSVLSALREIDKQVLASDSVGRRLRHYFEDFIGRILLQDYAAISTTSHPYRFRHRIFTALDSIEDSIADVGAIAEVYGEARLAADITAARDLVYDDLHKVRRVFDQIEEAFERIQQHRSRLETRLRNTVRYAGRRGGTFLQRSEPILLRLDKLLGRRVGDVSLSGLLEPRQTYWSPLLLARARNFRTSVTGGVIVLPPPDPLRELRKRLEREYLNRLAVTPEQVSRFLEKRVPPSGVTDARYFWIDTIDDFLAFETLRLSILAADQDGRGNAIADHLASAFGFSPGEWIDNAWLSCAGFAVIRKGDSVTLEGSHAQ

SEQ ID NO: 36393 - protein, 221 aa, Mesorhizobium plurifarium
MLSEFQALEARDPRRMQRVRQVISHLLRNQFLHVEDRGSSGLLDTLLRADVERLASDYFDVAGYRLIVRESEGWAGILPDTEQISHTRMRIDETLVLLLFRRLWEEGVQEGDIERYGSVLVTLNAAYDAYQDMVARARRPTLSIGDFKALVATLERRAIVRLGDLDDELEDIPLTIRALVATVAGDEFLTHLEELLMRPDLQDTDPEPLDNNTDTNEDDEA

SEQ ID NO: 36394 - protein, 1147 aa, Mesorhizobium plurifarium
MMQLVHIALVQWHLFGREDLAIAGDTAILGQNRSGKSTLIDLIQTVMTGGTRRWYQFNRSAGETGSRKSERTLRGYCLGQLNEHEFLREEAVTNIALVFADPQGVRPPVSVGLCIEASATEEAQVVGRYIAPGIRVDTELLVEQLEGNQQRSASWALVRDRLEQSCNAKGTALIRPDGPRNHIREYMRQLFTGRRHSDPERFIRAFVMALSFEDMRSVEDFIYKFLLAKNDINIGELRESIQRYRDIQKDIHELERRLAALRILAELVAKFVSLLEREEITRGVARLAALIEAGSALLANIKERRDNRASVEQTQRMIERCEEEIKSLIEQQDSLVAQSLAEGVAGKRAVVQSELRAVELAQEAVSQRLQARFIAVARAASLLDHRERLASLKLGALFQSLEALKRKSEGLAPPTWPREPHEMEEVIAGARETALANIAKILDRRDNAITQRRKLQEEITDLVERRDRARTGQVALDERTIRLMATLERENMRPRALCQVAEIIDPDWREAAEALLGRDREAILVEPAHAPRAVEILRSGRDSFRGCRVVNTRRLNEQPSGFEANSLATIFASEDQLAMAFIRFRTGQVRLADTQAELLGGGRAIMRDGAYNSGIVIEVLRTQDLKIGRAAAPLMEAELARQIAERQGWVATHLEAERFHDDIRRKLEPLLEEVPVADRLDLLAEAIDQHNVTRIELQKRLDRISATVDPAIQQGLDRVKLQLRSVNDEKDELVGRRGQLKQADLDVQRRLGAGDGQPGSWNCLKARRLAFRDRVRTRAQLVALRETYIAQRSRPLSRVTQEMSKRADEARDTYRACEGEIREALGHYRASFDSTAPVATQGSITSEIKPWVSSNLQALEENELIQYRRQADEAAAQIGQLFRTAFIHELNARFNDLRTELDNLTRALKARPLHGEIYTLHARPKEEFASLHRLARESENDDQVFEALFGRGTPRNEEHAQALAEVERLLSEDALDFTAYQDYRNYFTFDLRMEDVAKGRQTSFDKRKGTASGAERQVPYYVVIGAALASIYHGARRQYEASELGLGLAVFDEAFSKMDGPNQRTLLEFYDDIGLQVVIAAPSEKRSVVYENLDSVIDVFRHGDSASAETVRIKAHARAQMRAANPQHLSDAVLITRLNSPASDAAE

SEQ ID NO: 36395 - protein, 399 aa, Mesorhizobium plurifarium
MSRRQFGNVHRLIHDLLDRYESNPQASRILAYIDEDALQTVEERDRFIQALFGIEKAGGIVIQRKRAEGAFVLGSVRLADPTVLYAHVNRTPAKVSAGIALGKARVRSDLPEGALDVLDEIANAWSRGVGRFGLAPGDSSGLSASLDLVHALAIRAEDGGAAPVDYRTFSRLAGTPSKALERLVSTVPRLFERFYPDRAPSAELDSADWLATLGVTRTPQPLIVSGPIAIAGQPLPPLCFYGVPPEQGEQLGLSDRVDYLLTIENYTSFVRHAREINNNRSALIIYTGGFPSRCHLQQIVRLAAEAQAPIFHWGDIDDGGVRIFGHLERTLAERGLSLFPHLMDVAALHEHGVVRDKQMRTADAPPRESAVRGLWEALVASALVLEQESLSPQYPSRRT

SEQ ID NO: 36396 - protein, 487 aa, Achromobacter sp. 2789STDY5608620; identical to SEQ ID NO: 36215

SEQ ID NO: 36397 - protein, 229 aa, Achromobacter sp. 2789STDY5608620
MNLPVDTDLECLDSSSEDQGDAALESEARFAGDTGTLPVPARRVLVRLLQGPSLDARRHEKLWEVFKRYEKDLKSRLHDIFLELVVDNEAKVAFTRQVVSDEVDVPILLRKQSLSFIESVLLLFLRQKLTHSDAQAERAVVDLMEMTEYLKAYERSDNVDMSRFGRQMEGAIEKAKKLGVLLKLSGADDRFEISPSLRLLFPAEEIQALTEAFRRHLPVDVLPGQEEDH

SEQ ID NO: 36398 - protein, 1150 aa, Achromobacter sp. 2789STDY5608620; identical to SEQ ID NO: 36217

SEQ ID NO: 36399 - protein, 403 aa, Achromobacter sp. 2789STDY5608620; identical to SEQ ID NO: 36218

SEQ ID NO: 36400 - protein, 487 aa, Achromobacter sp. 2789STDY5608612; identical to SEQ ID NO: 36215

SEQ ID NO: 36401 - protein, 229 aa, Achromobacter sp. 2789STDY5608612; identical to SEQ ID NO: 36397

SEQ ID NO: 36402 - protein, 950 aa, Achromobacter sp. 2789STDY5608612
MHFTDEFSAYQTRFTRLFDIKSDRALRLLHKTQSAKDLGDLNKFLRDFMLDPPETFAVAETLVNEFQVLNGAHEAVLTARNQIEALRPVRDRLTEYDQTQSLLSLLAEEKVGVDYWREQNRRDLLQAYIAELAMRAEGLAARIEELKTKEEREAREFNSLLAIRAGAGGNVLADLQAQVERAERVRLPDASANNSRLVSSCKALGWALPASPEAFAQIQAEARIIFDDRDSMAERHEKLLDRLKDEKRALDDRFAALLKEIRAMEGRTSNMPSRLLEIRERMCRDLGIVEDELPFVGELLQVKAKEGQWTGAIERVLGGFARDLLVEERYYREVAAWVDQTHLGLRLGYRRMTTRANQSAATQPATNSLLRKLDVAPRHKDWVSEELRRFDYACVDSSDDLRLVERGVTLAGQVKHNRSLHEKNDSRRVDDRGNWVLGFSNAEKLQTYKVEFETLQVAVAKAEKALEQAREMTRNESRQVEHCQNLVNVTWENSNVAALLDDIQSLKDRIAQELRSRPQLSELDNKVDRQRKTWDRAVDARQTAQGEAADMDRERSKAQKRLDELPPEQLRFPLSPTQKERLAARFEATGKKMTVEQLDSACMAMVRAIGDEENAATSKTAEIKQKIEHGLFVFCQRWPAEAQGLDPKMDSAPDFMAKLARLETDGLHEYVARFKALLREQSDQNLAVLHAKLDQERRNIGERMEQVNDSLRRCAFNENTYLEINYDDRPTQEVVEFRSLLKAALSHSFKEDDDEEMERRFSVLNAVVQRLGSQQPADVKWRSLVLDVRQHVVFSATEFDDTSIEVETYDSGAGKSGGQRQKLTTTVLAAALRYQLAGEEGVWPTYSTVVMDEAFDRADNEFTAMVMNIFKSFGFQVVAATPVKNVMALEPFIGGGTFVSIRDRKHSEALAITYVDQTGRLDLPREAHEVLAEELAADTTGTAEGGLQSE

SEQ ID NO: 36403 - protein, 403 aa, Achromobacter sp. 2789STDY5608612; identical to SEQ ID NO: 36218

SEQ ID NO: 36404 - protein, 497 aa, Achromobacter sp. 2789STDY5608607
MAVHDLTDQIRQEKVAERYPPLFKRLPDRLFAPLASANRFQYWSLLCVLHAKRFGPEAPLPPSTGFLMREITADIAEELQYQDWTPEGDDVTPATPLAIRAIMVFNRLRDAGWIRVDRVGVREMVTMAPAVAHFMNRLVEFAHTGPEFVSGKIRSIEANLKLLLDESTDGASLQEAARQSRALLEHVRIAGTNVRDLMLEIGRVDATGEFVRRFFDDYVERMFIGDYKELRTREHPLARRQEILRLVTHIQQTQDLRARLIQWYLEKQAGRDPTRAEAMFERDVQKVEDLRRIDEYLDRLDDEIRRANKLALAYLDYRLRAARPLDELINQAIDAVVKHGSKAAALAPFAPGDCVGGERLASPRIETKRPPPSGLRKQVMSPEQEARARLALMARDRRTMSLPKLAAFVRQQLGEADALPSTALQVNSIESTRALQVLCTIATANATSSKLLRANARAMSSGFTTVRMEGEEVRSQGISHQPFTIARTTKPAKGGSQ

SEQ ID NO: 36405 - protein, 220 aa, Achromobacter sp. 2789STDY5608607
MSFWTDAATATKNVATEDDFEAAANRLITEQVLYAADRGSKVAYGLIRDFEREFKRALEPLGYVVRVNSQLRYACAIPKHARTSPVTVDQTLLALVLRKIFDEETRSGHHDENGEVACDLVTLEVKYKQMTGGRELATGGKLAALIQWMRRWGLARVSDEDGNQFGHDADQPYVVIIRPGIAEVLGEAALARIALFTSPDDEIDGVDPAVASTVEEGGAA

SEQ ID NO: 36406 - protein, 1147 aa, Achromobacter sp. 2789STDY5608607
MKKLIRIRVVQFFLYEMRDVEVGMNCGIFGANGSGKSSLLDAVQIVMLGANESRGSAGVAFNAQADESNHNSRNIRSYCLGQYGDSPDARVRDSANTYITLVWEDTTTQEIVSTGVSIYVSADREKSDVQGRYILPADIALSDHLELVDGEYRPRPWASFRQMLSQRAYGEEVLFHDSERFVNAMLFRLRGTRGAPRLDAYRQAFRFGLRMKFDKSVDDIVRQQVLETRPTNIKRFKEVLHTFQEMATLVRNVQAKLDEAELIETDFADAHRRNTHSVSLAALAQAAELEVAIEAVTAAEEAESQAAAALEAANTRRDEVNRQVEAAEQHARDSASARDKHASHADAALLRESLAKIQNRLTEQRTGLHRSIQAIGRAIDAQIPGKLVADSAEATAQAFKDVHALLEGDKATRRDAVESTVRKALRAAKLLSNELFEEMQAVGRAQTAAEAELAGVQENQERIAKGKPPLEGPAAALKRALANAGVDATPVCDLVRVDDPDWQPAIESYLGTSNMQALLVDEADERKAFRVSRQAAIYDAKVVMPSKFSNRSSPRRGAVAELISGNSAAAVNYLRSKFGDTQRAETEDECFAHRFAMTKDGMLLADGEMVRKKPANPALFKIGPTSTATRTSIAEQARQLQEKIDEFKERYAKLKELLNNLGPFVGGEQDKVHEVLEIFDRITKEAADEEDLTRRLQALNTEEYRQLVQVAKAAEASLGDVRKQLLTAAQAVGAAETACQQKSEDTKKKQARAVTQKGIAEAARAVDGYDADYASDQWERLLTRQGLSFSEIVADCKHRSNRAETDSRQKWSSAMQKLSAFLVRHNEFMPAGTQDDWRSARAWLDARVVVLTETGLRENKARMEDALSAAKSTFRNDVAVALHEHLEWLSDTINRMNEALRLAPMFTNNERYQFRAHVRPAFAVLLKFIKDVAQYGPTEDLLGGAGELPKEFEELMREKTVTGAAAVKSPLDDYREFFDFDVEVLREEASTGTTKHIGWLSKRVGSGSGGEHRAPLYVIAGAALSSAYRLERGDDTGIRLLVIDEAFIKMDPRNIVATMRYFEELGLQVFMASTGDALGSLTAFLDRYYDIMRDAESNVVVLEGHDVPLETREMFRADLPEFNPELVEAEIRRQYLPQATSTEGAAA

SEQ ID NO: 36407 - protein, 395 aa, Achromobacter sp. 2789STDY5608607
MSRQDQSEMDPLARKALERLLKSADKHEAGAAVRRPALTDSALSEYRELRGLKAKEDFEAVMAYAQAEGAIMALRPRRDPQGLIERIELIDVVKLACILGKVPHAVRVQSARQTLASRLGEHPILNDVLSSWERLKKIRGTGPDVAANWDMACDVITYCQSLVAHGVTETPVRDASARLFKDSKRIEALVPCLDVLLAGNIDDDARPEAEVLQELGLYREPQPARLAGNIVVRRERGAFPLDRPYGALPPSTVLGLGSMPSRVLTIENQTTFHVWARQHCDSDTLCIYTAGMPSPAWRAMYLRLLSELPVSAPVLHWGDVDEGGFRIASVLSRCVAESGHALRPWRMRPSDVPESLRRAAPTRTVERMVKYAHEAGWTDLAQQLAETKFVAEQEG

SEQ ID NO: 36408 - protein, 487 aa, Achromobacter sp. 2789STDY5608624; identical to SEQ ID NO: 36215

SEQ ID NO: 36409 - protein, 229 aa, Achromobacter sp. 2789STDY5608624; identical to SEQ ID NO: 36397

SEQ ID NO: 36410 - protein, 1150 aa, Achromobacter sp. 2789STDY5608624; identical to SEQ ID NO: 36217

SEQ ID NO: 36411 - protein, 403 aa, Achromobacter sp. 2789STDY5608624; identical to SEQ ID NO: 36218

SEQ ID NO: 36412 - protein, 487 aa, Achromobacter sp. 2789STDY5608616; identical to SEQ ID NO: 36215

SEQ ID NO: 36413 - protein, 229 aa, Achromobacter sp. 2789STDY5608616; identical to SEQ ID NO: 36397

SEQ ID NO: 36414 - protein, 1150 aa, Achromobacter sp. 2789STDY5608616; identical to SEQ ID NO: 36217

SEQ ID NO: 36415 - protein, 403 aa, Achromobacter sp. 2789STDY5608616; identical to SEQ ID NO: 36218

SEQ ID NO: 36416 - protein, 486 aa, Glutamicibacter arilaitensis
MQPSHRANSLWLQAQQFKGSAAYRLLTAQPWAVAFIRAEFTADRSRVALELFHASLDSFLKQARQSDEQIPQSYSAQDFAETWVKQGILARPLIDGRFVYEPSAQTLRTLRFLSDFSTDDSHLNSSRLNTLLSSLESLVHETDPDPEARIRALESQIAQRRAQIEQLRSGDDPAVLSRTTALSATRSLLDLASSLPADFRRMRDGVQDMLHSLREGILDASTAKGVAVGQVLEADRQLRSTAEGETFSGFTEFLNSPDAQQRFRSALAEVLEREFVDDLDATERQILTNLLRELRRQAAEVHASYGKLSESLHAFVQSEDYKQAELLRQAVRQAELAITKSSALKPRSGLAPMDLYTPQLMTLSGLGIYDPSEHVAPPPLAQAPEFSEADIVRSPATPQANMPLLRESITRQLNHAPAGAVRMDEVFAALDDEHRHLNTIRALVEIGRTNGESLNEAELVNIDFQQLDGSLRTAILPALSFTKEPL

SEQ ID NO: 36417 - protein, 228 aa, Glutamicibacter arilaitensis
MTTSDAYAAPIAEPLFDGDTGKYSLPLRQLLVRLLRGPYLDGTVDASAWQLLLDQQQTITDYFSEIFLALTMDMDRKIAMLSPVQIDQVHTAPIAPRRPLKRDETLLALRLRLLLEQNSGNGSDAVASRATMHEILAEHRQAADRDDKRFAESCDAAISRLQSLRLLTSTELENEFRISPALAMALPLSSIQDIPRYIAAIDANEPAFNLSPDDNDELAEQSPELVQE

SEQ ID NO: 36418 - protein, 1108 aa, Glutamicibacter arilaitensis
MSIEMTLPLGGAINPGQHRLSRVQIVNWGTFHGLHDLSVDRAGTLVTGHPGVGKSTLFDAMGHVFFATPRLNESANDAATREDRRTTFSYMRGRQFKTSEGTVYQRPGATWSAIILSYEDGMGNTVTAGAVFDLPDAGLEGQVSKHYLLCEGKVDIAELENHGPRRFTVSSLSKALAPTEAFDTHKAFIERLRRRLGVESDKAFALLRTLQNGKGLAKGVNQFFRHEVLEEPATLKAAAAAVEDFAHLRGIYRQLDTARAQRDALAEVPQQDLAYRQLAKKIAETRHLLDSDVQALEAQVRQLVMRNDLSSHQSELAALQIEEGELRARKEQLDDQLQSLEAAHDSAGSASLMLLEREADVARKALSEKENALRALQQQATDAGLSFEFSATGLDELRANAARTLQQLSSITHDAQTVEYEAMASLVNLRKRAETLAEQIRSYQRRASNIDDRSIAARRAIASACSLSEDQLPFAGELMDVSADSSTWRLAAEKALHSLARTLLVPGDLLGQVTHAIDQLDGLGRVRWIDISQQPKEGTAGPADLVTKLDFAPGDAGNWLKSKITADYPLACVDNDAAMHVHPKAITPAGTMKTGAGTFERDTRGLPASEYLLGFTNESKISELQSKAVRLEEKIAQAQASADERSAAKNKVVAKSLLLKAIIADERSFSQLDSSPALEALRRGEQKLGDALSLSGDSSRVRQQIEAAKAEAEKLVGDLALVRSRIRDLQLQVERAQQVLATAQEPAGDWEQSIPAPLRQHQLLGPVLDQAISGKCPPSEQISEAFAEVKLQLGSQMNSLNSQHQEIGSALSETFRRFARDFGTSHAQTHGTSAEAAEHYTQLHDQIVADGLPHHEAQFREYFANRSYERFSDLLQLLDEERRMISERIKPLNQILAEVTFEHGSILRLEVENSIPVEAGNFRKELKDALQEAYTTKDETTLATSYQALESLVTALSDPSLNAWRSTVLDVRQHVVISCNEHKTNGEIETGLEPGTLSGGEGQRFTSFIMGAALAYQLGFASAGFTSFGTVMIDEAFIQANSEYAAAGIRALQEFGFHLVLAAPEDKIDLSRHLGSITDIIKHPGSNISGFVTTGRSPAMATTITLRS

SEQ ID NO: 36419 - protein, 485 aa, Gammaproteobacteria bacterium SG8_11
MFFSDSRKHFFRPFNSKYREQVVECLRLFYVRLYSSLADYSRAFSRDQVLEVFQEAITRAPILEEESQDPDDANLPVRGEREQANWVLNLLLEHGWIERQVDEATLQSSYAFSRIGRLFAQPFVETSSGRFRTRHRNTRNTRNALNSFLEQGEVYDLLDAFEYSERIISDFSDVISELDERKRQLVKEVEAQQVIQRASDEFFDFMEKRFMPDLAIRLSADSVEKYRDDIQSLIRKAKRKSKEFKANAEKELRKLAPELLSDPKVSIYLMILDGLESRLHSASEIMLPALRHALHSFTRRADIIIRQLSFTSSGLQNDILAICKQFTELTEEEQEQCLSEAGDRMAEWQLKLVDPNMTRLYEGRRKRSINTRAEEHGDANAEHRRAMFVQRAVEQAFAVNNQELRQYIIQALNQGHRIHSQNLPVQNAKDLLLNAHAIEIGSGGQLSSEYRFQVEPSGQQVRTDYFDSTDEFSIELIELDQHESD

SEQ ID NO: 36420 - protein, 227 aa, Gammaproteobacteria bacterium SG8_11
MTDTIAQQLERENVSLSEFKELLIRLLNYGVLCRGESQTEQLLYDRFLRIEDLLREYLHFIDVRLFHDERFEYVRLYPPGSEVPGMEEAQENAYSGSLRNRLNQQEVALVLVLRAQYDKALHEGQVDEYGFVTESLEALSIAMKNLLGRTLPDKVTERKRLFQRLRQLRLIQYRQDEDIDSGEAWIKIHPMIVSFVSDQVLEALQNESPQSSTHENAEPDEVEAELH

SEQ ID NO: 36421 - protein, 529 aa, Gammaproteobacteria bacterium SG8_11
MFLKKFIFVNWGNIPNLEFDFGPINLFSGGNGSGKTTAADAIQTIMTAAHENLFQYNPGQDETTQRGRGGKRVRTLGSYVLGCDDGSYARLEPTDGYLAAVFHPTQGESAEPFTALIGVRAWLDKTANQNVARQEELSFFILPGEQLRLNQLVHGQQNNKHIVPLDKLQTLLIKEYGKTRVEKYDSKKAYLRRLYAVLRGRNDAVTEREAMAAAKAFSRFMAYKPVQGINKFVAEEILEKKDLGDAIRSISGQLKTIHAMERDAGRLVDSIAILEKARDYSQQYIERWIDLNTLDYTLAQHHYQQRQREYLHAKAQQTEHRQALQQNESETTLARERRQQIHQQLVQLEAQRMGISALQQKDDLERQRDDQQQQLIAKAKQLLEQDNLLNHSFELSRSILNDLQDAELIAELPVATDLNSRGLCKQVIEQGGRGDIDFHALLNRDITGDLAALESHLDHARTAQRLHNQWVQHWHGLDSEDKEKSLRGQLARLSHQRENRYEQLANQRQQKLHEIERLQSQQVSYPAHV

SEQ ID NO: 36422 - protein, 488 aa, Gordonia sp. QH-11
MQFDEIVAVRKSSAAWRLLRADNAPLLLSFLGRVFVDDNVREISESALVNLLDDELYSLNKRLGPGTYPRTPKAYLDEWAAADTGWLRKYYVIESDEPHYDATPAVERAVAWVRSLRERGFVGTESRLNTVIELLRQIVYGGSTDAEIRLAELHRRRAELDVEIEAAERGDFHVMDATSRRDRYQQFADIARALLSDFREVESNFRSLDREMRERIATWRGTKGELLDEVVGSRNVISDSDQGRSFQAFYDLLLSADRLDELDDLVRQTQSLDGLPDDDVRLTNIHHDWLDAGTRAQGTVRRLSEQLRRFLDDQAWLENRRVMDLLRNIESSAYTLRDHRIDDFAHEIDSPTPQVHLPLERPLYRRASTVEVASDGIEEGHADGDSTALFEQIHIDPAPLIEHVRSMLRRRDQVTLADVIAETPMEQGLAELITYLSLTDEGFTKVFDESATETVSWTDDVGAHRSAHVPRVIYLRPSHDPDHPEENR

SEQ ID NO: 36423 - protein, 199 aa, Gordonia sp. QH-11
MSRPVPRDELNLPLAVTSLMKGVVYRDTAETAWRHVLGLAAQISDYVATLGLAVVIDEAEGYAFLRSKGDDELADLGIPRLVARHQLPLHTSLLLALLRKKLAEHDTTDAGNRLILTSDQLRELITPFFPVSANEARTADQADTAIRRVVDLGFLRRMPGQDGEYEVRRVIKAYVDAQWLADLDTHLAEYADTMTQEQR

SEQ ID NO: 36424 - protein, 1138 aa, Gordonia sp. QH-11
MTGLFAPTELESAASARSGFRLQRFQVLNWGTFDQRVWTLTLDGENGLLTGDIGSGKSTLVDALTTLLLPAHRVAYNKAAGGESRERDLRSYVLGYYKSERNEVTGSSRPVALRGMSNYSVILGVFANEGYDETVTLAQVFSMRHDSGQPERFFTVTDRPLDIATDFADFGSDLRALRKRLKDGDTRIHEHFPEYGRDYRRSLAIRSEQAMELFHQTVSMKAVGNLNDFVRDHMLEPFDSSGWVDTMVTHFEDLTAAHDAVVLARTQLAELEPLLADHDKYRGHTEMAAELKDRRAALRFYFAQQRFDLLTAGLDVHNRDLHATRTALETVERDLADLRIALRELELRQAGLGGTDIATLEQQIAEATRQRDERTLAYDRYSTMIDDAGLAPVNDRGQFDQRRTEVADAVAALDAEVADTENSLNEVRFSKREYDTEGRRIAGEIASLRGRTTNIPDRNLRIRELICEGVGIPRDELPFVGELIGVREDESRWEGAAERVLRGFGLSLLVASDLYDDVSAWIDANHLGGRVVYFKVSDHVASKGVPTPPANALAHKIDIKQGRFEAWLERRLFERARHICAETLDEFRRADVAVTVNGQVRSGGGRHEKDDSQRVDDRRNYVLGWSNEQKISALFSAGQLLQDRLNRVDGEIDELEERRRALMARRNALTGLDAYPSFDIVDAASSVARIAELTARKTELEQSSSELAEVTDAIAATREQLSAADATRDGLRDKVSRLEMARGQSEQARDAAQQVIGDPEFDDAQPHFEAIAADVEKYRAKVRTADDADDAELTVAECGELESSMTEQLTDDSEQHASRAGTYETRVVNRMSEFNRSHPVLTTEFDADIASADEYRELHQRLAEDDLPRFEAEFKNYLNTNAIRDIAIFAAKLNKEVHLIGSKIDTINESLAGIEYNPGRYIRLDVNPTASQEIREFRADLRACSDGSFEADSDDHYAEEKFLLVKALVERFRGREGFTDVDRKWTELVTDVRNWVTFAASERYVDGDAEYENYTDSDGKSGGQKEKLAYTILAASLAYQFDLKWGATMSRDFRFVVIDEAFGRGSDDSARYALSLFARLGLQLLIVTPLTKIYTIEPFVSAVGYVENRGGSYSQLQCLTIEEYRARRDVRDLVEVVE

SEQ ID NO: 36425 - protein, 466 aa, Herpetosiphon geysericola
MSLFETIPATLFRPLASRGAAIYSQVLLALFAATKQQSQPLSRERALSLVEQQLELPNAEDLTSDAHEEESELEQNNHASAILRSLRAWGWLRFEQQSDYSSAIILPDYAFRLLQLFEDLATKQRQHLRGMICGIHDVLEKACTGDAPHDRLSNAYDQTLFLTQALKELQHNIGLHIQTVLKTLKTKDVLEHVFGSYRKDIVDQAYHQLRTSDHLSRYRPAILQFLHKIERTNLIDLSAQHLVSRGEAADFESAYNRLTDQIETIRSHFEQLDQLIRVIDLRHSQFVDSAVRNIELFLSASTSTSGQLHSILSHILPNPEAYAQASPEINELLNIYEVQLTDQQSLTAPTRAAVPFESQADSYIPISEADIEQAQAATLRQLRRSISRDRVRRYALQLLGDAEQRRGSEIELESIDDLSLIIYLRSYGDGSLGYKVEPIDNGVWVERDGVGFRDFLVRRVSTEQPA

SEQ ID NO: 36426 - protein, 210 aa, Herpetosiphon geysericola
MSLVNFAEEYSQLSSSEQQLFADSVRRLLSDGLIWREDEQDRRIFAWLVRRIDLVRDYLAVAGWELHYAENLHIFHVFHRDGSHRRRFDKEETLWLLLLRLIYAEQYESLNPSLTRYPTTTVSDLYTRYSEFFPNRAIRKKGVFDSALRLFNELKLIRAPQSTVLRANDPETVIELLPALEVIVPASGIAALAERLAEYQRPSSSDEEQA

SEQ ID NO: 36427 - protein, 1093 aa, Herpetosiphon geysericola
MIKLSRIFLYHWHRFDWHVFDVQDSLYLAGHNGSGKSSILDALQLVLVADLGRVRFNSAAQDRSQRSLDSYVRGKIGEQHWLRPGNTIGYVVLEWTDDLKHQAFISGICIEARPINQNLERTFFIADGQLNPDLFVNQGKETTRSELKKLARNRTSFNSFDQTGEYQAELLNRLGGLNQRFFDLFLRALTFQPIRNIREFVEQWLLEPNSLDVHTLQNVVERLRDLERKAKQVEDQLKSLNAIIKTQDEAKRFRDLQGKFEILAAHYNVAAIQQQINQHQQRLIDTRRDYELNQTDLEQQLGLQQNVQIAWDEARLQLSQSDVVRRKQQLANEIQQLQQQIQKINQRWRQLQAKLTQIAQSLNTLPGIAEQDLVNLLQQPEQIPQGQQIVPLLQQQNMATGSALKLQLQALTRTDDTIARLMEQEGSLKKEIASLEQSNRQNHYPQNVENVRNYLKQELKIELFLLCELLEIPDQHWQDAVEAMLGQRRFNIIVEPKYYSQALDLLDQLRDKQRLYDVGLVDLQQASAETRPARLLSLATKVKAKTGLIDKYIAAILGDIITCERVQDLRQHRRAITAEVMVYQEWTARSIDPRKFRPWFIGERAQRSQIESRRQQLTEIQAELAILRPEQQRQRQYSEQLEKLQQMLLGLDSYFEEELDASELQRTLVELQHEHDSIDTSGVAALEAEVKRLRIIYDEYSINISRFTELNGAFKTKISQLEHQIQQDNHQLLNAQSLFEHMQQQYPNQIEDASADFQRENTEAAQFSRLQETAEQQSRGYHTRFNNRQEALREQVLLYNRDFGARELADIEQTSFQTRKAELEATDLPNFGQKIAEAKHETETELREHVLHKLRENIGRAKAELDRINDALRGLDFNGQRYHFRYEIADSLRDFYQLIEQSANVTSEIIQDSDFYQQHKATFDRFFQLLIQPGLTDQEKLEQAQITDYRRYLSYDIDVIDRDGTRSRLSKIMGQTSGGETQTPFYVTIAASFVQLYKISERSKRSTIRIVAFDEAFSKMDQDRIGSTLDLFHHFGLQIITATPIERCEYLVPKMCTTLVLTSLKDQQQRVLVEPYRNYAARLEAPNAESDQN

SEQ ID NO: 36428 - protein, 401 aa, Herpetosiphon geysericola
MLNLTKTSTAILQQLLDQHEQRDRQRVNRVQVKAAKFSRYFDEKQVDERQQTNSCLLELARTKVVKLHWRKWEEHNWLEAVDLLDAAALYRLLKRQPLAEQEQALRALLAEYANPQAWFAEWLAWLEQQLIQQRSIQPLDLTDPTWNRDLLRAIYGLTQLATPILERLFSVRWLGQSKRFSELEGAVLRVLRQFAPQAKQFGDDDRALLQAFNLEKVPEYVLLAGDVRLRLNQKILELGDFRPSLGLPSSILRQATVLDSACSEIITIENLTSFHSMLARQPQAMLIYTGGFASPSLCQFLVKLATALPRVGWYHWGDYDVGGLRILAHLRQHVAQIQLWQPESTIFERMPNATQALHQKERHSLGELQQHPLLADCWALIDAMLAQNVKLEQEQLDLLGG

SEQ ID NO: 36429 - protein, 498 aa, Frankia sp. R43
MDGSLDYDTVDLLRRHAAWRLLRADHAPLVVSFLARVFVAENVREIAASALVDRLDDTLYALNQRLGAGTYPRAAKAYLDDWSATEHGWLRRFYPPGSDEPHFDATPALEQAVSFLSSLRSRAFVGTESRLNTLFDLLRQMALGTETDPERRLTELRLRRDALDREIERVSRGELDMLDPSAQRDRFQQFGDMARELLADFRQVETNFRELDRALRVQIASFNGAKGELLDEVLSSRGSITDSDQGRSFGAFYDFLLSADRQAEFKALLDQVLGLDALAGADERLRDIHYDWLAAGERTQATVRLLSAQLRRFLDDRVWLENRRIGEILRGIEAHALQLRDAAGPLPGAELEETAPRLVLPMERRLYTPKRRTAVDSDGITAGEGDFESDALYEQVYVDPAELGGAVRDALTSRPRVTLTSLVADRPLRRGLAELVTYLSLSGDGFTVVFDEDNTDELSWDDDDGTRVATVPRVTFVRAGFAAVAPDANDDGEERRDD

SEQ ID NO: 36430 - protein, 211 aa, Frankia sp. R43
MTDAASARGSARGAAPRAELDLPLVLTSLMKGPVYRDQHDKVWRHLLGLRAQVSDYVDVIGLQVIVDEAEGYAFLRSRPDDEAQDGPPRLIARRALSFPVSLLLALLRKRLAEFDTDNADTRLVLARADVVEMMRMFLPAGRNEARLVDEIDTHLGKAVDLGFLRKLPGSEETFEVRRILKAFVDAQWLSGFDEGLARYAASLAGPTEETA

SEQ ID NO: 36431 - protein, 1131 aa, Frankia sp. R43
MTTRPAAPAEETEPAPGRVGFRLDRLEVLNWGTFHQRVWTLRVGGDNALLTGDIGSGKSTIVDAVTTLLLPAQRISYNRAAGAEARERTLRSYVEGHYKSERNESTGGSRPVGLRTDGTTYSVLLGVFVNEAVDATVSLAQVFWQAADEPGQPRRFFVTAGRHLTLAADFGDFGADITALKRRLRKSGAEVNDEFPAYGRTFRRLLGIESDQAMELFHQTVSMKSVGDLNEFVRSHMLEKQDVQRRIDEVVAHFEDLTRAHTAVRRARDQLAMLTPLLADCDEYDALGEREQALGAEAGAVRYFVADRTATFLRGELAQLGVRITAGRGEAARLDQQVTTLRDEDVRLQLQRAGLGGGRLGEIEKDLERAGRERAQRAAKAEIFEGRLATLGLAAVVDEARFDERRREFAALASRLAEERGTLETRRSELDVQLAARRAESDLLGEEIASLRQRRSNIPAQSLDLRRRLCAETGLDAGDLPFAAELIQVSSEHRAWEGAAERLLRGFGLSLLVPERHYRAASEWIDRNHLRARLIYFRIPQAPPPRQQQFTGGDVLLVDRLDLKADSPFLPWLRRELEVRADYACVDSLDDFRRATKAVTRAGQIKHTGGRHEKDDRWRVDDRTKYVLGWSNEQKIAAIIARATQVQTDLTAIAGRREKLTKDIAALGRQELDLSLLGETRAWLEIDWRSAAAELDALRAEKAQLVAASAELAAIDHRLERVRRDLAAAVRDGDAMRERVGGLTTRQSNAETEFARSEALTALPAYALACASFASLGERLPTPPPTTPLDWADAGRDLDDAIRTESRQVAERRARAGQRVVAKMGRFRQGYPLETVELDASVAAIGGYRELHTRLIRDDLPRFEQEFKNYLNTNTIRDIAMFQAKLLEQREQIRTRAEIINASLTSIEYNAGTFIRLELEDTPNMEVRQFRADLRACTEGSLGSGGESDQYSEEKFLQVSRIVERLRGREGQTDADRVWTRRVTDVRNWFVFSASERSAADDTEREHYSDSGGKSGGQKEKLAYTILAASLAYQFRLDSGPRTFRFVVIDEAFGRGSDGSTRFALGLFARLGLQLLIVTPLQKIHVIEQYVSSVGFVDNQSGSYSRLQNLTVVEYRARRAHRLAAELVTVR

SEQ ID NO: 36432 - protein, 404 aa, Frankia sp. R43
MTRRRAVGWTTLADVRTHLRRRWDDGQLLAAWAAGQPFHPVDVTLRGPVGRDLTDRFDEVRAWRQEWLAVVDRSADLQLVMKSVGRRSIGANELPARLVVDGGWEALWRLLQVTAEVRRFTQLRDSVPTGAHAAMLVNWMNAHPLRVLAHQPDAEWTRVLATVRWLVSERGHSRYLRQVPVPGVDTKFIETHRAVLADLLDVVLPADTIDQTVPKAQFARRYGFRIPPLYVRFRTLGATPPRLPGVPEMTVRLDSLEAAAADVGTVFVLENEITYLAFPAVPDAIAVFGGGYGFTAFAALPWLSARRVYYWGDLDTHGFAILDRLRATAPTVESFLMDRATLLAHPEQWVREPTQARGPLSHLTPAEAALHDDLVAGTYGAAIRLEQERVGFPHLEASLTRLLS

SEQ ID NO: 36433 - protein, 489 aa, Xanthomonas arboricola pv. pruni; identical to SEQ ID NO: 33214

SEQ ID NO: 36434 - protein, 233 aa, Xanthomonas arboricola pv. pruni; identical to SEQ ID NO: 33146

SEQ ID NO: 36435 - protein, 1355 aa, Xanthomonas arboricola pv. pruni; identical to SEQ ID NO: 33147

SEQ ID NO: 36436 - protein, 489 aa, Xanthomonas arboricola; identical to SEQ ID NO: 33214

SEQ ID NO: 36437 - protein, 233 aa, Xanthomonas arboricola; identical to SEQ ID NO: 33498

SEQ ID NO: 36438 - protein, 1370 aa, Xanthomonas arboricola
MNSQSNLSPAQPGASLFTDSLAEQRAQQFRMRRLQVHNWGTFNGLTEVPIAEKGFLFVGRSGSGKSTLLDAMSALLTPPSIVDFNAAAREAERSGRDRSLVSYVRGAWADQQDSASGEIATQYLRKGATWSALVLEYRNAHGETVSLIRLFWIAGSGNAAADVRRHYMVAPRSFDVASELDGFDLDLRRLKARLGEEVAHFDGFAGYAERFRHALGIGNEMALRLLHKTQSAKNLGDLNVFLRGFMLDEPRTFEAADRLVEDFAELEGAHHAVVTARRQVETLSPAREHHAALMALRHSVGEVRELQLGVDSYREQQRLALLETRLHELDSQDRGLAGEEGQRRESLDNHEQKLAGLEREQRAAGGEQIEELERERARVERERDERLRRRVQIEQACRQLGTALAAGASGFAEQIAYAQTVLENGKHDASALDEAVAERMGVRRDDERRFAEIRAELDVLKRAPSSMPAPMQALRARLCEDTGIVEAALPFVGELVQVREDQSAWRGAIERVLSGFAQSLLVDDRHYAQVSEWVNRTQLGTRLVYFRVRRNDALHARTPDARALPGKLQLREHAFTEWLRNELMRRFDYECVDNAAALRNADRAITREGQVKHPGDRYEKDDRHAVNDRKRWLLGHDNRDKLKVFEREAQTLAQRIAGCDADVAALRKQREQDQERQLAAHTLVERDWDEIDVGPKLQRLSDIDEQLQQLREGNSGLRALGQAIETARTLRDQAKRTYEDVRLERAQLARERVRLEQQHAACASRAGTAALTPTQLQGLRERLAALAPLSLDNLEAHFRVVERGLAEQLAESQGRDSRLSAQLLDCFRKYCQQWPEDSGDFTVSLASADDFLARLDRLESDGLPRHEHRFFDLLQTQSKNNLLALQRHTAEAHKGIKQRMDEVNASLEQVPFNRGTLLTIEVSDRRLGEVQEFQQQLRAVLSHQQTEDRALAEAQFSTLRALVARLGAQEPDARRWREQVLDVRQHVEFIGVELDAQTRAQVEIYRSGAGKSGGQRQKLATTCLAAALRYQLGGEDGELPRYCAVVLDEAFDKADNEFTALAMNIFENFGFQMVVATPLKSVMTLEPFIGGACFVEISGRHNSGVLLIEYDEQAQRLQLPERSRGDEAAAAVTEQAVSAAQREDAPRSTQGETRMDSTGAVSAAEGAALQDLSTQDAAAAGASKRASKVAPASTAAVRAAPKSAKTAASSARAGSGTSAAAKTAAGKAASAKPAPAKPAPAKPASARRASPAAGTARKSATPTKSAKPPANTGTASRRATASAKPTARPNKAATTVAAPKKPAAKSTVATRRATTSLGGATKATKTTAARSAARPAPTKPVPTKPVPTKTAAKARPASTRGSAGKPRGKR

SEQ ID NO: 36439 - protein, 486 aa, Arthrobacter sp. Edens01
MSFTENAVARWAELQRLQASPGWKLTNANPWVLALFREAFTRTRPRIPLDEFHSLTDSFLQQLRLNGQSLREDWTGKNYADDWVARRFLARPRADGRFVYELTEPAVRFLSYLDGFTGDTTSLNSSRLNTLLSSVETLAHESNPDPEARIAVLEEEIARREDLIRSLRAGDAPPPLDDDTAVEAARDILDLAAALPADFKRMRDGLEKMLHTLRQEMVESQASKGLTMGEILEADKRLRSTSEGRTYEGFTAFLNDADQQGRFRHAIAQVLERDFADAMTPGDRQALYRMISDMREQAAEIQRIYGRLSESLHTYVQSDEYRESVQLRKLIRAAETAIHKAPRGRRRAAVVPAPKLYASAFESLSMVRSYDPAEHAAPRKLPEPPSFTEADIHRAARTPKADRRVLRDAITRAGSRRGRATVAEIFAELPAEHRHLNSIRALLASAAPTGDSGTTTAASESIPFLQIDGSSRTAVLPVLTVAESQS

SEQ ID NO: 36440 - protein, 255 aa, Arthrobacter sp. Edens01
MTENPTAETEEYDELDEDAQFDDYPQPARDVLIDGPELFPGDTGTLPLKLRQALIRLLRGPYLDANSSDNVYNTVVDNQEQLRVRLSELFLELVVDEDHKVALLRPVEMAEPHTTALQRQREMTREETLLLLRMRLVLDRHSGTGNEATIARQDIIDVLEQYVDPQAHDAKGVEDLADAAIRKLVTERRLLLPTELDDVWVISNALPLALPYEHIGDIITYMNSLTEAPAEPDTADEAPAEEAVTETQHDGEEPA

SEQ ID NO: 36441 - protein, 1107 aa, Arthrobacter sp. Edens01
MSIETTLPMGDLINPGQNRLSRIQIVNWGTFDGAHTIHVDRAGTLLTGDSGVGKSTIFDAILQVMDARPKMNEAAQNNGGTAAEEKRTAFSYMRGRLGTQGMEAGDGTAYQRPGATWSAVCLTFDNGLGQITSLSVLMDLPATGTEHHVGRFYAVHNRPLDITSLETGMRGRFTKGALESLLPGAQIFDSHKLFAERYRTALGVEDEKAFGLLRILQTGKGLGGTVNDFFRNHVLDTPKTLTAADEAVEDFSHLRSIRRQLERARQQRDHLANVPDQHRLFLTTKAELDRVRALTADGLPAYRRRLALASHERDVDRLTSAAATGREALKAAEKQRTKLKKQVAELTARYTQEGGGAIATLEREVAAAQAQLVSRETVENAFRADLCAAGIDTDLSPAGLVTARSRANELIKTLNADVDAARERSSDAHGEAWALKGSIAKLETEIASFRRRRSNIRPESLEQRARICEATGIDEAEMPFAGELIDVPAEHAQWRAAAERVLRPLSTALLVPGEHMPAVTRYLSETNLRGFLRCIDVSIPVDGPSEPGPRDLITKLSTYDSAMGDWVARKITAHYDFECVENPDELAKVSRGVSLGGAVKRNSSTTEKDDRHTKASDNVLGFDNKDKIAALAGELLALRASFEEADVVSRKHASEQDDLIRRLAAVRKVAADTREFEEISAEEHRAAVTAAVERLESARDANADLEQIRFELDTAELDLTAATEKIGVLKGDLARLEAELTAATERRDTLAGRGPDALAEDLRAQLDELFAPFGEITDVVHLNDAAGQVERNLLTDAARLDKTLLETRTRLERTFETYSEKWGSDFGTGVDSAEEYVHRYEDIVTEGLPQHESEFREYFNNRTYERFSDLLQLLDEERRSISARLLPLNSVLRRVPYHVDSHLEIEVKTTVPDDAHKFRMELKNALPMMGVRQDKADMDARYAALEGLVEKLKDPQERRWRAEVLDVRAHVTITCTNKLANGQSFTNLQASLMSGGEGQRFTAFIMASALAYQLGIVSQGFSTYGTVMMDEAFVKSSLSFAEASINALHEFGFQLLLAAPEDKVDLSRFLGSVTEILRDDAANRSGTLERVPVGSSGGSRAVDILLR

SEQ ID NO: 36442 - protein, 491 aa, Mycobacterium fortuitum
MPDAGTGGTSLDQLYQLHREVADSRSLRLLVTNNLATYLTLMERHLDRGAKLTETDLVVRLERDLADLGSETEQSGLSLIKYWASQGWLHRVTEQSGDTERNVCYLTYEARAVLDFARRMRREDTIATGGSISGIAAGLRRVAGQVSNDPDRIRADIEAEMAKLRDELEALEQGQRPEPDLVDAEDEARAIALQMEQIISDIGQYGAMLNRITTRLLDASADTDLGYRERQRQLFDDYESLFASRESASYTAFTRMIQDPEQRAALVADIEAVTRELPHLDPDLREVMTGFFSLVSAQTAEVGRTRQRCARRIKRFVASGTLEHSRGVTRQLNDALTSAHDLLSISLADSRIGIEVPLVRTDFNSIGAVAFKIRDAIPPSQAETSHGEVNLSAFSALASQVDAAELADLVNGAVAAGPLALSDAIGMLDSAYLGHVIVLWSWALKQPMSQPESDAESVRVRFRSLEGADREIEIPRLVFTEPIPTASESML

SEQ ID NO: 36443 - protein, 254 aa, Mycobacterium fortuitum; identical to SEQ ID NO: 32572

SEQ ID NO: 36444 - protein, 1120 aa, Mycobacterium fortuitum
MAEPTNQFSLSRLQVINWGVFDGYHSIPFSRHGTLITGSSGSGKSSLLDAISLAFLPSHRRNFNASGDTTAAGSGTGKRTVDKYVRGAWGERREGTSRQIMYLRGTGPAWSAVAVTYSDRTGRSVTGLVLKWLAAEKTSDPGSRYYLIDADRDIFGLCNRWASNGYDAAVFRDDGWTGGRSESQYLAQLYSSIGIRASEAAQQLLGKAKSLKSVGGLEQFVREFMLDEPASLSGVEEALEQINPLVEARGLLDVARRKRNTLGNIAAVQARYADEAAKFGVIDTIDNAMIRDYVDHVRLAQAGPEIANLDDQITQLGAQRDEFGTQQRQLKNEHNALMAQINSVAVDLVPLQQRLTEAERISEEVSRRRSAYEEKVTSLGLTPPDNGEEFWSLRETLMEEADRLHRELFTGNQPYVEASAKEVRAREARESVEAELERVQRLGSPLPRTEYEMRARIARALDISERDLVYVAELMELKPDESRWRLAVEKVLRGAGLRLLVPDAYMERALRFVNENDMRGRIQLQHVQHGAQLRTPAPGTLATKLQLADPTHDSAVEALNVIAAVGDYVCVDGPGEFTEQSRAVTDQGLRKDSGRLSIKDDRSRLRPSDYIFLGGTAAKVEALQDDLTAAQDVYQVARTARERLDEHRGQLQSRERACRALCDQYMQWSDIDTDSVDAMLERLQGEHDLLVSDNPDAERLQQRADDCWERVEKVIQQIGSLNERETTLDRRRTALLELSETLTERLGTSEFPSHARDTIDGYAADIALNLELLEPEPYRNELVRVIGRERDRLRADRNRSHDELAGIMAAYDSSFPDAIPNDSDVFDERVHDYVALCRRIDERELPDAYERMQRLITEQAPGAILNLHMIADNEARRITEQIARVNTGLGAVEFNRGTRLTLHAGTRHLAAVDELNEKAQRISSRVSLVSFGDETAMFEQYTDILQLRKLLAGNTPEDRQWTRDALDVRNRFVLYCEERDAETGEVIRTYSNSGDNSGGEQEKLMAFCLAGALSFNLASPDSDDTRPLFAQLMLDEAFSKSDPQFAQQALSAFRKFGFQLVIVSTVQNSTTIQPYIDNVVMVSKSDASAPNARPVASVTSASISEFADLRKTSGEAVASA

SEQ ID NO: 36445 - protein, 502 aa, Stenotrophomonas acidaminiphila
MPQSPPHGRKLQDPDVLTTTTATTTPPLFSVVPAGIFGPLASANRQNYWSLLCRMFDEFFGPDAPVPPSHGFPRREITAAIERYLLTDDPWEDEDGQAPDAPLNMRAGAIHDRFRAAGWLRQERIGAREMVTMPPMVAQLLSTLVEFSEHGPTFVSAKMRSVELQLQQVAEGRLDGGILDEAADQARRLLVSLASMSLQVRDLMPELSKAETTAQFARQWFERYVGQLFIGDYAELHRADHPMARRSSILAMVQQLESGAQREALVAWYGEHVTGGDAARAQQRLSRSLGRLRELERIDEYLARLDEDIRQANRRALAFLDYRLRAPDRLDVLLRRACRGVLSAPEDALRLPVAPGPLMDEARLRPPHRKPAPIPRSANATTPPTPEQLARLSLLRRMKRARLVNAEDMARYVGRHLQQGAAIDSARLDIASIEDLRAYQTLLTLALRGNRSGGLRREDPLGRLLRGFRVELLDAGDGDDNDYLRGPRFRILRVGAKLPETA

SEQ ID NO: 36446 - protein, 208 aa, Stenotrophomonas acidaminiphila
MKRSWNTLSQMSNGTYAVQDFERAAYRLATEQVLYAADTRSRVAYHLVEDHYPDFVAALEPLGIRLERNAHYRYVVALPAHGEGTPVTLDETLALLVLRQRYDEAMRQGLIEDHGEVVVELPDLQESWQALTGRAMPDVGALRALARTLRRWGVCRLVESEGDDPQPFHLRVRPAIVEIVGEQWLQRLDQHNRDEAGDAGLEDDDAAA

SEQ ID NO: 36447 - protein, 1143 aa, Stenotrophomonas acidaminiphila
MQQLERIHLVQFFLFEAQSLQLDATSAIIAPNGAGKSALLDALQIVLLGGDRSRIRFNAQAGGSHRARTIRDYCLGVFRSGEEGRKRRTATTYISLVFRDTETGVPLTAGIALGASVDEPEHRTHGLYLLPGVALELDEHLEQVKGKELPLAWNTFREHIARRCKDVGETPQLHPNAERFLRDLLLRLRASPSANPDLNAYRKAFLNALNLQRVEDVDLFVRTLVAEDRPTDIARFRALLDSFRQIKEKIEQVRQRIDAAEGAERQYEKIAAQATRAASARALAAEYARDLYSEQLDQAEGALAAAEDTLADTRRRLADTRVERDTLREEQARANARLQGSAGYGEQAQLDELAGRDRDRLAQLKKDLAREVGFVREQFRQLDALALDDVDSTALAAAREAWDVWHAELSALAAEDALPWAPQDLFARARQALHAAAPLRERVDRHARQLHAAHDKARDALETARQNQKRLAAGQAELNPDTVRLMSYLRDAGIDARPVCDLVRVTDATWQHAIEGYLRSNVEALLIPDKDEERAVKLYRGLSGGRSVYGVKLALSSHARRSRGADEPESGSVAALLEGVNADALAFLRRQLGELRCVETEAELVRSRQGLTRDGLLARGGSIERLRLPAAGDLRIGASDNRARLRVLHEEIEKAEQALRQIEPRLRRADDCQRGLARLADADAVAQALHERVLEHRQVAERYRSAQESRLAALDPDLLRLSEQLRELNAQLAGCEQRADALVGQEAVAAANLERTHGLLEGLRQQEELVARRAVEAFADPDVDPNRVERQREELDEKHPSLEERARRCEERARDSDAQLARLLPEAWSGLAQYARDHGLELDFDASAWRPARIVLQRELTQLRDTELVQYEEEARQAYATAVDTFRTGVASTLYDNFTRLRTQIATLNRTLRASPAFSNNERYQFHYEVVPEFRDLHRFIQRAADIGGEDTLFESAGQVPEAFRALVEDKAATHVANSPLDDYRRFFRFEVQIRQEDRVIGSLSERMRSGSGGEHRAPLYVIAGAALAAAYGKSEAQPGGLGLILLDEFGDKIDAQNARATTNYLRSLGLQLVLAAPDTAQGTLSGVLDSYIELFRDGDLLQAERIEVTEAARTLLLSDQFDLHPELLAAETERIEREQATS

SEQ ID NO: 36448 - protein, 262 aa, Candidatus Methanoperedens sp. BLZ1
MIKGKIVGFVLDADETLKDSDQGKSFYAFWRFLMSPSKEEELKHLIESVYNLPVIRALEADDKFLKKIKKNLLEAGDKVIRSNHRLSEQLRKILDEKNLQENRRVRELIGDIERIALEIIERHPSKKDFIFLEGDPVIEIIMDKPFWAPTQKPTFIDKLIEISKDELELEGLFNQFFIDESELKSRIHSFLLYYPQITLQEVIEKFPIEIGISELIAYFKIASEDNKHIINDKTQVNIIVENKLITNKLCFEIKIPQIIFIK

SEQ ID NO: 36449 - protein, 177 aa, Candidatus Methanoperedens sp. BLZ1
MENEKILSYASVIIRLLQGAVHYDDKDIWESLLSNRISVEDYFEKIGVKLFINEPDGYAFLKQKEFEEDDKNNSLPRLTRRIPLSYDVTLLCVLLREKLLQYDVGNTDSTRSPILTRDDLYELLLQFFKEKTDEKKQRGKLDAIINKVIDLGFLRHLKNPGKEEYENQSYHKSENCG

SEQ ID NO: 36450 - protein, 298 aa, Candidatus Methanoperedens sp. BLZ1
MQKTLFESDNSQIGFRLHRLELYNWGTFNKSIRRIEPNGYTSLLTGANGSGKSTIVDALLTLLVPNTIRNYNLASLPEKRRERDEKTYVLGAYGRLKDEIDQNTSKVQYLRTKDDYSVLLAYFFNQGYQQKITLAQVFWFENDSIRKFFIKSDKELNIEEHFNNVSSIKDLKKRLISNGNTDIYDQFINYSISFRRIFGLISEKALGLFNQTVAIKVIGDLNDFLRNYMLEKVDIREKIRDLKKNYDDLTKSYEAIQKANKQLQQLKPIISEANQFEKLSFEIQESNNCLRIVTPFFF

SEQ ID NO: 36451 - protein, 245 aa, Burkholderia pseudomallei
MALSKGGRSPEAKFNRMDAQLRDIAHWMAKEYTGSSLYDWLLGRIEDIVDAACESKQPGFLKAMETYLKRVNGLALQSMMLRSGQTRHAYLAAVQKVAESPKLEQDRLLKLVGQFLAPAEVRVLDPASFKLKTATQRRKAVTVSIRPRPTREERLAAAMARAEAEVFSIPNEDVAQGLRADLRLFQHPIRVSAMPTASARDVIRAMQAVEAARSAIGGDLIVKKLPTRLENEFYGANDYEIDLKK

SEQ ID NO: 36452 - protein, 223 aa, Burkholderia pseudomallei; identical to SEQ ID NO: 30855

SEQ ID NO: 36453 - protein, 1210 aa, Burkholderia pseudomallei; identical to SEQ ID NO: 30856

SEQ ID NO: 36454 - protein, 377 aa, Burkholderia pseudomallei; identical to SEQ ID NO: 33911

SEQ ID NO: 36455 - protein, 252 aa, Yersinia similis; identical to SEQ ID NO: 35120

SEQ ID NO: 36456 - protein, 1096 aa, Yersinia similis
MKQSPLWCDSETFILTHLDLFNWGGFKGVHRAVIDPAGTAVIGPTGSGKTTLVDALMTLLCANPRYNLASTGGHESDRDLVSYVRGVSGPGDGGAGQSHIARQGKTITGVVATLACDTQQIRLGVLLWFEGTSSAATDMKKLWLFSDAPGHTLEHWLNVHHEGGMRALRQMEKEGTGIWTYPSKKSYLARLRDYFDVGENAFTLLNRAAGLKQLNSIDEIFRELVLDDHSAFERAAEVANSFDDLTEIYQELQIARKQIRSLQPIADSWGRYQVQSRLLEERQALEVILPIWFAEQAHGLWLVQTHRLEKEISETESTVKELQRQQAEQKKQVNERLKRYWDVEGGSVDVLKDRITDWQKTCHQREMQAANYQRLAINLDLSQELTAAGLQANQQKAETRLTALSEEISAAERSAFSKGITDHELTEQLQQLCQEKIDVERRPESNLPSQFQAFRSALATELGLDDTTLPFVAELVQVKQEEKSWRGAIERAIGSHRLRILVPHASADAALNWVNQRHNQLHVRLLEVKSPASQPLFFHDGFTKKLTYKEHTSRETVKALLADIDRHCVENTDQLRHTPHAMTAQGLMSGKARFFDKQDQKRLDEGWLTGFDNRDRLAFLAEQIQQKEQQLQIATQALRLAQAAVGKLQEQANALAHIQALNFESIDLPTAQRQLEELQARLDRLTHPQSDIAIAKAALDEAEARQKELERQYQQEVTACAGLKKDLERAAMLSRKVHNIAKQGMTGALQALGAAHFPQVAPEQLDDIQDIEREHARQLQGRLNEVNDRLQRLRDELIKRMSDAKKEDTGALSEVGRELDDIPNYLARLQTLTEEALPEKLKRFQEYLNRSSDDGVTQLLSHIDHEVALIEERLEELNDTMRRVDFQSGRYLCLIAKPVVHDSMRTLLRTQRQLNSARFVDDDGESQYKALQALVGLLKDACERNRTQGARALLDPRFRLEFAVSVIERETGSVIETRTGSQGGSGGEKEIIASYVLTASLSYALCPDGRTKPLFGTIILDEAFSRSSHVVAGRIIAALREFGLHAVFITPNKEMRLLRHHTRSAIVVHRRGPDSSLVSLSWEDLNEHHQQRNKPI

SEQ ID NO: 36457 - protein, 384 aa, Yersinia similis
MKSPIDIGKQLARQWHQSKVRSERLLTPGCWPLQLPIGKPSAKIFTANTQVVQRHVEVWRQVSIGLVEWESVSYRASLTPVSIPVRWCLRTPSEWINAASNLQVSQEFQQLEQLVAQVDKSFHALLINQRALWLHKDPHEVITAANLACKLTPGCAQGRPLRLLSESGVDTKFFERNYSLLTKLLDERFEGEASGQGLATFLDAFEESSHWVLVTPLAPGILPFNMSKVTTTELASVDLPCSRILIVENEHCIHQLPQLPDTIAILGSGLDLQWLISPNLKSKSIGYWGDMDTWGLLMLARARAFQPAITALLMGRLLFEHYASGSAVAEPVNAQQAVPEGLHHHEADFYRYLLSQPRGRLEQEYLPRGVVEMALTEWVGHISL

SEQ ID NO: 36458 - protein, 499 aa, Yersinia wautersii; identical to SEQ ID NO: 35081

SEQ ID NO: 36459 - protein, 252 aa, Yersinia wautersii
MTGIFDRLVNTGNGELTQDVLSHIERDDMTTDALPDTDNESTEEKRTHKRVREAAQELLKYGLLEESHKPNLYRIALIHIEEMASILEPLDLSMGIDEVRGLLFVMVRQQETSEQDDWTHPLVRRQRLNLEQSLLIAILRQHFIAYEQENGIGASQALVAVDDLIPQLQVYLGDLGSDARERTRVINLLDQLKGHGLVSTPDAHERVIVRPIIAHLANPENLQALLAWLRDQVERSELPGDASELMGGEEMP

SEQ ID NO: 36460 - protein, 1096 aa, Yersinia wautersii
MKQSPLWCDSETFILTHLDLFNWGGFKGVHRAVIDPAGTAVIGPTGSGKTTLVDALMTLLCANPRYNLASTGGHESDRDLVSYVRGVSGPGDGGAGQSHIARQGKTITGVVATLACDTQQIRLGVLLWFEGTSSAATDMKKLWLFSDAPGHTLEHWLNVHHEGGMRALRQMEKEGTGIWTYPSKKSYLARLRDYFDVGENAFTLLNRAAGLKQLNSIDEIFRELVLDDHSAFERAAEVANSFDDLTEIYQELQIARKQIRSLQPIADSWGRYQVQSRLLEERQALEVILPIWFAEQAHGLWLVQTHRLEKEISETESTVKELQRQQAEQKKQVNERLKRYWDVEGGSVDVLKDRITDWQKTCHQREMQAANYQRLAINLDLSQELTAAGLQANQQKAETRLTALSEEISVAERSAFSKGITDHELTEQLQQLCQEKIDVERRPESNLPSQFQAFRSALATELGLDDTTLPFVAELVQVKQEEKSWRGAIERAIGSHRLRILVPHASADAALNWVNQRHNQLHVRLLEVKSPASQPLFFHDGFTKKLTYKEHTSRETVKALLADIDRHCVENTDQLRHTPHAMTAQGLMSGKARFFDKQDQKRLDEGWLTGFDNRDRLAFLAEQIQQKEQQLQIATQALRLAQAAVGKLQEQANALAHIQALNFESIDLPTAQRQLEELQARLDRLTHPQSDIAIAKAALDEAEARQKELERQYQQEVTACAGLKKDLERAAMLSRKAHNIAKQGMTGALQALGAAHFPQVAPEQLDDIQDIEREHARQLQGRLNEVNDRLQRLREELIKRMSDAKKEDTGALSEVGRELDDIPNYLARLQALTEEALPEKLKRFQEYLNRSSDDGVTQLLSHIDHEVALIEERLEALNDTMRRVDFQSGRYLCLIAKPVVHDSMRTLLRAQRQLNSARFVDDDGESQYKALQALVGLLKDACERNRTQGARALLDPRFRLEFAVSVIERETGSVIETRTGSQGGSGGEKEIIASYVLTASLSYALCPDGRTKPLFGTIILDEAFSRSSHVVAGRIIAALREFGLHAVFITPNKEMRLLRHHTRSAIVVHRRGPDSSLVSLSWEDLNEHHQQRNRAI

SEQ ID NO: 36461 - protein, 384 aa, Yersinia wautersii
MKSPIDIGKQLARQWHQSKVRSERLLTPGCWPLQLPIGKPSAKIFAANTQAVQRHVEVWRQVSIGIVEWESVSYRASLTPVSIPVRWCLRTPSEWINAASNRQVSQEFQQLEQLVTQVDKSFHALLINQRALWLHKDPHEVITAANLACKLTPGCAQGRPLRLLSESGVDTKFFERNYSLLTKLLDERFEGEASGQGLATFLDAFEESSHWVLVTPLAPGILPFNMSKVTTTELASVDLPCSRILIVENEHCIHQLPQLPDTIAILGSGLDLQWLISPNLKSKSIGYWGDMDTWGLLMLARARVFQPAITALLMGRLLFEHYASGSAVAEPVNAQQAVPEGLHHHEADFYRYLLSQPRGRLEQEYLPRDVVEMALTEWVGHISL

SEQ ID NO: 36462 - protein, 342 aa, Streptococcus pneumoniae
MLKEICENRTIEYQRYCFTTYQLLIGVEAEGRPASAIWESEKYSDQLYDELTILLHNMKNHMETIAAKDDIQQVLEHHFGEYKKDIIDKSYHRLRTSDHVSRYRNKILERIQTWFLDDEFMKRAAKDAVESGYSTSQEEAMDVLSKKMYKVEEIYSNLDEIYNQIDARHYQYLRAVLDRSRYLSTYNDSTDYKISYILEHIRQTDENILDSSPFRLVQFRQLQEASLLSPRKKKDVYEPEQHEVTEISEEMREELKAENVRRIEKVINRKKIRRFVLEAMKGRQEIEMSELDLQNEEDALYLIYVYLYGYSRNAGYTLSEESPEFITQRGYTFSNRTIKREN

SEQ ID NO: 36463 - protein, 197 aa, Streptococcus pneumoniae; identical to SEQ ID NO: 35504

SEQ ID NO: 36464 - protein, 1107 aa, Streptococcus pneumoniae; identical to SEQ ID NO: 35505

SEQ ID NO: 36465 - protein, 406 aa, Streptococcus pneumoniae; identical to SEQ ID NO: 35506

SEQ ID NO: 36466 - protein, 460 aa, Streptococcus pneumoniae; identical to SEQ ID NO: 35503

SEQ ID NO: 36467 - protein, 197 aa, Streptococcus pneumoniae; identical to SEQ ID NO: 35504

SEQ ID NO: 36468 - protein, 1107 aa, Streptococcus pneumoniae; identical to SEQ ID NO: 35505

SEQ ID NO: 36469 - protein, 406 aa, Streptococcus pneumoniae; identical to SEQ ID NO: 35506

SEQ ID NO: 36470 - protein, 486 aa, Mycobacterium abscessus; identical to SEQ ID NO: 31694

SEQ ID NO: 36471 - protein, 249 aa, Mycobacterium abscessus; identical to SEQ ID NO: 31486

SEQ ID NO: 36472 - protein, 1115 aa, Mycobacterium abscessus; identical to SEQ ID NO: 30763

SEQ ID NO: 36473 - protein, 489 aa, Xanthomonas campestris pv. campestris
MKHQARIAGYRHLRDQPAWKLLAADHAPELIGLLQTLLMDGERRLPSAVLHARLQRQLDALRGDELSRELPRTAQAYLAHWLAQGWLERRLPEGAAEEEYELSRAATQAIRFIAGLRESGSSATESRLSLVIQQLVQLAGQTEADPDARLAALRAERERIDAEIERVAAGRVGALDGKRALERTRDLIHLSDELAEDFHRVRDDFEQLNRQFRERIIDDEGARGDVLEQLFNGVDVIADSEAGRTFEAFWSLLNDTQQSSQLDQALDALLARGFARKLDRRERAFLRGLTGTLLERGGEVHTVMQHFARSLRGFVQSRGYLEQRRLNQLLKQAQGEALHLRESLHATTATGYTQALSGSRLRSLSQWRLHDPRLTQVDGRVYAADAAEISLDSVGDLVAQSEIDVRSLRRDLHALLGEHPRLTIGDALQQRPAVQGLGSVIGYLSLGTRHGLVIDGHMETVQWEGGDGTLRRARIPLVWFTREKRNELV

SEQ ID NO: 36474 - protein, 235 aa, Xanthomonas campestris pv. campestris
MNWSEQAALDTHDDDDADAHASSLRLPASDAASVAQGGALFLGDTGTLPFDARRALCQLLAGPSIDAQRHGGLWPALLRNEVAVRQVLCELFLELVLDREGGVAFTRQADTAELESPTLLRSAPLTFIESVLLLFLRQQLAEADTRGERAVVDEAQLVEALSVYEKNVSTDRAGFTRRVMTAIGKMRENQLLSRLRGSEERYEVSPVLKLLFSAEDVQALVVAYRELREGEVAAD

SEQ ID NO: 36475 - protein, 1337 aa, Xanthomonas campestris pv. campestris
MNSQSNLSPASPGASLFAETLAEQRAQQFRMRRLQVHNWGTFNGLTEVPIAEKGFLFVGRSGSGKSTLLDAMSALLTPPSIVDFNAAAREAERSGRDRSLVSYVRGAWADQQDSASGEIATQYLRKGATWTALVLEYRNAQGEAVSLVRLFWIAGSGNAAADVRRHYMVVPRAFDVASELEGFDLDLRKLKARLGEDVAHFDGFAGYAERFRHALGIGNDMALRLLHKTQSAKNLGDLNAFLRGFMLDEPRTFEAADRLVEDFAELDGAHHAVVTARRQVETLSPAREHHAALMALRRSVGELRELQLGVDSYREQQRLALLEARLQEVDSQDRGLAGEEGQRRESLDNHEQKLAGLEREQRAAGGEQIEELERERVRVERERDERLRRRAQIEQACRQLGTALAAGASGFAAQVAHAQGVLDGGKQHASTLDEAIAERMGERRDDERRFAEIRAELDALKKAPSSMPAPMQALRARLCDDTGIAESALPFVGELLQVREDQVAWRGAIERVLHGFAQSLLVDERHYAQVSEWVNRTYIGTRLVYFRVRRNDELHSRRVDPNALPGKLQLREHAFTEWLRNELTRRFDYACVDNAAALRNADRAITREGQVKHPGDRYEKDDRHAVNDRKRWLLGHDNRDKLKVFEREAQALAQRIASCDADVAALRKQREQDQEKRLAAHTLVERDWDEIDVGPKLQRLSDIDEQLQQLREGDSGLRALGQAIDTARTLRDQAKRTYEDVRLERAQLARERVRLEQQQAACAGRAGTAALTPTQLQGLQERLAALAPLSLDNLEAHFRVVERGLAEQLAESQGRDSRLSAQLLECFRRYCQQWPEDSGDFTVSLASADDFLARLDRLESDGLPRHEHRFFDLLQTQSKNNLLALQRHTAEAHKGIKQRMDEVNASLEQVPFNRDTILTIEVSDRRLAEVQEFQQQLRAVLSHQQTEDRALAEAQFATLRTLVARLGAQEPEARRWREQVLDVRLHVEFIGVELDAQSRAQVEIYRSGAGKSGGQRQKLATTCLAAALRYQLGGEDGELPRYCAVVLDEAFDKADNEFTALAMNIFENFGFQMVVATPLKSVMTLEPFIGGACFVEISGRHNSGVLLIEYDEQAQRLKLPERSRGEDAAVPAEQGGAVAPGERAERAPVIAVESGHPASVHLAESTAVPAQGDAVTDGQSRGSKRTRAAATASTAAPVPAPAGKRSTSAAATSATAAPATRTADASNARRKQAATPDTPPKPTKPASTRTGSSGKPAAKRTTTAKAAAVPKASNATPAVAAKRTGKAPKDVSKPASAQKVAKPVSRSKPTAKPATAASATSRAASTRGSAPKARSKR

SEQ ID NO: 36476 - protein, 477 aa, Alicyclobacillus ferrooxydans
MQNLFDVVSPNLFSILAAPNRVIYFRALMVLRRCYQRELTIHRSALVTYLVSEMERDLYDFTDEDALVEAGEEASEETDFGSLSGRAHALIRRFIETGWLQPSTDAVELDETLIVPPYASTLLDAFQSIVDPVQQRYNGFVYSVYSNLRTANDDRDEFMFQGLEAAYENTISLRESLRSLLHNIRSYYQNLHHRQEIRELLAEHFDSYQLSVAIAAYHPLKTFDSVYRFRPRILEVLRNWLTMPSLLTQMAKSIRQQRSDLDESAARGEVVQRITFITDTFESLDDLLKEIDKRHTSYNRASVERLQYLLNTDRDIKGKLVQLMRALPKAQDSSTSRLLEEMRTLPVYQVKYLDPEALYTEPKKRVRGTPQPIVRQKTDDALFRAEARELMERMNALYSQKQIGEFILKQMKDRERLDSGEMTLQEFDDFLRVIVAVVKGDEPEMPYDIVWSEDRSSVTVAGYQIPLMTFVKKGAAR

SEQ ID NO: 36477 - protein, 271 aa, Alicyclobacillus ferrooxydans
MSGDEQYTTLTERDKEDFSRLVSLLYEQTFLVRDVWDLKEHRMTGNRDYRFAERNMALLKGYLSVSGFEIQVDGRRGVIAIYNKHNRNRMKVDKFTTYMLYALRLVYEEQMETASMRREVVVPLREIIGKLYTIGVMDKRIALTHLQSTLNRLRKLSIIARVEGTSQDMESRWMIYPTITIAVSDDRINDLYARLISGELKGGVFDEDEQSGTGTDNGGADENGDGGLADDGAEDDGTDDDETNLAADDLVEDDLEEDDLEEDDLEEEETE

SEQ ID NO: 36478 - protein, 1189 aa, Alicyclobacillus ferrooxydans
MKLLRRALLVKWHYIEHELIDFAPVTFLTGKNAAGKSTILDALQLVLLGDTTGHFFNKAANDSSRRTLKGYLRGEVAEDEGVGVINLRDGQFSSYIVLEFADERGHKPFCMGVVFDCSPDGSVEWRFFSLAEGIPDFHFIRDGVPLDIKGLRSWGQTRKNRFEMFESNKRYQEVFLARMGNINQKFLRLFRKAVPFSPIMDIAGFISEFVCDVKVHLDIDDMRENIRHYRRMEEELHGVESRVEALREMDGTYDAMESAADKVKLYEYLLDRAELTAKEQSVAAAKTQADELESETKRIDGQISVHTDTQNQVRAERDALVEERANSDAYQRQQMLEQNKRLLESEFSHMRRDGERHDRMLADNGERWRAVSRSLGETDIWWTDLAGRDGTGHGAAERTSAGGMGYATAGGRADAATAGTANATAGGTTDAATAGTTDAGFAKADTPEWKLAQSAPLYNDAIRAINEGLSKWSRPAGWQSHRLLDEELAVSTDLDALRGSADALKQASELLREGHVIMRDAIGSWEEESKSLERAISELKRGIKQYDPKVLTLKQALEQGLSADVNIFAELLDIRDPMWQKAIEGYLHTQRFYLLVPPEAFSQALRIYDDTKQSQRLFDVGLVDIAKIMEEKPRAMSGSLAEEVITDNPYARAYADYLLGHVMKCHHVDELRNHRTSITKDGMLYQNYVARQINPARYATLYIGKMAIQHQLAQKSLRFDRVQTLLHAFRPRLAQVAEWAAQPYPTSSDLTAAEEFLQVLTGLPKLRADYKAILDDMGRLDFTRLDEIKKEIARCDAVLADVAHQIRELTSRQGALKGQRDRLVEQDIPHLEAEARDKKHAISSRYNPLEAADMSGRYEQELQRLGAPETVTANFGRQLSTERNRVIESWDKLVRQRETYNRTFGAGFDIQRRDNDAYRAELTALEQSGLTDYAAQIKDAKERAQIQFQEDFINKLRSNIDTVEQQIKALNFALREVSFGGRERYQFKVSPNAQYQPFYTMIMDDMLLEGRSLFSDAFMDKHGAVIDELFRQIVDVDERDPAVQAELEKNLQTFTDYRTYLDFDLVVKDEEGRESRLSRVIAKKSGGETQTPFYIAVLASFAQTYRINQPGFNNTLRLMMFDEAYSKMDHQRIRDSIKLVRDMGLQVILSAPTEKIADIVPLVDKTIVVQRIKSQTRVAPFEPDPVGVN

SEQ ID NO: 36479 - protein, 520 aa, Alicyclobacillus ferrooxydans
MGGVGRDVKTGMGGESLARGVLSALLDKYENSEAFRKGEPTQARIQLRFTDSLVPGYASGRLDPDDRSALHTALVTMADGGFIDLKWVKFEEGNILERVYLKWEQINDIYEYLGRTSQRQKLSAFTVEMEQWLRGLVGVGLVDSGLLGEGAGGKVRLGAGEALLDEGLAPGGEGMPNGSLPEAWRFLLNWADDILSFVHERGRIPSSLIPDEDGTRALLLRALAGLVRARGQSLPVRLFSKRELGNSKVFERQVQSHVIRLVRRYWSIGHPLDVEAPDDNATLLRELGIESGHEDITFCGPIRFRYQGTVAAEDIDASVFPYGLAIDASDVHRIAITEASISRILTIENKANYRAYVRGHRQSDELVVYLGGFASPAQRAFLRLLRNFLRGTASEVGEKSATSDMASIRELDKAGLDKGVSRADVSDQPTVFHHWGDLDYGGILILQNLRNSCWPEAMPWRMEPEVLDEYIDYAEPIDDAYRTKLTRLLESDVYAWAHPLIQRILTLGATLEQEALLLGD

SEQ ID NO: 36480 - protein, 507 aa, Pseudomonas coronafaciens pv. oryzae; identical to SEQ ID NO: 36334

SEQ ID NO: 36481 - protein, 265 aa, Pseudomonas coronafaciens pv. oryzae
MNREDQNNDALAPSLFDTYRQVAVTALAETGHREEGLAKQEEPGELDEVAVQPESQVVYDIMPAEARRALRLLLNTGVVRAEKKRLAFEALCQHRALIAAHLANMLLCMTLDQKAGIAILLEQDLSESGFEDLTDEDGSSLVGKRTMPLYDTLVLLVLRKYYQEREVIGENKVMIDVDTIAELMTPFLKLTNSSALERKTLNGSIAKLREKRLLANVRGDGERLEITPVIRYVVNADFLNTLLSEYQLLAERGSVMGQQEVEDDV

SEQ ID NO: 36482 - protein, 398 aa, Pseudomonas coronafaciens pv. oryzae; identical to SEQ ID NO: 36337

SEQ ID NO: 36483 - protein, 489 aa, Xanthomonas axonopodis pv. dieffenbachiae; identical to SEQ ID NO: 34738

SEQ ID NO: 36484 - protein, 233 aa, Xanthomonas axonopodis pv. dieffenbachiae; identical to SEQ ID NO: 30425

SEQ ID NO: 36485 - protein, 1342 aa, Xanthomonas axonopodis pv. dieffenbachiae
MNSQSNLSPAQPGASLFAETLAEQRAQQFRMRRLQVHNWGTFNGLTEVPIAEKGFLFVGRSGSGKSTLLDAMSALLTPPSIVDFNAAAREAERSGRDRSLVSYVRGAWADQQDSASGEIATQYLRKGATWTALVLEYANAHGEAVSLIRLFWIAGSGNAAADVRRHYMVAPRRFDVATELDGFDLDLRKLKARLGEDVAHFDGFAGYAERFRHALGIGNEMALRLLHKTQSAKNLGDLNAFLRGFMLDEPRTFEAADRLVEDFAELDGAHHAVVTARRQVETLTPAREHHAALMALRHSVGELRELQLGVDSYREQQRLALLEERLQELDNQDRGLAGEEGQRRESLDNHEQKLVGLEREQRAAGGEQIEELERERARVERERDERLRRRAQIEQACRQLGTALAAGASGFAAQIAHAQTVLDNGKHDASALDEAIAERMGARRDDERRFAEIRAELDALKRAPSSMPAPMQALRARLCEDTGIAEAALPFVGELVQVREDQTAWRGAIERVLHGFAQSLLVDERHYAQVSEWVNRTHIGTRLVYFRVRRNDELHSRRVDPGALPGKLQLREHAFTEWLRNELTRRFDYACVDNAAALRNADRAITREGQVKHPGDRYEKDDRHAVNDRKRWLLGHDNRDKLKVFEREAQALAQRIASCDADVAALRKQREQDQERQLAAHTLVERDWDEIDVGPKLQRLSDIDEQLVQLREGNSGLRVLGQAIETARTLRDQAKRTYEDVRLERAQLARERVRLEQQHAACAGRAGSATLTPTQLQGLRERLAALTPLSLDNLEAHFRVVERGLAEQLADSQGRDSRLSAQLLECFRKYCQQWPEDSGDFTVSLASADDFLARLDRLESDGLPRHEHRFFDLLQTQSKNNLLALQRYTAEAHKGIKQRMDEVNASLEQVPFNRDTVLTIEVGDRRLAEVQEFQQQLRAVLSHQQTEDRALAEAQFSTLRALVARLGAQEPEARRWREQVLDVRLHVEFIGVELDAQTRAQVEIYRSGAGKSGGQRQKLATTCLAAALRYQLGGEDGELPRYCAVVLDEAFDKADNEFTALAMNIFENFGFQMVVATPLKSVMTLEPFIGGACFVEISGRHNSGVLLIEYDEQAQRLKLPERSRGDEPAAADAAGAAPSIAALSEPAGVQGAASADGMAADGVPMRTASPAAGETSSAAPETQTSQRKPAVATANKQNKAAKNARTASSTRAAAQSRATQTKKPTSRTPAVANMPASGKRTADASAVSSGARSNVGKTTPSSNTPGKPIAAANASNATSRKVAAASAPVKNTAAAKPRATAASTGQPARGAGKTSSSRAAAKPSPAKKRAAKANAPQARGKR

SEQ ID NO: 36486 - protein, 472 aa, Vibrio metoecus
MFFDHINTDLFRPLVSKNARLYGTGLMAIYDSLVNQYIEGECTPKQARQVIYNALSSGNQNVEWVYEAEDEGEEILDHTSMAAQIYSVLKKTGWIIEMDDVGYRRIVYIPQQSSRLLQAIKSVSDRRDFSIGATFQGVYGALLSVEKNPVEYSAQIIFASKVTRELSNELKSVAASAREVTHKMREQSVDAHLFQTFFDEFLTECLGSFDHIKINSHPNRYRSETLSVVTRLLNDEEKLDQISVKLARENSHIDYRHQKQLVINDLNEIFRVFSGIPRLMDIIERYRSVTIRRTREAMQYSFQAVPEIGRKIETVTKALANFPLCESSMFLPAPVVHEEYVAGYRLTSPRKPKPEAQPTKQIIKTVNNWDIAYGRVYDEYLTRRTDQPQRLEDYILRELGDKSSITTCEMSIDGLEDLLAFLQLRELLHNSVPIDSPFEQLSKTYKVSRVEGVTTDNEYITAPSLRVERFCD

SEQ ID NO: 36487 - protein, 218 aa, Vibrio metoecus
MLKELGHLVDKYESRKISEDDLIGAAAELRAKQFIWQSGHGQGRYYEILRHQDFREYFENLFGAFGDTFFVDEQYAYCGIIPKKSTPALKLNESFFLLILAKLHDGELRKGCCDEGRTSPSEDLLLDEYERLTGRIKPKSSDTHEALARLAKYGVIELGPKNTETDMRQITILPSIMKVVSQSYIEEMLDLCGVDGEVTSYDEDVEFSSGGGEVSENE

SEQ ID NO: 36488 - protein, 1151 aa, Vibrio metoecus
MSRHFDKLVRITFVNWYLFSAEDIEVSPNSTLFRGQNGVGKSSILDGIQTCLAGADEHLMSMNAASSNGKRSGRSVRSYVLGEVAESPGHSASEPRVESNSYIALTFQKKNDGGFYSFGVSLHAREKHSEVTKKYFALDGGEIKADDFMLESDQVITWKTFEQRLRAGKGTYLAANSAREYRDICSDLMSAPGASNQISSVAMFRAIKNGLTFKERDSMSEFCRDFILPQQNIDVVRIENDYENFTRIQKTIAEALERLKALRSINNFLKQYETNTRKMRAFQWAEQESLVISSDTNKNFCEERLEHKNGRLQDVLERLGELDTKIPELQKKRDEALLNYTSSDYASSVKQIEEDIEAQNKIKREKITSLSRARGLISELIKEYAPLYVDETLKSQLNQAIDALCFASGSTLGMFDSLWPQSKQDIEAVEEVLLQFEDIASDVAEQLLELKVERRPLDDEIRKKGEVLSKLSEGQSSLNQSTLALVKVLDAEGINSSPVCDLAEVIDTSWQKGIEHFLGNNREALVIIGPDGGEASPELIERAISIYRVAKTTDSRVRRAKLVNPEKIPTTPENQVQGYAAGLIKANHPTAERYLHAQLRNLDLVETESELRQAKRAITRDGMVAANGTIGGGNKIDFVLLGEKARKDSSIVLSEEIELLKVKLDNIDQKIHGLSLVYNHLNTVTDLKRQCVVLYDTLASYDEVCDFIYELTESLVQLKGSEDSYLENTYRALDKTLQNANEEKGNLNIQHANLVRDINEEKERISKFRAIGQEAIDKRREIEAREGHETEESIHCLEVLQETFGEENYDEIISEAQSKTKEHANRAQDNLNSGKSKAMAYAVEYNVPDRREFDGLSDTELYARCREHAERIEKTDIVRYKNDADIVRENMIKGFRSEVVAKLKDNFQKVESTFKDLNDALTGIVFNGNTYQFKYPLVEDRTLKQVHAYATSTSDIELASPDGLFATPEDHPAIELITKTLEEGRLMDLSDYRAFYNYDLESTSKATGTKRGFSELVSKGSGGEKGTPYYVALGAAFMTAFKIRISGKEAFGGAAIAIFDEAFSKIDGSNSKAALQFFEDIGLQVILAAPPESEAKIGPYVEESYNVIRSADAMYLDPKRYKDAARKILQSDDPSINPHLVDERVAEMEGY

SEQ ID NO: 36489 - protein, 425 aa, Vibrio metoecus
MTYIINALFNNLAGKVNKPQGLKPSLDVPISVSGFKFYHEASIAERESLHAYLNDLTHQVSWLDISFIPRGFDDHELLQRIKISSSRDFLSYFEKPVVADQISEAIRHVVDARLVLPLRFENLEVGLSNSWKKGKRYFSCDFTSYGKLIDALRVIEYLHQQPSNYSIDYRTLSVKLFKDSKWLEQLKLTISNLLKPETPELDDLEPDAVLAYWGLYRFPPSLKMKGNLTIKTTKGLLCVDNAWPFIGIPPDAIKDVVVTTEPSYVLFIENKTTFERYCREIDDGGLIIYTNGFPSRRWHSVFKSLDTALNNSVNFYHWGDIDLGGFKILRFMEELFERPLFPHQMDIIKKSDDANGVPAKELLAVITNPNRLVISDKIVSMLSKLGDDKVMLVEQETLDLITPLEKSESSAFEKSFLSVTQTQSA

SEQ ID NO: 36490 - protein, 472 aa, Roseburia faecis
MILKKKIPKEFYKLFRTKNRDAYMQFLVAIYEENNEVYTALGLTIEECRVIIADTIAKARIIWEDEEIEEEDEPDTLFPEDSPSGILNTLIRWGWLKSDFDEKLNTYIISFPEYSQLFTELFQKLQTEDDSRERESILSIYSALFTYHSDTEKNNDILKNALQTSRRLGQLLSNMQDGMRSYFEELSQKKNFIGIQKVLVEEINNRDSKKYAILTTTDSFYRYKEAVKELISQILRENDQKREQLVKERTGLVEGTVTSKRNQYRLEYCESASQLVYQVEREFDLIEKKYNKLIEQKTVFAKRALARIHYILQEGSSDEDHIVKLINLLDHHANSPQVLEQMRDRIRVGTQFKNITDRSFYNRKNAEDAGFHPIAMEKHNEETQMTDFVPKPLYTKKQLQEFRQKNIVDGRFVTDEQTIQSVEDLEKLLFLWQEETDDTKQEETVHIDGELKGEYGFVFSKLVIDAKKGEKK

SEQ ID NO: 36491 - protein, 224 aa, Roseburia faecis; identical to SEQ ID NO: 32693

SEQ ID NO: 36492 - protein, 1115 aa, Roseburia faecis
MSQAKKVFTRMCLNNWGGIDHKVLEFHEYVNLFSGKSGSGKSTVMDAIQVILYGSFSPSFLNKAADDAKNRRSVLSYLRGEQKDGSANRKDCDFCSVIALEIEDTGTHIITCIGIAFEVRKSDSEIKKFVYFSHSGKMPESEYLTEQGVCYSNQEIKKLVSARTKSDDNRGKGEVNRIYGSKEAYLGTLYDVILGYIDQNRFITMEKSAIALKMTNGTGQFIRDYMFPKNTSNTIATISEQLDSYRQIKEKIEDLRKRIELLSEIQASGKELVRLQTDIVRAEAMIRCIGIEDLRARIQAAEDDKRNLAEKQEQCKKKVQELSASREEAQQKLIQVSADLKASDLGGKQQQYEELDERSRMLADNTRQWQKILQGMKNWEEDDVITDYISNPVLNMIAELNQGRVTEELCQNLHLKIESAKQNIEDEVEDYRDQRREIGKQLKEKKRLVDDMKHDRKPYDENLRSARSALSQQLSDRYGQTVKVQIFADLFDVQEEEWKNAIEGRMGRLKHSLITEPQYAHEAAVLFRNMKQYENVDLINSKAIADSKPDCMEGSLYEAVKTQEAYVDVCLKRYLGHIMKCRSVEELEQVRDGVTPDCYSYSNFIFRHLKKKDYTTRACIGRRVSKARLTEYENDVEDLSRQETELDHLLRRLKAAREFECLKDEPSHYVKLSKAGAELAKVNKTKKELEEVIRFLREGAYKELEEKEQALKKQVRDIQTEIDEVQTELAKLTSRYGQLSGENESRRQQLEEKLQGYIANEELEQEVWELLKKQSGQSVINRKKAEIADLADKEQEQAERLQMARNKYILAYPASEFSGAEKSNEAYEKLLERYRTDFEPAYEEEFEKKCASIYKSLRENVIATIHGDIKAAKRHAYEINRLLRETNFSDSTYQIKIEPAKNENGQFFDMLMAEELDSKNLDNAGIDGQISFGEDAFYQKYEQKIKLLTDKFMPPKDEDEHLRAQKRKEMEQYADYRNYLSFSMFEQVTDEHGNVIRENFVDDMAGRDSGGEGQNPKYVALLAGFAMLYMQQSKRDSKIKLVLLDEAFSKMDQERSAVCLKYARKMDLQLIVCVPDERLQSLIRNVDCVYGFRRFKNRISMMHIDKGQYLEMMEG

SEQ ID NO: 36493 - protein, 401 aa, Roseburia faecis
MGRKKEQEHKTLARWIIDKTNTDHYRAGMLSGWKHPYIDADVMEIVGGRKQLLDQATILENETNAGKMGKFKPDWKDVKTSIKKIDYDVAIIPELCEREQIEDPRERQLRLIARVEKWRRKGQDCAWLCSYYDDLLDLLNRGKEQKELEDETFFVCIDAVAHQKEHVWKRVFSARVLHNSKCFQKNYEDRILSVLKEKSPFYIEEMSDDELLDAHNIHSYAQTLEWKGTLQYIINDEKVIDSSSQIYGTIINTQTMEHARAYALSGCKRIMTIENKANYEDMSYRKDTLYIFCHGFFSPKEVRFLKTICDLVSEGCEFYHWGDLDYGGICIFQFIKAQVFPKLLPYKMSQEDFELAVREDAGILLKEDTRNKLIRKNAGLLEPLKEAILKSGLTIEQERLL

SEQ ID NO: 36494 - protein, 498 aa, Eubacterium rectale
MSMTLKDRIPKEFYSLFRTKNMDAYMQIVVALYEENNEVYASLGLTREECQIIIADTISKTGIVWQTDYNEDEINKDSGGMDNDDDNPDSEIDVIYDQTSFAYTLTPSAILGRLINWGWIRSDFDEKLNTYVIAFPQYSQMYAELFKKLLVDDDSRERESILAVYSALFTYFSDPEKNNDILKNALYTSKNLGQLLSNMQDGMRAYFDELSRMKDFIGIQKVLIKEINNSDSRRYAILTTTDSFYRYKEAVKELISKILNQNDDRRAELEEILSQTTPGTFERKRYEYSVEYCDKASELVYKVEHEFDLIERKYNKLIEQKTIFAKRALARIHYILQEGADDEDNIVKLINLIDKSDKTDEILGALRNRMKFTRQFYNVTDDSFPGRRERGRSEFVPFVIDDASAGEDDMADFVPKPLYTKKELQSFRDKNMRDGMFVTDEQTVESMEDLEKLLFLWQEETNERMGEDTVSLEGEITKSDGVSYSRLVISKSDSKREA

SEQ ID NO: 36495 - protein, 241 aa, Eubacterium rectale
MFEYMENVSPNEAENIRKTIQDLLRQTCILQMKCDPVTLIQRDNPRYQVCLRNREFISDYLAVLDCELVHDQQEHLFRITGDGVMLEKMTLLTARIVIIMKMIYRDKIMGEGLNATTTNLAEIREYGRNTNLITRKLNNQEWSDALLLMKTHQMIELPGAIANLEDNTPIYIYGTVNIFCSAMDINELVRMYSDEVELIKYDNESAATLDAAGLNTEGSSVNHTHEFAKNSEMEELPIESV

SEQ ID NO: 36496 - protein, 1121 aa, Eubacterium rectale
MSQSKKIFTRMCLNNWGGINHKVLQFNEYVNLFSGKSGSGKSTVMDAIQVILYGSFSPTFLNKAADDAKNRRSVLSYLRGEQKDGSANRGDCDFCSVIALEIEDTGSHTFTCIGIAFEVRKNDSEIKRFVYFSHSGRMPEPSYVTADGFCYSNNDIKKLVNTRSQSADRRARGDVNRIYASKEAYIGTLYDVILGYIDPNRFITMEKSAIALRMTNGTGQFIRDYMFPKSDSGTIETISEQLDAYRQIREKIEDMRKRIELLKEIKESGQELVNIQSDIVMAETMIRCIDIEDMRAKIQAAEDDKKRIEEEQDRLSEKADDIAGQQADLQQEYIQVCADLKSSDLESKKDQLRELEKRSLMLTDNSRQWIKITNGLKAWDDDEVITDYVSNAVLNLIEEIVDGDVTEAKCQELHLKLESIKKDIEDELEDNTSQKNEITKELKEKKRLVDDMKNNRKSYSESLRSARAALQRDLSDRFGEPVKVQVFADMFDVQDEEWKNAIEGRMGRLKFSLITEPRYAHTAAVIFRDMKQFEDVDLINSKAIMDSEPKAMDGSLYEAVDTKEKYVDVCLKRYLGHIIKCRSVDELEQVRDGVTPDCYSYSNFIFRHLKKRDYTTNACIGGRVSKARLAEYEADVERLEKDQIQLMGIISSLKAQRDFECLKGEPEYFVGLSEASDELKAVNSQKNELEEIIRTMENGQYKELKEKKRLLEKNIDALKSAFSLNQQQINEKISQHEKIIGANEQRRAQLEDMLQGYVAREELEKQVQDMLQHSSGASVKSKQREKLIELQGADGNGGRQQSCVETLQTARYRYIKEFPSGQFSGAEKSNKAYEELLEKYEKDYEPEYESEFEEQCKVIYKSLRENVIGTIHGDIKAAKRHAYEINRLLRETNFSDSTYQIKIEPAKNENGQFYDMLMAEELDSKNPDNGGIAGQISFGEDDFYKKYEQKIRLLTDKFMPPRDEDEHLRMQKRKEMEQYADYRNYLSFSMYEQVTDENGRVIRENFVDDMAGRDSGGEGQNPKYVALLAGFAMLYMQQSNRDSKIKLVLLDEAFSKMDQERSAVCLKYARKMDLQLIVCVPDERLQSLIRNVDCVYGFRRHNNQISMMHIDKGDYLKLMEG

SEQ ID NO: 36497 - protein, 471 aa, Roseburia inulinivorans
MILKKKIPNDFYKLFRTKNREAYMQFVTAIYEENNEVYASLGLTQEECALIIENTIEKSKIVWQEEDDMEEGETPDALFPSDSPSGMLNHLIRWGWMKSDFDEKLNTCVISFPEYSQLYVELFKKLQSDDDSRERESMLSIYSALFTYHSDNEKNNDILKSALRTSKSLGQLLSNMQDGMRSYFDELSSQKHFIGIQQVLVEEINNSDSKKYAILTTTDSFYRYKEAVKELISEILNENDEKKAVLLKEKNSLEAGTLLQKRNEYRLQYCEDTSRIVMQLEREFDMIERKYNKLIEQKTVFAKRALARIHYILQEGVSEEDNIIKLINLLDRSEKKDEILMEMRDRIRFSSQFKNITDNSFAGRRDRGDGAFSPVMLDEEIDAREQHMTDFVPKPLYTRNELQSFRRKNTVGGVFVATEETVQSVEDLEKLLFLWQEETEERLAEDTVSVDGEIRSEDGLTYSRLVIGQNQ

SEQ ID NO: 36498 - protein, 207 aa, Roseburia inulinivorans
MLQYMETVSQGEAENIRKTIQDLFRQTCILQVKCDPATLVQHDNLRYQVCLRHREFIADYLSVLDCELVHDPQEHIFRITGDGVMTERMSLMTTKLVILLKMIYRDKIMGEGLHATTTNLAEIREYGKNTNLITRRLTGQEWNDALVLMKTHQMIELPGAVANLEDFTPIYIYSTVNVFCSAMDINELVRTYQDEVEELLTEEEKEN

SEQ ID NO: 36499 - protein, 1126 aa, Roseburia inulinivorans
MSQAKKIFTRMCLNNWGGINHKVLEFNEYVNLFSGKSGSGKSTVMDAIQVILYGSFSPSFLNKAADDAKNRRSVLSYLRGEQKDGSANRGNCDFCSVIALEIKDTGTHITTCVGIAFEVRRNDSEIKKFSYFSHSGKMPEPGYITEEGFCYSNQDIKKLVNERAVSKDNRGKGDVNRIYASKEAYLGTLYDVILGYIDPNRFITMEKSAIALKMTNGTGQFIRDYMFPKSTSDTIGTISEQLDAYRQIKEKIEDMRKRIELLTDVKETGQELVTLQTDMIRTESFIRCIDIEDLWAKIEAAEEDKKRIEEEQAQLQQQADTLAEERGEVEQELIRVSADLKASDLGNKQQQLEELEERSRMLIDNSRQWRKIVQGLKQWEEDEVITDYISNPVLNLIETIENGNVTEENCQELHLKIESAKQDIENEFEDYSEQKRETGKELKEKQKLVDDMKNNRKSYSENLRSARSSLERKLSDLYGRTIKVQILADLFDVADEEWKNAVEGRMGRLKFSLITEPKFAHDAAAVFREMKQFEEVDLINSKAIADSEPRAMENSLYEAVETKEAYVDVCLKRYLGHIIKCHSVEELEQVKDGVTPDCYSYSNFIFRHLRKKDYTTNACIGEKVSKARLAEYEADVERLEKQYQELHYMTERLKAARDFESLKEEKEYYVNLSGAEKELGKVNKKKSTLEETIRTLQEGQYKELQQKEQSLKQQMRELQASIGENQGQMSEKIRRHENLSGANEQRRLQLEEMLQGYMPNEEIGQEVQEQLKKRSGQSLKNQKNAELAALSAGEQEKAETLRTARNRYIFAYPSSQFNGSEKSNEAYEKLLEEYQTDYEPAYEAEFEKQCDFIYKSLRENVIATIHGDIKAAKRHAYEINRLLRETNFSDSTYQIKIEPAKNENGQFFEMLMAEELDSKNLDNAGFDGQLSFGEDTFYQKYEQKIKLLTDKFMPPRDEDEQVRAKKRQEMEQYADYRNYLSFSMFEQVTDEQGNVIRENFVDDMAGRDSGGEGQNPKYVALLAGFAMLYMQQSNRDSKIKLVLLDEAFSKMDQERSAVCLKYARKMDLQLIVCVPDERLQSLIRNVDCVYGFRRHQNQISMMHIDKGDYLKLMEGEHGQGEPETVK

SEQ ID NO: 36500 - protein, 471 aa, Roseburia inulinivorans
MDDAQAQQTNPLFGIIPKEFFTPLASPNRLVYWDCLCRLFQAMSAQLSFGIEREILVDELQFYFEQNQAAEFEEDDINGMDSRKKANEMLRLLEKYGWLEVETDKSYVQRVNFYDYAVKVMKTLLEISDGRKVEYQGYIYTIYSLVRTNTDHPAVVLQQIRDNTDMLITGLKNLNSNIKHYIDELTKHKTVAEIMNALFNDYITNIVDKAYHRLLTSDNVSKFRPEIIERLEANGHSSRYIAKTSEELAAIREIPVGQAEELVYQTLHEIVEAFRNMDDILAEINRKNTQYQRAAVNRAKFLLAGTEDVRGQMKEILLYIGEQMEQSQLDLNGIYEIEYLDNLVRLFGSSFIDEKSFYSPIEGKKEFHPQELTEVMPDVELRQEKLRKMTEKMQRILSPERIERFVEEQLGDREKIYASELPMETMDDFIRLIYVRLYGSRKKMRYRIEKAEGANKISGEFDFPDFAIIKR

SEQ ID NO: 36501 - protein, 204 aa, Roseburia inulinivorans
MDLLNGMLQKDQDEFRRICNKLINVCFICRQNQATRSDFYFIEKYKEKFEELLGVLGYRLEMNDEYGVVQLTNALNTNRQNLKLYESVILLILRILFDEKKRELSVSDEVIVNLGDIQDKFLSLKIRDKMIDKTTMGNALRLFRRYQLIELLESDLKNEESRVLIYNSILMAVRVEDIKSVYEKVDSYRKGKLKDEEADQTETD

SEQ ID NO: 36502 - protein, 1082 aa, Roseburia inulinivorans
MKKLTRLKLINWHRFSDVTIDFGDSTLISGENGAGKSTLLDAIQFVVTCSTNHFNKAAHENGKRKLTGYIRCKTGRENHPYERTGEISAHVALEFYEESKEKYFVIGAVIDSATEGQETVVRYLMDNVMLEDEMFKIGNRPRTITEFRSFNNKNIKLFAKTNAEGKKMMKQRFGRIEDKFFQLIPKALAFKPIDDIKDFVYSYVLDEKEVNIDHLRENVRSYQELEKTLEGVKNRIEKLSEIECHHKAVVDCIQSDRMYEYFMAQSDLDLTKEQIGVLQDEIRRESYRLEQLNAKCSSMKKELENKEEVRTLLLAELNANSDFQTLEKQKKYLKELQEKEEIQYQEKKRLLESGKKAGQKVKRLLEIPDVDECMKQYDELLHRLKDTEDVVSAQELIDRAIAYKKHMSTKLQRKNLEIQSRLNEIAADLQETEQRISNLKQHRFSYPSAVQLLMSRVEQELLKIGRTAKPRILCEMLEITDETWRNAVEGYLNTQRFYVLVEPEHFDIALGIYEKLRREKKAYGVGLINSGKLEEYDIAPAGSLATVVESKSIYAKRYVNMVLGKVHMCKRVDELKQYPVSITPNCMRYQNHVASAIRPEIYTTPFIGKNAFKVQYEQALQKKEDLNRQKIECKDRMTHMEATLQWLEWDDDTDVKYRITIVSEMKRTGLEIEKCETEIRNLQQNTTMIEKQIRADEMRKECEDLKSHISKSDRESGACELKISSAKDRLVECEDECIHKNELITDIAQKAENEIVLWKKEYEKQTGDKTLEQFRQNFDRRRKANNTTKENADKKMTSAMYDYKTAFDFGAPATLEAYPEYAAVQERLVNSELLNYEEKVRKAKLSAEEEFREQFLSKLQENMKQAQGEFKELNKALKDITFSNERYEFLYLPSKSYGKYYDMIMDDFNVVQGESIFSGLFHENHKEVIDELFSKLALDQDNGIKALDEFTDYRTYMDYDIKITHEDGSYSLYSKVCEEKSGGETQTPFYVTVAASFVQLYNNNIGGEAIGLVMFDEAFNNMDDERIGAVLEFMNRLPLQIVIAAPPDKIQYIGPKMQETLLVLTDDKVSFVEEYRYASGRK

SEQ ID NO: 36503 - protein, 408 aa, Roseburia inulinivorans
MHPVENKILNYLLDKYENSKLSRGENQRAIHIAFPFNKKTMPKYFDESSLEIETIHAAAEQMEREGLVAIAWKNQKPGYIIEKLVLCEDHVEEAYERLGRKPKREAEARTKQILEQFYQKTQGEITRSFLSRMITRLESEQSVKEYLDIMDHRKTEQLIDTLDKVEQNRKECYIREFSIEHFHDSKVFETLIPKICKIFREENEELTGFENEEILAEYQIYKTPGYVYMKGNVQIYSAGKQAADISAFPEGIAVAVGSEEDVPDICPDQTIDKVFTIENLTSFYRFKQEHSLVIYLGGYHNRSRRNLLMQIYQKLPDAQYYHFGDLDAGGFYILEHLKRKTGIPFQMFQMDIETLKKYEDYAKPLTENDKKRLMQLEKMELPDEERKLITYMLQKGIKLEQECISESQ

SEQ ID NO: 36504 - protein, 478 aa, Alcanivorax dieselolei
MFFTEDRHQFFKPLTGKYREQVAECLRLLHERLYSAQADYGESLKREQVLDVFSEALERAPLLEGGDEDGGRFRNNREQAAWILNTLVEHGWLKRDKDEASFQSTYPFSRTGRLFTQTLAEVDGRGIRTRHRNTRNTLNALAAFLDRGEVYDLLDAHEHSERIIADFTDIIAELEERKRELVKEVEAQQLVQQASDQFFEFMEKRFQPDVAIRMSADSVEKHRDRIQNTIERIRRKPKAWKRNAELELRRLAPDLVINPEGSVLWQLLDSIETRMRSAAEIMLPALRRTLQGFTRRADIIIRQLSYLHSQQHSDIVGLCRELSELDDATAAKRLEAAGQAMAHLRPGLVDPAQNRLREQREKRQVQSRMTQLDAPDPATLRDLAIQQLLEKAFSIHGEGLRDYLRQALGASRRIDNRDLPVNNATDLLALSHVIELGSADHRASGFRLRIEPTDPIVGERYFARRDGFLLELEHDDDT

SEQ ID NO: 36505 - protein, 222 aa, Alcanivorax dieselolei
MTIRDALAEALEARGVSPDQFSELMIRLLDRGVLCRDESKKETELYDRYLQVADLVEDYLSVLRIRLLHERRFHSLRLFPPGAEVPGLADSEDGFNQGLRERLSQQEVAAILVLRAEYDKALREGQIDEHGQVMLPLEAFNLASKNLLGRPLPEALTERRALFRRLRQLRLIRTASDDGLEDAETWLTIRPDITSLVTDAVLSQLTGDGPDTKAPSPEELPS

SEQ ID NO: 36506 - protein, 1216 aa, Alcanivorax dieselolei
MFLKRSITVNWGNLPAEELEYGPINLFSGGNGSGKTTAADALQTLMTAAHDNLFNYNPGQDETTQRGRGGKQVRTLASYILGCDDGAFARPYDSDGYLAGVFHPTKGETAEPFTAVIGVRAHLDRAGVTAQARQNELLLMIVPGEMLSLSHFVHGEGAERQVVEITELPNALRRTFGKKNVETYEKKGAYLARLYGALRGRRDAVSQQEAKNAARTFARFMAYKPVDSIDQFVAGEVLEAQDMGDTLRRIRDMLRTIHGMEQEARQLRASVDYLEQARGLAGQYQETWLERTALAYGAAAQRYRRNQRQYLEKKEEQSQLRQQQQALREEAEQVEQRLEQAHDELVGLEARIQGIPALRDKQQLQAQLESLTQQLQQGARPLLEQDQQRSRNFTALRNLRDLLNRHSIELELPLFASKGWRATSKELLALEQRPIPDLNQMLARDWIDLSPLESGLEQARAEQQLHNYLAEQLHGQVDSASDRENLSLAQRLDRLVTQRAQALEKLDEQQKQIQHRISTLESKRVNYPRDVEEALQAIREQCPQADPRVLCDHVEVQDPEWQMAIEGYLGGARFGILVEPDYEAEAIRVVRRLAGRQRNKARVIQGEQARRDAEKAALPAESIFHVLRFSHRTAEHYLKASYGNVVRVGDAETLRRTRRGITSDGLGSGNYALFRCDLDDSQLVFGETARERNLYAQRNALMDVQESYRHASDDYQAVRQLQQQVLEFKPLDWVATVTHLLQCQRQLSDTEQALANLDLSDHEELERQQQDARQRHKQLSQRQGELKEENGKLGEQQHACERAINALADQSEQLQQDQEDAEEHLHACTRYWPDLDVLSRIEAMDRRLQAAQDDIDFSVEEQAQTKTLNHAVLTLERLVGDYNQQAQPADQILIETAEELHSAPFFGHVHHLHQQLDNLHNRLRNNVLLSKLEQLGGLRDTFNTTFVSDLCNQIQQAIKDGERTLKNLNKELEHHYFGADRERFSFDWEWVQEYKEYWDFFREVTEIPNLGDGASLFESTLSDKATAVRDRLLALLLDGDEQQALRELERISDYRRYRRYDILKHPEGKAPIRLSQYGTGSGGQLETPAYIIRAAAITSAFRFNEGDSHLRMVIVDEAFMHMDETRSRQVIRYLTETLGLQLIFIMPTSKAGPFLDLVSNQFVFSKVPSPVPVGELNTRVLVDRQQLNQERIAELWDQHRRVIRQQGALDFMEGIS

SEQ ID NO: 36507 - protein, 375 aa, Alcanivorax dieselolei
MSAPPWLEEEPWLRRLLSWFLDRLERPRTQAITRRVKKTTVPELFRFSEDTRYRWQLVERLAREYRVFSIHYDSRLDPFQERYENAQLRLDPSCEALLRDWLDRPRVDPRRQAWQQALSGHEAHFQDGGAALLDAQPALAGESPEDMVGHFVLAANWLDSDLTLRELSARCFRGDSKFLDGRQDLLARLFGERAQRLRPRPLLLTAWAPAGFERLLIVENQDSFLRLVEQAPVGHALLYSGGFRASAQRLTSPHTRFAFLPGSDGADFQARWLSNTLPAFFWGDLDFAGLGILAALRHSLPQLAAWRPGYEPMLLALEDGQGHGAEQAGKGRQNDPGNTGCPYADQQLLPALRDHQRFLDQEGFLPVLSSPRTPL

SEQ ID NO: 36508 - protein, 482 aa, Bacteroides vulgatus; identical to SEQ ID NO: 32546

SEQ ID NO: 36509 - protein, 194 aa, Bacteroides vulgatus; identical to SEQ ID NO: 30463

SEQ ID NO: 36510 - protein, 1118 aa, Bacteroides vulgatus
MAGFKLDYLEVWNWGTFDKKVYHMNLHGNNSLLTGANASGKSTLIDALLTLMVPLKRQRFYNQSSGVEKKGNRTEESYFFGNYGNQQQEGAASTTTLRLRDKGARSVLLASFCNVDKRVVTLFQVRYYTGEELKVLFGVARESLTIERDFSEFDLHGDWRKRLTKKYNTNETKRTIEFFDGPVAYGEKMITLFGMRSDKALTLFNQIVGVKVLDDLDSFIRTNMLEELPAEEKYQELKDNFQNLMEAKTNIDKVKEQIAQLEPINALTEELKEIDIRIDEMEQEKSVAAYWFAARTVDLCDKELVCCKSDLRKLEDRLKELKVQKGELEQEQMRLTVAIEKDEVGQQIHEIEKEINQRVRIRDNRKAKAEEYDKLAKLVKMEQSPDVEVFEINRATAKREKDALQVTIDRQLMEEKRQAQNRQDEISSNIEERMATIRYLQQHKNNISGRVAEIRDEILEAVGATTEEIPFIGELICVKDDERDWEYSIERILHNFALRLVVPEKYYKQVNEYVNGHNLRGRIVYQRYQGAETIREFEDRTLKADSLLRKLEYKPMCLYLDWLEDRLFAEFNYSCVDSLADFNHLQEKAVTKEGLIKARGGKHEKDDRPEIRGKEHYVLGWDNKEKIAVLQAEVRQLQQEEKMTAAKVRKLEEDIKNAQKKRETYLTLFSKYDKFDDIDWQSCVLVIQQKQEQKRQLEEANNRVKILQEQLAGVRKEIGLLDDENNEAIKKKTLSENRENKLKERRNESNSALAQIGVVDTDTFESQHTDLLNVALEDLNGKRDTLQHEIDLALQKQRETKSRKNSDLKNLIYRFKNPAEEITMKYHDWRSDVSRLPEAVEFMGEYQAYYQRLLDEDLPGFESRFNKYLQENIINKVSAFNVFFQNWCQSITKTIDQLNSYLIGIDFKDAPKTYIQLVATKRLNVDVKEFQNLLSSAIPNIHEMNSTIDGSKIHFEQHIEPLMSRLQVESWRKSVMDVRGWYTYKSEEFYQDDGQKRNTYEAMGQLSGGEKAQLTYTILGSAIAYQFGLTKSGLDSSFRFIAIDEAFRAQDEDKARYLISLCKQLHLQLLVVTPSDNIHIVENDISYVHYVERKGNCSVLYNMPISEFKAERERSMEV

SEQ ID NO: 36511 - protein, 370 aa, Bacteroides vulgatus
MRSVVAGSEFEPIVIPCDKKASASMDEYQRELTDIRSQSKEVKGFGYTIEWKTVKTKALGEQDLPERVLFESASDIERFLQKCGEVSQFRKDVAMLLDEFPQLRSWVERYPLKVVENASFWSDLLKVLRYFVANPCPRLYIRELPIEVHTKFIERNKGVLRELLDIVIVEHVCSDEKVFEKRFGLRYDESWVRIRVLEASIANEYFSGVDDLTMPQSQFCALSLPVQKVFVVENKINFLTFPKLAGSLLIWGHGFTIGILKSVPFMRHASLYYWGDIDAQGFEILSQFRSYFPQTQSLLMDRTTFDTYFEGDKGTPSNVSKPLHLTPAEAALYDHVKFHNLRLEQEKIPQKCINNIFNSLLKNGQVISEV

SEQ ID NO: 36512 - protein, 490 aa, Pedobacter sp. PACM 27299
MPMIDSARILEVLNSSASVNLLKLRNRDIVIEFLINTFINEEATVSSDHVHSLLADFLELKQVDNDEEYEIESFDSYEVKARKYVRKWTDSGFLTNYQDDQGEIFYEISAHSSKTIDWLLSLQKKEFVGTESRFKDIFNQLKDLVEFTNGDRDNRLAILEEKRLEIEHQIEQLKAGKKVKIYQDYEVIPRYNQLTQAAKELLSDFKEVEDNFKDITRQIYQKHAEGSLTKDHILEFTFDALDQIKDSQQGKSFYAFWSFLLDPVLQEEWTTLSNTLFERLDEREIVVGDFFLKGMKKYLHASGQKVYKANDKMAEKLGRIIRESEGSKIQVTHNVIQEIKTMLIEVGKQENRPDIGLVLESSLEIYPFFEQRLMLEQPEELLYNTRPKLADKDILSSRQLGKLFGQTKIDKEVLRKKIRTVLSGRARVSLFEIIEADGGIADGLPELFGYLSVAKEFKHTINPENTQRILFDAQGQKSINVPEVILLKNE

SEQ ID NO: 36513 - protein, 190 aa, Pedobacter sp. PACM 27299
MSNFEDKTKPYSKAIIRLLKGPVYSQSSVWEDIIHYQREIQHYLNVIGLELILKKEEGLAFFKQFENNEGHTMGLISRRQIGFETSIVLVILRQMLEDFDNNPTLIDGNEKFISHKEIREEIELFLPEKYNRVKFLKELDSYIRKVVELGYLKEQQETDAEPIYKIQRIIKEKVTLDVLKDFKLKLEEYV

SEQ ID NO: 36514 - protein, 1133 aa, Pedobacter sp. PACM 27299
MYSLFSTSSDKAGYRLQYMEVYNWGTFDGEIFKISPKGNNSLLTGANASGKSTFIDALLTLLVPVKGDRFYNQSSGVEKKGDRTEETYVYGHYGNIQNEGELKATTQKLRDHTAYSVLLASFENTEGQVITLFQVRWFSNGELKRSFGIAHVPLEIEKDFGQFDGKGIWKRRLDKIYNYAVSKKRVEFLDGPTKYAERLAYLFGMRSVNALSLFNQVVGVKVLEDLDEFIRMNMLEYQDAEAEFIQLKESFITLMDAKTNIEKAKEQIAQLIPINDMATQLAEIEAKLEVLQKDKDTAVFWFAGKGVELITAKLDKNKEVLQQLKADLIQLKEKDEAARKQERALSMSIENEEVWKQIEKIEEEIKQAEKLRNHRQHKLESYNRLVAALDLPQNPDAIVFADSRALTQEKRSEGDAQRELEEEKKRQIKNEIDRLQEEVDNLLAVVGSLQKNKNNISGREADIREDILAHVGATKDELPFIGELIRVREEDLEWEPAIEKVLHNFALRLIVPEKYYNEVNAYVNRTNLKGRITYQRYKGFTSMGSLKRRSYEGDLLVNKLEFKDGSVYAEWLEDAIAGQYNYSCAESLEEFNRYEEKALTKEGLINAVKGKHEKDDRPHIARRENFVLGWDNKDKINLLKQELSVFQEKQKENQQQLEFINQSIKKIDELKEKFYQLYSDYAVFEDLNWAVYATEIEEKKTVKESLEKTNDKVRELQKQLEIVKGQLDAIDKEKERSVKLKHDTEWMKQSLEKELTANKETLVLFEGHHPEVAEFEATHEHLLNIQHVNFKAVQDTFREQNMNLGNDLRSEKHKKENAARIKINNFKQPSEQLTQKFKDWRSDVNGLPDSTNLEFIAEYQKRLQQLKEDNLPKYEQKFEAYLQETIINKIGDFRMFFENWAESIKENVKVLNEALFEIDFKSTPKTYIQLVAPDRIYEDVKTFRALLNNAIPNGQEGEDLIEGKKLHFDRHIEPLIEKLEKEEWRKKVMDVRSWYSYKAEEFYKETGQKYKTYENMGQLSGGEKAQLTYTILGSAIAYQFGLTKEGLQNNSFRFIAIDEAFKAQDEDKARYLITLCRQLHLQLLVVTPSDNIHIVENDISFVHFVERKDERHSWLYDMPIEQFKAERAHFVKD

SEQ ID NO: 36515 - protein, 237 aa, Xylella fastidiosa; identical to SEQ ID NO: 33439

SEQ ID NO: 36516 - protein, 1128 aa, Xylella fastidiosa
MRETSTLGLNFVANDKRVGFRLQHLEVVNWGTFNTRVWCYTLGGRSGLLTGDIGSGKSTLIDAITTLLVPAQRVAYNKAAGADARERSLRSYVLGYYKSERNDATGTAKPVALRGTSDYSVILGVFHNVGYDKVITLAQVFWLKDSQSQPARLFVVAERALGIATDFNNLGGDIKTLRKKLRGAGCELFDSFPPYGAWFRRRFGIQHEQALELFHQTVSMKSVGNLTDFVCSHMLEPCDMGSRIEALICHFDDLDRAYQAVLTAKQQVKLLAPLVDDGKKHQSQLANIQTLEAGRDTLRPYFAQLKGELLKHRLDALAAEAAQLTVEIQRLEEQRKAVDSEVTQLQQALRDNGGDRLEALAAEIEQLEQTKAQRQKKSDRYQTLLTKIDETAPADAIGFSTQQQRFAQHTEELNAAIATLHNDKSEKDFALRNARKDHTTLLAEINSLQQRQSNISAAQIGIRHDLCMALSIDAEALPFAGELIQVREDARDWEGAAERLLHSFGLTLLVPDAYYKAVAEWVNREQLQRRLVYFHMRPRNTTQDAALHAQSLVHKLIIKPESPHYTWLRQELQRRCNVVCCDTMEQFHREVRAITQAGQIKDPSGRHEKDDRHRIDDRSRYVLGWSEDSITALGQDLGTIQRECQKQQERLDALNKLGEYPDFADIDWMSLVRQMAGRKEEQEQLQATSNILQILQQQLTEAKTQVNVLQGKWENALSEQGEVKSKQKTAQQMWNQARSAWDDAPLSQAQIALLAGWRQQALGEHVLSVESCDNHEQQVRQWLQKRIDAENAHLRQLNDRITGAMHRFKDQFKAETVEMDADLAALPEYERMLNGLQKDDLPRFEARFKALLNVNTINEIASFNAQLNRERETITERIKDINQSLYGIDYNQDHYINQSLHGIDYKRGRYITLLAQPSPDAEIRDFQQDLRACTEGTLTGSDDEQYSDAKFLQVKHIIDRFRGREGLSDADRRWTAKVTDVRNWFVFSASERWRADESEYEHYADSGGKSGGQKEKLAYTVLAASLAYQFGLKWDEVRSESFRFVIIDEAFGRGSDESAEYGLRLFQKLNLQLLIVTPLQKIHIIEPFVSSVGFVHNKGGCDSQLRCLSIEEYQAEKTNGSGPRGDAR

SEQ ID NO: 36517 - protein, 405 aa, Xylella fastidiosa
MSWATPVSLRAQVERLWKRGDLLRALVTDTHAMTWPHHLKLRAPNAADLSERFQAVRDWVQAIVGTPQIRIQWREWKHRVQGTQQVPAAVYLDTLQDALAFIGKTHEALQFEAVWQQTAAAQPVLLAWLLRRPTQALEVADRWERLLAVVAWLQAHPRPGVYLRQVDVHGVDSKFIETHKSVLTALLDLALPPESIETAASGVLQFTRRFGFLDKPVPIRFRLLDAAQPSLPGCTGLPDISLDAAHFAALTLPITRVFIIENEISFLTFPKVAGAIVIFGAGYGWEPLARAAWLHACQLHYWGDMDTHGFVILNRLRGYFGHVTSVLMDQDTLLAHRLYWDKESEPTRQALEHLTTEEAAVYDDLRYDRHQPRLRLEQERIGFRWVCDRLACLLSTAHVAPPQDA

SEQ ID NO: 36518 - protein, 450 aa, Pseudomonas aeruginosa; identical to SEQ ID NO: 32505

SEQ ID NO: 36519 - protein, 220 aa, Pseudomonas aeruginosa; identical to SEQ ID NO: 33036

SEQ ID NO: 36520 - protein, 979 aa, Pseudomonas aeruginosa; identical to SEQ ID NO: 33037

SEQ ID NO: 36521 - protein, 393 aa, Pseudomonas aeruginosa; identical to SEQ ID NO: 32927

SEQ ID NO: 36522 - protein, 577 aa, Frigoribacterium sp. Leaf8
MNHPSGHDDALSRDDVRAAYEDDPTWALLRGYNARWMLPLFSRHLEHAEGPVSADWFHRQVADALEQNTAEQAASEQAALEQAASEQAAPEHPTSERATTERDPEEARPASPTPVATPAPAEQKTTPAEYCRSWVESRWLVRTRASGPDARAEYRLSPHALKALRLVRDLVERDNAVSEARLGSIAHAVGQLAGLADPSRGSQLTRLDEQIAELERRKAEIERHGTEPTAPDVLRRQVREVVRLTASLPEDFRQLGAMVEQRHREVARRASSEHVGKGALVDQYLRDNDLLEQTPEGRAYRGFAQMLSSRGIDVMRADIEKVLAQPDAAAQLTERQRTQLESLISSLLAEEQSVQETYGRWTSSLRRFLSRSGSDQQQRLLTLADRALHAGGVWAERRPGHAMLPVEHGDGLGLGALDVRDVSQVQLHTDRARPTVDVQVTIGDATLPEADRAALRLTSGTSTAAVSATIDRLLVDRDEVTSGDVYQATEPGFRRLALVLSMLDLALERGVVGDDTETVELVGDPADPTTSGGAGRQVTLPRLVFRRGPAGPPGAEPGVEPDAPDPTTGTTSTKDLA

SEQ ID NO: 36523 - protein, 334 aa, Frigoribacterium sp. Leaf8
MSPAAPWDETGVDEATRASSAEATATSPDESARASRDAFDDGDADDAAAGGVPDALPLAGRKALVTLLTHRFVSRARQQEAWAGLLAHEPEIRARLEELFLVLVVDHDHEVAFKRQGGEDDVPVLLRREKPLSRDASLLMVFARREHAFTDGQDEAVVISKDAVAEFLGRYHDDSGSDEVRARRRVDAAIAALVARDLLTAEPDDPELFVVSPAIVPLMTADRLAHLERVYLEAAGVEGDPTDGDEVGIPVDADAAEAEVDADIDADADADADEPEVEVEPDPADDDPADTVEDTPDAEPDPTAVPLDLDLDLEPAPAHDAGTGTDTDTEAPQA

SEQ ID NO: 36524 - protein, 1151 aa, Frigoribacterium sp. Leaf8
MSIADTPPDLGMFHSGQYRIEQVQLLNWGSYAGLHRMPVGRGGIAILGPTGRGKSTVLDAMAAVIMPNPQEFNRAARDDSRQRSERTVYSYARGKTDEVRDAASDRTTTRFLRPLGQAFPSGAAITWSTELGQTVTAVRVAWIGEDTASQDDVTQASVYLLVQGRFDLSRLSEVTREGTSQNPLTRGSLARLLDPAHDLATSSQPELRVRLCGQLGIGGSDESQLKALTLLRRAQASKGVFSIDDLFKQFVLVQPQALSRWETTLATYREASALYDVFETTRKKLDVLEAVPTLADRYELAGRDGSAKRRLLVDDDGPSRLRIWLAERVGSWVSGEVDRVTTDKREQGERRRRAQADEQLAFRSREQALARISELGGDPTQSLREHVAAAEAELAAVERTRGRLAAALDGTGASLPRDDEQLAALGQRADRLSADDAAARAATADARSDLAARIGETKRSLAALEKQKRSFEQRRSNVPDDAIERRRRIAEGAGVPVSDLPYAGELFEVAPEHAGWAVAIERVLGDLATHLLVDRAHFDAVRRWVDENDVRGRVTLVPATTGAEPTLTPVDRTVPVMVRLDPASPFRGWLHDELVADRSVLCVEGPDDLGGPRPTGTRGAVTRRGLRTGSRDRVIKDDRSTRSWIGLDNAARIAELGDEIVDLEAVLARVRAEYDAIEAEAVERRRVADAVARAKEFTWDELDTAPAQARLDDLRAQLDRIAVERPELATLQAEAAQHDDDRSAATRRLAEIDQVLAQLDEKHATLVDIEDEFADAADADPLTDDERALLAPLPFAAPREATDVVRLYRDAASQLRAQVDAHDRDRANAESTLVVVFERYLELDRTAGIDATIESLPAVRAIHRQLVEDDLPRARQRWLERAGSDVGDSLRALLVQIEEDGHVIRRGVRPISQALRSIEFRQGSTLDIEPRPVSNGDLLEFKRTLREHTGGAGSEGTSEARSADGRAPEARDASEVERRFLRLRRDLAHLEEKSKVGDAWRRRVLDAREHYQFRAIETRADGTQIVHEGVAGKSGGEGQELIAFVLGAALRFRLGDGTDRVPTYAPIVLDEGFVKADAEYTGRALAALTSLGFQLVVGAPRDKVNAFEQHVESVAYISSDPSNPELSRIYPLTIRQAIQVEQHGLDPAALA

SEQ ID NO: 36525 - protein, 501 aa, Microbacterium sp. Leaf203
MSSTRTEAAYLRSVTAFKNPTLDLLHGRFAPFVVAVLSIVFTPDRPAVAVADAHVEVAEAIDELRAAGIDTDDDRRIPAGTAREICRGWVRVGWLGLQIEDDVEVYRLSAHAVGALEIAGRAGGGRARVSRSRVRTLLDAVDRLARDAESDPARRREALLEERAALDAEIAALDGGVVEPLDDDHLLEEAENVIHLARELPADFSRVAESIAAMQRDVVAELRRDVRPTGDVLREYLERGRQVMQATPEGRAFQGALRLIGDPENIDDLTDQLHAVLTQPFSRLMTPEQRGELDAIARRVEAGVQEVLTAQRRASHVITAQVRTHDPIRDRQVDDLLRSVMAGLHRWSQTRSPGRVEPVRTLPLADIGHLRRSLGDVRPPGAPAPLASGDSDVEFVDADTRAWGGPHYAELEAYVATLPGGFDLATAFAGADAETRRPVDLVGLLEIVHREGLVETDDVSIVEAVRPDGTTRRFAFGAVIAAPSRVSDAEPPTATETDADD

SEQ ID NO: 36526 - protein, 242 aa, Microbacterium sp. Leaf203
MTDIDPSAPDTDTPAFIAPVAMENDPDALFAGDRGTLDADVRRVLVRILQRRFLVADNSPAEWKLLLEHQQMIESRLNDLFVRLVVDHARGVAYKEQVRSDDVDVPILLKDEAYSRAETLVLVYLRTVFQRETTAGTASARVDVEEVEQTVLTYFSETDGTRASQQRAVRTAIARLDREGIIEEESEGRYRIGPLIEIVLSAEVLRDLQRWLEEQTRDADTPAPLIDDAETVASGILEEERA

SEQ ID NO: 36527 - protein, 1115 aa, Microbacterium sp. Leaf203
MTMLETLFGLIPAASRGQQWVAEDLQLINWGGYDGTHRVRFAPTATLLCGGSGSGKSTLMDAYVALMMPHTTPFNGASNGAVVGRPRGQEQRNILSYGRGKLDESRTDEGTKVRVLRGDGVDTWTAIGMTWADHDGARFTAVRAWYFPAAARTLDDAVKVRATVHGAFDLRQLERAAQSHLSDSAVRAAGLDTLATDREFSARLHAVLGIGAAGAGSKAMSLLARIQAGQQITTVDDLYKRMVLEEPETLAVADAVVTHFDGLESTRTRMLEARQQVRALQPIRGMKTRIDDAAERLRLIDALGRFGDPESRASLWRAQRRVDLLEAVEAELRDRTHATDALVRERQALADAAEAEREALGDVLRAAGGDRLDAAQRELRTLERRLAGMQRDRERFEAALAVLSVEVATEKQFTALVAEARRTLADTGAKSAVRDAFVAASSRHTDLRQQLAALEVEHRRTQTRDDNIPPRLHEAREALAEAAGLTAAELPFVAELVDVRTEFEPWRGAFTLALGGFATTLLVDAAHLSAFRAAIDSVRLSERLRFEGVPTDLPERGALDPATLPGRLEFRSSHFTGWLQDRLEQQFAFVCVDAASELSQHRMALTISGQTSQGARGAHGGSARQSILGFSSRVRLTELGEQIVTVRRDLTAAKAAVDEAAAALDAFDDRRGALEKIADLSWDQVDVASVERDLDRWNETVVEVTAGNPRIAELQEQISGAKARVARLREEIGGAKTEQQTLAARWAEITDDVDAAQILLERAEDREMTLTPDEVAYLDGLFVAPSGDDVSPSQRLARFDAALESASKRLLEEQRATQETWSDQRESLRRTMTAFTDRWPSPNLLADPDEALGDFERILSELEASGLHELEAEWRDSLLRLSGNDLTSLDSALTRALREIRERIAPINDIMQDLPFYDDDHRLQIVPRESQSEVRKRFRRELRDVRAAIDAASTDEEREGVYGRMARLINRIRPTAPDFADLVDVRNHVRVSAERFRADTGEHVALYDHIGEKSGGESQELIAFIVGAALRYQLGDAGSERPRYAPVFLDEALIKADAHFTKRAIGAWRGLGFQLVIGAPNDKYSAIEPHVDVEYDILKDTRGRSWAKAKVGVPG

SEQ ID NO: 36528 - protein, 515 aa, Plantibacter sp. Leaf1
MGEIDGEFDRVRNALERPAIRLLSRPTAPAVVAIFRTTFGRDVQFVAADRFHLQVEEYLAELGARGARIPAGGDERGGGRTLCREWVHDQWLVRTSTDDGEEQYSLTSHALEAVSLVDGLAHDRALISESRLTMILDSVRRWALQADPDREEHLRRIDAQLAELQAERERVAAGGTVVAASDDRMHDGYANIADLIRQLPSDFRRVEESVIAMHRRIVEDFRNDTRPIGEILDDYLRRTDELMTATAEGRAFEGAFELLRNDELLQDLKRDLSTILDHPFSSRLGPAELRGFRGAVGIIRQGIDDVLAQRRRLTATLRDHIVHHDVVQDRELDTTLRALNQRLGIWMRTAGPRATVDVPLLPEAIDVEHLRERFYDPDVEAAPPPITTAPERTDVASMSLDTLRSQGGPLLDELRAGLLAAATSGASDAHTAFTGLDPELRRPVELFGLVHLMTQLGAYDEAGPRRRYETVRPDGTTAAFDLPAFPLGETGITGLTRATTTSTTATRDRASRGTE

SEQ ID NO: 36529 - protein, 282 aa, Plantibacter sp. Leaf1
MTIEPEPTHRESTEAATDGALSAAPVATPDRASDAESFALFEGDEGRLDAAQRRALVALLKHRYVSPALQPAEWRTILESEALLGSRLNELFLELQVDRSAEVAFKRQAGSESGRRPFPTLLHDTSYSREETILLVYLRTRLRTELANGARAAIVEHDELLGFVASFRPEHATDRARDDGRVERAIEKLLTARVLLRTKDARRHRIASVVETLLPLERLQELLEWLETQTPAADAPQPEQEPDTPSGPGAAATDGDDDAEPDDTEPDDVASDTASRPGEDGR

SEQ ID NO: 36530 - protein, 1128 aa, Plantibacter sp. Leaf1
MSRPTDTDTLLDLVEQWRIERMQLINWGGFDGYRSVDFASRATLISGASGTGKSSLMDAYLAVMMPSDVPFNGASNDAAVGRARNPDQRNLLTYLRGKVDSARDPQTGAMRDINLRGSEQLTWGAVAVTFVNDDDRRFTVVRAYLVPRRALRTGDLSMTMATVDGPFDLTELEAFVPKRFDAGELQGRIPGFVVRDTYAELSYTLHTRLGIGAGGDGGRAMRLLARIQAGQHLPTVDGLYKSMVLERPSTYEAADRALSHFEALDEAYLAMETESRKARVLERLGELRRDYEDGHRAAAELERLGFAEDGETPFAVWRSRAHEALLDEAVSRNRREKLAAGATLEAARARATAAGVRVRELERQVSEQGGSALRRAEERREAAEAAHAEAVRTRALFDERTEPLDEPLHDEASFVAALSRSEEFLDDDDAALEAIEAERAELHREAFPLEERNTELRLELQSLRGRDGAVPDRLHRARLALAEAAGLDPEQLPFVAELIDVAPTHAAWRPAIEVTLHGLARTVLVDEEHLDAFARAIDAVRIPVRLQFEGVPLGATTAPAPGDPAFVSGRITYKASPFSAWVEQRVTSDRIDARCVDSPSQLSGGGRRVTANGQLRDGRRGSHGDPGGAPILGFTNEARIASIESEMAELRGRLELIAGRQAAVQRRLAGREAERAAHRYRLDSEWSRIDVDGAAARRDAAAADLERLLDASDVLQELQGSVTAAQRELDAANAERFPAEDRVRRLDEEHGSLVDQQDAATTVIDRFERSGVDEVSTDDVERIEAALAAVGGVPSLGGFADAMKRLRTRLGDELSAAVRLAEQAAIAQVHVFEHYQSIWHDPNLGTTLESYGDYRAILDGILGTGLPERRQEWRRRLSQWSGEDLVPLSSAFDSAVEEIEDRLVPVNDILRDLPFGPAHDRLKIVLRRVHREEAAAFRRELRALSGEVTAELDDDALEGRFQRLRRFMESMRDTAATSTSASTRDQVLDVRRHVEITAVRYDTSGRDVSVYSSLGDKSGGETQELVAFIVGAALRYQLGDEDRPRPRFAPVLLDEGFIKADSEFAGRAVVAWLRLGFQLVIGAPLDKVTALEPYMDRLLSIRKDPETRHAWVAEIERAEPVEPLERIG

SEQ ID NO: 36531 - protein, 556 aa, Frigoribacterium sp. Leaf44
MNHPSGHDDALSRDDVRAAYEDDPTWALLRGYNARWMLPLFSRHLEHAEGPVSADWFHRQVADALEQNAAEQAASERDPEEARPASPTPVATPAPTEQKTTPAEYCRSWVESRWLVRTRASGPDARAEYRLSPHALKALRLVRDLVERDNAVSEARLGSIAHAVGQLAGLADPSRESQLARLDEQIAELERRKAEIERHGTEPTAPDVLRRQVREVVRLTASLPEDFRQLGAMVEQRHREVARRASSEHVGKGALVDQYLRDNDLLEQTPEGRAYRGFAQMLSSRGIDVMRADIEKVLAQPDAAAQLTERQRTQLESLISSLLAEEQSVQETYGRWTSSLRRFLSRSGSDQQQRLLTLADRALHAGGVWAERRPGHAMLPVEHGDGLDLGALDVRDVSQVQLHTDRARPTVDVQVTIGDATLPEADRAALRLTSGTSTAAVSATIDRLLADHDEVTSVDVYRATEPEFRRLALVLSMLDLALERGVVGDDTETVELVGDPTGPGASSDAGPGGAGRQVTLPRLVFRRDPAGPPDAAPAAPAEPALTTSTTSTKDLA

SEQ ID NO: 36532 - protein, 326 aa, Frigoribacterium sp. Leaf44
MSPAAPSDETGADEATCASFAEAIAPSGDESARASRDAFDDGDADDGATGVPDALPLAGRKALVTLLTHRFVSRARQQEAWAGLLAHEPEIRARLEELFLVLVVDHDHEVAFKRQGGEDDVPVLLRREKPLSRDASLLMVFARREHAFTDGLDEAVVISKDAVAEFLGRYHDDSGSDEVRARRRVDAAIAALVARDLLTAEPDDPELFVVSPAIVPLMTADRLAHLERVYLEAAGVEGDETGEDDDAVDTTGDPSTEADPADDVDVDVVTVADPEVEPHLVDDPAAPADDAPEPDPEPDPTAVPLDLDLEPPLDTDTDTDPEAPQA

SEQ ID NO: 36533 - protein, 1149 aa, Frigoribacterium sp. Leaf44
MSIADTPPDLGMFHSGQYRIEQVQLLNWGSYAGLHRMPVGRGGIAILGPTGRGKSTVLDAMAAVIMPNPQEFNRAARDDSRQRSERTVYSYARGKTDEVRDAASDRTTTRFLRPLGQAFPSGAAITWSTELGQTVTAVRVAWIGEDTASQDDVTQASVYLLAQGRFDLSRLSEVTREGTSQNPLTRGSLARLLDPTTDLATSSQPELRVRLCGQLGIGGSDESQLKALTLLRRAQASKGVFSIDDLFKQFVLVQPQALSRWETTLATYREASALYDVFETTRKKLDVLESVPTLADRYELAGRDGTAKRRLLADADGPSRLRVWLAERVGSWVSGEVDRVTTEKREQGERRRRAQADEQLAFRSREQALARISELGGDPTQSLREHVAAAEAELAAVERTRGRLAAALESTGESLPRNDEQLAALGQRADRLAADDAAARAATADTRSDLAARIGETKRALAALEKQKRSFEQRRSNVPDDAIERRRRIAEGAGVPVSSLPYAGELFEVAPEHTGWAVAIERVLGDLATHLLVDRSHFDAVRRWVNENDVRGRVTLVPATAGAEPKLTPVDHTVPAMVRLDPASPFRGWLHDELVGDRSVLCVEGPDDLDDPRPTGTRGAVTRRGLRTGSRDRVIKDDRTTRSWIGLDNAARIAELGDEIVDLEAVLARVRGEYDAIEAEAADRRRVADAVARSKEFTWDELDTAPAQTRLDDLRAQLDRIAVERPELATLQAEATQHDDDRSVATRRLAEIDQVLAQLDEKHATLVDIEDEFADAADAEPLTDDERALLAPLPFAAPREATDVARLHRDAASQLRAQVDAHDRDRANAESTLVVVFERYLELDRTAGIDATIESLPSVRAIHRQLVEDDLPHAKQRWLEKAGSDVGDSLRALLVQIEEDGHVIRRGVRPISQALRSIEFRQGSTLDIEPRPVSNGDLLEFKRTLREHTGGAGGASEARASDGRAPEARDASEVERRFLRLRRDLAHLEEKSKVGDAWRRRVLDAREHYQFRAIETRADGTQIVHEGVAGKSGGEGQELIAFVLGAALRFRLGDGTDRVPTYAPIVLDEGFVKADAEYTGRALAALTSLGFQLVVGAPRDKVNAFEQHVESVAYISSDPSNPELSRIYPLTIRQAIEVEQHGLDPAALG

SEQ ID NO: 36534 - protein, 502 aa, Stenotrophomonas sp. Leaf70
MPQSPPHGRKLQDPDVLTTTTPTTTPPLFTVVPAGIFGPLASANRQNYWSLLCRMFDEFFGPDAPVPPSHGFPRREITAAIERYLLTDDPWEDEDGQAPDAPLNVRANAIHDRFRAAGWLRQERIGAREMVTMPPMVAQLLSTLVEFSEHGPTFVSAKMRSVELQLQQVAEGRMDGGILDEAADQARRLLVSLASMSLQVRDLMPELSKAETTAQFARQWFERYVGQLFIGDYAELHRADHPMARRSSILAMVQQLESGAPRETLVAWYREHVTGGDEARAQQRLSRSLGRLRELERIDEYLTRLDEDIRQANRRALAFLDYRLCAPDRLDVLLRRACRGVLSAPEEALRLPVAPGPLMDETRLRPPHRRPVPIPRSANATTPPTPEQLARLSLLRRMKRARLVNAEDMARYVGRHLQQGAAIDSARLDIASIEDLRAYQTLLTLALRGNRIGGLRREDPLGRLLRGFRVELLDAGSGENNDYLRGPRFRILRVGATLPETA

SEQ ID NO: 36535 - protein, 208 aa, Stenotrophomonas sp. Leaf70
MKRSWNTLSQMSNGTYAVQDFERAAYRLATEQVLYATDARSRVAYHLVEDHYPDFVSALEPLGIRLERNAHYRYVVALPAHGEGAPVTLDETLALLVLRQRYDEAMRQGLIEDHGEVVVELPELQESWQALTGRAMPDVGALRALARTLKRWGVSRLVESEGDDPQPFHLRVRPAIVEIVGEQWLQRLDQHNRDEAGDVDAEDDDAAA

SEQ ID NO: 36536 - protein, 1143 aa, Stenotrophomonas sp. Leaf70
MQQLERIHLVQFFLFEAQSLQLDATSAIIAPNGAGKSALLDALQIVLLGGDRSRIRFNAQAGGSHRARTIRDYCLGVFRSGDEGRKRRTATTYISLVFRDTETGVPLTAGIALGASVDEPEHRTHGLYLLPGVALELDEHLERVKGKELPLAWNTFREHIARRCKDVGETPQLHPNAERFLRDLLLRLRASPSASPDLNAYRKAFLNALNLQRVEDVDLFVRTLVAEDRPTDIARFRALLDSFRQIKEKIEQVRQRIDAAEGAERQYEKIAGQATRAASARALAAEYARDLYSEQLDQAEGALADAQSALADTRRGLADTRVERDTLREEQARANARLQGSAGYGEQAQLDELSGRDRERLAQLKKDLTREVAFVRDQFRQLDALALDDVDGTALAAARAEWDDWHAGLSALAAEDALPWTPDDLFARARQALRAAAPLRERIDRHARQLHAAHDKARDALETARQNQKRLAAGQAELHPDTVRLMSYLREANIDARPVCDLVRVTDPTWQHAIEGYLRSNVEALLIPDKDEERAVKLYRGLSGGRSVYGVKLALSSQARRSRGAEEPEAGSVAALLEGVNADALAFLRRQLGELRCVETESELVRSRQGLTRDGLLSRGGSIERLRLPAAGDLRIGASDNRARLRVLHEEIEKAEQELRQIEPRLRRADDCQRGLARLADADAVAQALHERVLEHRQVAERYRSAQESRLASLDPDLLRLSEQLRELNAQLADCEKRADALVGQEAVAAANLERTHGLLDGLRQQEDLVARRAVEAFADPDVDPNRVERQREELDEKYPSLEERARRCEERARDSDAQLARLLPEAWSGLAQYARDHGLELDFDASAWRPARGLLQRELAQLRDTELVQYEEEARQAYATAVDTFRTGVASTLYDNFTRLKTQIATLNRTLRASPAFSNNERYQFHYEVVPEFRELHRFIQRAADIGGEDTLFESAGQVPEAFRALVEDKAATHVANSPLDDYRRFFRFEVQIRQEDRVIGSLSERMRSGSGGEHRAPLYVIAGAALAAAYGKSEAHPGGLGLILLDEFGDKIDAQNARAITGYLRSLGLQLMLAAPDTAQGTLSGVLDSYIELFRDGDLLQAERIEVTEAARTLLLSDQFDLHPELLAAETKRIEREQATA

SEQ ID NO: 36537 - protein, 450 aa, Pseudomonas sp. Leaf83
MEDALQALSEMLAAYASQELYEIDPDATHLQAGRELREWIKRRLVVEREGRIYATDALESAIQFVDSLDSRIMTSTASRLSVVQREIENLETGLNPSPTGRIASLRRRIQDLEHELAQVEAGHVVVLDEAQAIEGIREVYNLATSLRADFRRVEDSWREADRALRHSIISEQSHRGEIVDRLLDGQDALLNTPEGRVFESFQQQLRQSAELETMRERLRTILRHPAVPKALNRPQQRELRWLALRLVRESQAVLQARARSERDVRGFMKTGLAAEHHRVGQLLNDFFNLALSVDWQRQSERRKPACLPPVGVAITGIPAIERLRFKTLDDDDTGELDLSLKPAGLEQIDDDFWDAFDGLDREALIQDTLAVLAEQGRPVSLGELASLLPPAHDLETFALWLAMAREAGIEVLKEERQLVELVDEDEQRWRFNLPYVGLDHEALKDIDWEL

SEQ ID NO: 36538 - protein, 220 aa, Pseudomonas sp. Leaf83
MDDEQPLMSAAVQVDECRTPQRVREAVQEMLKYGLLEESHKPNLYRSALSNIEAVDRILEPLDLAMGVDEVRGLVFVTVRQGEVAEQDEWSHPLVRRQRLNLEQSLLIAILRQHFIAYEQESGTGASQALVAVDELIPQLQVYLGELGSEAKERNRIITLLDQLKGHGLVSALDAHDRVIIRPIITHLANPENLQALVAWLREQVEGAATPVAGAEEDEA

SEQ ID NO: 36539 - protein, 979 aa, Pseudomonas sp. Leaf83
MGAVLWFEGTSSSASDLKKLWLLSESPEQTLEHWLSQHHAGGMRALRQMEKDGTGIWPYPSKKAFLARLRDYFEVGENAFTLLNRAAGLKQLNSIDEIFRELVLDDRSAFERAAEVASSFDDLTDIHRELETARKQQRSLQPVADGWERYRALQEQLQDKQALEGILPVWFAEQGYRLWLAETNRLEKAQKQAELNQEQCRGQFDIQKGVVDQHRQRYLRVGGAEIDLLRARIADWVREFDKRRLKAEQYQRLAKGLGLVEELSAAALEENQQQITARLEVLAEQITEARQKAFDTGIVQKELDGRLQSLQQERAEVERRPGSNLPGHFHAFRGELAQMLGVDESALPFVAELVQVKPEELAWRGAIERAIGSHRLRILVPQGASEAALRWVNQRHNRLHVRLLEVKEPSSRPVFFDDGYTRKLTFKEHPYREAVKALLADNDRHCVESTEQLRYTPHAMTAQGLMSGKERFFDKQDQKRLDEDWLTGFDNLDRLAFLTEQIREVNEQLAPAKLALDAAQGDVRKLEDQASLLQRVEELQFEEIDLPGAERQLESLRAQLDTLTRPDSDLALIKAELDEAEALLDSLDRQRQQLIEQCGQLKIQFEQAASATRKAYRGAEKGLSDTQRELALAHFPTLSADDLGDIVELERKHTHELQGQLKTLGEKLGDQKSELTKRMSDALKVDTGALAEVGRELVDVPKYLERLRVLTEEALPEKLKRFLEYLNRSSDDGVTQLLSYIDHEVSMIEERLDDLNSTMQRVDFQPGRYLRLVAKKVIHESLRTLQQAQRQLNSARFIDDEGESHYKALQALVGLLKDACEHSRNQGAKALLDPRFRLEFAVSVIDRESRSVIETRTGSQGGSGGEKEIIASYVLTASLSYALCPDGSSRPLFGTIVLDEAFSRSSHAVAGRIIAALREFGLHAVFITPNKEMRLLRHHTRSAVVVHRRGMESSLVSLSWEALDEHHQQRIKAMHEVAH

SEQ ID NO: 36540 - protein, 385 aa, Pseudomonas sp. Leaf83
MKSPTDISRSLARQWQRSSVRLERLLNPASWPQSLNIGKPSARLFTDNIQAVLRHVENWRSVNVGKVDWEPVSYRAGLSPISLPMRWHLRSPSEWIAASDDPRVSQEYAQLEYLVEQVDSAFHALLVVQRSLWLTKPSEEVVATARLATRLSPGCARGRPLRLLAEHGVDTKFFERNASLLTWLLDERFGGAASEQGLTTFLDAFEESSHWVLVVPLQPELLPFKRLRLTTAELAETPLPASRLLVVENEQCIHLLPENLPDTLAVLGSGLDLQWLASAHLAGKQIAYWGDMDTWGLLMLARARLHQPAVEALLMEQELFEQHSPVSAVVEPTKALDSAPPGLLADEADFYRYLLVQERGRLEQEYLPKEQVERAIEQWARKIPV

SEQ ID NO: 36541 - protein, 470 aa, Methylobacterium sp. Leaf85
MLFTRLPDDLFKPLASPSRAFNAALLLHLHARVFAETTEPLRKSELLASIGDFSADWSQGEIADDEATPVDPVERRSAVYRRLLDAGWLVERRERYVPVVDFDPDARLVIEELARLDRGETRSYGGAVLEVLGSLESAVANPAERSEALVNAAKASRAFLGHLRSLAGSMRKIEERILREEDQGVAFRLYFEEFVARHLVSDYRTLHTRLNPFRFRSGIVREAGRALRDDLTLRALAEAGLREGRAHDLSLAERAVRADLAEILSIFEGLDRHLDAVADIVARLERRIAAALRYTDHRDSDRIERTAAALRAVGAAEWSETGPFAEVSLLRPPIGEPHLYTPRMRRAAILSEPLPEIHLDPAIEAFILAKDAFRQRVMVTPERVIAFVERKLGASPAVRGSEIVVADVDEFVVFQRLREIDVLFDGILTTRYRLSRVAGRVSNGWLDCPDFLVERRNPAFRPASVRPRGA

SEQ ID NO: 36542 - protein, 211 aa, Methylobacterium sp. Leaf85
MIEAFRAIVDGDEPPPPGTRAPSGEDLTRALQVLLKSQCIYSDTPGIGRSYELARHYAPFFKGYFACLGYGVEVSPRDQMVFLRVPPDGVRHDGQAERLRKDETLVLLALRLAYEEGLRAHRVTTDGVVECTTDDIAESIRTVARSEAPEEARLTEILRLFARKGALRLGERDKAEKITPLMLLPGIAVLSPDAWMEQVRAWAAARLDDDG

SEQ ID NO: 36543 - protein, 1151 aa, Methylobacterium sp. Leaf85
MYRLTDIVLSNWYLIRREQIRIRGAAALVGPTGAGKSTIFDAVGTVLAGNNASRLALNASASGRSARTVRDYCLGWISDPAEGGRPTREACETLIVLVFENETTGRVVSVGLALAARAEDSRETTLSRFIAVGHRFEIADYVRETAEGSFVAPWPEIAKDLRIQADRFEEFRSSGERFTAELLALMREGASSPEPRHFLRTFSNAVAFKPIFDSSAFVRSFVLEPEPLDVARIRQSVENWRRLLETIEELERRLTHLGRILKRYETWAEASLSATLDDLRAASADLRRRILDYATARSRLGEVAERLRIARESVATSQGFVREIDGEIAGKKAMLAGSQGEGRLAASNAGLAMLARDKRDLSARVADLVGMVQEAGKLNTLFSEIQRIDPDAARIVAACSRSGLRREAPPEESLRIDGPLGGLIEMLAALPDIATPLDTAAEDMALRARAQEKEAQALSAEIGTGRTGGARLSCDTAGFRDELARLGIEATPICELAEITDPKWGPALEGLLGGAREALVVEPDRLNEAFAHLEARKSQFYRCLLVKTTDTARRRGGRDDEGPISLIETRDPHAQAFLAARLGGYDLAPNDAALAHMSRAVAPSGRSTSGMAYSVVRPVQLMMTRGSRGPTAEGRQNLERAVAEARRLRGEAGVLREAARIAAMLRVRLAEANLDIVSLRQEADAMEGRRRSLTTEREAVEKADTGALEAEIKELAKERSAYLTELVQVLEPKRDALLGEEAGLKAKVATAREAIRGALQARRSAHARWIAGDSVRIRLVRPDGFDPLAVAKARADAAGLESKELAALANAARGAAREAMETARTQGRAAERDLAEYCVQWRIENPLGNGDAPASFGFSWVARAHDEVAGHELRRYRDQAVRAEGEMRRLMTEDLLTRLADKFERVRTRLDALNERLSTQTFTGQTYAFEATVDRRYAAVHALATEVARSADAAQAILPGEGEEAPSGPLAAAIEEITALIAGDESAARLADYRNYFVYEIGMRDKAGNRTTMSNRALRGSGGEAQAPFYVAIAASLASAYYPGDRPGDENPGLGLCLLDEAFSKLDVRNSQALVDLYQAWGLQLLIAAPEDKRTTLTEVMDTIVTVYKSPDLTSVRIEAEHPLETAKRALAAINPERQGIETFRVSDAAE

SEQ ID NO: 36544 - protein, 576 aa, Frigoribacterium sp. Leaf254
MNHPSGHDDALSRDDVRAAYEDDPTWALLRGYNARWMLPLFSHHLEHAEGPVSADWFHRQVADALEQNAAEQAALEQATPEHPASEPATTERDLEEARPASPTPVATPAPAEQKTTPAEYCRSWVESRWLVRTRASGPDARAEYRLSPHALKALRLVRDLVERDNAVSEARLGSIAHAVGQLAGLADPSRESQLARLDEQIAELERRKAEIERHGTEPTAPDVLRRQVREVVRLTASLPEDFRQLGAMVEQRHREVARRASSEHVGKGALVDQYLRDNDLLEQTPEGRAYRGFAQMLSSRGIDVMRADIEKVLAQPDAAAQLTERQRTQLESLISSLLAEEQSVQETYGRWTSSLRRFLSRSGSDQQQRLLTLADRALHAGGVWAERRPGHAMLPVEHGDGLGLGALDVRDVSQVQLHTDRARPTVDVQVTIGDATLPEADRAALRLTSGTSTAAVSATIDRLLADHDEVTSVDVYRATEPEFRRLALVLSMLDLALERGVVGDDTETVELAGDPTGPGASADARPGGAGPGGAGRQVTLPRLVFRRDPAGPPDAEPAAPTAADLTTSPTSTKDPA

SEQ ID NO: 36545 - protein, 331 aa, Frigoribacterium sp. Leaf254
MSPAAPSDETGVDEATRASFAEATAPSVDESARASRDAFDDGDADDGAAGVPDALPLAGRKALVTLLTHRFVSRARQQEAWAGLLAHEPEIRARLDELFLVLVVDHDHEVAFKRQSGEDDVPVLLRREKPLSRDASLLMVFARREHAFTDGLDEAVVISKDSVAEFLGRYHDDSGSDEVRARRRVDAAIAALVARDLLTAEPDDPELFVVSPAIVPLMTADRLAHLERVYLEAAGVEGDVTGEGEVEVDAPGDARAEADADADATDDAEDIAVEPEVEPDPAEDDDPAAQADDAPEPEPDPTAVPLDLDLDLEPPHDADTDTDTDPEAPQA

SEQ ID NO: 36546 - protein, 1154 aa, Frigoribacterium sp. Leaf254
MSIADTSPDLGMFHSGQYRIEQVQLLNWGSYAGLHRMPVGRGGIAILGPTGRGKSTVLDAMAAVIMPNPQEFNRAARDDSRQRSERTVYSYARGKTDEVRDAASDRTTTRFLRPLGQAFPSGAAITWSTELGQTVTAVRVAWIGEDTASQDDVTQASVYLLVQGRFDLSRLSEVTREGTSQNPLTRGSLARLLDPAHDLATSSQPELRVQLCGQLGIGGSDESQLKALTLLRRAQASKGVFSIDDLFKQFVLVQPQALSRWETTLATYREASALYDVFETTRKKLDVLEGVPTLADRYELAGRDGSAKRRLLADADGPSRLRVWLAERVGSWVSGEVDRVTTEKREQGERRRRAQADEQLAFRSREQALARISELGGDPTQSLREHVAAAEAELAAVERTRGRLAAALDGTGESLPRNDEQLVALGQRADRLAADDAAARAATADARSDLAARIGETKRALAALEKQKRSFEQRRSNVPDDAIERRRRIAEGAGVPVSSLPYAGELFEVAPEHTGWAVAIERVLGDLATHLLVDRAHFDAVRRWVNENDVRGRVTLVPATAEAEPTLTPVDHTVPAMVRLDPASPFRGWLHDELVADRSVLCVEGPDDLDDPRPAGTRGAVTRRGLRTGSRDRVIKDDRATRSWIGLDNAARIAELGDEIVDLEAVLARVRGEYDAIEAEAADRRRVADAVARAKEFTWDELDTAPAQARLDDLRAQVDRIAVERPELATLQAEATQHDDDRSAATRRLAEIDQVLAQLDEKHATLVDIEDEFADAADAEPLTDDERALLAPLPFAAPREATDVARLYRDAASQLRAQVDAHDRDRANAESTLVVVFERYLELDRTAGIDATIESLPSVRAIHRQLVEDDLPHAKQRWLEKAGSDVGDSLRALLVQIEEDGHVIRRGVRPISQALRSIEFRQGSTLDIEPRPVSNGDLLEFKRTLREHTGGAEGTSEARSSDGRSSQAQTPEARDASEVERRFLRLRRDLAHLEEKSKVGDAWRRRVLDAREHYQFRAIETRADGTQIVHEGVAGKSGGEGQELIAFVLGAALRFRLGDGTDRVPTYAPIVLDEGFVKADAEYTGRALAALTSLGFQLVVGAPRDKVNAFEQHVESVAYISSDPSSPELSRIYPLTIRQAIEVEQHGLDPAALA

SEQ ID NO: 36547 - protein, 474 aa, Methylobacterium sp. Leaf86
MLFARLSDDLFKPLASPSRAFNAALLLHLHARVFAETTEPLRKSELLASIGDFSADWSQGEIADDDATPADPIERRSAVYRRLLEAGWLVERRERYVPVVDLDPDARHVIEELARIDRGETRSYGGAVLEVLGSLESAVANPAERSEALVNAAKASRAFLGHLRSLAGSMRKIEERILREEDQGTAFRLYFEEFVARHLVSDYRTLHTRLNPFRFRSGIVREAGRALRDPLTIRALAEAGLREGRAADLPLAERAVRRDLAEILSIFEGLDRHLDSVADIVARLERRIAASLRYTDHRDSDRIERTAAALRVVGAAEWSDSAPLAQVSLLRPPIGEPHFYTPRMRRTAILSEPLPEIHLDPAIEAFILAKDAFRQRVMVTPERVIAFVERKLGTNPAIRGSEIVVADVDEFVVFQRLREIDVLFDGLLNDRYRLTRVAGRVSNGWLDCPDFMVERSSPPPTRGPASAGERRPRR

SEQ ID NO: 36548 - protein, 211 aa, Methylobacterium sp. Leaf86
MIEAFRAIVDGDEPPPPGARAPSEEDLIRALQVVLKSQCLYADTPGIGRSYEIARYYAPFFKSYFACLGYSFEVSPRDQMVFLRVPADGVRHDGQAERLRKDETLVLLALRLAYEEGLREHRVTTDGVVECTTDDIAESIRTAARSEAPEEARLTEILRLFARKGALRLGERDKVEKITPLMILPGVAVLSPDSWMEQVRAWAAARMDDDG

SEQ ID NO: 36549 - protein, 1151 aa, Methylobacterium sp. Leaf86
MYRLTDIALSNWYLIRREQIRIRGAAALVGPTGAGKSTIFDAVGTVLAGNNASRLALNASASGRSARTVRDYCLGWISDPAEGGRPTREACETLIVLVFENETTGRVVSVGLALAARAEDSRETTLSRFIAVGHRFEIADYVRETAEGRYVAPWPEIAKDLRIRADRFEEFRSSGERFTADVLALMREGAPSPEPRHFLRTFSNAVAFKPIFDSSAFVRSFVLEPEPLDVARIRQSVENWRRLLETIEELERRLSHLGRILKRYETWAEASLSATLDELRAAGADLRRRILDYSQARSRLGDVAERLRIARESVSTSQGFVREIDGEIAGKKAMLAGSQGEGRLAASNAGLAMLARDKRDLATRVADLVGLVQEAGKLNVVFSEIQRIDPESARIVAACSRSGLRRDAPPEESLRSDGPLGPLLTALASLSDIATPLDTAAEDMALRARAQEKEAHALSAEVGSGRAGGARLSSDTATFRDELARLGIEATPICELAEITDPKWGPALEGLLGGAREALVVEPDRLNEAFAHLEARKSQFYRCLLVKTTDTARRRGGRDDEGPISLIETRDPHAQAFLAARLGGYDLAPNDAALAHMSRAVAPSGRSTSGMAYSVVRPVQLMMTRGSRGPTAESRQNLEHAVNEARRLRGAAGVLREAARIAAMLRVRLADANLDIVFLRQEADAMEGRRRSLTTEREAVEKADTGALEAEIKKLAKERSAYLTELVQVLEPKRDALLGEEAGLKAKVATAREAIRAALQARRGAHARWIAGDSVRIRLVRPDGFDPLAVAKARADAAGLESKELAALANAARGAAREAMETARTQGRAAERDLAEYCVQWRIENPLGNGDAPASFGFSWVARAHDEVAGHELRRYRDQAVRAESEMRRLMTEDLLTRLADKFERVRTRLDALNERLSTQTFTGQTYAFEATVDRRYAAVHALATEVARSADAAQAILPGEGEDVPPGPLAAAIEEITALIAGDESAARLADYRNYFVYEIGMRDKTGNRTTMSNRALRGSGGEAQAPFYVAIAASLASAYYPGDRPGDENPGLGLCLLDEAFSKLDVRNSQALVDLYQAWGLQLLIAAPEDKRTTLTEVMDTIVTVYKSPDLTSVRIEAEHPLEAAKRALAAINPERQGIERFQVSDAAE

SEQ ID NO: 36550 - protein, 550 aa, Curtobacterium sp. Leaf261
MTDLEREFSRVRQVLDRPTLRLMSRPTSAAVIAVFRTVFDRDVQYVPADRMHLQVEEHVARLRSLGARVPAGAAGAAGAAGAAGAAGAAGSTSDQDRPDGRTLCREWVSAQWLVRSNSPDGDEQYSLTSHALESLSLVDALSTDRALISESRLTMIVDAVHRWAHRADPDRDAHLRRLDAQIDELQAERGRIRDGGDVVTVDAPRMRDGYANLIDLIRQLPSDFKRVEEAVATMHREIVEDFRQELRPIGEVLDDYLARTDSLMESTPEGRAFEGAFELLRDDDLLVRLRDDIATILTHPFAQSLTSQERRAFRNTVAILRQGIEDVLAQRRQLTATLRDQIVAHDVVRDRELEATLRSVNRRLATLMQAPGGPTRVPLELLPPTAEIEHLRERFHDPDSDSVPPAIEDEDLDAFEPVEVDDLRRHGGPLLDELRAALAAAVGSTTDAVFNALPAAHRRPVELFGLAHVLAAVDGLDGATATTHRAIRPDGTTVTFDMPAVRVERDLDAAGPTGSGHPSGERTRPDVPNRSAGPNDPVRRGPEHDRSTDD

SEQ ID NO: 36551 - protein, 339 aa, Curtobacterium sp. Leaf261
MSRTGRPARTTPSGEDRSTTGAPMTDPAPASAGLDSADVDTSDLDTSDDHDSTFALFEGDEGHLADPERRALVALLRHRYVSARSHPVEWRALLTAEHHLRSRLNDLFLELHIDHEREVAFKRQARSESTRRPFPTLLHDTAYTREETLVLVYLRMRLRADTRPGPDQVVVDRSEVLGHVAGFRPATATDRTRDEGRVAKAIDRLVTARILLRTTDPDRFRIASVVEVLLPLERLQELDRWLQTQTDTAAQTGAVTQTDTAAQTGAVTETGAVTETGLEARGGPAPSLPSDTVTVAGLEARGGSAPFLPSGAEHDDQGDPDAVPDDPTDAPLEGLDDRA

SEQ ID NO: 36552 - protein, 1175 aa, Curtobacterium sp. Leaf261
MTDARTTEDVGLFDVVAQWRAESLQVVNWGGFQGHRQIDLSEGSTLVSGASGTGKSTLMDAYLAVMMPSDVPFNGASNDATTGRARSADQRNLLTYLRGKVDSRRDPETGSLRDVNLRGDDQATWGAVAVTFRNDDERRFTVFRAYVVPKRARGVSDIQMTMATVDDVFDLRRLEQFVPTRFNAAELAGYVPGLVVRDTYTELAYTLQTRLGIGDSGGGGRAMRLLARIQAGQHMPTVDTLYKSMVLETPGTYDAADRALAHFAALDESYEAMDTEERKVRILEPITGLHEEIERSRASAAALDGIGALDPSGEAPLAYWTAARKRALLDAEVARNARERTAAAAELTAATVRHTADEVQLRDAEARLRENGGNALQQLEDRIDRVTADVAAVRAARATFEERTAVLSREPGASSSTDARSSTDARSSTDARSSTDARSSTDARSSTDARSLTDARSFAETQSRSSAFLTEFDAERAALGDRRDALSREEYPLLDRERELRRERNSLEHRQGAMPLPMHEARVAMAAAAGLDPSDVPFVAELLDVLPGEEHWRTAIESVLAPVARTLLVDEEHLDRFSAAIDDVRIPVRIAFEGVAPGSLPAPAGDPSMVSGKVALKDSPFAAWVHDRITADRADARCVEDAADLGGGGRRVTASGQLRDGRRGQHGDRRQPNIIGFTNEARLLVVDRELTEIAADIAGLEARRASVTRDLSDLEALRVAHQHVVDTTWDRIDVAGGAAALDRLERERTALLAADDGLRTLRDSVAGFRRALDTSADRRSEARTGVARLDERHAVLVDGQDAAAEVLERFDDRADLLPDDTQTGILEEAFAEIGAPADLDGFDDAARRLRRRLEERLTQALDGASAATIAMVTTFQRYQDAWPDPNLGTGAASYPDYARILEQILETGLHSRRAEWRRRLSQWSGEDLVPLAGAFDRAVVEIEERLEPVNEILRELPFGANRDRLRIALRRVSREDVASFRRELKALSANVAEALPDDALETRFRRLRRFMDTIRPDAGAPGRPGAGGGPGGRGTGSLLRDAVLDVRRHMEITAVRYDTDGNDLGVYSSLGDKSGGETQELVAFIVGAALRYQLGDETRPRPRFAPVFLDEAFIKADSEFAGRAVAAWLRLGFQLVVSAPLDKVTALEPSMDRLLAMRKHPTTGHSSVTEIVRAD

SEQ ID NO: 36553 - protein, 462 aa, Methylobacterium sp. Leaf89
MLFTHLSDDLFKPLASPSRAFNAALLLHLHGRVFGDTAEPLRKSELLTAIGDFAADFVDREIDDDASGTVEPSERRSVVYRRLLDAGWLVERRERYVPVVEFDPEARMVIEELARLDRGERRSYGGAVLDVLGSLESAIANPAERSEALVNAAKSARTFLSHLRSLAGSMRKSEERILREADQGVALRLYFEEFVARHLVSDYRTLHTRFNPFRFRSGIVREAGRALRDPLTLRALTDAGLREGRAPDRETAERAVRGDLAEILAIFEGLDRHLDVVADIVARLERRIAATLRYLDHRDSDRIERTAAALRAVAGGDDDLASLPDPQVSLFRTPIGEPHCYAPRLRRAAIESEPLPEIEIDPVIEAFIAAKDAFRERVAVTPERIVAFIEARLGPERTIRGSQIRIADVDDFVVFQRLREIDVLFDGSLRGRYRLSRMEGRVSNGWLDCPDFLLERAPALRR

SEQ ID NO: 36554 - protein, 211 aa, Methylobacterium sp. Leaf89
MLESFRAIVDGEDLPPPGARAPSEEELTRALQVLLKSQCVYAGTPGIGRSYELARHYAPFFQAYFACLGYQFDVMHRDQMVCLRVPPEGVRHDAQAERLRKDETLVLLALRLAYEEGLRAHRVTTEGVVECTTDDIVESIRTATRSDPPEEARLTEILRLFARKGALRLGERDKVEKITPLMVMPGIAVLSPDAWMDQVRAWGAARGDEEA

SEQ ID NO: 36555 - protein, 1151 aa, Methylobacterium sp. Leaf89
MYRLTDIVLSNWYLIRREQIRIRGAAALVGPTGAGKSTIFDAVGTVLAGNNASRLALNASASGRSARTVRDYCLGWISDPAEGGRPTREACETLIVLVFENETTGRVVSAGLALAARAEDSRETTLSRFVHVGHRFEVADYVREAPGGSFVAPWAEIAKDLRTRGSTFDEYRASGERFTAELLRNLREGAAVPEPRHFLRTFSNAVAFKPIFDSSAFVRSFVLEPEPLDVARIRQSVETWRRLLETIEELERRLAHLARIVGRYETWAEASLASVLGDLRAADADLRRRIIDTVTARQTLKDVAERLRIARESVATSQGFVREIDGEIAGKKALLAGTAAEGRLAASNAGLAMLARDRRDLAARVAELVGIVLDTGKLAVILGTIRTVSPEAARLVEACARSGLRREANPEETLRSDGSLAALLAGLAGMPPIAAPLERAAEDAALRARALENEAQSRAPAPSAGRGAAPRLSSDVAAFREELSRLGIVATPICELAEIIDSKWGQALEGLLGGAREALVVQPDRLNDAFAHLEARKSQFYRCLLVKTTDTARRRGGRDDEGPLALIETADPHAQAFLGARLGGYDLAPNDAALTHMSRAVAPSGRSTSGMAYSVVRPVQLMMTRGHRGPTAESRQDWEQAVAEARRARAEADVLREAARIGTALARRLSETNLDLAELRAEADAIEGRRRSLTTERESVERAETGVLEAELAELAKERSAYLTELVQVLEPKRDLLLGEEAGLKAKVAASREAARAALQARRTAYQRWAGGDSMRIRLVRPDAFDPKALATLRAERADLDAKALASHANTGRARAREAAETARTQGRAAERDLAEYCVQWRVENPLGAGDVPASFGYGWAKRAHDEVASHELRRYRDQARRAESEMRRLMIEDLLTRLADKFERVRARLEALNERLSSQTFTGQTYAFEAEVDRRYAAVHALATEVARSPDAAQAILPDEGGAIPDGPLAAAIDEITALIAGEESAARLADYRNYFVYEIGMRDRAGNRTTMSNRALRGSGGEAQAPFYVAIAASLASAYYPGDRPGDENPGLGLCLLDEAFSKLDVRNSQALVDLYQAWGLQLLIAAPEDKRTTLTEVMDTIVTVYKSPDLSSVRIEAEHPLEAAKRALAAINPERQGIEGFRITDAAE

SEQ ID NO: 36556 - protein, 470 aa, Methylobacterium sp. Leaf90
MLFTHLADDLFRPLASPSRAFNAALLLHLHARVFGDAAEPLRKSELLAAIGDFSAGWSQAEIADDEATPVDPIERRSAVFRRLIEAGWLVERRERYVPVVDFDPDARLLIEELARIERGETRSYGGAVLEVLSALESAIASPADRSEALRNAAKASRTFLGHLRGLAGAMRKLEERILREPDLSAAFRLYFEEFVERHLVSDYRTLHTRFNPFRFRSGIVREAGRALRDPLTLRALADGNLREGRAADITAAERMVRTDLVEILSIFEGLDPHLDAVAEVVARLERRISAALRYRDPRDSARIERAAAALRAVGAGEDDLAGLPLPQISLLRPPIGPPQLTNPRMPRRIIEYEPLPEIDIDPAIEAFIAAKDEFRRRITVTPERIVAYLDARLAQVKALRGSDIQVDDVDAFVVFQRLREIDVLFDGVLRSRYRVARIEVRVSNGWLDCPDFMIERIPPPAARRGAGKAG

SEQ ID NO: 36557 - protein, 211 aa, Methylobacterium sp. Leaf90
MLEPFRAILDGEEMPPPGSAAPSEEELTRALQVMLKSQCIYAATTGIGRSYELARHYAPFFRDYFACLGYRFEVAHRDQMVFLALPPDGVRHDAQGERLRKDETLVLLALRLAYEEGLRDHRVSTDGTVECTTDDIADAIRSAARTEPPDEARLIEILRLFARKGALRLGERDRAERVTPLMVMPGITVLSPDAWMDQVRAWASAGEGRGV

SEQ ID NO: 36558 - protein, 1159 aa, Methylobacterium sp. Leaf90
MYRLTDIAISNWYLIRREQIRIRGAAALVGPTGAGKSTIFDAVGTVLAGNNASRLALNASASGRSARTVRDYCLGWISDPAEGGRPTREACETLIALVFENPASGRIVTVGLALAARSEEPKEETLSRFIAVGHRFEIADYVRETSEGSFVAPWAEIAADLRRRADTFEEFRTSGERFTAAVLATLREGAAVPDPRQFLRTFSNAVAFKPIFDTSAFVRSFVLEAEPLDVARIRQSIETWRRLLETIEELEKRLAHLSRICARYEGWARASLTAALDEMRAAGADLRRRILDHAEACRLLAETSERLRIARESVVTSQGFVREIDTEIAARKALIVGSVAEARLAASHAGLAMVARDRRDLTNRLAGIVGLVQDAGRLSAIAGPLRRIDLQAARIVEACARSGLRREAPPEDILRVDGPLKGLLEGLAQMPDVSSTLEEEAEDLALKARERENEVRGLDGQVNAGRSSAARLSSDTEAFREELGRLGIEAAPICELAEIVDPKWGPALEGLLGRAREALVVEPDRLDRAFALLESRKNQFFRCLLVKTTDTARRAARRFDDGPMGLIETDSDHAEAFLAARLGGYDLAPDDAALRNMSRAVAPSGRSTSGMAYSVVRPVPLMMTRGQRGPTAETRRRLDEAREEARTLRAEATVMREAARIAALLRSRLAEAPIDLEALRAEADAIEGRRRSLSTEQETVARADAGVIEAELNELQKERSAYLTELVQVLEPKRDAALAEEAGLKARVAQGREAARAAFLAYRTALKRWTSGDTVRIRLTGTVPADVPDTVAGIAAARADRAALDTKALASLASQARASAREAADSVRNQGRAAERDLAEYCAAWRVENPLGSGEQPASFGYAWATRERDEVAGHELRRYRDQSLRAEAEMRRLMTEDLLTRLADKFERMRARLDALNERLASQTFTGQTYAFEAEVDRRYAAVHALATEVARSPDAAQAVLPSPDNSAEGGPDNSPLAAALAEITALIEGEENAARLADYRNYFVYEIGMRDRAGNRTTLSSRALRGSGGEAQAPFYVAIAASMASAYYPGDRPGDETPGLGLCLLDEAFSKLDVRNSQSLVDLFRAWGLQLLIAAPEDKRTTLTEVMDTVVTVYKSPDLGSVRIEAEHPLETAKRALAEINPDRRGIDAFRLPSAAE

SEQ ID NO: 36559 - protein, 599 aa, Frigoribacterium sp. Leaf263
MNESSGPDDALSRDDVRVAHEDDPTWALLRSYNSRWMLPLFSRHLEHAEGPVSADWFHQQVAQALELNALDQTAPDQTAPVRTAPVQAGTEEARVGGSGATAAPETRTTPVDYCRSWVASRWLIRTRASSTDDGGARHGDAGHGGSSSTTTGTSPVADGWGAFGAAHPSGTAAGSAPTRASSPPPRGEARAQYRLSPSALKALRIVRELVEQDNAVSEARLGSIAHAVGQLAGLADPSVEAQTARIDEQIAELQRRRARIEQHGTEPVGPDVLKRQVREVVRLTASLPEDFRQLSSMVEQRHREVARRATVEHVGKGALVEQYLRENDLLEQTPEGRAYRGFAQMLSSREIDVMRADIELILDHPAAGEHLTERQRTQLESLISSLLAEEQSVQETYGRWTSSLRRFLSRSSTERHQRLLTLADRALHAGGVWAERRPGPAVLPVDVLGLGALDVVDISQAQLHSDRGRPTVDVQVPEGDAMLPAADRAALRLSSGTSTAAVAATLERLLEADETVTSADLHEATDPEFRRLGLVLSMLDLAIDQGLVDESTETVTLTSADDAGGADRRVVLPRLVFRRPPARGDDAPDSAPQSERDPA

SEQ ID NO: 36560 - protein, 317 aa, Frigoribacterium sp. Leaf263
MSPDQYDATDAATPTRTSSGAQEVTGSATADGVDAATAGAALDRGDDGSPDRLRDELPLAGRKALVTLLTHRFVSRSRQGEAWAALVAYEPEIRARLDEMFLVLIVDHEYEVAFKRQSGQDDVPILLRREKPMSRDASLLLVFLRREHAFSDAHDESVVVSRHQIAEFLDRYHDDASHDEIRSTRRVDAAIAAMVTRDLLEPEPDDPALFVVAPAIVPLVTAEQLAHLERVFLEAAGADAPVDAPLGVEDDEPSDDEDSDDGRPDDGPRLVADPAVGDSGADEAPDAAEAPDADEAPRPDPTAVALDIPLDPEADQA

SEQ ID NO: 36561 - protein, 1161 aa, Frigoribacterium sp. Leaf263
MIPADATRTSPAFGTAPETAPESTSDDEATPDLGMFHSGQYRIQQVQLLNWGSYSGLHRMPVGRGGIAILGPTGRGKSTVLDAMAAVIMPNPQEFNRAARDDSRQRSERTVYSYARGKTDEIRDAASDRTTTRFLRPLGEAFASGAAITYATELGQTLTAVRLAWIGTDTSSQDDVTQASVYLLVRGPFDLSRLTEVKRDASSSSPLTKGSLARLLDPLRDLVTSSQPEFRVRLCGELGIGGSDESQLKALTLLRRAQASKGVFSIDELFKQFVLTQPKALSRWETTLGTYREASALYDVFETTRRKLAVLEPVPGLADRYEIAGHDATEKRRLVDETDGPSRLRVWLAEKVGSWVSGEVDRVTGDKRALSESRRRAAADDTAAYRAREQALARISDLGGDPSQSLRQLVATAERDLAVIERERRRFATALDGTGESVPTSEKQLVALRQRAGVLAAEDAAARAAADEVRGELAARIGETKRALSAREAQRRSFEQRGGNVPDDAAERRLRIAEGTGIPVAGLPYAGELFEVAAAHTDWSVAIERVVGDLATHLLVDRSRFDAVRRFVNDNDMRGRITLVPASTGVEPTREAVARTVPAMLQFDERSPFAGWLVDEIVRERSVLCVEGPDDLDSPVPTGARGAVTRAGLRTGSGGRVVKDDRRSRSWIGLDNSARIAELTDEIASLERDLTVARAAWDSAEAESSARRRMLDAVARSTEFSWTDIDTAPAQARLDDLQGQLDRLSDERPELATLQADARRHDDERSAATRRLAELDHELARLDAEHSTLVDIEDAFSDALGGADPLTDHERALLAPLPFAAPREVADVERSYREALGLLRGQIDGHDRERTQAENTLVLIFERYLELDRTAGIDASIDSLGAVRAIHRTLVDDALPSAKQDWLAKAGADMGDSLRALLVQIEEDGHVIRRGVRPISQALRSIEFREGSTLDIEPRPVSNGDLVEFKRTLREHIGDRSEAPRDPAEIERRFITLRRDLAHLEERSKIGDAWRRRVLDAREHYQFRAIETRVDGTQIVHEGVAGKSGGEGQELIAFVLGAALRFRLGDGTDRVPTYAPIVLDEGFVKADDEYTGRSLAALTSLGFQLVVGAPRDKVNAFERHVDSVAYISSDPAHPELSRIYPLTIRQAMEVERHGLDPAALS

SEQ ID NO: 36562 - protein, 470 aa, Methylobacterium sp. Leaf93
MLFTRLPDDLFKPLASPSRAFNAALLLHLHARVFAETTEPLRKSELLASIGDFSADWSQGEIADDEATPVDPVERRSAVYRRLLDAGWLVERRERYVPVVDFDPDARLVIEELARLDRGETRSYGGAVLEVLGSLESAVANPAERSEALVNAAKASRAFLGHLRSLAGSMRKIEERILREEDQGVAFRLYFEEFVARHLVSDYRTLHTRLNPFRFRSGIVREAGRALRDDLTLRALSEAGLREGRAPELSLAERAVRADLAEILSIFEGLDRHLDAVADIVARLERRIAAALRYTDHRDSDRIERTAAALRAVGAAEWSETAPSAEVSLLRPPIGEPHLYTPRMRRAAILSEPLPEIHLDPAIEAFILAKDAFRQRVMVTPERVIAFVERKLGASPAVRGSEIVVADVDEFVVFQRLREIDVLFDGILTTRYRLSRVEGRVSNGWLDCPDFLVERRNPAVRPVSVRPRGA

SEQ ID NO: 36563 - protein, 211 aa, Methylobacterium sp. Leaf93
MIEAFRAIVDGDEPPPPGTRAPSGEDLTRALQVLLKSQCVYSDTPGIGRSYEIARHYAPFFKSYFACLGYGFEVSPRDQMVFLRVPPDGVRHDGQAERLRKDETLVLLALRLAYEEGLRAHRVTTDGVVECTTDDIAESIRTAARSEAPEEARLTEILRLFARKGALRLGERDKAEKITPLMLLPGIAVLSPDAWMEQVRAWAAARLDDDG

SEQ ID NO: 36564 - protein, 1151 aa, Methylobacterium sp. Leaf93
MYRLTDIVLSNWYLIRREQIRIRGAAALVGPTGAGKSTIFDAVGTVLAGNNASRLALNASASGRSARTVRDYCLGWISDPAEGGRPTREACETLIVLVFENETTGRVVSVGLALAARAEDSRETTLSRFIAVGHRFEIADYVRETAEGSFVAPWPEIAKDLRIQADRFEEFRSSGERFTAELLALMREGASSPEPRHFLRTFSNAVAFKPIFDSSAFVRSFVLEPEPLDVARIRQSVENWRRLLETIEELERRLTHLGRILKRYETWAEASLSAALDDLRAAGADLRRRILDYATARSRLGEVAERLRIARESVATSQGFVREIDGEIAGKKAMLAGSQGEGRLAASNAGLAMLARDKRDLSARVADLVGMVQEAGKLNTLFSEIQRIDPDAARIVAACARSGLRREAPPEESLRIDGPLGGLIEMLVALPDIATPLDTAAEDMALRARAQEKEAQVLSAEIGTGRTGGARLSSDTAGFRDELARLGIEATPICELAEITDPKWGPALEGLLGGAREALVVEPDRLNEAFAHLEARKSQFYRCLLVKTTDTARRRGGRDDEGPISLIETRDPHAQAFLAARLGGYDLAPNDAALAHMSRAVAPSGRSTSGMAYSVVRPVQLMMTRGSRGPTAEGRQNLERAVAEARRLRGEAGVLREAARIAAMLRVRLAEANLDIVSLRQEADAMEGRRRSLTTEREAVEKADTGALEAEIKELAKERSAYLTELVQVLEPKRDALLGEEAGLKAKVTTAREAIRGALQARRSAHARWIAGDSVRIRLVRPDGFDPLAVAKARADAAGLESKELAALANAARGAAREAMETARTQGRAAERDLAEYCVQWRIENPLGNGDAPASFGFSWVARAHDEVAGHELRRYRDQAVRAEGEMRRLMTEDLLTRLADKFERVRTRLDALNERLSTQTFTGQTYAFEATVDRRYAAVHALATEVARSADAAQAILPGEGEEAPSGPLAAAIEEITALIAGDESAARLADYRNYFVYEIGMRDKAGNRTTMSNRALRGSGGEAQAPFYVAIAASLASAYYPGDRPGDENPGLGLCLLDEAFSKLDVRNSQALVDLYQAWGLQLLIAAPEDKRTTLTEVMDTIVTVYKSPDLTSVRIEAEHPLETAKRALAAINPERQGIETFQVSDAAE

SEQ ID NO: 36565 - protein, 458 aa, Methylobacterium sp. Leaf99
MLFTRLSDDLFRPLASPSRAFNAALLLHLHARVFGDTAEALRKTELLAAIGDFSADYAQGEIADDETTPVDPIERRSAVYRRLLEAGWLVERRERYVPVVDFDPEARILIEELARLDRGETRSYGGAVLDVLGSLESATANPAERSEALVNAAKASRAFLSHLRTLAGSMRKIEARILAQEDQRAAFRLYFDEFVARHIVSDYRTLHTRLNPFRFRSGIVREAGRALRDPLTLRALAEAGLREGRAPDVEAAERAVRADLAEILAIFEGLDRHLDAVADIVARLERRIAAALRYMDHRDSDRIERTAAALRAVAGAPEAMADMPPAGISLLRPPIGAVHLYAPRLKRPPIDCEPLPELFLDPAVEAFIAAKDAFRHRVAVTPDRMADFVEDRLGRKGAIRGSQMPIADVDAFVVFQRLREIDVLFDGSLSGRYRLSRVEGRVANGWLDCPDFLLERTR

SEQ ID NO: 36566 - protein, 210 aa, Methylobacterium sp. Leaf99
MLEPFRAIVDGDEPPPPGARAPSDEELTRALQVLLKSQCVYSGTPGIGRTYDLARHYAPFFQGYFACLGYGFEVSHRDQMVFLRVPADGVRHDGQAERLRKDETLVLLALRLAYEEGLRDHRVTTEGVVECTTDDIAESIRTATRSDPPEETRLLEILRLFSRKGALRLGERDKTEKLTPLMVLPGIGVLSPDAWMEHVRAWASAGDDAA

SEQ ID NO: 36567 - protein, 1152 aa, Methylobacterium sp. Leaf99
MYRLTDIALSNWYLIRREQIRIRGATALVGPTGAGKSTIFDAVGTVLAGNNASRLALNASASGRSARTVRDYCLGWISDPAEGGRPTREACETLIVLVFENPVSGRVVSVGLALAARAEDSRETTLSRFVCTGHRFEIADYVRETPDGSFVAPWTEIAKDLRIRSETFEEFRASGERFTAEVLGLLREGAPVPEPRHFLRTFSNAVAFKPIFDSSAFVRSFVLEPEPLDVARIRQSVENWRRLLETIEELERRLSHLGRILARYETWAEASLSAALDDLRAAGADLRRRVVEHTTARTGLADVAERLRIARESVTTSQGFVRDIDGEIAAKKAMMAGTHAQGRLAASDAGLSVLTRDRRDLTLRVTGLVGLIHDVARLSAVIGEIRRIDAGAARFVEACTRAGLRREAPPEETLRSDGPLGGLVAGLIDLPDIAGPLDTAAEDMALRARAAETEAQALSAPFAGGGAAKGARLSSDVAAFRDELARLGIDAVPVCELAEIVEPKWGMALEGLLGGAREALVVQPDRLNQAFAHLEARKAQFYRCLLVKTTDTARRRGGRYDDGPLGMIETRDPHAEAFLAARLGGYDLAPDDAALAHMSRAVAPSGRSTSGMAYSVVRPVQLMMTRGSRGPTEAGREAMERAVAEARRLRGEAGVLREAARIAAGLRLRLAEAPIDLPALRAECDALEGRRRSLATERESVEKADTGALEAELKELAKERSAYLTELVQVLEPKRDALLGEEAGLKAKVASSREAARAALGARRSAHARWVGGDTVRIRLVRPEGFDPRAVAKARADLAGLDAKELGAAAAAARSAAREALETARTQGRTAERDLAEYCVQWRIDNPLGRGDAPASFGYGWTRRAYDEVAGHELRRYRDQAVRAEGEMRRLMTEDLLTRLADKFERVRARLDALNERLSSQTFTGQTYAFEAAVDRRYAAVHALATEVARSPDAAQAILPGEGTTPPDGPLSAAIEEISALIAGEESAARLADYRNYFVYEIGMRDAAGNRTTMSNRALRGSGGEAQAPFYVAIAASLASAYYPGDRPGDENPGLGLCLLDEAFSKLDVRNSQALVDLYQAWGLQLLIAAPEDKRTTLTEVMDTIVTVYKSPDLKGVRIESEHPLEAAKRALAAINPERQGIEGFRLPGAAA

SEQ ID NO: 36568 - protein, 458 aa, Methylobacterium sp. Leaf102
MLFTRLSDDLFRPLASPSRAFNAALLLHLHARVFGDTAEPLRKTELLAAIGDFSADYAQGEIADDETTPVDPIERRSAVYRRLLDSGWLVERRERYVPVVDFDPEARILIEELARLDRGETRSYGGAVLDVLGSLESAIANPAERSEALVNAAKASRAFLSHLRTLAGSMRKIEARILAQEDQRAAFRLYFDEFVARHIVSDYRTLHTRLNPFRFRSGIVREAGRALRDPLTLRALAEAGIREGRAPDVEVAERAVRADLAEILAIFEGLDRHLDAVADIVARLERRIAAALRYMDHRDSDRIERTAAALRAVAGTDAPMEGMPPAGISLLRPPIGAVHLYAPRLKRPPIDCEPLPELFLDPAVEAFIAAKDAFRHRVAVTPDRMVDFLEGRLGRKGAVRGSQMPIADVDAFVVFQRLREIDVLFDGSLSGRYRLSRVEGRVANGWLDCPDFLLERTR

SEQ ID NO: 36569 - protein, 210 aa, Methylobacterium sp. Leaf102
MLEAFRAIVDGDEPPPPGARAPSDEELTRALQVLLKSQCVYSGTPGIGRTYDLTRHYAPFFQSYFACLGYGFEVSHRDQMVFLRVPPEGVRHDGQAERLRKDETLVLLALRLAYEEGLRDHRVTTEGVVECTTDDIAESIRTATRSDPPEETRLLEILRLFSRKGALRLGERDKTEKLTPLMVLPGIGVLSPDAWMEHVRAWASAGDDAA

SEQ ID NO: 36570 - protein, 1152 aa, Methylobacterium sp. Leaf102
MYRLTDIALSNWYLIRREQIRIRGATALVGPTGAGKSTIFDAVGTVLAGNNASRLALNASASGRSARTVRDYCLGWISDPAEGGRPTREACETLIVLVFENPVSGRVVSVGLALSARAEDSRETTLSRFVCTGHRFEIADYVRETPDGSFVAPWAEIAKDLRIRSETFEEFRASGERFTAEVLGLLREGAPVPEPRHFLRTFSNAVAFKPIFDSSAFVRSFVLEPEPLDVARIRQSVENWRRLLETIEELERRLSHLGRILARYETWAEASLSAALDDLRAAGADLRRRVVEYTTARTGLADVAERLRIARESVTTSQGFVRDIDGEIAQKKALMAGTHAQGRLAASDAGLAVLTRDRRDLTLRVTGLVGLIQDVARLTAVIGEVRRVDPGAARFVEACARAGLRREAPPEETLRSDGPLNALVTALVDMPDIAGPLDTAAEDMALRARGAETEAQGLSAPFAGGGAAKGARLSSDVAAFRDELARLGIDAVPVCELAEIVEPKWGMALEGLLGGAREALVVQPDRLNQAFAHLEARKAQFYRCLLVKTTDTARRRGGRYDDGPLGMIETRDPHAEAFLAARLGGYDLAPDDAALAHMSRAVAPSGRSTSGMAYSVVRPVQLMMTRGSRGPTQEGREAMERAVAEARRLRGEAGVLREAARIAAQLKARLAEAPIDLPGLRAECDAIEGRRRSLATERESVEKADTGALEAELKELAKERSAYLTELVQVLEPKRDALLGEEAGLKAKVASSREAARAALAARRSAHARWVGGDTVRIRLVRPEGFDPRAVAKARADLAGLDAKELAAAAAAARSAAREALETARTQGRTAERDLAEYCVQWRIDNPLGRGDAPASFGYGWTRRAYDEVAGHELRRYRDQAVRAEGEMRRLMTEDLLTRLADKFERVRARLDALNERLSSQTFTGQTYAFEAAVDRRYAAVHALATEVARSPDAAQAVLPGQGETPAEGPLSAAIEEISALIAGEESAARLADYRNYFVYEIGMRDAAGNRTTMSNRALRGSGGEAQAPFYVAIAASLASAYYPGDRPGDENPGLGLCLLDEAFSKLDVRNSQALVDLYQAWGLQLLIAAPEDKRTTLTEVMDTIVTVYKSPDLKGVRIESEHPLEAAKRALAAINPERQGIEGFRLPGAAA

SEQ ID NO: 36571 - protein, 458 aa, Methylobacterium sp. Leaf87
MLFTRLSDDLFRPLASPSRAFNAALLLHLHARVFGDTAEPLRKTELLAAIGDFSADFAQGEIADDETTPVDPIERRSAVYRRLLDSGWLVERRERYVPVVDFDPEARILIEELARLDRGETRSYGGAVLDVLGSLESAIANPAERSEALVNAAKASRAFLSHLRTLAGSMRKIEARILAQEDQRAAFRLYFDEFVARHIVSDYRTLHTRLNPFRFRSGIVREAGRALRDPLTLRALAEAGIREGRAPDVEVAERAVRADLAEILAIFEGLDRHLDAVADIVARLERRIAAALRYMDHRDSDRIERTAAALRAVAGTDAPMEGMPPAGISLLRPPIGAVHLYAPRLKRPPIDCEPLPELFLDPAVEAFIAAKDAFRHRVAVTPDRMVDFLEGRLGRKGAVRGSQMPIADVDAFVVFQRLREIDVLFDGSLSGRYRLSRVEGRVANGWLDCPDFLLERTR

SEQ ID NO: 36572 - protein, 210 aa, Methylobacterium sp. Leaf87
MLEAFRAIVDGDEPPPPGARAPSDEELTRALQVLLKSQCVYSGTPGIGRTYDLARHYAPFFQSYFACLGYGFEVSHRDQMVFLRVPPEGVRHDGQAERLRKDETLVLLALRLAYEEGLRDHRVTTEGVVECTTDDIAESIRTATRSDPPEETRLLEILRLFSRKGALRLGERDKTEKLTPLMVLPGIGVLSPDAWMEHVRAWASAGDDAA

SEQ ID NO: 36573 - protein, 1152 aa, Methylobacterium sp. Leaf87
MYRLTDIALSNWYLIRREQIRIRGATALVGPTGAGKSTIFDAVGTVLAGNNASRLALNASASGRSARTVRDYCLGWISDPAEGGRPTREACETLIVLVFENPVSGRVVSVGLALSARAEDSRETTLSRFVCTGHRFEIADYVRETPDGSFVAPWAEIAKDLRIRSETFEEFRASGERFTAEVLGLLREGAPVPEPRHFLRTFSNAVAFKPIFDSSAFVRSFVLEPEPLDVARIRQSVENWRRLLETIEELERRLSHLGRILARYETWAEASLSAALDDLRAAGADLRRRVVEYTTARTGLADVAERLRIARESVATSQGFVRDIDGEIAQKKALMAGTHAQGRLAASDAGLAVLTRDRRDLTLRVTGLVGLIQDVARLTAVIGEVRRVDPGAARFVEACARAGLRREAPPEETLRSDGPLNTLVTALVDMPDIAGPLDTAAEDMALRARAAETEAQSLSAPFAGGGAAKGARLSSDVAAFRDELARLGIDAVPVCELAEIVEPKWGMALEGLLGGAREALVVQPDRLNQAFAHLEARKAQFYRCLLVKTTDTARRRGGRYDDGPLGMIETRDPHAEAFLAARLGGYDLAPDDAALAHMSRAVAPSGRSTSGMAYSVVRPVQLMMTRGSRGPTEEGREAMERAVAEARRLRGEAGVLREAARIAAQLKARLAEAPIDLFGLRAECDAIEGRRRSLATERESVEKADTGALEAELKELAKERSAYLTELVQVLEPKRDALLGEEAGLKAKVASSREAARTALAARRSAHARWVGGDTVRIRLVRPEGFDPRAVAKARADLAGLDAKELAAAAAAARSAAREALETARTQGRTAERDLAEYCVQWRIDNPLGRGDAPASFGYGWTRRAYDEVAGHELRRYRDQAVRAEGEMRRLMTEDLLTRLADKFERVRARLDALNERLSSQTFTGQTYAFEAAVDRRYAAVHALATEVARSPDAAQAVLPGQGETPAEGPLSAAIEEISALIAGEESAARLADYRNYFVYEIGMRDAAGNRTTMSNRALRGSGGEAQAPFYVAIAASLASAYYPGDRPGDENPGLGLCLLDEAFSKLDVRNSQALVDLYQAWGLQLLIAAPEDKRTTLTEVMDTIVTVYKSPDLKGVRIESEHPLEAAKRALAAINPERQGIEGFRLPGAAA

SEQ ID NO: 36574 - protein, 462 aa, Methylobacterium sp. Leaf88
MLFTHLSDDLFKPLASPSRAFNAALLLHLHGRVFGDTAEPLRKSELMTAIGDFAADFVDREIDDDASGTVEPSERRSVVYRRLLDAGWLVERRERYVPVVEFDPEARMVIEELARLDRGERRSYGGAVLDVLGSLESAIANPAERSEALVNAAKSARTFLSHLRSLAGSMRKSEERILREADQGVALRLYFEEFVARHLVSDYRTLHTRFNPFRFRSGIVREAGRALRDPLTLRVLTDAGLREGRAPDRETAERAVRGDLAEILAIFEGLDRHLDVVADIVARLERRIAATLRYLDHRDSDRIERTAAALRAVAGGDDDLAGLPDPQVSLFRPPIGEPHCYAPRLRRAAIECEPLPEIEIDPVIEAFIAAKDAFRERVAVTPERIVAFIEARLGPERTIRGSQIRIADVDDFVVFQRLREIDVLFDGSLRGRYRLSRIEGRVSNGWLDCPDFLLERAPALRR

SEQ ID NO: 36575 - protein, 211 aa, Methylobacterium sp. Leaf88; identical to SEQ ID NO: 36554

SEQ ID NO: 36576 - protein, 1151 aa, Methylobacterium sp. Leaf88
MYRLTDIVLSNWYLIRREQIRIRGAAALVGPTGAGKSTIFDAVGTVLAGNNASRLALNASASGRSARTVRDYCLGWISDPAEGGRPTREACETLIVLVFENETTGRVVSAGLALVARAEDSRETTLSRFVHVGHRFEVADYVREAPGGSFVAPWAEIAKDLRTRGTTFDEYRASGERFTAELLGNLREGAAVPEPRHFLRTFSNAVAFKPIFDSSAFVRSFVLEPEPLDVARIRQSVETWRRLLETIEELERRLAHLARIVGRYETWAEASLASVLGDLRAADADLRRRIIDTVTARQTLKDVAERLRIARESVATSQGFVREIDGEIAGKKALLAGTAAEGRLAASNAGLAMLARDRRDLAARVAELVGIVLDTGKLAVILGEIRKVSPEAARLVEACARSGLRREANPEETLRSDGPLAALLAGLAGMPPIATPLERAAEDAALRARALENEAQSRAPAPSAGRGAAPRLSSDVAAFREELSRLGIVATPICELAEIIDPKWGQALEGLLGGAREALVVQPDRLNEAFAHLEARKSQFYRCLLVKTTDTARRRGGRDDEGPLALIETADPHAQAFLGARLGGYDLAPNDAALAHMSRAVAPSGRSTSGMAYSVVRPVQLMMTRGHRGPTAESRQDWGQAVSEARRARAEADVLREAARIGAALARRLSETNLDLAELRAEADAIEGRRRSLTTERESVERAETGVLEAELAELAKERSAYLTELVQVLEPKRDLLLGEEAGLNAKVAASREAARAALQARRTAYQRWAGGDSMRIRLVRPDAFDPKALATLRAERADLDAKALASHANTGRARAREAAETARTQGRAAERDLAEYCVQWRVENPLGAGDVPASFGYGWAKRAHDEVASHELRRYRDQARRAESEMRRLMIEDLLTRLADKFERVRARLEALNERLSSQTFTGQTYAFEAEVDRRYAAVHALATEVARSPDAAQAILPDEGGAIPDGPLAAAIDEITALIAGEESAARLADYRNYFVYEIGMRDRAGNRTTMSNRALRGSGGEAQAPFYVAIAASLASAYYPGDRPGDENPGLGLCLLDEAFSKLDVRNSQALVDLYQAWGLQLLIAAPEDKRTTLTEVMDTIVTVYKSPDLSSVRIEAEHPLEAAKRALAAINPERQGIEGFRITDAAE

SEQ ID NO: 36577 - protein, 474 aa, Methylobacterium sp. Leaf91; identical to SEQ ID NO: 36547

SEQ ID NO: 36578 - protein, 211 aa, Methylobacterium sp. Leaf91; identical to SEQ ID NO: 36548

SEQ ID NO: 36579 - protein, 1151 aa, Methylobacterium sp. Leaf91; identical to SEQ ID NO: 36549

SEQ ID NO: 36580 - protein, 458 aa, Methylobacterium sp. Leaf100; identical to SEQ ID NO: 36568

SEQ ID NO: 36581 - protein, 210 aa, Methylobacterium sp. Leaf100; identical to SEQ ID NO: 36572

SEQ ID NO: 36582 - protein, 1152 aa, Methylobacterium sp. Leaf100
MYRLTDIALSNWYLIRREQIRIRGATALVGPTGAGKSTIFDAVGTVLAGNNASRLALNASASGRSARTVRDYCLGWISDPAEGGRPTREACETLIVLVFENPVSGRVVSVGLALSARAEDSRETTLSRFVCTGHRFEIADYVRETPDGSFVAPWAEIAKDLRIRSETFEEFRASGERFTAEVLGLLREGAPVPEPRHFLRTFSNAVAFKPIFDSSAFVRSFVLEPEPLDVARIRQSVENWRRLLETIEELERRLSHLGRILARYETWAEASLSAALDDLRAAGADLRRRVVEYTTARTGLADVAERLRIARESVATSQGFVRDIDGEIAQKKALMAGTHAQGRLAASDAGLAVLTRDRRDLTLRVTGLVGLIQDVARLTAVIGEVRRVDPGAARFVEACARAGLRREAPPEETLRSDGPLNALVTALVDMPDIAGPLDTAAEDMALRARAAETEAQGLSAPFAGGGAAKGARLSSDVAAFRDELARLGIDAVPVCELAEIVEPKWGMALEGLLGGAREALVVQPDRLNQAFAHLEARKAQFYRCLLVKTTDTARRRGGRYDDGPLGMIETRDPHAEAFLAARLGGYDLAPDDAALAHMSRAVAPSGRSTSGMAYSVVRPVQLMMTRGSRGPTQEGREAMERAVAEARRLRGEAGVLREAARIAAQLRARLAEAPIDLPGLRAECDAIEGRRRSLATERESVEKADTGALEAELKELAKERSAYLTELVQVLEPKRDALLGEEAGLKAKVASSREAARAALAARRSAHARWVGGDTVRIRLVRPEGFDPRAVAKARADLAGLDAKELAAAAAAARSAAREALETARTQGRTAERDLAEYCVQWRIDNPLGRGDAPASFGYGWTRRAYDEVAGHELRRYRDQAVRAEGEMRRLMTEDLLTRLADKFERVRARLDALNERLSSQTFTGQTYAFEAAVDRRYAAVHALATEVARSPDAAQAVLPGQGETPAEGPLSAAIEEISALIAGEESAARLADYRNYFVYEIGMRDAAGNRTTMSNRALRGSGGEAQAPFYVAIAASLASAYYPGDRPGDENPGLGLCLLDEAFSKLDVRNSQALVDLYQAWGLQLLIAAPEDKRTTLTEVMDTIVTVYKSPDLKGVRIESEHPLEAAKRALAAINPERQGIEGFRLPGAAA

SEQ ID NO: 36583 - protein, 462 aa, Methylobacterium sp. Leaf104
MLFTHLSDDLFKPLASPSRAFNAALLLHLHGRVFGDTAEPLRKSELLTAIGDFTADFVDREVDDEGAAPLEPGERRSVVYRRLLDAGWLVERRERYVPVVEFDPEARMVIEELARLDRGERRSYGGAVLDVLGSLESAIANPTERSEALVNAAKSARTFLSHLRSLAGSMRKSEERILCEADQGVALRLYFEEFVARHLVSDYRTLHTRFNPFRFRSGIVREAGRALRDPLTLRALTDAGLREGRAPDRESAERAVRGDLAEILAIFEGLDRHIDAVADIVARLERRIAATLRYLDHRDSDRIERTAAALRAVAGADDDLDGIPDPQVSLFRPPIGEPHCYAPRLRRAAIESEPLPEIALDPVVEAFIAAKDAFRERVAVTPERIVTFIETHLGRERAIRGSQIHIADVDDFVVFQRLREIDVLFDGTLRARYRLSRVEGRVSNGWLDCPDFLLERAPALRR

SEQ ID NO: 36584 - protein, 211 aa, Methylobacterium sp. Leaf104
MLEAFRAILDGEEPPPPGARAPSEEELTRALQVMLKSQCIYGGTPGIGRSYELARHYAPFFQAYFACLGYGFEVMHRDQMVCLRVPPEGVRHDAQAERLRKDETLVLLALRLAYEEGLRAHRVTTDGVVECTTDDIVESIRTATRSDPPEEARLTEILRLFSRKGGLRLGERDKVEKITPLMVLPGIAVLSPDAWMDQVRAWGAARGDAEA

SEQ ID NO: 36585 - protein, 1151 aa, Methylobacterium sp. Leaf104
MYRLTDIVLSNWYLIRREQIRIRGAAALVGPTGAGKSTIFDAVGTVLAGNNASRLALNASASGRSARTVRDYCLGWISDPAEGGRPTREACETLIVLVFENETTGRVVSAGLALAARAEDSRETTLSRFVHVGHRFEVADYVREAPGGSFVAPWAEIAKDLRTRGETFDEYRASGERFTTELLGMLREGAAVPEPRHFLRTFSNAVAFKPIFDSSAFVRSFVLEPEPLDVARIRQSVETWRRLLETIEELERRLSQLARILGRYETWAEASLASALGELRAADADLRRRILDNVTARQALRDVAERLRIARESVATSQGFVREIDGEIAGKKALLAGTAAEGRLAASNAGLAMLARDRRDLAARVGELVGIVLDAGKLTVNIGEIRKVSPEAARLVEACARSGLRREANPEETLRSDGPLAALIGGLAGMPQIATPLERAAEDAALRARSLENEAQARAPAPSAGRSSAPRLSADVAAFREELAGRGIVATPICELAEITDPKWGQALEGLLGGAREALVVQPDRLNEAFAHLEARKSQFYRCLLVKTTDTARRRGGRDDEGPLALIATADPHAQAFLGARLGGYDLAPNDAALVHMSRAVAPSGRSTSGMAYSVVRPVQLMMTRGHRGPTAESRQDWEQAVAEARRARAEADVLREASRIAAALTRRLSETSLDLAELRAEADAIEGRRRSLTTERESVERAETGVLEAELVELAKERSAYLTELVQVLEPKRDLLLGEEAGLKAKVASSREAARAALQARRTAYQRWTGGDSMRIRLVRPGAFDPQALAGLRAERSDLDAKALASLANTARARAREAAETARTQGRAAERDLAEYCVQWRIENPLGTGDAPASFGYGWAQRAHDEVAGHELRRYRDQARRAENEMRRLMIEDLLTRLADKFERVRARLDALNERLSSQTFTGQTYAFEAEVDRRYAAVHALATEVARSPDAAQAILPDEGGAIPDGPLSAAIDEITALIAGEESAARLADYRNYFVYEIGMRDRAGNRTTMSNRALRGSGGEAQAPFYVAIAASLASAYYPGDRTGDENPGLGLCLLDEAFSKLDVRNSQALVDLYQAWGLQLLIAAPEDKRTTLTEVMDTIVTVYKSPDLTSVRIEAEHPLEAAKRALAAINPERQGIEGFRIIDAAE

SEQ ID NO: 36586 - protein, 470 aa, Methylobacterium sp. Leaf106
MLFTRLPDDLFKPLASPSRAFNAALLLHLHARVFAETTEPLRKSELLASIGDFSADWSQGEIADDEATPVDPVERRSAVYRRLLDAGWLVERRERYVPVVDFDPDARLVIEELARLDRGETRSYGGAVLEVLGSLESAVANPAERSEALVNAAKASRAFLGHLRSLAGSMRKIEERILREEDQGVAFRLYFEEFVARHLVSDYRTLHTRLNPFRFRSGIVREAGRALRDDLTLRALAEAGLREGRAQDLSLAERAVRADLAEILSIFEGLDRHLDAVADIVARLERRIAAALRYTDHRDSDRIERTAAALRAVGAAEWSETGPFAEVSLLRPPIGEPHLYTPRMRRAAILSEPLPEIHLDPAIEAFILAKDAFRQRVMVTPERVIAFVERKLGASPAVRGSEIVVADVDEFVVFQRLREIDVLFDGILTTRYRLSRVAGRVSNGWLDCPDFLVERRNPAVRPASVRPRGA

SEQ ID NO: 36587 - protein, 211 aa, Methylobacterium sp. Leaf106
MIEAFRAIVDGDEPPPPGTRAPSGEDLTRALQVLLKSQCIYSDTPGIGRSYELARHYAPFFKSYFACLGYGFEVSPRDQMVFLRVPPDGVRHDGQAERLRKDETLVLLALRLAYEEGLRAHRVTTDGVVECTTDDIAESIRTAARSEAPEEARLTEILRLFARKGALRLGERDKAEKITPLMLLPGIAVLSPDAWMEQVRAWAAARLDDDG

SEQ ID NO: 36588 - protein, 1151 aa, Methylobacterium sp. Leaf106
MYRLTDIVLSNWYLIRREQIRIRGAAALVGPTGAGKSTIFDAVGTVLAGNNASRLALNASASGRSARTVRDYCLGWISDPAEGGRPTREACETLIVLVFENETTGRVVSVGLALAARAEDSRETTLSRFIAVGHRFEIADYVRETAEGSFVAPWPEIAKDLRIQADRFEEFRSSGERFTAELLALMREGASSPEPRHFLRTFSNAVAFKPIFDSSAFVRSFVLEPEPLDVARIRQSVENWRRLLETIEELERRLTHLGRILKRYETWAEASLSATLDDLRAAGADLRRRILDYATARSRLGEVAERLRIARESVATSQGFVREIDGEIAGKKAMLAGSQGEGRLAASNAGLAMLARDKRDLSARVADLVGMVQEAGKLNTLFSEIQRIDPDAARIVAACSRSGLRREAPPEESLRIDGPLGGLIEMLAALPDIATPLDTAAEDMALRARAQEKEAQALSAEIGTGRTGGARLSSDTAGFRDELARLGIEATPICELAEITDPKWGPALEGLLGGAREALVVEPDRLNEAFAHLEARKSQFYRCLLVKTTDTARRRGGRDDEGPISLIETRDPHAQAFLAARLGGYDLAPNDAALAHMSRAVAPSGRSTSGMAYSVVRPVQLMMTRGSRGPTAEGRQNLERAVAEARRLRGEAGVLREAARIAAMLRVRLAEANLDIVSLRQEADAMEGRRRSLTTEREAVEKADTGALEAELKELAKERSAYLTELVQVLEPKRDALLGEEAGLKAKVATAREAIRGALQARRSAHARWIAGDSVRIRLVRPGGFDPLAVAKARADAAGLESKELAALANAARGAAREAMETARTQGRAAERDLAEYCVQWRIENPLGNGDAPASFGFSWVARAHDEVAGHELRRYRDQAVRAEGEMRRLMTEDLLTRLADKFERVRTRLDALNERLSTQTFTGQTYAFEATVDRRYAAVHALATEVARSADAAQAILPGEGEEAPSGPLAAAIEEITALIAGDESAARLADYRNYFVYEIGMRDKAGNRTTMSNRALRGSGGEAQAPFYVAIAASLASAYYPGDRPGDENPGLGLCLLDEAFSKLDVRNSQALVDLYQAWGLQLLIAAPEDKRTTLTEVMDTIVTVYKSPDLTSVRIEAEHPLETAKRALAAINPERQGIETFRVSDAAE

SEQ ID NO: 36589 - protein, 490 aa, Microbacterium sp. Leaf288
MGNTRAEAAYLRALAAFRTPTLDLLHGRYAPFVVAALSIVFTVDRPSVEISDAHAEVAEILDELRAAGYDEGDRTLPVGTAREICRYWVRVGWLVPQIDGDAEVYRLTAHAVGALEITGRTAGGRTRVSNSRVRTLLEAVERLSDHAETDPAVRMARLIQERDALDAEIARLELGQSEPIDDEQLLEEAENVLHLARELPADFTRVAESIKAMQRDVVADLRRDVRPTGEVLREYLQRGQHVMQSTAEGRAFAGALRLIGDPERIDSLTEQLHTLLAQPFTRLMDGEQRKELDAIGRRVELGVEEVLTAQRRASRVITGQVRTHDPIRDRQVDDLLRDVMSGLQTWTRSSSSDAPVEPLRSLPMADLGHLRQSVSDIRPPGAPAPLTAADEDAQFADADTRAWGGPRYAELEAYVAGLGDEFDLGDAFQGADDEARRPVDLVGLLEIAHRNGMSEGGEVSVVEALRPDGTTRRFAFGSVTARTAKEHDHD

SEQ ID NO: 36590 - protein, 264 aa, Microbacterium sp. Leaf288
MTETATQADLEAGDLDATDIAVEDAAASDAFIAPAAMEDDLDELFPGDRGVLDPAVRRVFVHVLQRRFLLADRNREEWTVLLDNQQLLESRLNDLFVRLVVDHDRGVAYKQQVRSDELEMPILLRDAPYTRSETLVLVHLRTVYQRESAAGEPAARVDIEDVEQTVMSYFVDADGDTARRQRSIRKAMDRLARDGIVDEETTGRFRISPLVEIVLSAEKLRELRDWLRTQSDPAGAQGAASVAAVDVFDETDEDDEDDLEETSL

SEQ ID NO: 36591 - protein, 1116 aa, Microbacterium sp. Leaf288
MTMLDTLFGLIPAASRGQQWLAEDLQLVNWGGYDGAHRVRFSPEATLLCGGSGSGKSTLMDAYIALMMPHTTPFNGASNGGVTGRPRGDEQRNILSYGRGKLDESRTDEGTKMRVLRGDGEDTWTAVAMTWIDHDGSRFTAVRAWYIPAGARVLEDTVRVRATTDRAFDLSSLQEAAALRLSDLSLRNAGLDPVGTDREFSARLHAVLGIGAAGAGGKAMSLLARIQAGQQITTVDDLYKRLVLEEPETMTTADAVVAHFDGLESTRTRMLTARQQVSALEPLRELREKIAVALERVRLIDEVGEFSDPASLATLWRADRRLGMLREVETELRDRKNAADTALREKRALADAAEAERDGLVEVLRLSGGDRLETAQRELREVERRLTATQSRRAGFDADLRAIGEDAATQAEFAELIDRARESLADRDAKGGVRAEYAEAISAEKSAAREIAELEAEVRRTTGLQGNIPRALHESRELVARAAGIEVEDLPFVGELVEVRTEFEPWREAFNLALGGFATTLLIDVDHLGRFRTAIDSVRTPVRLRYEGVHAGLDEADLRDTTTLPGRLDYQSTPFTGWLRERLADRFGFVCVDSAAGLSQHRMALTITGQMSQGSRGAHGGHGRENVLGFSNDRRLADLARQLDDARARLERATEDRTRADAALDAVDARFAVYAKVRDLTWEQVDVAAVTAERDRWLAVQDDVTSSNPEIARVQGQIAAAKGKAARLREEIARTVVEREQIESQWSDVIDDVDADQTVIDAAEDAGRMLRPEQIAFLDDRFRLTETSRPASASDALAGFVAALTTAAQRLTEDRRAAADSLEQQRDGVRRIMVSFLERWPNPNLLPDPDESVGDFERILEALRTSGLHELEAEWRDSLLKLSGNDLTNLDSTLSRSIREIRDRIAPINEIMQDLPFYDDDHRLQITTRENQSEARRRFRRELREVRALIEAASTDEEREQVYRRMSKLIGHMRRSAPDFGDLIDVRNHVRVSAERVDAVTKQHVALYDHIGEKSGGESQELIAFIVGAALRYQLGDAGAVRPRYAPVFMDEALIKADAHFTKRAIGAWRGLGFQLVIGAPNDKYSAIEPHVDVEYDILKDTRGRSWAKPKVGLRG

SEQ ID NO: 36592 - protein, 490 aa, Microbacterium sp. Leaf288
MFLQNGRVPAVAQVLELAQLAERDAAWKLLRADSAPVVAGLLGTHLGGDERQVDAEELYERIDADLERLRAQGLILPLTAKGYCGEWRSAGFLVRRPSSEARGETLELSPDAIAGIRFLQGRAAPRSSVTESRLASLAAQVRRLAIDTDPDVSARIALLQEEIESIERRIESLRSGDETAIDEDRALERVRDVLAQAADVPDDFSRVRAEFEALNASLRAKIVESDVSQASVVDEVFRGIDHISDSDAGRSFAAFSQLVLDPALGAAFEADIRRILDRGFARDLTSDERRALRSFLTTLKGRSAEIHDVITLFARALRRYVQSQDYQRDRVLRTLLREAQHAGVEASAHTRPWHPTSLTLDLSAVAMSSVGAIDLHDPAEFAATDEIVTQTASLASLEEMRAIARETEIDFDELTRNINDLLAEVQSCTVADVLARYPATQGVGSVIGLLSIAAEQGTVDDEPEVLAWQGADGVPRAAIVAAHRFTGAVT

SEQ ID NO: 36593 - protein, 219 aa, Microbacterium sp. Leaf288
MTEAIPTDVAPGEHTGLWRGDSGELPDRTRRVLLRLVRGPYLSGAREAQLWAVLLTDETMIRSRLAELFLELVIDRDNEFAFVRNAPSDDAPKAVRSEALTFLDTAMLLVLRQTLLSEEGRGRVIVGQAEVFEQLAVFRTPDRDEKDFASRVNSSWNKMQNKLRVLHAVGDDRAEISPVLRLLVDADQIRAITAEYQRIARECEGDFAALSTDDEDQDA

SEQ ID NO: 36594 - protein, 1117 aa, Microbacterium sp. Leaf288
MTMLTFPTDEPEIDPTRPGQWRLAQIEIVNWGTFAGHVAVDVARDGHLFTGASGSGKSSLLDAIAAVLTPDRWLRLNAAAQDGASRHSDRTLMSYVRGAWSKEADEAADRATTTYLRSKATWSGILLRYENLRDEPVVLLRVFHAPGTRTEATALKDARIFARGHVELLEVKPHVEGGIDARRMSKAFPDALLTTGGRHGRFHERVIRQFGFRGDATLQLLHKTQSAKNLGTLDALFRGFMLDQPGTFARAETAVEQFTELDAAHKHVVDLRKQADALRKVDEAIAAFDLAGAEMAAISDLHDAVEPFTSALKLRLAKDAAGPARAALARAESELSDAAREQRLAADALETAKARVRDEGGARVELLQERIDSAQSAEDVIGQYRSQLGAELTRIGAPMPEDSEQFAELLAVAVAEAARDIPAVSYEVRDAASQARKVLDEITNQIQSLRDHRSNLDEKLLRARRYLADAVGVPASTFPFAGELISVAEQHSTWRGAAERVMAPFASTLLVRDEHLAGARRAADSRTLGVRLVIEAVPHSVDEPRRPKDPRSLVHRLAVSDGPFASYVRRRIATEFDYACVSHPDELDDVERGVTIGGLVKRNSRRYEKDDRHDVGDATRWVLGGDTAARLEALLERRREAMVAMEETSARDAHADSARQDAVTRRDVFTRVSRFTWERVDLAAAAAVTAARRDELRVLTSESGTLREAQEAAERAGQRLADTGEAHERALGHHAVARNKMESVGAQIAELEAAPHTPVDEPIADSLEERFRAERRSVSLETVDEVARKVQSALSKEKDVAAGRAADAEASFAGRAAEFRLGWPAASAELAADIRDRYGYRELREGILARGLPEKETEFRKLLRERSQDVVAHLLSDLRDAPGFIRERILPVNASLGRSPFEGTDRFLEIDVKTTRTPEVDEFLTDLRRIVEGNWADESAAGAEQRFGVLQRVIGRLGSKDRIDIDWRNRVLDTRLHVSFLAREKDLTGRVVRVYDSAEGLSGGQRQKLVIFCLAAALRYQLTEEEDEVPRFGSIVLDEAFDKADSRYTRNAMEVFREFGFHMILATPQKLLQTLEPYVGAITSVSNPDRNTSRLANVVFAVGDPEATSTPHAESRA

SEQ ID NO: 36595 - protein, 373 aa, Microbacterium sp. Leaf288
MTTPVTPSDVRARAKKLFDRDARTWAAEQQTGVVLDVPLRPPTEREALSDLNRVREWVKSWRGVSEASGIELEWAVRNWSRVGSQEVPVRAIVRSPEVIAGVAGEAAVWRRLVERLDELRALVGPDAQVVLRTYAHSIADLDDADFHRLVDVLTWLRDNPASDRLIRELPIRGIDSKWIESRRGVVEALHRAGTGASGLGLREPSPLVRIRVLDPSLSFQWLTDVSAPVDEVASIPLRPQRVFVFENLATVLAMPNVPDAVAVHGGGHRVDLVARLPWAQTVTYWGDLDSHGFAILNRLRARGVEATSALMDSGTLFDHRDLWGTDPEPNVGVLELLTPGERATLQSLSAEGNIRLEQERIPWSYALARLGVS

SEQ ID NO: 36596 - protein, 462 aa, Methylobacterium sp. Leaf117
MLFTHLSDDLFKPLASPSRAFNAALLLHLHARVFGDTAEPLRKSELLGAIGDFAADFIDREIDDEAVTPVEPNERRSVVYRRLLDAGWLVERRERYVPVVEFDPEARMVIEELARLDRGERRSYGGAVLDVLGSLESAIANPAERSEALVNAAKSARTFLSHLRSLAGSMRKSEERILREADQGTALRLYFEEFVARHLVSDYRTLHTRFNPFRFRSGIVREAGRALRDPLTLRALTDAGLREGRAPDRDSAERAVRSDLAEILAIFEGLDRHLDAVGDIVARLERRIAATLRYLDHRDSDRIERTAAALRAVAGSDDVLTGLPDPQVSLFRPPIGEPHCYAPRLRRAPIESEPLPEIEIDPVVEAFIAAKDAFRERVAVTPERVVAFIEGRLGPERAIRGSQIRIADVDDFVVFQRLREIDVLFDGTLRGRYRLSRVEGRVSNGWLDCPDFLLERAPALRR

SEQ ID NO: 36597 - protein, 216 aa, Methylobacterium sp. Leaf117
MLEPFRAILDGEDPPPPGARAPSDEELTRALQVLLKSQCVYAGTPGIGRSYELARHYAPFFQAYFACLGYGFEVMHRDQMVCLRVPPEGIRHDAQAERLRKDETLVLLALRLAYEEGLRAHRVTTDGVVECTTDDIVESIRTATRSDPPEEARLTEILRLFARKGALRLGERDKIEKITPLMVLPGIAVLSPDAWMDQVRAWGAARGDDEGGPAQD

SEQ ID NO: 36598 - protein, 1151 aa, Methylobacterium sp. Leaf117
MYRLTDIVLSNWYLIRREQIRIRGAAALVGPTGAGKSTIFDAVGTVLAGNNASRLALNASASGRSARTVRDYCLGWISDPAEGGRPTREACETLIVLVFENETTGRVVSAGLALAARAEDSRETTLSRFVHVGHRFEIADYVREAPGGSFVAPWAEIAKDLRTRGETFDEYRASGERFTAELLGMLREGAAVPEPRHFLRTFSNAVAFKPIFDSSAFVRSFVLEPEPLDVARIRQSVETWRRLLETIEELERRLSHLARILGRYETWAEASLAASLGELRAADADLRRRILDHGTARSALKDIAERLRIARESVATSQGFVREIDGEIAGKKALLAGTAAEGRLAASNAGLAMLARDRRDLAARVGELVGIVLDAGKLTVIIGEIRKVSPEAARLVEACARSGLRREANPEETLRSDGPLAALIGGLAGMPEITAPLERSAEDAALRARALENEAQTRAPAPSTGGRGAAPRLSSDVAAFREELGRLGIVATPVCELAEITDPKWGQALEGLLGGAREALVVQPDRLNEAFGLLEARKSQFYRCLLVKTTDTARRRGGRDDEGPLALIATADPHAQAFLGARLGGYDLAPNDAALVHMSRAVAPSGRSTSGMAYSVVRPVQLMMTRGHRGPTAESRQDWEQAVAEARRARAEADVLREAARIAAALTRRLSETNLDLAELRAEADALEGRRRSLTTERDSVERAETGVLEAELAELAKERSAYLTELVQVLEPKRDLLLGEEAGLKAKVATSREAARAALQARRTAYQRWTGGDSMRIRLVRPEGFDPAALATLRAERAELDSKALGSLANAARARARDAAETARTQGRAAERDLAEYCVQWRVENPLGTGDAPASFGYGWAKRAHDEVAGHELRRYRDQARRAESEMRRLMIEDLLTRLADKFERVRARLDALNERLSSQTFTGQTYAFEAEVDRRYAAVHALATEVARSPDAAQAILPNEDGTIPEGPLSTAIDEITALIAGDESATRLADYRNYFVYEIGMRDRAGNRTTMSNRALRGSGGEAQAPFYVAIAASLASAYYPGDRPGDENPGLGLCLLDEAFSKLDVRNSQALVDLYQAWGLQLLIAAPEDKRTTLTEVMDTIVTVYKSPDLTSVRIEAEHPLEAAKRALAAINPERQGIEGFRVDAAE

SEQ ID NO: 36599 - protein, 462 aa, Methylobacterium sp. Leaf125
MLFTHLSDDLFKPLASPSRAFNAALLLHLHARVFGDTAEPLRKSELLSAIGDFAADFVDREIDDETSGTVEPSERRSVVYRRLLDAGWLVERRERYVPVVEFDPEARMVIEELARLDRGERRSYGGAVLDVLGSLESAIANPAERSEALVNAAKSARTFLSHLRSLAGSMRKSEERILREADQGVALRLYFEEFVARHLVSDYRTLHTRFNPFRFRSGIVREAGRALRDPLTLRALTDAGLREGRAPDRETAERAVRSDLAEILAIFEGLDRHLDAVADIVARLERRIAATLRYLDHRDSDRIERTAAALRAVAGGDDDLGGLPDPQVSLFRPPIGEPHCYAPRLRRAAIESEPLPEIEIDPVIEAFIAAKDAFRERVAVTPERIVAFVEARLGPERAIRGSQIQIADVDDFVVFQRLREIDVLFDGSLRARYRLSRTEGRVSNGWLDCPDFVLERAPALRR

SEQ ID NO: 36600 - protein, 211 aa, Methylobacterium sp. Leaf125
MLEPFRAIVDGEDLPPPGARAPSEEELTRALQVLLKSQCVYAGTPGIGRSYELARHYAPFFQAYFACLGYQFEVMHRDQMVCLRVPPEGVRHDAQAERLRKDETLVLLALRLAYEEGLRAHRVTTEGVVECTTDDIVESIRTATRSDPPEEARLTDILRLFARKGGLRLGERDKVEKITPLMVMPGIAVLSPDAWMDQVRAWGAARGDEEA

SEQ ID NO: 36601 - protein, 1151 aa, Methylobacterium sp. Leaf125
MYRLTDIVLSNWYLIRREQIRIRGAAALVGPTGAGKSTIFDAVGTVLAGNNASRLALNASASGRSARTVRDYCLGWISDPAEGGRPTREACETLIVLVFENETTGRVVSAGLALAARAEDSRETTLSRFVHVGHRFEVADYVREAPGGSFVAPWTEIAKDLRTRGTTFDEYRASGERFTAELLGILREGAAVPEPRHFLRTFSNAVAFKPIFDSSAFVRSFVLEPEPLDVARIRQSVETWRRLLETIEELERRLAHLARIVGRYETWAEASLASALGELRAADADLRRRILDTVTARQALKDVAERLRIARESVATSQGFVREIDGEIAGKKALLAGTAAEGRLAASNAGLAMLARDRRDLAARVADLVGIVLDTGKLSVIIGEIRKVSPEAARLVEACARSGLRREANPEETLRSDGPLAALLAGLAGMPPIATPLERAAEDAALRARALENEAQSRAPAPSAGRGAAPRLSSDVAAFREELSRLSIVATPICELAEIIDPKWGQALEGLLGGAREALVVQPDRLNEAFAHLEARKSQFYRCLLVKTTDTARRRGGRDDEGPLALIETADPHAQAFLGARLGGYDLAPNDAALAHMSRAVAPSGRSTSGMAYSVVRPVQLMMTRGHRGPTVESRQDWEQAVAEARRARAEADVLREAARIGAALARRLSETNLDLAALRAEADAIEGRRRSLTTERESVERAETGVLEAELAELAKERSAYLTELVQVLEPKRDLLLGEEAGLKAKVAASREAARAALQARRAAYQRWTGGDSMRIRLVRPDAYDPGALTALRAERADLDAKALASLASAGRARAREAAETARTQGRAAERDLAEYCVQWRVENPLGAGDAPASFGYGWAKRAHDEVASHELRRYRDQARRAESEMRRLMIEDLLTRLADKFERVRARLDALNERLSSQTFTGQTYAFEAEVDRRYAAVHALATEVARSPDAAQAILPDEGGAIPDGPLAAAIDEITALIAGEESAARLADYRNYFVYEIGMRDRAGNRTTMSNRALRGSGGEAQAPFYVAIAASLASAYYPGDRPGDENPGLGLCLLDEAFSKLDVRNSQALVDLYQAWGLQLLIAAPEDKRTTLTEVMDTIVTVYKSPDLSSVRIEAEHPLEAAKRALAAINPERQGIEGFRITDAAE

SEQ ID NO: 36602 - protein, 515 aa, Plantibacter sp. Leaf314
MGEIDGEFDRVRNALERPAIRLLSRPTAPAVVAIFRTTFGRDVQFVAADRFHLQVEEYLAELGARGARIPAGGDERGGGRTLCREWVHDQWLVRTSTDDGEEQYSLTSHALEAVSLVDGLAHDRALISESRLTMILDSVRRWALQADPDREEHLRRIDAQLAELQAERERVAAGGTVVAASDDRMHDGYANIADLIRQLPSDFRRVEESVIAMHRRIVEDFRNDTRPIGEILDDYLRRTDELMTATAEGRAFEGAFELLRNDELLQDLKRDLSTILDHPFSSRLGPAELRGFRGAVGIIRQGIDDVLAQRRRLTATLRDHIVHHDVVQDRELDTTLRALNQRLGIWMRTAGPRATVDVPLLPEAIDVEHLRERFYDPDVEAAPPPITTAPERTDVASMSLDILRSQGGPLLDELRAGLLAAATSGASDAHTAFTGLDPELRRPVELFGLVHLMTQLGAYDEAGPRRRYETVRPDGTTAAFDLPAFPLGETGITGLTRATTTSTTAARDRASRGTE

SEQ ID NO: 36603 - protein, 282 aa, Plantibacter sp. Leaf314
MSIEPEPTHRESTEAPTDGALSAAPVATPDRPSDAESFALFEGDEGRLDAAQRRALVALLKHRYVSPALQPAEWRTILESEALLGSRLNELFLELQVDRSAEVAFKRQAGSESGRRPFPTLLHDTSYSREETILLVYLRTRLRTELANGARAAIVEHDELLGFVASFRPEHATDRARDDGRVERAIEKLLTARVLLRTKDARRHRIASVVETLLPLERLQELLEWLETQTPTADALQPEQEPDTPSGPGAAATDGDDDAEPDDTEPDDVASDTASRPGEDGR

SEQ ID NO: 36604 - protein, 1128 aa, Plantibacter sp. Leaf314
MSRPTDTDTLLDLVEQWRIERMQLINWGGFDGYRSVDFASRATLISGASGTGKSSLMDAYLAVMMPSDVPFNGASNDAAVGRARNPDQRNLLTYLRGKVDSARDPQTGAMRDINLRGSEQLTWGAVAVTFVNDDDRRFTVVRAYLVPRRALRTGDLSMTMATVDGPFDLTELEAFVPKRFDAGELQGRIPGFVVRDTYAELSYTLHTRLGIGAGGDGGRAMRLLARIQAGQHLPTVDGLYKSMVLERPSTYEAADRALSHFEALDEAYLAMETESRKARVLERLGELRRDYEDGHRAAAELERLGFAEDGETPFAVWRSRAHEALLDEAVSRNRREKLAAGATLEAARARATAAGVRVRELERQVSEQGGSALRRAEERREAAEAAHAEAVRTRALFDERTEPLDEPLHDEASFVAALSRSEEFLDDDDAALEAIEAERAELHREAFPLEERNTELRLELQSLRGRDGAVPDRLHRARLALAEAAGLDPEQLPFVAELIDVAPTHAAWRPAIEVTLHGLARTVLVDEEHLDAFGRAIDAVRIPVRLQFEGVPLGATTAPAPGDPAFVSGRITYKASPFSAWVEQRVTSDRIDARCVDSPSQLSGGGRRVTANGQLRDGRRGSHGDPGGAPILGFTNEARIASIESEMAELRGRLELIAGRQAAVQRRLAGREAERAAHRYRLDSEWSRIDVDGAAARRDAAAADLERLLDASDVLQELQGSVTAAQRELDAANAERFPAEDRVRRLDEEHGSLVDQQDAATTVIDRFERSGVDEVSTDDVERIEAALAAVGGVPSLGGFADAMKRLRTRLGDELSAAVRLAEQAAIAQVHVFEHYQSIWHDPNLGTTLESYGDYRAILDGILGTGLPERRQEWRRRLSQWSGEDLVPLSSAFDSAVEEIEDRLVPVNDILRDLPFGPAHDRLKIVLRRVHREEVAAFRRELRALSGEVTAELDDDALEGRFQRLRRFMESMRDTAATSTSASTRDQVLDVRRHVEITAVRYDTSGRDVSVYSSLGDKSGGETQELVAFIVGAALRYQLGDEDRPRPRFAPVLLDEGFIKADSEFAGRAVVAWLRLGFQLVIGAPLDKVTALEPYMDRLLSIRKDPETRHAWVAEIERAEPVEPLERIG

SEQ ID NO: 36605 - protein, 462 aa, Methylobacterium sp. Leaf111
MLFTHLSDDLFKPLASPSRAFNAALLLHLHGRVFGDTAEPLRKSELLTAIGDFAAEFVDREIDDDASGTVEPSERRSVVYRRLLDAGWLVERRERYVPVVEFDPEARMVIEELARLDRGERRSYGGAVLDVLGSLESAIANPAERSEALVNAAKSARTFLSHLRSLAGSMRKSEERILREADQGVALRLYFEEFVARHLVSDYRTLHTRFNPFRFRSGIVREAGRALRDPLTLRALTDAGLREGRAPDRETAERAVRGDLAEILAIFEGLDRHLDVVADIVARLERRIAATLRYLDHRDSDRIERTAAALRAVAGGDDDLAGLPDPQVSLFRPPIGEPHCYAPRLRRAAIESEPLPEIEIDPVIEAFIAAKDAFRERVAVTPERIVAFIEARLGPERTIRGSQIRIADVDDFVVFQRLREIDVLFDGSLRGRYRLSRMEGRVSNGWLDCPDFLLERAPTLRR

SEQ ID NO: 36606 - protein, 211 aa, Methylobacterium sp. Leaf111; identical to SEQ ID NO: 36554

SEQ ID NO: 36607 - protein, 1151 aa, Methylobacterium sp. Leaf111
MYRLTDIVLSNWYLIRREQIRIRGAAALVGPTGAGKSTIFDAVGTVLAGNNASRLALNASASGRSARTVRDYCLGWISDPAEGGRPTREACETLIVLVFENETTGRVVSAGLALAARAEDSRETTLSRFVHVGHRFEVADYVREAPGGSFVAPWAEIAKDLRTRGTTFDEYRASGERFTAELLGNLREGAAVPEPRHFLRTFSNAVAFKPIFDSSAFVRSFVLEPEPLDVARIRQSVETWRRLLETIEELERRLAHLARIVGRYETWAEASLASVLGDLRAADADLRRRIIDTVTARQTLKDVAERLRIARESVATSQGFVREIDGEIAGKKALLAGTAAEGRLAASNAGLAMLARDRRDLAARVAELVGIVLDTGKLAVILGEIRKVSPEAARLVEACARSGLRREANPEETLRSDGPLAALIAGLAGMPPIAAPLERAAEDAALRARALENEAQSRAPAPSAGRGAAPRLSSDVAAFREELSRLGIVATPICELAEIIDPKWGQALEGLLGGAREALVVQPDRLNEAFAHLEARKSQFYRCLLVKTSDTARRRGGRDDEGPLALIETADPHAQAFLGARLGGYDLAPNDAALAHMSRAVAPSGRSTSGMAYSVVRPVQLMMTRGHRGPTAESRQDWEQAVSEARRARAEADVLREAARIGAALARRLSETNLDLAELRAEADAIEGRRRSLTTERESVERAETGVLEAELAELAKERSAYLTELVQVLEPKRDLLLGEEAGLKAKVAASREAARAALQARRTAYQRWAGGDSMRIRLVRPDAFDPKALATLRAERADLDAKALASHANTGRARAREAAETARTQGRAAERDLAEYCVQWRVENPLGAGDVPASFGYGWAKRAHDEVASHELRRYRDQARRAESEMRRLMIEDLLTRLADKFERVRARLEALNERLSSQTFTGQTYAFEAEVDRRYAAVHALATEVARSPDAAQAILPDEGGAIPDGPLAAAIDEITALIAGEESAARLADYRNYFVYEIGMRDRAGNRTTMSNRALRGSGGEAQAPFYVAIAASLASAYYPGDRPGDENPGLGLCLLDEAFSKLDVRNSQALVDLYQAWGLQLLIAAPEDKRTTLTEVMDTIVTVYKSPDLSSVRIEAEHPLEAAKRALAAINPERQGIEGFRITDAAE

SEQ ID NO: 36608 - protein, 458 aa, Methylobacterium sp. Leaf112; identical to SEQ ID NO: 36571

SEQ ID NO: 36609 - protein, 210 aa, Methylobacterium sp. Leaf112
MLEAFRAIVDGDEPPPPGARAPSDEELTRALQVLLKSQCVYSGTPGIGRTYDLARHYAPFFQSYFACLGYGFEVSHRDQMVFLRVPPEGVRHDGQAERLRKDETLVLLALRLAYEEGLRDHRVTTEGVVECTTDDIAESIRTATRSDPPEETRLLEILRLFSRKGALRLGERDRTEKLTPLMVLPGIGVLSPDAWMEHVRAWASAGDDAA

SEQ ID NO: 36610 - protein, 1152 aa, Methylobacterium sp. Leaf112
MYRLTDIALSNWYLIRREQIRIRGATALVGPTGAGKSTIFDAVGTVLAGNNASRLALNASASGRSARTVRDYCLGWISDPAEGGRPTREACETLIVLVFENPVSGRVVSVGLALSARAEDSRETTLSRFVCTGHRFEIADYVRETPDGSFVAPWAEIAKDLRIRSETFEEFRASGERFTAEVLGLLREGAPVPEPRHFLRTFSNAVAFKPIFDSSAFVRSFVLEPEPLDVARIRQSVENWRRLLETIEELERRLSHLGRILARYETWAEASLSAALDDLRAAGADLRRRVVDYTTARTGLADVAERLRIARESVATSQGFVRDIDGEIAQKKALMAGTHAQGRLAASDAGLAVLTRDRRDLTLRVTGLVGLIQDVARLTAVIGEVRRVAPGAARFVEACARAGLRREAPPEETLRSDGPLNTLVTALVDMPDIAGPLDTAAEDMALRARAAETEAQGLSAPFAGGGAAKGARLSSDVAAFRDELARLGIDAVPVCELAEIVEPKWGMALEGLLGGAREALVVQPDRLNQAFAHLEARKAQFYRCLLVKTTDTARRRGGRYDDGPLGMIETRDPHAEAFLAARLGGYDLAPDDAALAHMSRAVAPSGRSTSGMAYSVVRPVQLMMTRGSRGPTEEGREAMERAVAEARRLRGEAGVLREAARIAAQLKARLAEAPIDLFGLRAECDAIEGRRRSLATERESVEKADTGALEAELKELAKERSAYLTELVQVLEPKRDALLGEEAGLKAKVASSREAARAALAARRSAHARWVGGDTVRIRLVRPEGFDPRAVAKARADLAGLDAKELAAAAAAARSAAREALETARTQGRTAERDLAEYCVQWRIDNPLGRGDAPASFGYGWTRRAYDEVAGHELRRYRDQAVRAEGEMRRLMTEDLLTRLADKFERVRARLDALNERLSSQTFTGQTYAFEAAVDRRYAAVHALATEVARSPDAAQAVLPGQGETPAEGPLSAAIEEISALIAGEESAARLADYRNYFVYEIGMRDAAGNRTTMSNRALRGSGGEAQAPFYVAIAASLASAYYPGDRPGDENPGLGLCLLDEAFSKLDVRNSQALVDLYQAWGLQLLIAAPEDKRTTLTEVMDTIVTVYKSPDLKGVRIESEHPLEAAKRALAAINPERQGIEGFRLPGAAA

SEQ ID NO: 36611 - protein, 462 aa, Methylobacterium sp. Leaf113
MLFTHLSDDLFKPLASPSRAFNAALLLHLHARVFGDTAEPLRKSELLGAIGDFAADFVDREIDDEAVTPVEPNERRSVVYRRLLDAGWLVERRERYVPVVEFDPEARMVIEELARLDRGERRSYGGAVLDVLGSLESAIANPAERSEALVNAAKSARTFLSHLRSLAGSMRKSEERILREADQGTALRLYFEEFVARHLVSDYRTLHTRFNPFRFRSGIVREAGRALRDPLTLRALTDAGLREGRAPDRDSAERAVRSDLAEILAIFEGLDRHLDAVGDIVARLERRIAATLRYLDHRDSDRIERTAAALRAVAGSDDVLTGLPDPQVSLFRPPIGEPHCYTPRLRRAPIESEPLPEIEIDPVVEAFIAAKDAFRERVAVTPERVVAFIEGRLGPERAIRGSQIRIADVDDFVVFQRLREIDVLFDGTLRGRYRLSRVEGRVSNGWLDCPDFLLERAPALRR

SEQ ID NO: 36612 - protein, 216 aa, Methylobacterium sp. Leaf113
MLEPFRAILDGEDPPPPGARAPSEEELTRALQVLLKSQCVYAGTPGIGRSYELARHYAPFFQAYFACLGYGFEVMHRDQMVCLRVPPEGIRHDAQAERLRKDETLVLLALRLAYEEGLRAHRVTTDGVVECTTDDIVESIRTATRSDPPEEARLTEILRLFARKGALRLGERDKIEKITPLMVLPGIAVLSPDAWMDQVRAWGAARGDDEGGPAQD

SEQ ID NO: 36613 - protein, 1151 aa, Methylobacterium sp. Leaf113
MYRLTDIVLSNWYLIRREQIRIRGAAALVGPTGAGKSTIFDAVGTVLAGNNASRLALNASASGRSARTVRDYCLGWISDPAEGGRPTREACETLIVLVFENETTGRVVSAGLALAARAEDSRETTLSRFVHVGHRFEIADYVREAPGGSFVAPWAEIAKDLRTRGETFDEYRASGERFTAELLGMLREGAAVPEPRHFLRTFSNAVAFKPIFDSSAFVRSFVLEPEPLDVARIRQSVETWRRLLETIEELERRLSHLARILGRYETWAEASLAASLGELRAADADLRRRILDHGTARSVLKDVAERLRIARESVATSQGFVREIDGEIAGKKALLAGTAAEGRLAASNAGLAMLARDRRDLAARVGELVGIVLDAGKLTVIIGEIRKVSPEAARLVEACARSGLRREANPEETLRSDGPLAALIGGLAGMPEITAPLERSAEDAALRARALENEAQTRAPAPSTGGRGAAPRLSSDVAAFREELGRLGIVATPVCELAEITDPKWGQALEGLLGGAREALVVQPDRLNEAFGLLEARKSQFYRCLLVKTTDTARRRGGRDDEGPLALIATADPHAQAFLGARLGGYDLAPNDAALVHMSRAVAPSGRSTSGMAYSVVRPVQLMMTRGHRGPTAESRQDWEQAVAEARRARAEADVLREAARIAAALTRRLSETNLDLAELRAEADALEGRRRSLTTERDSVERAETGVLEAELAELAKERSAYLTELVQVLEPKRDLLLGEEAGLKAKVATSREAARAALQARRTAYQRWTGGDSMRIRLVRPEGFDPAALATLRAERAELDSKALGSLANAARARSRDAAETARTQVRAAERDLAEYCVQWRVENPLGTGDAPASFGYGWAKRAHDEVAGHELRRYRDQARRAESEMRRLMIEDLLTRLADKFERVRARLDALNERLSSQTFTGQTYAFEAEVDRRYAAVHALATEVARSPDAAQAILPNEDGTIPEGPLSTAIDEITALIAGDESATRLADYRNYFVYEIGMRDRAGNRTTMSNRALRGSGGEAQAPFYVAIAASLASAYYPGDRPGDENPGLGLCLLDEAFSKLDVRNSQALVDLYQAWGLQLLIAAPEDKRTTLTEVMDTIVTVYKSPDLTSVRIEAEHPLEAAKRALAAINPERQGIEGFRVDAAE

SEQ ID NO: 36614 - protein, 487 aa, Microbacterium sp. Leaf320
MTGSRAEAAFARAVTAFSTPTLDLLHGRFAPFVVASLTLLFNADRASVAVADAHAELAEVLDELRAAGYDEDDRKLPSGSGRDVCRNWVRLGWLIQQIDDDVEVYRLSAHAVAALEISGRTGGGRTRVSNSRVRTLLDAVDHLSVSAEVDPVRRLSRLRAERDLLDAEIARIQETGHADPTDDEELLEEAENVLHLARELPADFTRVAESLRAMQRDVVAHLRRDERPTSEVLREYLQRAQDVMQSTPEGRAFAGALRLIGDPDRIDALTEQLRGLLDQPFARMLDGAQRAELDAIARRVELGVEEVLAAQRRASHVITGQVKTHDPLRDRQIDDLLRDVIAGLHGWSGPTTVVDPVRSMPLIDLGHLRQTTSDIRPPRAPAPLADADDVDFLDHDTRAWGGPRYAELEAYVAGLEADFDLAEAFGAVPDAARRPVDLLGLLEIAHRNGLTDGDGISTVEALRPDGTTRRFAFGTVTARSTKEDADE

SEQ ID NO: 36615 - protein, 219 aa, Microbacterium sp. Leaf320
MSDDDLTTAVVDEGFIAPTAMEDDLEAHFPGDRGTLDPEIRRVLVHLLQRRFLSMERNRREWTLLLEHQQVIESRLNDIYLRLIIDHARGFAYKQQLRSDEVEMPVLLKDSPYSRAETLVLVHLRTVYQRESASGEGSVRIDIEDVEQTVLSYFADVDGGTAKQQRAIRSALDRLDREGIVQEETSGRYRITALVEVVLSAETLKELREWLRAQAVVAR

SEQ ID NO: 36616 - protein, 1119 aa, Microbacterium sp. Leaf320
MTMMDTLFGMIPASSRGQQWVAEELQLINWGGYDGGPHRVRFSPDATLLCGGSGSGKSTLMDGYIALMMPHTTPFNGASNGGVTGRPRGEEQRNILSYGRGKIDESRTDEGTKLRVLRGDGEDTWSAVSMTWLDHDGSRFTAVRGWYIPADARTLEDTTRLRATIDGAFDLTLLERAVAQRLNDASVRAVGLDPVATDREFSARLHAVLGIGAAGSGAKAISLLARIQAGQQITTVDDLYKKLVLEEPETMATADAVVAHFDELESTRTRMLVAKQQVAALEPIRGISERIEAASQRMRVVDEVGVFSEPTSLAALWSAERRLDLLREVETDLRDRTQALQLAVREKSALIAAAEVEREGLLDVLRQSGGDRLETAQRELRGVERRLEDIQRERSRFDAVAAELGAEVHDAAGFEDLLARLGRDLPQAGLRAARAAFADAESARRAAASELARVQAERERARELRGSIPAHLDESRALLARAAGLAPTDLPFVGELIEVRTEFEPWREAFNLALGGFARTLLIDVANLGRFRAAIDSVRTAERISYEGVHTGLVESRTADPRTLPGRLDHRSTPFTGWLQQRLRERFEYVCVDSSAELAEHPRALTLAGQVSQGDRGSHGGHGRANLLGFSNARRLRELDEQISELESRRDAAASAAAEAEAGLDRIEATAKAHAKIEDLTWDQLDVEAVSAERARWLAVEAEVTDENPKIAELRSQAEELRKRAGRLRDENSRLGGDLTVAQDRWVEVTDQVDACQRIVDAAEASEIALEERHRSFLDARFLGADSAVSVTASERLAHLDSALRTAATRLLEDRTSAAAAHADQREQMRRLMTGFLERWDTLTILADPDESVAEFEGILDALETNGLHELESEWRDSLLKLSGNDLTSLDSTLGRSLREIKNRIDPINRIMEELPFYDDEHRLQITPRENQSEARRRFRRELREVRGLIDAAATDADRESVYRRMSRLIGRMRRTAPDFAELIDVRNHVRVSAERIHATTREHVALYDHIGEKSGGESQELVAFIVGAALRYQLGDAGAERPRYAPVFMDEALIKADAHFTKRAIGAWRGLGFQLVIGAPNDKYSAIEPHVDVEYDILKDTRGRSWARPKVGLPAGTE

SEQ ID NO: 36617 - protein, 489 aa, Xanthomonas sp. Leaf131
MKVRARIARYRSLREDPLWKLLAADHAPEVIGLLQALLLDGERLLPAAVLHERLQRLLDDINAEQLARDLPRTAQAYVAHWLAQGWLERRLPEGAQQEEYELSTQAAQAIRFVDGLEHSRGAATESRLALVMQQLAQLAALTETNPDARLSALRDERDRIDAEIARVSAGKVASLDGKRALERTRQVIALADELTEDFRRVRDDFEQLNRQFRERIIDDEGERGEVLTRLFEGVDVIGDSEAGRSFQAFWALLNDAEQSAQLDAALETVLARAFARKLDRRERSFLRGLTGTMLERGGQVHDVMQHFARSLRGFVQSRGYLEQRRLNRLLKQAQAEALTLREHIPAQRLIGRSLMLTTSRLRSLSQWRLHDPRQQQVDGSIQRNEAAAISLDSVGDLVAQSEIDFRSLRRDLFELLDTQPQLSIAQVLTQRQATQGLGSVIGYLSLGTRHGVVSGDQFEVAQWRGSDGQVRRARIPLIWFTQEKRHELA

SEQ ID NO: 36618 - protein, 234 aa, Xanthomonas sp. Leaf131
MNWHEHDPDAESELAHDAAEGQRPDAASTGLFAGDTGQLPVEARRALCQLLSGPSVDAQRHSRLWPALLRSEAGIRRALAEVFLELVLDREAGIAFTRQAETGELEAPVLLRSSPLTFIDSVLLLHLRQQLAEADARGVRAVVEEAALGEALAVYEKNLSTDRAGFLRRVATAVQKMKDNHVLTRLRGEDARYEISPALKLLFSAEDVAALGQVYRQLRDGPAGDEDEADPAHA

SEQ ID NO: 36619 - protein, 1130 aa, Xanthomonas sp. Leaf131
MTSSAAPSSLFANDLPDARLQQFRMRRLQVHNWGTFSGLTEVPIAERGFLFVGRSGSGKSTLLDAMSALLTPPSIVDFNAAAREAERSGRDRNLVSYVRGAWADQQDSASGEIATQYLRKGATWTALVLEYRNGEDRVVSLVRLFWIAGNSAATGDVRKHYMVAERAFDVAQDLAGFDLDLRKLKQRLHDVHHFDSFAGYAERFRHQLGIGNEMALRLLHKTQSAKNLGDLNAFLRGFMLEEPKTFDAAERLVGDFAELDGAHHAVVTARRQVETLLPARAHHAELMQLRRQRNELEELKLGIDPYREQRRLALLDARLQELDVQDRGLAGEEGQRRAALDNHTRHLDDLEAQRRAQGGERIDALEREQGQLQTERDRRAAKRAQAEQACRALEQALADSAHGFAEQVAQARAALEDSQRAAAELDEAISERIAGKHEDSKRFAEVRAEIEALTRNPSNIPAPMQSLRARMSADTGVPEAALPFVGELIQVREEASAWRGAIERVLHGFAQSLLVDERHYAEVADWVNRTQLGTRLVYYRVRHNEQALSGREPGSASLLHKLELRDHPFAGWLRRELGKRFDYDCVDSAKALRHAERAITREGQVKHPGERYEKDDRHAVGDRRRWLLGFNNRDKLALYEREGQELAQRIAACDAEVADLRARRERDGQRRLARNTLANLGWDEIDVAAALQRLSQIAETLQQLREGDANLRALGEAIDRTRADIAQATRTYEGVRTERITLGAERTRLEKQHLECADAHARLVTPLQQQGLAERLLSLGELSLDNLQDRFRTLERGLDAQLGVSKDELTRLQQALIGCFRRYFQQWPEDSGDLSPTLEGADDFLARLQRLERDGLPQHEARFFDLLQSQSKNNLLALQRHTAEARKSIAQRLDEVNASLEQVPFNHGTLLTIELSDRRLPEVIEFHQRLRDVLGHHQTEQREVAEQQFAVLRELVRKLGSAEGEDKRWRELVLDVRLHVEFVGVELDAATRQQVEIYRSGAGKSGGQRQKLATTCLAAALRYQLGGEDGELPRYCAVVLDEAFDKADNEFTALAMNIFENFGFQMVVATPLKSVMTLEPFIGGACFVEISGRHDSGVLLIEYDEQSRRLKLPERTRSAAANTTAVAEQE

SEQ ID NO: 36620 - protein, 393 aa, Xanthomonas sp. Leaf131
MARADCMLLPAAALQALRGQWQRQRGDWLIGASAPRPIVLQPPTQAQAGARFDAFGDWLRSWQRVDLPGRVEYRDVLWSQLGPQRLPQTWVLETPADAAAALQEHDRWQRASARCASLQAHWPEAAGLAARLRRQFDLLADSAQADIDRLVAVVDWLHRHRDSGLFLRQLPIAGIDSKWVHTRRGIIADWLGGLRGIAEPRSFDSLAGLRSAPDRVRLRLLDPALRRQLGGLDDLSVPIEQLAALRLPIERVLIVENLETGLACEPLAGTALLMARGYAVDYVRNIEWLRTLPLFYWGDIDTHGLAILHRLRTHAPQTVALLMDQATLLATPRAMWGHEPRQHRAHRLAALTPDEQLFYARLRSGHFGAAPRLEQERIAWSQAWPQIQAALRG

SEQ ID NO: 36621 - protein, 485 aa, Arthrobacter sp. Leaf145; identical to SEQ ID NO: 34088

SEQ ID NO: 36622 - protein, 293 aa, Arthrobacter sp. Leaf145
MTEDITTTDITEAEQDTVAEDITEAEQDTVEVPDETAQHPDPFRITPRDTFVDGAALFPGDTGVLPMKVRHALVKLLKGPYVDGARDEKLWTTLLDNQLILRSRLSELFLTLQLDHDRKIAVLRPVDPEIIGASSRSSILRQQRALSRVETIVLLRLRLLLDRHVTAQTDPTITREEISDLVANYTPAGQQDALRDSDVVTRTITKLLARQLLLPTPLDDTYTISNALPLALPFENIGDIPAHIEALVAVAADESGTEPLLDIEADSSPTSEDGDDDAGTAADSDPAAEEAAK

SEQ ID NO: 36623 - protein, 1157 aa, Arthrobacter sp. Leaf145
MTIASMLPLGELTNPGQMRLALVQVVNWGTFHGAHTMHVDRKGTLLTGNSGVGKSTLFDAMLRVFDARPRSNEAAAQRSGGAVEDKRTTFTYMRGKVGDKAVGDSSASAFQRPGATWSAVALTFDNAAGTKVTVSALFDLPKNGTESSVGRFYVIDSKPLDLEAIEGIAQKRFTRSALESIFPDGQVFDVHKAFAERFRRLLGINSDQALPLLRVIQAGKGLGGSVNTFFRDQVLDAPATLAAADDVVEEFSNLMSIRQRLEDVRLQRDQLAPVPGLNKEYAQALLDANRLRELAGEEFEAYKQQLAVTVHAKTLARFKELAQSKAQELAAERVVRDALAKELRDLELDYNNRGGNAISAIEQSLENAKVGLKLRQQVEDSARKALADAGLNLEWSAEGWDQAHEQAAARSIELKDDSEALKELRFEAFDGHATKKRELAAAQQELLSLRSRKSLLPPSSIENRAAIAAATGVPEERMPFGGELIDLAEGQDQWRPAAERALRNLATTLLVPGEHFAAVTRYLNDNTVRGALRAVDVSKPLAGGALAVEDVSDGDLLTKLSILTSGANADAGEWIRERIALDFAYPCVEDPDELASMDKGLSLGGVVKRNRHTVEKDDRFTSRQDYVLGFDNASKLELVAARVGELENELAKAAELAQSREDSHQGMARQLEALRRVAEDERPWEQVSAAVAADELARIEQRLVDALAAQADLEPLRASIEAVREKHQSSTGVAAVLQSEYKALDHKMTTADGLLDAARLKLEQSPPSASTVTALEPYFDGVADVSELYELDNLANSVRNKLLDELHAAESRSQATAERLTRMFEAFVRDWGSAISADHGTSIGAAGDFEARYHAIMSDGLPAQEAEFRLFFNQRTHESFSTLLHLLDEERRSITSRILPLNGILSEVNFHEGSFLELDIKQTLPATAKVFKDAIQNALKTKHTRPSRGASAAGSAETDDDAELTARYKSLETLVKRLGSQTPEDRRWRAEVLDVRGHVFIQCKEHREVAKQGKAGASKTGKKKTEVFMHADTGSMSGGERQRFTAFIMAAALSYQLGIAEQGFTTYGTVMMDEAFVLASEEFAGAGIKALHEFGFQLLLAAPENVIDLSRHLGSVTEILRDKRTNRSGVLTAPVIAGPGEPGAWRSEANPVDIVLR

SEQ ID NO: 36624 - protein, 489 aa, Xanthomonas sp. Leaf148
MKHQARIAGYRQLRDQPAWKLLAADHAPELIGLLQTLLLDGERRLPSAVLHARLQHQLDALRGDELSRELPRTAQAYLAHWLSQGWLERRLPEGAAEEDYELSRAATQAIRFIASLRESGSSATESRLSLVIEQLVQLAGQTEADPATRLAALREERDRIDAEIERVAAGRVAALDGKRALERTRDLIHLADELAEDFHRVRDDFEQLNRQFRERIIDDEGARGDVLEQLFSGVDVIADSEAGRTFEAFWSLLNDTQQSSQLDNALDALLARGFARKLDRRERAFLRGLTGTLLERGGEVHTVMQHFARSLRGFVQSRGYLEQRRLNQLLKQAQGEALQLRDSLHATAATGYTQALSASRLRSLSQWRLHDPRLTQVDGRVYAADAAEISLDSVGDLVAQSEIDLRTLRNDLYVLLGQQPRLTIGDALQQRPAAQGLGSVIGYLSLGTRHGVVIDGHMEMVQWEGGDGILRRARIPLVWFTREKRNELV

SEQ ID NO: 36625 - protein, 234 aa, Xanthomonas sp. Leaf148
MNWSEQAPLDADDDNDDARDAALTLPASDAANAASGGALFLGDTGTLPFDARRALCQLLAGPSIDAQRHGSLWPALLRNEAAVRQVLCELFLQLVLDREGGVAFTRQADTAELESPSLLRSAPLTFIESVLLLFLRQQLAEADTRGERAVVDETQLVEALSVYEKNVSTDKAGFTRRVMTAIGKMRDNQLLSRLRGSEERYEVSPVLKLLFSAEDVQALVVAYRELREGEVALE

SEQ ID NO: 36626 - protein, 1334 aa, Xanthomonas sp. Leaf148
MNSQSNLSPASPGASLFAETLAEQRAQQFRMRRLQVHNWGTFNGLTEVPIAEKGFLFVGRSGSGKSTLLDAMSALLTPPSIVDFNAAAREAERSGRDRSLVSYVRGAWADQQDSASGEIATQYLRKGATWTALVLEYRNAQGEAVSLIRLFWIAGSGNAAADVRRHYMVAPRSFDVASELDGFDLDLRKLKARLGEDVAHFDGFAGYAERFRHALGISNEMALRLLHKTQSAKNLGDLNAFLRGFMLDEPRTFEAADRLVEDFAELDGAHHAVVTARRQVETLSPARAHHAALMDLRRSVGELRELQLGVDSYREQQRVALLQARLLELDSQDRGLAGEEGQRRESLDNHEQKLAGLEREQRAAGGEQIEELERERVRVERERDERLRRRAQIEQACRQLGTALAAGASGFAAQVAHAQSVLDGGKQHASALDEAIAERMGERRDDERRFADIRSELDALKKAPSSLPAPMQALRARLCEDTGIAESALPFVGELLQVRADQVAWRGAIERVLHGFAQSLLVDERHYAQVSEWVNRTHIGTRLVYFRVRRNDELHSRRVDPDALPGKLQLREHAFTDWLRNELTRRFDYACVDNAAALRNADRAITREGQVKHPGDRYEKDDRHAVNDRKRWLLGHDNRDKLKVFEREAQALAQRIASCEADVAALRKQREQDQEKQLAAHTLVERDWDEIDVGPKLQRLTDIDEQLQQLREGDSGLRALGQAIETARTLRDQAKRTFEDVRLERAQLARERVRLEQQQAGGAGRAGTAALTPTQLQGLHERLAALAPLSLDNLEAHFRVVERGLAEQLAESQGRDSRLSAQLLECFRRYCQQWPEDSGDFTVSLSSADDFLARLDRLESDGLPRHEHRFFDLLQTQSKNNLLALQRHTAEAHKGIKQRMDEVNASLEQVPFNRDTILTIEVSDRRLAEVQEFQQQLRAVLSHQQTEDRALAEAQFATLRTLVARLGAQEPEARRWREQVLDVRLHVEFIGVELDAQSRAQVEIYRSGAGKSGGQRQKLATTCLAAALRYQLGGEDGELPRYCAVVLDEAFDKADNEFTALAMNIFENFGFQMVVATPLKSVMTLEPFIGGACFVEISGRHNSGVLLIEYDEQAQRLKLPERSRGEEPAASQAEPPATAAQQRHVAAVSDAPSDREADEQATAGAAIAAPTEAVVAAATRRGKGKPATAATSSAPVSAPRSTRAAGPTRTAATADGAASAKRTSAVSGARRTQAATPGKLPKAAAKPAAKPALKRPAAAAKPAAKSTSAAAATARTVKPTSSPTRAAKAPAGAAKVASSRRTSGKQAATPASAASTKARPAPARGAASKARSKR

SEQ ID NO: 36627 - protein, 487 aa, Microbacterium sp. Leaf159
MTGSRAEAAYTRAVTAFSTPTLDLLHGRFAPFVVASLTLLFNADRASVAVADAHAELAEVLDELRAAGYDEDDRKLPSGSGRDVCRNWVRLGWLIQQIDDDVEVYRLSAHAVAALEISGRTGGGRTRVSNSRVRTLLDAVDHLSVSAEVDPVRRLSRLHAERELLDAEIARIQESGHADPADDEELLEEAENVLHLARELPADFTRVAESLRAMQRDVVAHLRRDERPTSEVLREYLQRAQDVMQSTPEGRAFAGALRLIGDPDRIDALTEQLRGLLGLPFARMLDGTQRAELDAIARRVELGVEEVLAAQRRASHVITGQVKTHDPLRDRQIDDLLRDVIAGLHGWSGPATVVDPVRSMPLIDLGHLRQTTSDIRPPRAPAPLTDADDVDFLDHDTRAWGGPRYAELEAYVAGLGADFDLADAFRAVPDAARRPVDLLGLLEIAHRNGLTDGDGISTVEALRPDGTTRRFAFGTVTARSTKEDADE

SEQ ID NO: 36628 - protein, 219 aa, Microbacterium sp. Leaf159
MSDDDLTTAAVDEGFIAPTAMEDDLEAHFPGDRGTLDPEIRRVLVHLLQRRFLSMERNRREWTLLLEHQQVIESRLNDIYLRLIIDHARGFAYKQQLRSDEVEMPVLLKDSPYSRAETLVLVHLRTVYQRESASGEGSVRIDVEDVEQTVLSYFADVDGGTAKQQRAIRSALDRLDREGIVQEETSGRYRITALVEVVLSAETLKELREWLRAQAVVAR

SEQ ID NO: 36629 - protein, 1119 aa, Microbacterium sp. Leaf159
MTMMDTLFGMIPASSRGQQWVAEELQLINWGGYDGGPHRVRFSSDATLLCGGSGSGKSTLMDGYIALMMPHTTPFNGASNGGVTGRPRGEEQRNILSYGRGKIDESRTDEGTKLRVLRGDGEDTWSAVSMTWLDHDGSRFTAVRGWYIPADARTLEDTTRLRATIEGAFDLTHLERAAGQRLSDASVRAVGLDPVATDREFSARLHAVLGIGAAGSGAKAISLLARIQAGQQITTVDDLYKKLVLEEPETMATADAVVAHFDELESTRTRMLVAKQQVAALEPIRGIAQRIEAASERMQVVDEVGVFSESTSLAALWSAERRLDLLREVETDLRDRTQALQLAVREKNALISAAEVEREGLLDVLRQSGGDRLETAQRELRGVERRLEDIQRERARFDAAAAELGAEVHDAAGFEDLLARLGRELPQTGVRGARAAFADAETARRSAATELARVQAERDRTRELRGSIPAHLHESRALLAQAAGLAPTDLPFVGELIEVRTEFEPWREAFNLALGGFARTLLIDVENLGRFRAAIDTVRTAERISYEGVHTGLAESTTSDPRTLPGRLDHRSTPFTGWLQQRLRERFDYVCVDSSAELAEHPRALTLAGQVSQGDRGSHGGHGRANMLGFSNARRLRELDEQISELENRRDAAASAAVEAEGGLDRIEAAAKAHAKIEDFTWDQLDVEAVTAERARWLAVEAEVTDENPKIAELRAQAEELRKRAGRLRDENSRLGGDLTLAQDRWVEVTDQVDACQRIVDAAEASEIAVEERHRSFLDARFLGADSAVSVTASERLAHLDSALRTAATRLLEDRTSAAAAHADQREQMRRLMTGFLERWDTLTILPDPDESVAEFEGILEALETNGLHELESEWRDSLLKLSGNDLTSLDSTLGRSLREIKNRIDPINRIMEELPFYDDEHRLQITPRENQSEARRRFRRELREVRGLIEAATTDADRESVYRRMSRLIGRMRRTAPDFAELIDVRNHVRVSAERIHATTREHVALYDHIGEKSGGESQELVAFIVGAALRYQLGDAGAARPRYAPVFMDEALIKADAHFTKRAIGAWRGLGFQLVIGAPNDKYSAIEPHVDVEYDILKDTRGRSWARPKVGLPAAGE

SEQ ID NO: 36630 - protein, 487 aa, Microbacterium sp. Leaf161
MTGSRAEAAYARAITAFSTPTLDLLHGRFAPFVVASLTLLFNADRASVAVADAHAEMAEVLDELRAAGYDEDDRRLPSGSGRDVCRNWVRLGWLIQQIDDDVEVYRLSAHAVAALEISGRTGGGRTRVSNSRVRTLLDAVEHLSVSAEVDPVRRLSRLQAERDLLDAEIARIQESGHAEPVDDEELLEEAENVLHLARELPADFTRVAESLRAMQRDVVAHLRRDERPTSEVLREYLQRAQDVMQSTPEGRAFAGALRLIGDPERIDALTEQLRGLLDQPFARMLDGTQRAELDAIARRVELGVEEVLAAQRRASHVITGQVKTHDPLRDRQIDDLLRDVIAGLHGWSGPAAVVDPVRSMPLADLGHLRQTTSDIRPPRAPAPLTDADDVDFVDHDTRAWGGPRYAELEEYVAGLGAQFDLAEAFGAVPDAARRPVDLLGLLEIAHRNGLADGDGISTVEALRPDGTTRRFAFGAVIARSTKEDADE

SEQ ID NO: 36631 - protein, 219 aa, Microbacterium sp. Leaf161
MSDNDLTTAVADEGFIAPTAMEDDLEAHFPGDRGTLDPEIRRVLVHLLQRRFISMERNRREWTLLIEHQHVIESRLNDIYLRLIIDHARGFAYKQQLRSDEVEMPVLLKDSPYSRAETLVLVHLRTVYQRESASGEGSVRIDIEDVEQTVLSYFADTDGGTAKQQRAIRSALDRLDREGIVQEETSGRYRITALVEVVLSAETLKELREWLRAQAVVAR

SEQ ID NO: 36632 - protein, 1119 aa, Microbacterium sp. Leaf161
MTMMDTLFGMIPASSRGQQWVAEELQLINWGGYDGGAHRVRFSPDATLLCGGSGSGKSTLMDGYIALMMPHTTPFNGASNGGVTGRPRGDEQRNILSYGRGKIDESRTDEGTKLRVLRGDGEDTWSAVSMTWLDHDGSRFTAVRAWYIPADARTLEDTTRVRATVDGAFDLAQLERAATHRLTDTSVRAVGLDPVATDREFSARLHAVLGIGAAGSGAKAISLLARIQAGQQITTVDDLYKKLVLEEPETMATADAVVAHFDELESTRTRMLVAKQQVAALEPIRGISHRIEEASERMRVVDEVGVFSESTSLAALWSAERRLDLLREVEADLRDRTHALQLAVREKNALIAAADSEREGLLDVLRQSGGDRLETAQRELRGVERRLEDVQRERSRFDAVAGELGIEVHDAAAFESLLTRIGRELPQAGIRGARAAFADAESARRAVETELAQVRAERDRTRDLRGSIPAHLHESRALLAQAAGLAPTDLPFVGELIEVRTEFEPWRDAFNLALGGFARTLLIDVSNLGRFRAAIDSVRTTERISYEGVHTGLAESRPADPRTLPGRLEHRSTPFTGWLQQRLRERFEYVCVDSSAELAEHPRALTITGQVSQGDRGSHGGHGRANLLGFSNARRLRELDEQVTELEIRRDAASSAAGEAEAALDRIEATAKAHAKIEDLAWEQIDVEAVSAERARWLAVEAEVTVENPKIAELRSQAEELRKRAGRLRDESARLGRDLTLGQDRWVEVTDQVDASQRIVDAAEAAGIALDERHRSFLDARFLGAEASVSVTASERLAHLDAALRTAATRLLEDRTSAATAHAEQREQMRRLMTGFLERWDTLTILPDPDESVGEFEGILDALETNGLHELESEWRDSLLKLSGNDLTSLDSTLGRALREIKNRIDPINRIMEELPFYDDEHRLQITPRENQSEARRRFRKELREVRGLIDAAETDADRESVYRRMSRLIGRMRRTAPDFAELIDVRNHVRVSAERIHATTREHVALYDHIGEKSGGESQELVAFIVGAALRYQLGDAGAERPRYAPVFMDEALIKADAHFTKRAIGAWRGLGFQLVIGAPNDKYSAIEPHVDVEYDILKDTRGRSWARPKVGLPAGGE

SEQ ID NO: 36633 - protein, 558 aa, Frigoribacterium sp. Leaf164
MEEPSGHDALSRDGVREVFGTDPTWALLRSSNSRWILPLFSRHLERAEGPVSADWFHQAVAEALAENAAETAEAAAGETANVSDTTPGEAPAGPAETADLPEAKTPADYCRGWVDSRWLIRTRASGEEDGQAARARYRLSPHALKALRIVRELAEADNAVSEARFGSIAHAVRQLAGLADPDPASQVARIDEQIAELQRRRDEVERHGPVPATADVVSRQVREVVRLTASLPEDFRQLSAMVEQRHREVARRATHEHVGKGALVEQYLRENDLLEQTPEGRAYRGFAQMLSSREIDVMRADIDKVLSQPGAAEHLTERQREQLEQLISSLLAEEQSVQETYGRWTSSLRRFLSRSGAEKHQRLLTLAERALHAGAAWAERRPGAAVLPEDVLGLGPVDVVDVSQVQLWSERGRPTVEVRVAEGDAALPAADRAALRLTAGTSPAAVAATIDRLLDEGDGRDEVTSADVYRATEPEFRRLALVLSMLDLAVERGVVTDETESVVLTPDDPSGTGAGAPRGGAPREVTLPRLVFTRDAPPPGADAPAPDDTARTLQGDPA

SEQ ID NO: 36634 - protein, 304 aa, Frigoribacterium sp. Leaf164
MTAAPTDDLRPADATPGAAADATLDVAPDSDDAPARPVSDELPLAGRKALVTLMTHRFISRATQKEAWAGLLAHEPEVRARLAEMFLELEVDRGYEVAFKRQVGGDDAPVLLRREKPLSRDASFLLIFLRREHAYADGDDDAVVVSRDQVAEFLGRFHDDTAHDEVRALRRVDAAIAAMVARDLLEPEPDDPSLFVVAPAIVPLVRPEQLRHFERVYLEAAGAEPEAGAPAASAAAPGELDEPDELTDPDPDPELDAGDDLTELDPDAAHDAGDTPAPDDAPRASDTALDLPLDLPLDPEADQA

SEQ ID NO: 36635 - protein, 1199 aa, Frigoribacterium sp. Leaf164
MTPASPADAPRASRTPVEAGTAPAADATAATTPAPPVTPALDVDVEPDAAPDLGMFHSGQYRIELVQLLNWGSYAGLHRMPVGRGGIAILGPTGRGKSTVLDAMAAVIMPNPQEFNRAARDDSRQRSERTVYSYARGKTDEVRDADSDRTTTRFLRPLGESFASGAAITWSTELGETLTAVRLAWIGPDTASQDDVTQASVYLLVRGRFDLSRLTDVRRDETSTSPLTKSSLTRLVDPAHDLVTYSQPELRVQLCARLGIGGSDESQLKALTLLRRAQASKGVFSIDELFKQFVLTQPKALSRWETTLATYREASQLYDVFETTRRKLDVLEPVPGLAERWRTAGDDATAKRRLLAGGDDEPRRLDVWLAEAVGSWVGGEVDRVQTEKRGHVETRRRAAEAAEAALRAREQALAQIADLGGDPSHSLREQVRWAGEALGRVEKEHRRFAAPLEGVGEPVPTTADELESLRTRATELAAEEAAARREHDELRGDLAARIAETRRSVGERQREKESFERRRSNVPDDAVERRRRIADGTGVPVARLPYAGELFEVATEHRDWTTAIERVLGDLATHLLVDPDDFDAVRRFVDREDMRGRVTLVPATPGLTPTRTPLARTVPSMLVFDEASPFVGWLRDEVVDDRSVLCVDDASALDDPLPVGAKGAVTRSGLRTGSRRRVTKDDRRVRSWIGLDNAGRVAELTAEITVLTESLDAARAEWDAAETVATARRTVVETVARAAAVEWSDVDPAPARARLADLQAQLERVAVERPEVTALQAEAAAQDEARLEAVRRGAEVQQVLDQLEATHATLVDIEDAFSDASGADPLTDDERVLLAPLPFAAPREVADVERTRREAAAQLRAQVDAHDRERTQHELTLELVFTRYLELDPNAGFDASIESLPAVLAIHRTLVDDDLPHAKQRWLAKAGASVGDSLRALLVQIEEDGHVIRRGVRPISQALAAIEFRQGSTLDIEPRPVSNSDLAEFKRTLREHTGGGGGGSAVGGGSAAGGSAASAVDLRDPAEIERRFLRLRRDLASLEERSKSGEAWRRRVLDAREHYQFRAIETRRDGTQIVHEGVAGKSGGEGQELIAFVLGAALRFRLGDGTDRVPTYAPIVLDEGFVKADTEYTGRALSALRSLGFQLVVGAPRDKVNAFEQHVESVAYISSDPVNPELSRIYPLTIREAMEVERHGLDPAALG

SEQ ID NO: 36636 - protein, 497 aa, Leifsonia sp. Leaf336
MDEALDGARVAAVWEDHPTWALLRSYNGRWVLPLFSRHLEYADGTVSADWFHQKVADALEELDYDREPAEPETTRTSPAEYCRSWVDSRWLVRTRAGAGEGRARYRLSQFSLQALRIVRELAEPDSAVSEARFASIANAVHQLAALTDPTAESQLDRLDREIAELQRRRDDIARHGASVATPEAVSRQVREVLRLTATLPEDFRQLGAMVEQRHRDVARAASSQTVGKGALVDRFLRDNDLLEQTPEGRAYRGFAAMLSSRELETMRADIERVLARPGEITDLTERQRAQLETLITSLLAEEQSVQETYVRWTSSLRRFLSRTGSDRHARLLALAARALDAGALWTERRPGPALIDGELLGIGGWDLVDVTQAQLWRDRGRPEVGVAITENDDPLPDDEREALRLAVATSTAAVRETIDSLLAGAETVTGADVYAATPAEYRRLGLAVSLIELGAENGAVAEGVQTVPLDITAGAREVTMPLLVFGRDAADQEADGL

SEQ ID NO: 36637 - protein, 232 aa, Leifsonia sp. Leaf336
MSATETMTEGREEADTTGADAFGDRMAGDALPREARIALVTLLTSRFITRAKHPEAWRGLLDHEADIRARLDELFLTLHLDLAHEVAFKRQNGEDGVPVLLRREKPLSRDASLLLVLLRQEHAYADAQDEPVTVTRDHVAEFLGRFQGDSSHDEVRVDRRIRAAIAALDRLELLTPTPEDPDVYVVSPAVVPLIGTDELLHLERMFLAAAGEDAPDEDDDDAADDTPEEDGE

SEQ ID NO: 36638 - protein, 1138 aa, Leifsonia sp. Leaf336
MNDLPEDDGLVRRGQFRIELVQLLNWGGYDGLHRMPVGRGGIAILGPTGRGKSTVLDAMSAVIMPNPQEFNRAARDDSRQRSERTVYSYARGKTDEVKDAGSDTTTTHFLRPLGTAFPSGAAITWRTELGETITAARLAWIGPDTSTQDEVTTATVYLLAHGEFPLGRLNELVQEPGSSSPLTRASLGRLVHPERDLVTSSQPELRVRLCEELGIGGSDESQLKALTLLRRAQASKGVFSIDELFKSFVLTEPRALSRWETTLSSYREASALYDVFETTRRKLEILADVPARAEQLSAAADDATGKRKLLTAADGESDPRLRVWLAEHVRDWVSGQVDAVRGRKREQETLRRTAEADEHAAHRAQQDAQARLAALGGDPSVALRRELELAERILAAQARERASADALFARAGLDAPASAEQLAGAQAQAEAALAALAADDELKAERYELAGRVDAAKKAIAAVSAEKRSYEQRRSNVPADADERRRRIAAAVGLPAESLPYAGELFEVAPGRRDWSRAVEAVLGETATHLIVDERSFSAVRRFVNDGDMRGRVVLVPAVAGLAPELDPIDRTVPALLHFDEASPYWGWLHDELVRDRSVLCVESPEELDAPRPAGVSAAVTRSGMRSASRGRVIKDDRSSASWIGLDNTPRIEELAARLADLETELGAARAASDSAEAAHSDARTRAEALAALRAIQWEAIELAPHESRVAELTEQLDRVSVEHPEATALQEEADRYDRERLDAAKRGAALQARLEELESEHADLNDIEDSVADALERNSPLTPEERLLLGTLPFAAPKQSSDVDRRYVEALAVLRDQIDTHQQNVEHLSELLVVTFERYRDLDPSAEIDAGIDSLPAVLAIHRGLVDDDLPRSKADWLVKAGASMGDSLRALLTQIEEDGHAIRRGVRPISNALRGIEFREGSTLDIEPRPVSNSDLHEFTRTLRKHTAGAAGSATADRRDAAAIERDFLDLRRDLSRLEERSRAGEAWRRRVLDAREHYQFRAIETRADGTQIVHEGVAGKSGGEGQELIAFVLGAALRYRLGDGSDAIPTYAPIVLDEGFVKADNEYTGRALAAFRGLGFQLVVGAPRDKVNAFEEHVESVAYITGDPARPGFSRIYSLSIREALEGERLGALVE

SEQ ID NO: 36639 - protein, 515 aa, Plantibacter sp. Leaf171; identical to SEQ ID NO: 36528

SEQ ID NO: 36640 - protein, 282 aa, Plantibacter sp. Leaf171; identical to SEQ ID NO: 36529

SEQ ID NO: 36641 - protein, 1128 aa, Plantibacter sp. Leaf171; identical to SEQ ID NO: 36530

SEQ ID NO: 36642 - protein, 482 aa, Arthrobacter sp. Leaf337
MSRSAPSSADAINARLRDLELLTKGPAWALTRSAPWVIAVLQASFTRTRPQLPLEEFHADVDAFLEQLRRQDPGLGGVANGKSFGDEWTRKNFLTRRNQSGQIVYEVTEPAARVLAFLDSLSSERSTLNGSRLGTLLGDVEKLANETNPDQTARLESLEDEIEERRQLIEDISSGDFDGLLDDDEAVEAAGNILDLAASLPADYKKMRDRIEELVGELRNQIIEESLSKGATMAQVLEADKRLRQSPEGRTFRSFTAFLEDPQQQLRFRSAIGEVLSRQFADDLSHEDRETLKNLVAELRTQHSQIQRIYGKLSESLNTYVQSDDFRQSVRLRKVLREAEQAIRSLPYERERPGLVPGPVLFNAGFESLSMVKLFDPDEFAAPPKLADPIAFSDSDRVRSPRTGKAKPAAIRAALAGAATLPEAWEQLPPEERHINSIRALLSHALHDGAGFDRAGWDAIDFEQIDGTTRKAFLPVVTLTKD

SEQ ID NO: 36643 - protein, 274 aa, Arthrobacter sp. Leaf337
MTEEMTTTAAPVAGPVETPEAPAAPEHTYADPFTVTPRDTFVDGAALFPGDTGVLPMKVRQALVKLLKGPYIDGGRDEKLWTTLLDNQLILRSRLSELFLTLQLDHERKVAVLRPVDPDAIGGSTRSSILRQQRALSRVETIVLLRLRLLLDRHVTAQTDPTITKEEIAELVAHYQPSGQQDALRDSDVVNRAITKLLARQLLITTGLEDVYTISNALPLALPFENIGDIPAQIEALVAATADPTGTEALIELDRDSPASPDDDTEDDAEGSTK

SEQ ID NO: 36644 - protein, 1155 aa, Arthrobacter sp. Leaf337
MSIATMLPMGELTNPGQMRLALVQVVNWGTFHGAHTMHVDRNGTLLTGNSGVGKSTLFDAMLRVFDARPRSNEAAAQRSGAVEDKRTTFTYMRGKVGDKAVGEGSASAFQRPGATWSAVALTFDNAAGTKVTVSALFDLPKNGTESSVGRYYLIDNKPLDLAAIEGIAEKRFTKAALDVIFPDAQVFDVHKAFAERFRRLLGINSDQALPLLRVIQAGKGLGGSVNTFFRDQVLDAPATLAAADDVVEEFSNLMSIRQRLEDVRQQRDQLAPVPGLNKEYAQSLLDANRLRELAGEEFDAYKQQLAVTVHEKTLVRYKDLAQAKARELAAERAVRDGLAKDLRQLEADYNNQGGNAISAIEQSLENARVGLKLRQQIEEAARQALAEAGLDLEWTAEGWEQAHTHAAARSAELQGDSEALKELRFEAFDGHATKKRELAAAQQELVSLKTRKSLLPPSSIENRTAIAAATGVPEEQMPFGGELIDLAEGEERWRPAAERALRNLATTLLVPGEHFGAVTRYLNDNSVRGALRAIDVSKPLAGGALAAEDVADGELLTKLDILTTGPAADAGQWIRERIAVDFAYPCVEDPDELARLDKGLSLGGVVKRNRHTVEKDDRFTSRQDYVLGFDNASKLELVATQVEDLQQELAKAAELARSREESHQGMTRQLDALRRIAEDHRPWEQVSAAVAEDELGKIEQRLKDALAAQADLEPLRANIEVARQKHQASTEAAAVLQSEYKALDRQLTAGDSLLEAARTRLGQAPPSESTVTALEPYFSAFGDVGEMHELDNLANEVRTRLLAELHTAESRGQATSERLTRIFEGFVREWGTAISADHGTSIGAAGEFEARYHAIVSDGLPAQEAEFRQFFNQRTHESFSTLLHLLDEERRSITSRILPLNGILSEVNFHEGSFLELDIKQTLPPTAKQFKDAIQNALKIRHTRPSRAAGAAASGAETDDDAELTNRYKSLETLVKRLGSQTPEDRRWRAEVLDVRGHLFIQCKEHREVVDPASGKKRGKRTDVFMHADTGSMSGGERQRFTAFIMAAALSYQLGIAEQGFTTYGTVMMDEAFVLASEEFAGAGIKALHEFGFQLLLAAPENVIDLSRHLGSVTEILRDKRTNRSGVLTSPVIGPRAGAEGQWRSEANPVDIVLR

SEQ ID NO: 36645 - protein, 491 aa, Microbacterium sp. Leaf179
MSSTRTEAAYLRSVTAFKNPTLDLLHGRFAPFVVAVLSVVFTPDRAAVTVADAHVEVAEAIDELRAAGYDTDDDRRIPAGSAREICRGWVRVGWLGLQIEDDVEVYRLSAHAVGALEIAGRAGGGRARVSRSRVRTLLDAVERLARDAESDPARRREALLEERAALDAEIAALEEGIVEPPDDDHLLEEAENVIHLARELPADFSRVAESIAAMQRDVVAELRRDVRPTGEVLREYLERGRQVMQATPEGRAFQGALRLIGDPENIDDLTDQLHAVLTQPFSRLMTAEQRGELDAIARRVEAGVQEVLTAQRRASHVITAQVRTHDPIRDRQVDDLLRGVMAGLHRWSQTKTPGRVEPVRTLPLADIGHLRQSLSDVRPAGAPAPLASADVEAEFVDADTRAWGGPHYAELEAYVATLGDGFDLATAFSGGSADTRRPVDLVGLLEIVHRGGLTETDDVSIVEAVRPDGTTRRFAFGAVRANSLREKDADD

SEQ ID NO: 36646 - protein, 257 aa, Microbacterium sp. Leaf179
MENDPDALFPGDRGILDSEVRRVLVRILQRRFLSAENSPVEWKLLLEHQQMIESRLNDLFVRLVVDHARGVAYKEQVRSDEIDVPILLKDEAYSRAETLVLVYLRTVFQRETTAGTASARVDVEEVEQTVLTYFAETDGTRASQQRAVRTAIARLDREGIIEEESEGRYRIGPLIEVVLSAETLRELQLWLEEQTRDAGSSPEGGVVTSASDEHTQDAGSPREGGVMASALDEHTQDAEAAGDREVAASGTFEGDPR

SEQ ID NO: 36647 - protein, 1117 aa, Microbacterium sp. Leaf179
MTMLETLFGLIPAASRGQQWVAEDLQLVNWGGYDGTHRVRFAPTATLLCGGSGSGKSTLMDAYVALMMPHTTPFNGASNGAVVGRPRGQEQRNILSYGRGKLDESRTDEGTKIRVLRGDGVDTWTAIAMTWADHDGARFTAVRAWYIPAAARTLDDAVKVRATVHGAFDLRDLERAAQQHLSDAAVRATGLDTLATDREFSARLHGVLGIGAAGAGTKAMSLLARIQAGQQITTVDDLYKRMVLEEPETLTVAEAVVSHFDGLESTRTRMLEARQQVRALQPIRAMKTRIDEAAERLRLIDALGRFTDPDSRASLWRAQRRVDLLGAVEAELRDRTHATDALVRERQALADAAEAEREGLGDVLRAAGGDRLDAAQRELRTLERRLAGMQRDRERFETALAVLQTEVSTEKQFAALVDDARRTLGDADAKTAVRDAFVAASSTHTDLRQQLAALEAEHRRTQTRDDNIPPRLHEAREALAEAAGLTAAELPFVAELVDVRTEYEPWRGAFTLALGGFATTLLVDAAHLTSFRAAIDGVRLSERLRFEGVSTGLPERGGLDPATLPGRLEFRTSPFTGWLQDRLEQQFAFVCVDAASELSRHRLALTISGQTSQGARGAHGGSIRQSVLGFSSRVRLTELGEQIVTARRALTAAKATVDEAAAALDAFDERRSALEKIADLSWDQVDVASVQRDLDRWNETIAEITAGNPRIAELQEQISGTRARAGRLREEIGGAKTEQQAVAARWAEITDDVDAAQMLIERAEDSETALSPDEIDYLDALFVAPGASDATPSQLLASFDAALESASRRLLEEQRSAQETWGDQRESLRRTLIAFTDRWPSPNLLADPDESLGDFERILADLEASGLHELEAEWRDSLLRLSGNDLTSLDSALTRALREIRERIAPINDIMQDLPFYDDEHRLQIVPREGQSEVRRRFRRELRDVRAAIDAASSDEEREAVYTRMARLINRIRSTAPDFADLVDVRNHVRVSAERFRADTGEHVALYDHIGEKSGGESQELIAFIVGAALRYQLGDAGAERPRYAPVFLDEALIKADAHFTKRAIGAWRGLGFQLVIGAPNDKYSAIEPHVDVEYDILKDTRGRSWAKAKVGVAAEG

SEQ ID NO: 36648 - protein, 596 aa, Frigoribacterium sp. Leaf186
MNHPSGHDDALSRDDVRAAYEDDPTWALLRGYNARWMLPLFSRHLEHAEGPVSADWFHRQVADAVEQNAAEQAASERAASEHPEEGRVASSSTVATPTTADATPTDPASSTTPAPPAEGRTTPAEYCRSWVESRWLVRTRASGPDARAEYRLSPHALKALRLVRDLVERDNAVSEARLGSIAHAVGQLAGLADPSREAQLARLDEQIAELERRKRQIERHGTEPAAPDVLRRQVREVVRLTASLPEDFRQLGAMVEQRHREVARRASSEHVGKGALVDQYLRDNDLLEQTPEGRAYRGFAQMLSSREIDVMRADIEKVLAQTDAAEQLTERQRTQLESLISSLLAEEQTVQETYGRWTSSLRRFLTRSGSDQQQRLLTLADRALHAGGVWAERRPGHAMLPADHGDGLGLGALDVRDVSQVQLHTDRARPTVDVQVTIGDAALPEADRAALRLTSGTSTAAVSATIDRLLADRDEVTSADVYRATDPEFRRLGLVLSMLDLALDRGVVGDDTETVELAGDPADATVPGGTGTGGAGPGGAGRGGAVRQVTLPRLVFRRAPAAPSDVEPAAAPPDVEPAAPVAPALTTSTPRTKDPA

SEQ ID NO: 36649 - protein, 329 aa, Frigoribacterium sp. Leaf186
MSPAAPLDETGVDEPARASSVEATGGSVDEPARASRDAFDDGDADDAPSGAASDALPLAGRKALVTLLTHRFVSRARQQEAWAGLLAHEAEIRARLDEMFLVLVVDHDHEVAFKRQGGEDDVPVLLRREKPLSRDASLLMVFARREHAFTDGLDEAVVISRDAVVEFVGRYHDDSGADEVRARRRADAAIAALVARDLLSPEPDDPELFVVSPAIVPLMTADRLAHLERVYLEAAGVEGDVEASVEGSGDEPRGDVDADVDALEPEVEPDSDDSADPDAEPDDSPEPDPTAVPLDLDLDLDLDLDLDTHPAAGTAPGTHPDTDPEAPQS

SEQ ID NO: 36650 - protein, 1154 aa, Frigoribacterium sp. Leaf186
MSTADTAPDLGMFHSGQYRIEQVQLLNWGSYAGLHRMPVGRGGIAILGPTGRGKSTVLDAMAAVIMPNPQEFNRAARDDSRNRSERTVYSYARGKTDEVRDAATDRTTTRFLRPLGEAFPSGAAITWSTELGQTVTAVRVAWIGDDTASQDDVTQASVYLLVHGPFDLSRLSEVTREGASQNPLTRGSLARLLDPTRDLATASQPELRVQLCGELGIGGSDESQLKALTLLRRAQASKGVFSIDDLFKQFVLVQPQALSRWETTLATYREASALYDVFETTRKKLDVLDPVPALGDRYELAGRDGSAKRRLLVDDDGPSRLRVWLAERVGSWVSGEVDRVTADKREQSERRRRAQADEQLAFRSREQALARISELGGDPTQSLREHVAAAEAELTAVERTRGRLAAALDGTGESLPRDDAQLAALGQRADRLAADDAAARAATADARSDLAARIGETKRALAALEKQKRSFEQRRSNVPDEAIERRRRIAEGAGVPVSSLPYAGELFEVAPEHAGWAVAIERVLGDLATHLLVDRDDFDAVRRWVNENDVRGRVTLVPATLDAEPRLTPVEHTVPAMVRLDPASPFRGWLHDELVADRSVLCVEGPDDLDDPRPAGTRGAVTRRGLRTGSRDRVVKDDRSTRSWIGLDNAARIAELGDEIVGREAELARVRAEYDAIETEAAERRRVADAVARSREFTWDELDTAPARARLDDLRAQLERISIERPELATLQAEAAQHDDDRSAATRRLAEIDQVLARLDEKHATLVDIEDEFADASDADPLTDDEQALLAPLPFAAPREATDVARLYRDAASQLRAQVDAHDRDRANAEATLVVVFERYLELDRTAGFDATVDSLPTVRAIHRRLVADDLPHAKQRWLEKAGSDVGDSLRALLVQIEEDGHVIRRGVRPISQALRSIEFRQGSTLDIEPRPVSNGDLVEFKRTLREHASGAERTGAPGSGAEGSTGGRPEEARDASAIERRFLRLRRDLAHLEERSKVGDAWRRRVLDAREHYQFRAIETRADGTQIVHEGVAGKSGGEGQELIAFVLGAALRFRLGDGTDRVPTYAPIVLDEGFVKADAEYTGRALAALTSLGFQLVVGAPRDKVNAFEQHVESVAYISSDPSNPELSRIYPLTIRQAIQVEQHGLDPAALA

SEQ ID NO: 36651 - protein, 491 aa, Microbacterium sp. Leaf151
MTRTRAEAAYLRSITAFKNPTLDLLHGRFAPFVVAVLSVVFSPDRSAVAVADAHVEVAGAIDELRAAGLDTDDDRRIPAGSAREICRGWVRVGWLGLQIEDDVEVYRLSAHAVGALEIAGRAGGGRARVSGSRVRTLLEAVERLARDAESDPDRRREMLLAEREAIDAELAALNEGVVEPLDDEHLLEEAENVIHLARELPADFSRVAESIAAMQRDVVAELRRDVRPTGEVLREYLERGRQVMQATPEGRAFQGALRLIGDPEHIDDLTDQLHAVLTQPFSRLMTPDQRGELDAIARRVEAGVQEVLTAQRRASHVITAQVRTHDPIRDRQVDDLLRGVMAGLHRWSQTRVPGRVEPVRTLPLADIGHLRQSLSDVRPSGAPEPLASEDPDAEFAGVDTRAWGGPHYAELEAYVATLGRGFDLATAFAGADAGTRRPVDLVGLLEIMHRGGLTETDDVSIVEAVRPDGTTRRFAFGAVRAENLRETDADD

SEQ ID NO: 36652 - protein, 235 aa, Microbacterium sp. Leaf151
MTDVDLRTPETDSPVFIAPVAMENDPDALFAGDRGILDAEVRRVLVRILQRRFLLAENSPAEWKLLIEHQQRIESRLNDLFVRLVVDHSRGVAYKEQVRSDELDVPILLKDEAYSRAETLVLVYLRTVFQRETTAGTASARVDVEEVEQTVLTYFAESDGTRASQQRAVRTAIARLDREGIVEEESEGRYRIGPLIEVVLSAETLRELQQWLDEQTQGSPVEVPASETPGKDLLS

SEQ ID NO: 36653 - protein, 1115 aa, Microbacterium sp. Leaf151
MTMLDTLFGLIPAASRGQQWVAEDLQLVNWGGYDGTHRVRFAPTATLLCGGSGSGKSTLMDAYVALMMPHTTPFNGASNGAVVGRPRGQEQRNILSYGRGKLDESRTDEGTKVRVLRGDGVDTWTAIAMTWADHDGARFTAVRAWYIPASARTLDDAVKVRATVHGVFDLRALEPAARTHLSDAAVRATGLDTLPTDREFSARLHAVLGIGAAGSGAKAMSLLARIQAGQQITTVDDLYKRMVLEEPETLAVADAVVSHFDGLESTRTRMLEARQQVRALQPIRAMRTRIDEAAERLRLIDALGRFGDPASRASLWRARRRVDLLGSVEAELRVRTHSTDALVRERQGLADAAEAEREGLGDVLRAAGGDRLDAAQRELRGLERRLAGMERDRERFEAALAVLSVEVTTEKQFAAVEDDARRTLADADAKTAVREAFVAASGTHTDLRQKLAALEAEHRRTQTRDDNIPQRLHEAREALAAAAGLTAAELPFVAELVDVRTEYEPWRGAFTLALGGFATTLLVDAAHLASFRSAIDGVRLSERLRFEGVSTGLPERTGLDPATLPGRLEYRRSPFTGWLQDRLEQQFAFLCVDSSAELAAHRLALTVSGQTSQGSRGAHGGSTRQSVLGFSSRVRLSELGEQIVAVRRDLATAKAAVETAAAALDAFDARRSAFEKIVDLSWDQVDVASVQRDLDRWNETIVEITAGNPRIAELQEQISGTRARAARLREEIGGAKTEQQALAARWAEITDDVDAAQILLERADDAGVALSDDEHAYLDSLFVAPGASDATPSQLLARFDAALESASKRLLEEQRAAQETWADQRESLRRTLTAFIDRWPSPNLLADPDESLGDFERILADLEASGLHELEAEWRDSLLRLSGNDLTNLDSALTRAMREIRERIAPINDIMQDLPFYDDAHRLQIVPRESQSEVRRRFRRELRDVRAAIDAAGSDEEREAVYARMARLIDRIRPTAPDFADLVDVRNHVRVSAERFRAETGEHVALYDHIGEKSGGESQELIAFIVGAALRYQLGDAGAERPRYAPVFLDEALIKADAHFTKRAIGAWRGLGFQLVIGAPNDKYSAIEPHVDVEYDILKDTRGRSWAKAKVGVAG

SEQ ID NO: 36654 - protein, 487 aa, Acidovorax sp. Leaf160
MKALRGAAALRNLREQPLWRLLAANKGPVVIAMLQSLFVESGQTLPSSVLHERLTRDIEALRAVGEELPQTPQAYVAEWLSQGWLTRRFPAGASEEEYELSADALTALRFVTGLLKPRTTATESRLSVVIHQLSRLAEETDTNPQSRLAALRAERDRIDRAIAEVERGGVKALAPDRAVERAREVIALAQELAADFRSVRDEFERLNRGLRQSLMENEGSRGDVLEQLFAGVDLIGESDAGRTFHAFWRLLTDSEQAATLRESLDEVTGRPFARQLESQERKFLLGLTGALLNEGRGVHDVLQHFARSLKSFVQSREFLEHRRLHGLLKAATQAALSAKDDVRPNEQLGFELMQSSSRIRSVSQWALFDPAERVTDSSMQAAEPSELDLETVSELVRQSEIDFRTLKAHVRAILERQSQVSIAQVLAEYPAEQGLGSVVGYVALGSKHGEVTDGTELVVWEGDDEVQRRAKVPTIYFMRERYLELVD

SEQ ID NO: 36655 - protein, 235 aa, Acidovorax sp. Leaf160
MDESFADDAAAVSAATEAATFQGDTGALPIDTRRVLVQLLLGPSVDARRQSKLWPVLLRDEVAIRSRMHDLFLEVVIDHEQKVAFTRQVVSEDLDVPILLRKASLTFLETALLLFLRQRLTQADAQGERAVVSREDMHEHLAVFEKENNPDHAKFARQVVNAVDKAKKLSLLQSIRGSGERYEVSPTLKLLFSAEEIQELTRTYATLAVSPGRVGSNVEADGDDDEQPADEEEAQ

SEQ ID NO: 36656 - protein, 1118 aa, Acidovorax sp. Leaf160
MNPFAQADLLGGSSDQFRLARIQTFNWGTFSNVFDFPIPKEGYLFVGPSGSGKSTVLDAHAALLTPPKWVDFNVAAREAERNGRDRSVMTYLRGAWAQQTGEAGEYVSQYLRSGTTWSAIAETYRDELGRVVVLAQVLWVKGNSTAPGDAKRVYLTLEREFDVQELEFFAKNEFDARRFKHDLPDAKVHTEFSAYQERFRRLLGIENERALRLLHKTQSAKNLGDLNVFLRDFMLDEPETFGIAASLVNEFGELNEAHQEVVAARKQIQTLVPAREEHGELDRTKFESNGLLAIQTAIDQYREHRRKLLLDERIAELEVDREGSRQEALRLASIVENEFQKLTDLQRQKLNMGADVLVRLEDDIKAAELEKPIRIGKRDQAAAACEAMGWAVPDSVVWFVQRVEAAKQRVLKARDLKNEVEERKDGVKDELRRANEGFLKVVAEVKALERQKSNLPARLVDLRERMARDLSIPEEKLPFVGELVEVRAEETAWRGAIERVLGGFARSILVDEKHYSAVSAYLNERNIGERLVYFRTIPQTSGRSPGPNSLVRKLNMASGSFGDWVREELKHSFDFECADTLQAFRNASRAVTREGQVKHSTMRHEKNDRHSVNDRNQWVLGFDNKEKLALFKQQAAEIGGRISELEETVRKIGKEEETQQAQMLHCQNLSNLTWNDVDVGSLLTRINDLTSRLKAEREARPDLAALNDSIGKQEGVHSLAVGKKNTEDSKGQSIAADINRLKGKLEELARLWPTSDRPPAFAEQIGVRYEATEKVVTLESLDHVTNLVERGLNAELRALESRLSDLRNSIVQRFAEFNRLWPALAGGLDATLESAEDYLAKLKRLEDDNLPAFEDRFFSLLREQSDQNLTLLTTKLDEERSAIRSRMELVNESLQTAPFNPGTHLVIETTDKAIEDVRLFRASLKESLSHSFSNDRDLAEERFKALAALVKRLASQETVDKNWRSLVLDVRQHVEFVARELDEADLEVEVYRSGAGKSGGQRQKLAATCLAAALRYQLGGQDRALPRYSTVVLDEAFDKADAEFTAMAMNIFKTFGFQMIVATPLKSVMTLEPFIGGACFVHIKDRKKSAVIPIEYDSESHRLKLSQDVRNVEEATVS

SEQ ID NO: 36657 - protein, 599 aa, Frigoribacterium sp. Leaf172
MNESSGPDDALSRDDVRVAHEDDPTWALLRSYNSRWMLPLFSRHLEHAEGPVSADWFHQQVAQALELNALDQTAPDQTAPDRSAPVQAGTEEARVGGSGATAAPETRTTPVDYCRSWVASRWLIRTRASSTDDGGARHGDAGHGGSSSTTTGTSPVADGWGAFGAAHPSGTAAGSAPTRASSPPPRGEARAQYRLSPSALKALRIVRELVEQDNAVSEARLGSIAHAVGQLAGLADPSVEAQTARIDEQIAELQRRRDRIEQHGTEPVGPDVLKRQVREVVRLTASLPEDFRQLSSMVEQRHREVARRATVEHVGKGALVEQYLRENDLLEQTPEGRAYRGFAQMLSSREIDVMRADIELILDHPAAGEHLTERQRTQLESLISSLLAEEQSVQETYGRWTSSLRRFLSRSSTERHQRLLTLADRALHAGGVWAERRPGPAVLPVDVLGLGALDVVDISQAQLHSDRGRPTVDVQVPEGDAMLPAADRAALRLSSGTSTAAVAATLERLLEADETVTSADLHEATDPEFRRLGLVLSMLDLAIDQGLVDESTETVTLTSADDAGGADRRVVLPRLVFRRPPARGDDAPDSAPQSERDPA

SEQ ID NO: 36658 - protein, 317 aa, Frigoribacterium sp. Leaf172
MSPDQYDATDAATPTRTSSGAQEVTGSATADGVDAATAGAALDRGGDGSPDRLRDELPLAGRKALVTLLTHRFVSRSRQGEAWAALVAYEPEIRARLDEMFLVLIVDHEYEVAFKRQSGQDDVPILLRREKPMSRDASLLLVFLRREHAFSDAHDESVVVSRHQIAEFLDRYHDDASHDEIRSMRRVDAAIAAMVTRDLLEPEPDDPALFVVAPAIVPLVTAEQLAHLERVFLEAAGADAPVDAPLGVEDDEPSDDEDSDDGRPDDGPRLVADPAVGDSGADEAPDAAEAPDADEAPRPDPTAVALDIPLDPEADQA

SEQ ID NO: 36659 - protein, 1161 aa, Frigoribacterium sp. Leaf172
MIPADATRTSPASGTAPETAPESTSDDEATPDLGMFHSGQYRIQQVQLLNWGSYSGLHRMPVGRGGIAILGPTGRGKSTVLDAMAAVIMPNPQEFNRAARDDSRQRSERTVYSYARGKTDEIRDAASDRTTTRFLRPLGEAFASGAAITYATELGQTLTAVRLAWIGTDTSSQDDVTQASVYLLVRGPFDLSRLTEVKRDASSSSPLTKGSLARLLDPLRDLVTSSQPEFRVRLCGELGIGGSDESQLKALTLLRRAQASKGVFSIDELFKQFVLTQPKALSRWETTLGTYREASALYDVFETTRRKLAVLEPVPGLADRYEIAGHDATEKRRLVDETDGPSRLRVWLAEKVGSWVSGEVDRVTGDKRALSESRRRAAADDTAAYRAREQALARISDLGGDPSQSLRQLVATAERDLAVIERERRRFATALDGTGESVPTSEKQLVALRQRAEVIAAEDAAARAAADEVRGELAARIGETKRALSAREAQRRSFEQRGGNVPDDAAERRLRIAEGTGIPVAGLPYAGELFEVAAAHADWSVAIERVVGDLATHLLVDRSRFDAVRRFVNDNDMRGRITLVPASTGAEPTREAVARTVPAMLQFDERSPFAGWLVDEIVRERSVLCVEGPDDLDSPVPAGARGAVTRAGLRTGSGGRVVKDDRRSRSWIGLDNSARIAELTDEIASLERDLTVARAAWDSAEAESSARRRVLDAVARSTEFSWTDIDTAPAQARLDDLQGQLDRLSDERPELATLQADARRHDDERSAATRRLAELDHELARLDAEHSTLVDIEDAFSDALGGADPLTDHERALLAPLPFAAPREVADVERSYREALGLLRGQIDGHERERTQAENTLVLIFERYLELDRTAGFDASIDSLGAVRAIHRTLVDDALPSAKQDWLAKAGADMGDSLRALLVQIEEDGHVIRRGVRPISQALRSIEFREGSTLDIEPRPVSNGDLVEFKRTLREHIGDRAESPRDPAEIERRFVTLRRDLAHLEERSKIGDAWRRRVLDAREHYQFRAIETRVDGTQIVHEGVAGKSGGEGQELIAFVLGAALRFRLGDGTDRVPTYAPIVLDEGFVKADDEYTGRSLAALTSLGFQLVVGAPRDKVNAFERHVDSVAYISSDPARPELSRIYPLTIRQAMEVERHGLDPAALS

SEQ ID NO: 36660 - protein, 510 aa, Williamsia sp. Leaf354
MAVGTTPAGSAAALHAAFTESADADVTLRLLRSRSAMVHLALMAARLGDGQVDGDHLAAGLAHDIAALSSHWTDRDVAVPTAEELLDLWTRRGFVARTLDADRHIERYQLTRGATTALAQVQSVRHDRTVATQTAMEMVIGRLSNIAVAINPDPGEHIRDIDAKIAELTARRAELAAGAVPAVDARRVFDDIRMVTSLAERMPADIIGYGEKLRENSRELLTGGLDERAGAYADALNRMFDGHDELHRSAEGSAFDAFYTLISDHRLRDDLERHIDAILAALPDLPRDQADILGRFIDRMWDEVQHVDEIRGQVYRRINTFVKGGDFLHYRALREQIGEAQRAAAAAFEHVSAGRDMGIEVPMGVADTHSIGAVSLHDGVIEIPDGVEASAGEIDIDPAALVGTETIDWQALTEAVNASVARGAADLAEVLSRIDSPRVGDVVGVWSLAQRHGAVDTTRSAMTVGAHTARGVREITVPAIVFTAPMPEPVVTAVDPAVHLLDDLTGGTPA

SEQ ID NO: 36661 - protein, 270 aa, Williamsia sp. Leaf354
MTEDDLATDAPEAGDDLFVDSPDAEASPSVDLSHFSFDGTEPLGEIGQRRTEPRFDGDTSELPAPVCYALQELVAAAHVSGKSRNWRAIEANEQIIRSRLSELNLVLEIDTEHRYAFTRQVTESDPRQRNILRASTLTLAASVLALFLRQKYLTSVDESATVERTEMVDHMLTYKPVRDTDEAGFIRRVDAAINVLENRKVIRALPGTDRYAIHGVIAALLTPEQVESYTRAYRVLAGDDPSPDLAELDEASLDETENAPDGTTEDEDEQ

SEQ ID NO: 36662 - protein, 1133 aa, Williamsia sp. Leaf354
MTDTLEQTATTARRTIAIGQFRLTRIQLVNWGTFHGYKDFPIDERGVLLTGPSGSGKSSLMDGHSVVLLPTYDQGFNASADLTAKGAKRAARSMADYVRGAWAENDDEYNQSQVQYLRGSGATWSAIAATYDNGAGSVTTAVAIKWFPGSGNDGAALRSWYQLHPGDADLLSLNDWAAGGFDIRSYRASHPEVACFDVQSAYQEALRRRVGIGSSSAALALMGKAKAMKNVGDLNLFIRTYMLDRPDTYTKAQRLVENFTQLDEAYQAAARAHAQEKVLRPIPDAWQAYCGAEESTTRAAELLGPPMRAFMREHRVALLQAKLDSIEDQRTALDNEVASWENIADEREDRHTSLRDQLTVDKGELTSLEAELKSFEAQVTARNRAYERYSAVVSRLGENTPESHEEFAALRDRAPQIGRAAREAAASLSARAHPVFSAETDARREHEAVLEELTTLTARRSLLPRDALAQRDAIATGTGVAAHDLPFAAELVEVAPEHRDTWAGAAERVLRSLGMTLLVPQEHRRRVSDFVNATNLGGVLEFRAFDTDAGVTDPTPGTLAAVMTVDTAHPAGPWLTGVVARSAAHVCVGTPVELDRHDLAVTPQGLVKAGRDRYRKDDRRRVDDRTHWIFGTNTDGKRAALEESLVGLQARFDEARQASQDMRDLLEDNRERAKAADALAAYGSWTELNWWSSRRDADELNQRIEAVRGNRVDLAELEEQVDIARADWREAVARVGAINDQLRHIGSDWDRWLAELEQSSDADAISDDDRDYLSGVLSTVLEGNGKQLSIETYGEVRSDLRNALEAVQADANADRDSAENRIVRAAEAFVREWPAAANNLTPTIAGAQDLVSIHAGLIDHGLASTQERFRQLITTDISHSVSNLYKEIGDTNKRIRRGIAEVNSGLRRVDFNTGTYLQIAVQHNPTEEATEFARIVDAMMRDAPAARAGDGAVLARQFYRIKNLIIALTATDAEGKRWCDNVLDVRNSYFFYGKELARPVAGEEADDDAPPVHTYRNTATNSGGEQEKLVAFCLAAALSFSLSSPDDHRPGFAPLMLDEAFSKSDETFSSQSLRAFEQFGFQLIIAAPIRMAGIVEQFIGQVILVDKRIGPDGARSDARTATFGEIATARQQR

SEQ ID NO: 36663 - protein, 501 aa, Curtobacterium sp. Leaf183
MTDVDLEYARVRAVLDRPTLRLMSRPTSAVVLAVFRTVFDRDVQYVPADRMHLQVEEHVARLQARTHQHQQQDEPDTRPTGRALCREWVAAQWLVRSNSPDGDEQYSLTSHALEALSLVDALSSDRALISESRLAMIVDAVHRWAARAEPDPDVQIRRLDAQIAELQAERDRLASGDEPTAVDDDRMRDGYTNITDLIRQLPSDFKRVEEAVATMHREIVEDFRNEVRPIGEILDDYLARTDTLMEATPEGRAFEGAFELLRDDALLLRLREDIATILDHPFAESLSTAERRTFRNTVVILRQGIEDVLAQRRLLTGTLRDQIVAHDVVRDRELDAVLRSVNRRMATLMESGGARERIPLGLLPPVAEVGTLRERFYDPDTEAVPPPIEEPDDDVFDEIDVESLRRHGGPLLVELREALRSAGAGTSVGAFHALPPEQRRPVELFGLAHLLTGHTDFETAATAVPHHTVRPDGTAVTFTMPTADLTEDRPADDDSTTLEAR

SEQ ID NO: 36664 - protein, 261 aa, Curtobacterium sp. Leaf183
MTDTTASHVDDTDAFDGIDPFDESASVALDETERDESSFALFEGDEGRLDELQRRALVALLRHPYVSARTHPDEWRAVLDAEGQLRSRLNDLFLELHVDRDREVAWKRQARSESQRRGFPTLLRDVPYTREETIVLVWLRMRLRADTRPGPDQVVVDRSEILGHVAGFRPATATDRTRDEGRVAKAIERLITARVLLKTSDPDRFRVASVVEVLLPLERLLELDTWLASTTSSNATSAPVDAPDGAEPSLQTDDDDEEESA

SEQ ID NO: 36665 - protein, 1132 aa, Curtobacterium sp. Leaf183
MTDHRIDTAGMPALFDTVAQWRAESMQVVNWGGFHGHRQIELSGAATLISGASGTGKSTLMDAYLAVMMPSDVPFNGASNDATTGRARSADQRNLLTYLRGKIDTRRDPESGSLRDVNLRGDDTATWGAVAVTFLNDDERRFTVLRAYIVPKRARGVGDIQMTMATVDDDFDLRRLEAFVPSRFNHLELTGRVPGLVVRDTYQELAYTLQTRLGIGDSGGGNRAMRLLARIQAGQHMPTVDSLYKSLVLETPGTYEAADRALAHFSALDEAYEAMDTEERKVRILAPITELHLEIERSRAAAAALDGIATGSEVSPFAHWTATRKRALLDDEVDRNRRSRTAARAEVEAASARHAAVEIELREAEARLRDSGGNALAQLEDRIERRTRERAAVERTRTAFDDRTAALGTFTTESAFVAGQRASHEFLGTHAASRAALDDRRDALTREEYPLLDRERSLRQERQSLEHRQGAMPLPMHEARVAMAQAAGMDPASVPFVAELLDVLPGEERWRTAIESVLAPVARTLLVDQDQLDTFSAAIDALRIPVRVQFEGVPSGPHLDVVGDRAMVSGKLAVKDSPFSTWVRSRIESDRIDARCVSSASELGGGGRRVTESGQLRDGRRGAHGDRRQANVIGFTNEARVVAVEQELAAIAEDLATLEARRTDVAQDITALDELRAAHQHLVDTTWDAIDLTGADESLARLSTERDALLAADDGLRALRTSVARLRTALDDAADRRAAARLSVQRLEERHAVLVDGQDAAAEILSRFEDSPALLPDEQQAQLLAETFDEVGAPDGVDGFDDATRRLRRRLEERLSQALDGAASASNALTMTFQRYQDAWPDPNLGTGVASYPDYRAILDDIVATGLHARRSEWRRRLSQWSGEDLVPLAGAFDRAVVEIEERLEPVNEILRDLPFGANRDRLKIVIRRVTREDVTQFRRELRALSASVDTELTDDVLETRFRRLRRFMAVIRHDGSMHRGARTSQRDAVLDVRRHMEITAVRYDTTGTDLGVYSSLGDKSGGETQELVAFIVGAALRYQLGDETRPRPRFAPVFLDEAFIKADSEFAGRAVTAWLRLGFQLVVSAPLDKVTALEPAMERLLSMRKHPDTGHSSITEIRRAEPAAEAAVAPA

SEQ ID NO: 36666 - protein, 456 aa, Methylobacterium sp. Leaf361
MLFAQLSDELFKPLASPSRGFNAALLLHLHRRVLGAEPVRKAELLAEIGDFAAGWSDPEVSGDEPISADPAERRTALYRRLLDTGWLIERRERYVPVAEFDPEARLLLEELSRLERGETRSYGGAVLEVLGGLESALSDPANRSEALSNAARGAAAFLSHVRGLAAGMRKVEERILREPDRAKTFRLFFEDFVERHLISDYRTLHTRFNPFRFRASVVREAGRALRDALTVRALAEGLIREGRIADLDTAQRAVRADLAQILAVFEGLDNHLDAVDAVVARLERRIASALHVMDRPDPSGVERVAAMLRAVGEAEIAPEVPGDVSLLRPPIGHAHLQAPRARKSAIDMEPLPDIEDDPVVDAFAAAKAEFRRRTTVTPESMSAFVEARLGKAVRLRGSQIVIAGVDDFIVFQRLREIDVLFDAKLGARYALTRLPERVVNGWLDCPDFLLERRPRA

SEQ ID NO: 36667 - protein, 208 aa, Methylobacterium sp. Leaf361
MLEGFRAIIDGDEPPPPGARAPDAEELCRALQVLLKGQVIYAETQGIGRSYELARHYAPFFTDYFACLGYALTVSHRDQMVSLSPAADAPRHDIVSERLRKDETLVLLALRLLYEEGLRDHRAGTDGIVDCTTDEIVEKIRAVARNEPPEEGRLADILRLYAKRGGLRLGERDRVERVTPLSLLPGLTVLASDAWMERLRAWSEAGEA

SEQ ID NO: 36668 - protein, 1145 aa, Methylobacterium sp. Leaf361
MYVLTDIAISNWYLIRREQIRLRGAAALVGPTGAGKSTIFDAVGTVLAGNNASRLALNASASGRSARTVRDYCLGWISDPAEGGRPTRESCETVLVLVFENPDSGRVVSVGLALAARAAEPKETVLSRFIAVGHRFEVSDYARTASGGTYTAPWSEIAAELRARASSFTEYRTSGERFTADVLATLREGAPAPEPRHFLRSFANAVAFKPIFDTSAFVRAFVLEPEPLDVERVRHSIANWRRLRETIAELETRLGRLRRLRDRYEAWGEAVLAAATHELRAASADLRRRSLDLIAVRGRLREGADTLRIARERVAASRGYVREIDGEIAEKKALAAAGAAEGRLAASTLGLSMLERDRKELIGRIGDLVALVGQMAKLQPVAPILRQSCPQAARLAEACARAGLRRESSPEEILRPDGPLAELADGLARLPDFDEALERAAEDAALKARAQESEAERTAPRTGGGPAARLSSDTVAFRGELERRGIDALPICELAEIVDPTWGPALEGLLGRAREALVVAPDRLSEALGVLQSGRDRYSRCILVKTTDTAKQRARRYDDGPLTVIETSDPHAEAFLGVRLGGYDLARDDAELARLSRAVAPSGRTTAGMAYTVTRSVDLLMTRGHRGPTADSRRAHEIAVAEARRLRGEAAVLREAARTAAAIRARVARGLDAVEALRAELDGLEGRRRTLQTEREGIEKRDTAGLAAEIAALTTERVGYLRELSEELEPKLDRLLADEAALRARMGPMREAVRAALSARRAALRQLSAGDAARVRLARAEPFDLGAVAEARRALAGLDAKAAGARVSAERGLARDSAEAARSHGRIAERELAEACAAWRVENPLASGDAPAIDGFAWVRREYEAVEGHELRRYRAQAERAESEMRRLMTEDLLTRLADRFERVHARLAALNERLSARSFTGQTYAFEAAVDRRYAAVHALATETARSPEAAQALLAGEAEGPMAAALEEITALIAGADDAARLADYRNYFVYEIGMRDRAGNRTTMSARALRGSGGEAQAPFYVAIAASLASAYYPGDRPGDENPGLGLCLLDEAFSKLDVRNSQALVDLYRAWGLQLLIAAPEDKRTTLTEVMDTIVTVYKSPDLTSVRIEAEHPLEAARRALHAINPDQVGIEGFRQSDAAE

SEQ ID NO: 36669 - protein, 482 aa, Arthrobacter sp. Leaf141; identical to SEQ ID NO: 36020

SEQ ID NO: 36670 - protein, 285 aa, Arthrobacter sp. Leaf141
MTEPSAETGTEPSESVAAAAGPAAVARAGADAEPAAGRSLAAGPRDTFIDGAALFPGDTGVLPMRVRQALVKLLKGPYIDGGRDEKLWTVLLDNRVIIRSRLSELFLTMELDPDRKIAVLRPVDPDAIGGSTRSSILRQQRALSRVETIVLLRLRLLLDRHVTAQTDPTITREEIADLVAHYQPSGQQDALRDSDVVTRAITKLLARQLLLATGLDDVYTISNALPLALPFENIGDIPAQIDALVAASADPSGTEPLLDLDAETATDDDAADDADGTTTTEEGTK

SEQ ID NO: 36671 - protein, 1148 aa, Arthrobacter sp. Leaf141
MSIASMLPLGEETNPGQMRLALVQVVNWGTFHGAHTMHVDRNGTLLTGNSGVGKSTLFDAMLRVFDARPRSNEAAAQRSGGAVEDKRTTFTYMRGKVGDKAVGEGSASAFQRPGATWSAVALTFDNAAGTRVTVSALFDLPKNGTESSVGRFYLIDSSPLDLPALEDIADKRFTKAALETVFPDAQVFDVHKAFAERFRRLLGINSDQALPLLRVIQAGKGLGGSVNTFFRDQVLDAPATLAAADDVVEEFSNLMSIRQRLEDVRQQRDQLAPVPGLNREYAQALLDANRLRDLAGGEFEAYRQQLAVTVHEKTLTRFRELAQAKAQDLGAERTVRDALAKDLRQLETDYNTQGGNAISAIEQSLENARVSLKLREQVEEAARAALADAGLQLAWTAAGWDQAHEQAAARSAELKDDSQALQELRFEAFDAHATRKRELAAAEQELVSLKTRKSLLPPSSIENRTAIAAATGVPEDQMPFAGELMDLLEGEERWRPAAERALRSLATTLLVPGEHFGAVTRYLNANNIRGALRAVDVSKPLPGGALAVEDVNDGDLLRKLDILTAGGAAEAGAWVRERIALDFAFPCVEDPDELAALDKGLSLGGVVKRNRHTVEKDDRFTSRQDYVLGFDNAAKLELVASQVADLRQEVAKAAELAQSREESHQGMGRQLEALRRVAADDRPWDQVSAAVAAEDLARIEQRLKDALAAQADLEPLRANIEQARQKHQSSTESAAVLQSEYKALDRQLTTADSLLDAARGRLAEAPPSDATVEALAPYFDGFGDITELHELDNLANRVRSTLLGELHAAESRGQGTAERLTRIFEGFVREWGSAISADHGTSIGAAADFETRYHAIVSDGLPAQEAEFRQFFNQRTHESFSTLLHLLDEERRSITSRILPLNGILSQVNFHEGSFLELDIKQTLPPTAKAFKDAIQNALKARHTRPARPEAGQERDEDAELTARYKSLEALVRRLGSQAPEDRRWRAEVLDVRGHLFIQCKEHRDVTGPRGGKRSEVFMHADTGSMSGGERQRFTAFIMAAALSYQLGIAEQGFTTYGTVMMDEAFVLASEEFAGAGIKALHEFGFQLLLAAPENVIDLSRHLGSVTEILRDKRTNRSGVLTAPVIRPTAGAEGAWRSEANPVDIVLR

SEQ ID NO: 36672 - protein, 521 aa, Curtobacterium sp. Leaf154
MTDVDLEFARVRAVLDRPTLRLMSRPTSATVLAVFRTVFDRDVQYVPADRMHLQVEEHVARLQAAGARVPASDQAVPAASAQTDSEQAEGEQEARPNGRALCREWVGAQWLVRSNSPDGDEQYSLTSHALEALSLVDALSADRALISESRLAMIVDAVHRWAARAEPDPDVQIRRIDAQIAELQSERARLEHGDDVVAVDDDRMRDGYTNISDLIRQLPSDFKRVEEAVATMHRSIVEDFRQEVRPIGEILDDYLARTDNLMEATPEGRAFEGAFELLRDDALLLRLRDDIATILAHPFAQGLGAGERRAFRNTVTILRQGIEDVLAQRRQLTATLRDQIVAHDVVRDRELDAVLRSINRGLATLMDQGGARDRIPLPLLPAAAEVGTLRERFYDPDAESVPPPIEEPDDDVFEDLDVEMLRKHGGPLLTELRAALRFAEADSSVDAFHGLPPEQRRPVELFGLAHLLTGHEDFESAAHVAEHRTVRPDGTAITFQMPTAALDDERTPVGDAHDENAQEAR

SEQ ID NO: 36673 - protein, 262 aa, Curtobacterium sp. Leaf154; identical to SEQ ID NO: 32333

SEQ ID NO: 36674 - protein, 1122 aa, Curtobacterium sp. Leaf154
MTDTFEIPALFDTVAQWRAESMQVVNWGGFHGHRQVELSGTATLISGASGTGKSTLMDAYLAVMMPSDVPFNGASNDATTGRARSADQRNLLTYLRGKVDTRRDPETGSLRDVNLRGDDQTTWGAAAVTFRNDDERRFTVLRAYIVPKRARGVGDIQMTMATVDDTFDLRRLEEFVPSRFHHLELTGRVPGLVIRDTYQELAYTLQTRLGIGDSGGGNRAMRLLARIQAGQHLPTVDALYKSLVLETPGTYEAADRALAHFSALDEAYEAMDTEERKVRILSPITDLHDEISRATEAAAALDGIATGAEVSPFAHWTASRKRDLLDAEVSRNARERTASRAEVAAAEARHAAVEIELRDAEARLRDQGGNALAQLEDRIERLTRERDGVVRTRATFDERTAVLGTSVATEADFTAAQRSSHEFLGSYADARTALDERRDALTREEYPLLDRERSLRQERQSLEHRQGAMPLPMHEARLAMARAAGIDPAELPFVAELLDVLPGEERWRTAIESVLAPVARTLLVDQDRLGDFSEAIDALRLPVRVQFEGVPTGPHLDLDGDPAMVSGKLAIKPSPFSTWVRERIESDRTDARCVASASDLGGGGRRVTESGQLRDGRRGAHGDRRQSNVIGFTNEARVAAVEQELASIAQDLATLEARRTDVAQDLTALDVLRAAHQHVVDATWAAIDVDGLGASLARLDEERQALLAADDGLRTLRASVARLRKSLDEAADRRSAARLSVQRLEERHAVLVDGQDAAAEILERFESSPGSLPDDQQARLLEETFEEIGAPDGVDGFDDATRRLKRRLEERLSQALDGAAAASTSLTLTFQRYQDAWPDPNLGTGVASYPDYHAILEQIVATGLHARRSEWRRRLSQWSGEDLVPLAGAFDRAVVEIEERLEPVNEILRELPFGANRDRLKIQIRRVTREDVTAFRRELRALSASVDTELTDDVLETRFRRLRRFMAVIRPDPDAARGRTTQRDAVLDVRRHMEITAVRYDTDGNDLGVYSSLGDKSGGETQELVAFIVGAALRYQLGDETRPRPRFAPVFLDEAFIKADSEFAGRAVTAWLRLGFQLVVSAPLDKVTALEPSMERLLSMRKHPETGHSSITEIARVEPAAV

SEQ ID NO: 36675 - protein, 576 aa, Frigoribacterium sp. Leaf415; identical to SEQ ID NO: 36544

SEQ ID NO: 36676 - protein, 331 aa, Frigoribacterium sp. Leaf415; identical to SEQ ID NO: 36545

SEQ ID NO: 36677 - protein, 1154 aa, Frigoribacterium sp. Leaf415; identical to SEQ ID NO: 36546

SEQ ID NO: 36678 - protein, 462 aa, Methylobacterium sp. Leaf465
MLFTHLSDDLFKPLASPSRAFNAALLLHLHGRVFGDTAEPLRKSELLTAIGDFAADFVDREIDDDASGTVEPSERRSVVYRRLLDAGWLVERRERYVPVVEFDPEARMVIEELARLDRGERRSYGGAVLDVLGSLESAIANPAERSEALVNAAKSARTFLSHLRSLAGSMRKSEERILREADQGVALRLYFEEFVARHLVSDYRTLHTRFNPFRFRSGIVREAGRALRDPLTLRALTDAGLREGRAPDRETAERAVRGDLAEILAIFEGLDRHLDVVADIVARLERRIAATLRYLDHRDSDRIERTAAALRAVAGGDDDLAGLPDPQVSLFRPPIGEPHCYAPRLRRAAIESEPLPEIEIDPVIEAFIAAKDAFRERVAVTPERIVAFIEARLGPERTIRGSQIRIADVDDFVVFQRLREIDVLFDGSLRGRYRLSRMEGRVSNGWLDCPDFLLERAPALRR

SEQ ID NO: 36679 - protein, 211 aa, Methylobacterium sp. Leaf465; identical to SEQ ID NO: 36554

SEQ ID NO: 36680 - protein, 1151 aa, Methylobacterium sp. Leaf465
MYRLTDIVLSNWYLIRREQIRIRGAAALVGPTGAGKSTIFDAVGTVLAGNNASRLALNASASGRSARTVRDYCLGWISDPAEGGRPTREACETLIVLVFENETTGRVVSAGLALAARAEDSRETTLSRFVHVGHRFEVADYVREAPGGSFVAPWAEIAKDLRTRGSTFDEYRASGERFTAELLGNLREGAAVPEPRHFLRTFSNAVAFKPIFDSSAFVRSFVLEPEPLDVARIRQSVETWRRLLETIEELERRLAHLARIVGRYETWAEASLATVLGDLRAADADLRRRIIDTVTARQTLKDVAERLRIARESVATSQGFVREIDGEIAGKKALLAGTAAEGRLAASNAGLAMLARDRRDLAARVAELVGIVLDTGKLAVILGEIRKVSPEAARLVEACARSGLRREANPEETLRSDGPLAALIAGLAGMPPIAAPLERAAEDAALRARALENEAQSRAPAPSAGRGAAPRLSSDVAAFREELSRLGIVATPICELAEIIDPKWGQALEGLLGGAREALVVQPDRLNEAFAHLEARKSQFYRCLLVKTTDTARRRGGRDDEGPLALIETADPHAQAFLGARLGGYDLAPNDAALAHMSRAVAPSGRSTSGMAYSVVRPVQLMMTRGHRGPTAESRQDWEQAVSEARRARAEADVLREAARIGAALARRLSETNLDFAELRAEADAIEGRRRSLTTERESVERAETGVLEAELAELAKERSAYLTELVQVLEPKRDLLLGEEAGLKAKVAASHEAARAALQARRTAYQRWAGGDSMRIRLVRPDAFDPKALATLRAERADLDAKALASHANTGRARAREAAETARTQGRAAERDLAEYCVQWRVENPLGASDVPASFGYGWAKRAHDEVASHELRRYRDQARRAESEMRRLMIEDLLTRLADKFERVRARLEALNERLSSQTFTGQTYAFEAEVDRRYAAVHALATEVARSPDAAQAILPDEGGAIPDGPLAAAIDEITALIAGEESAARLADYRNYFVYEIGMRDRAGNRTTMSNRALRGSGGEAQAPFYVAIAASLASAYYPGDRPGDENPGLGLCLLDEAFSKLDVRNSQALVDLYQAWGLQLLIAAPEDKRTTLTEVMDTIVTVYKSPDLSSVRIEAEHPLEAAKRALAAINPERQGIEGFRITDAAE

SEQ ID NO: 36681 - protein, 491 aa, Microbacterium sp. Leaf436
MSSTRTEAAYLRSVTAFKNPTLDLLHGRFAPFVVAVLSVVFTPDRAAVTVADAHVEVAEAIDELRAAGYDTDDDRRIPAGSAREICRGWVRVGWLGLQIEDDVEVYRLSAHAVGALEIAGRAGGGRARVSRSRVRTLLDAVERLARDAESDPARRREALLEERAALDAEIAALEEGIVEPLDDDHLLEEAENVIHLARELPADFSRVAESIAAMQRDVVAELRRDVRPTGEVLREYLERGRQVMQATPEGRAFQGALRLIGDPENIDDLTDQLHAVLTQPFSRLMTPEQRAELDAIARRVEAGVQEVLTAQRRASHVITAQVRTHDPIRDRQVDDLLRGVMAGLHRWSQTKTPGRVEPVRTLPLADIGHLRQSLSDVRPAGAPAPLASADVEAEFVDADTRAWGGPHYAELEAYVATLGDGFDLATAFSGGSADTRRPVDLVGLLEIVHRGGLTETDDVSIVEAVRPDGTTRRFAFGAVRANSLREKDADD

SEQ ID NO: 36682 - protein, 257 aa, Microbacterium sp. Leaf436
MENDPDALFPGDRGILDSEVRRVLVRILQRRFLSAENSPAEWKLLLEHQQMIESRLNDLFVRLVVDHARGVAYKEQVRSDEIDVPILLKDEAYSRAETLVLVYLRTVFQRETTAGTASARVDVEEVEQTVLTYFAESDGTRASQQRAVRTAIARLDREGIIEEESEGRYRIGPLIEVVLSAETLRELQLWLEEQTRDADSSREGGGVAPALDEQTQDAGSPREGGVMASALDEHTQDAEAAGDREVAASGPFEGDPR

SEQ ID NO: 36683 - protein, 1117 aa, Microbacterium sp. Leaf436
MTMLETLFGLIPAASRGQQWVAEDLQLVNWGGYDGTHRVRFAPTATLLCGGSGSGKSTLMDAYVALMMPHTTPFNGASNGAVVGRPRGQEQRNILSYGRGKLDESRTDEGTKIRVLRGDGVDTWTAIAMTWADHDGARFTAVRAWYIPAAARTLDDAVKVRATVHGAFDLRDLERAAQQHLSDAAVRATGLDTLATDREFSARLHGVLGIGAAGAGTKAMSLLARIQAGQQITTVDDLYKRMVLEEPETLTVADAVVSHFDGLESTRTRMLEARQQVRALQPIRAMKTRIDEAAERLQLIDALGRFTDPDSRASLWRAQRRVDLLGAVEAELRDRTHATDALVRERQALADAAEAEREGLGDVLRAAGGDRLDAAQRELRTLERRLAGMQRDRERFETALAVLQTEVSTEKQFAALVDDARRTLGDADAKTAVRDAFVAASSTHTDLRQQLAALEAEHRRTQTRDDNIPPRLHEARETLAEAAGLTAAELPFVAELVDVRTEYEPWRGAFTLALGGFATTLLVDAAHLTSFRAAIDGVRLSERLRFEGVSTGLPERGGLDPATLPGRLEFRTSPFTGWLQDRLEQQFAFVCVDAASELSRHRLALTISGQTSQGARGAHGGSIRQSVLGFSSRVRLTELGEQIVAARRALTAAKTTVDEAAAALDAFDERRSALEKIADLSWDQVDVASVQRDLDRWNETIAEITAGNPRIAELQEQISGTRARAGRLREEIGGAKTEQQAMAARWAEITDDVDAAQMLIERAEDSETALSPDEIDYLDALFVAPGASDATPSQLLASFDAALESASRRLLEEQRSAQETWGDQRESLRRTLIAFTDRWPSPNLLADPDESLGDFERILADLEASGLHELEAEWRDSLLRLSGNDLTSLDSALTRALREIRERIAPINDIMQDLPFYDDEHRLQIVPREGQSEVRRRFRRELRDVRAAIDAASSDEEREAVYTRMARLINRIRSTAPDFADLVDVRNHVRVSAERFRADTGEHVALYDHIGEKSGGESQELIAFIVGAALRYQLGDAGAERPRYAPVFLDEALIKADAHFTKRAIGAWRGLGFQLVIGAPNDKYSAIEPHVDVEYDILKDTRGRSWAKAKVGVAAEG

SEQ ID NO: 36684 - protein, 458 aa, Methylobacterium sp. Leaf469
MLFTRLSDDLFRPLASPSRAFNAALLLHLHARVFGDTAEPLRKTELLAAIGDFSADYAQGEIADDETTPVDPIERRSAVYRRLLDSGWLVERRERYVPVVDFDPEARILIEELARLDRGETRSYGGAVLDVLGSLESAIANPAERSEALVNAAKASRAFLSHLRTLAGSMRKIEARILAQEDQRAAFRLYFDEFVARHIVSDYRTLHTRLNPFRFRSGIVREAGRALRDPLTLRALAEAGIREGRAPDVEVAERAVRADLAEILAIFEGLDRHLDAVADIVARLERRIAAALRYMDHRDSDRIERTAAALRAVAGTDAPMEGMPPAGISLLRPPIGAVHLYAPRLKRPPIDCEPLPELFLDLAVEAFIAAKDAFRHRVAVTPDRMVDFLEGRLGRKGAVRGSQMPIADVDAFVVFQRLREIDVLFDGSLSGRYRLSRVEGRVANGWLDCPDFLLERTR

SEQ ID NO: 36685 - protein, 210 aa, Methylobacterium sp. Leaf469; identical to SEQ ID NO: 36572

SEQ ID NO: 36686 - protein, 1152 aa, Methylobacterium sp. Leaf469
MYRLTDIALSNWYLIRREQIRIRGATALVGPTGAGKSTIFDAVGTVLAGNNASRLALNASASGRSARTVRDYCLGWISDPAEGGRPTREACETLIVLVFENPVSGRVVSVGLALSARAEDSRETTLSRFVCTGHRFEIADYVRETPDGSFVAPWAEIAKDLRIRSETFEEFRASGERFTAEVLGLLREGAPVPEPRHFLRTFSNAVAFKPIFDSSAFVRSFVLEPEPLDVARIRQSVENWRRLLETIEELERRLSHLGRILARYETWAEASLSAALDDLRAAGADLRRRVVEYTTARTGLADVAERLRIARESVATSQGFVRDIDGEIAQKKALMAGTHAQGRLAASDAGLAVLTRDQRDLTLRVTGLVGLIQDVARLTAVIGEVRRVDPGAARFVEACARAGLRREAPPEETLRSDGPLNALVTALVDMPDIAGPLDTAAEDMALRARAAETEAQGLSAPFAGGGAAKGARLSSDVAAFRDELARLGIDAVPVCELAEIVEPKWGMALEGLLGGAREALVVQPDRLNQAFAHLEARKAQFYRCLLVKTTDTARRRGGRYDDGPLGMIETRDPHAEAFLAARLGGYDLAPDDAALAHMSRAVAPSGRSTSGMAYSVVRPVQLMMTRGSRGPTQEGREAMERAVAEARRLRGEAGVLREAARIAAQLRARLAEAPIDLPGLRAECDAIEGRRRSLATERESVEKADTGALEAELKELAKERSAYLTELVQVLEPKRDALLGEEAGLKAKVASSREAARAALAARRSAHARWVGGDTVRIRLVRPEGFDPRAVAKARADLAGLDAKELAAAAAAARSAAREALETARTQGRTAERDLAEYCVQWRIDNPLGRGDAPASFGYGWTRRAYDEVAGHELRRYRDQAVRAEGEMRRLMTEDLLTRLADKFERVRARLDALNERLSSQTFTGQTYAFEAAVDRRYAAVHALATEVARSPDAAQAVLPGQGETPAEGPLSAAIEEISALIAGEESAARLADYRNYFVYEIGMRDAAGNRTTMSNRALRGSGGEAQAPFYVAIAASLASAYYPGDRPGDENPGLGLCLLDEAFSKLDVRNSQALVDLYQAWGLQLLIAAPEDKRTTLTEVMDTIVTVYKSPDLKGVRIESEHPLEAAKRALAAINPERQGIEGFRLPGAAA

SEQ ID NO: 36687 - protein, 493 aa, Duganella sp. Root336D2
MKPDKPLAAYRQMRQQPLWRLLAAANGPTVIALLQAHLYESERSLPASIFHERIERELERLRNLGEEWPQTAQQYAASWLGDGYLERRFPPGSKEEEYELATSTVEAIRFISSLAKPHSAATESRLGLVIDALSKLSDDTDTDKGRRIARLRAEQARIEREIADIEQGKAIILPEAAALERTREIIALADNLAGDFRRVRDQFEQLNRDLRERIMDNEGSRGEVLDSLFAGIDLISESEAGRTFSAFWRLLTDPVQSSTLEDALDQLMSREFVAALNPAERQFLLRLTRTLLEQGGIVHEVLQSFARSLKHFVQSREFMEQRRLTQLLRSAQRSALALKEEVKATDTLNYTLELTSSKLSSLSQWLLHDPALQALPDRMGEAAAVPIDLAAIGELVAQSEIDFRSLAVNVQAVLATHSQCSVADVLYAFPAAQGLGSVIGLMSLGSRYGMVAQSSETVTWLGNDNVQRKATIPAIYFFKDQQDGLARTGGSAG

SEQ ID NO: 36688 - protein, 227 aa, Duganella sp. Root336D2
MDLPEQAAAQADVAPAPTVLFMNDTGELPLDTRRVLVQLLSGPSLEGRRHPKLWPVLLRDETVVQRRLHDLFLDLVIDRDLQVAFTRQVDAGDLDIPILLRRAQLTFIDSVLVLFLRQRLTQAEAHGDRAVVARDEMVENLVLYERAASTDRAGFTKRISASIEKMKKHNILQKIRASEDRFEISPTLKLLFTAEEIVALTALYDAMAAGESPELERQPLDDGEDEE

SEQ ID NO: 36689 - protein, 1115 aa, Duganella sp. Root336D2
MNDQFRMARLQVFNWGTFSGLHDIPISERGFLIVGPSGAGKSTLLDAFSALLVPPRWIDFNAAAREADRTGRDRNLVSYIRGAWSAQSDSASGVTSTRYLRGGTTTWSAIALHYHNSNGQDVVLLQLFWLRGNSNANTDVKRIFLVLERPFDLRELQDFGSTNFDIRKLKQTLPDAHIKDEFRPYCERFCRLLGIESEMTLRLLHKTQSAKNVGDLNTFLRDFMLDKPETFEVADRLVNEFGELNAAHQSVVTARRQVQTLAPARARHQEMESLQLERNGLKELEAGLNGYREQMRMKLLAGHIEALRIDVEGMSGRVQQLRNSQDNRELALRDLELQRSAAGGDRIEQLEIERRLVEEQRIGRMAKRKQAVDACTALEWTFAGSPDGFALLAGQARRELEEWQQSATGEDQLLELGRARDDVKRKREEVLQELQSLRRQPSSIPAHMLEMRRQLAAALGLGHDALPFAGELMEVKPEEAQWRGAIERVLHGFALSILVDEEHYAALANHVNEASLGQKLVYFRTGRAEQSQARALRASSLVTKLNVKSGRFADWLQADLRQRFDYECVESMRAFRAAPERALTREGQVKHNRARHEKDDRNSVNDRRYWVLGFDNREKLSLYEQQDQELRQQHESLEIQLSALGKQRREAGARVLQCHTLANLQWHEIEVEPLVLRIGAIERQLAAIRDGNANLQAIDDRLRQQRELVKQAAAALEEEKVSLLARQREIDLHEKQLAAAQQDPSIVRPTPYQQQGLDERYLRLPQPLVLKDVDHADRVVRKGISDDILKLSEHIGDCGKFIEAQFSAFISNWRADSDGLDAALAAAPDFFTKLTRLETDGLPAHEQRFFDLLRNQSHQNLAALNTYLSDARKAILARMEVVNESLRQVPFNRNEERTTYLQIQPKDRQLPDVRQFKQDILDALSHAWHDDPEAAEARFIELRRLVDRLSSQDAEQRRWRESVLDVRLHVEFIGREYDEHGVEQDVLESGAGKSGGQRQKLATTVLAAALRYQLGGSESGVPVYAPVVLDEAFDKADNEFTALAMNIFANFGFQMIVATPLKSVMTLEPFIGGACFVAIRDRRESGILLIEYDEEQRRLKLASDVRAEASLEAAG

SEQ ID NO: 36690 - protein, 386 aa, Duganella sp. Root336D2
MKQPDDVRTLLKKRFAGKHREWLVAGDPSQQWPLVIPLGPPSEAEALKQVDAVRDWASVWRNWSGEGDVKWVERRWRLLGTQRLPEALHLDGPRAVCAWIGELDRWRIAERRFQDLCQRWPQLALTASRLFNVLADFEDADFQRLLLALDWLEANPRSGLYPRQLPIAGLDTKWIEPRKGLLAKLLAGIRKLDGNGEDFHSLSGLESLPAVVQVRLLDPVLRARCGGLRDFSAPVEQLAGMSLEPTTVLVVENLQSGLALPDMPGTIALIALGYNVDVLSRIPWISGCRGIYWGDIDTHGYAILHRARCHLPQLQSLLMDEATLLQFSSLWTKEADQCAAEDLPLLQPAERIVYQGLRDHRWGHCLRLEQERISWQLVLLALGIPR

SEQ ID NO: 36691 - protein, 497 aa, Nocardioides sp. Root122
MSEVAGELARVKGAFAQPTLTLLHQRQAPVVITIFRTAFGRSNNPIPTARLHTQVEEHLGRMRLAGEQDVPTGTGREVCQRWMRGQWLVRSLDEAGHEVYALTSHAQQALELVKNLARDRATLSEHRVATILGTVRRFNTEANPDRTARVTILNEEIARLKAERDRLVDGGELEGATEDFMLEGFTELLSLISALPSDFARVEERFATIRSEILSAFRAEDRPAGEVIDDYLARADALMTATHEGRAFEGAFALLRDDALVTQLREDLTDLLEHPLSDRILSDAERAELRGTVRLVRDGLDRVLAQRSRVTATLKEYIVSHDAARDRELEQTLRQVEAELMAWMATTGPRAVHDVALLPARTSIDHLRERFHDPADDVLPDRISTPDPDLAPPVSLAELVAQGGPKLATLRDRLDAVLGSLLPVASLGALFDGLEPSLRRPVEIFGLLHLAADRDWRAEESLESFEAVRPDGSRRTFAVPRTPLPDPDLPATQETTG

SEQ ID NO: 36692 - protein, 244 aa, Nocardioides sp. Root122
MDDVEAGFEAVIEDGIEDGIEDDELSDDVSFSLFEGDEGGLAYAQRRALVTLLKQRFISARTHPRDWEVLVEHERLLRSRLNDLFLDLQVDRTREVAWKRQATSETGSRFPTMLYDAAWSREETLVLVHLRDRLRAGAASGDARVFVDREDIVGYVASFRPSHATDAAGDEKRARNAITSIVKSGLLIATGSEERFEISEAVEPLIPLELLKELLEALVAANASEVPPDPDDAADLFDDVAEEQ

SEQ ID NO: 36693 - protein, 1159 aa, Nocardioides sp. Root122
MSIDEIEQTTPDGLFERRDVATPGDDTMQWRAALLQMVNWGGFDGLTVVPLRGDATMISGASGVGKSTILDAYTALMMPSDTKFNGASNDAVAGRARGVGQRNLLSYLRGAVDVVDDPRTGRPVEKLLRGMGADTWGAIAMTFVNDQGGRFTVLRTYYVPRRATRSGDVQMQLATQDGAVALDTLEVAVPERFHANTLKKLFPGIRVHRTYAELAAVLHARLGIGANGDGAKALRLLARIQAGNQVRSVDELYKDMVLERPSTFAAADRAIEHFDDLDTAHSAMRTEEQKLELLTPIVELHDRKVAATRRLAELDSYGVTRDGDTPLRMWLLRTHLGLIETAVVDNRAARASAADELATTSAAERTHLADLEAARESHRAAGGSTLRSLALSLEQEQVVREDRLARRRVMQERLLPLIDAADAQAPDVEAALLSNESFTVLQMHAQQWLAGFQREQERIRRQRDAVLRDQFPLSQRQAELRRERASLESRAGRVPARMDELRAEVARASGLDVAELPFVAELVDVAPDETRWRTAVETVLGASARTMLVPLDRLERFSAAIDGLRLRGRLTFEGVELDLPDLGPADPERVAGKLVFKDSPFSGWVQAHVAEPSRNALCVESADDLAGAGYRVTLAGQTRNGRRGVHGRNDTRNIIGFSNADAIAEVDAELAELEQRLDAQGAEVAALDRASRVLEQQRTSYDLVATARFDDLDVDGSDRRIADLGRRRTEILDADDGLQVLESQIRDLTERLEETRRARYAVEQRQRELNAAHGELVDDEDAVKDRLQAMETAGKVELSADQEAALAADFAAAAAPADPDDLDRFAESAQRLAERLRAAVGDAEAEVRRVDDDLAQVFRVYKLQWDSPNLGASADSYPDYARILHDIRGEGLAARRAEWRRRLTEWSGQDLVPLVGAMAASVEEIEDRLEPINAILRRLEFGASGDRLRIRLRRLAPAHVQTFMKDLRALSSGSTSELDEDALEKRFADLSRFMQQLRKPSQVGDQATSLTDRERLLDVRRHVEISAERYDHTTGELRATYRTLGEKSGGESQELVAFIVGSALRFRLGDEMRSRPRFAPVFLDEGFVKADSEFAGRAVQAWRGLGFQLIVGVPLDKVTGLEPHMDELLAITKNSTTHQSWITPITDAGRVGEPPRGHS

SEQ ID NO: 36694 - protein, 532 aa, Leifsonia sp. Root4
MSDIAGELARVREAFDKPTLRLLDRKWAPFVLAVFKCSFSRDRRSIQAERLHAQVDAYLADLRTIGADTPNGNGRSLCVQWMNDQWLYRDTGDSEDGADENGAAGENSSATEEFYSLTSHALEALSLVESLARDRALLSESRLTMIVDAVRHRATQANPDRDERVRRLDQQIAELQSERDRVAGGGEIAAASVEDMREGYANLIDLIGQLPGDFKRVEESVATMHRQIVNDFRAEDRPVGEVLDEYLAKTDALMSLTAEGRAFEGAFELLRDDALLLDLKGDLETILSHPFAAQLKPVERRSFGATVTLIRSGIDDVLTQRNGLTTTLREHIVNHDIVKDRELEGLLRDINKELVTWMQTAGPQSRVRAEIMPGNLDAPHLRERFYDPESHVPPAALADVSQHAPEVLSLGEMRKQGGPQLLEMREALVDALGASGANNGDTSIGDVFNSLAPELRRPVEILGLMQLATQIDAVGHDGAAGAADGHTKNTSTEQYMTVRPDGTTRTFQVPRITLSDDETAALAALNSGANSD

SEQ ID NO: 36695 - protein, 341 aa, Leifsonia sp. Root4
MTDDRRDEPSAGGELGTGAKPFGHKSTIEHAASAAAPGAASAEQSAAQSAAFTDGDAFVGADDSTDADGDSLSLFEGDEGGLSAAQRRTLVLLLKHRYISASDHPAAWRTLIASTGLIKSRLNDLFLDLHVDRHYEVAFKRQAQSEGGAAFPTVLHDTSYNREETILLVVLRQRFRSERANGHDFVIVDRDNLLEKVAHFRPAHATNRSGDAKRASAAIETLAKAQVLLRTSDPDRFRIAPVIEVLLPVQRLAELLDWLRAENGSGSVDITDATEPLVDVAEPAESAESTETDGRVARNERIETESPGLDTAAGGLLDQQDDADTDSDAETAAEPELEPAV

SEQ ID NO: 36696 - protein, 1156 aa, Leifsonia sp. Root4
MSDSPLFYIDGATEGTTQWRAETFQMVNWGGFHGHHSVALASTATLVSGASGTGKSTLLDAYLALMMPSDTPFNGASNDAGSGRARSAEQRNVLTYLRGKTDDNREAETGALHDQVLRGAGEPTWGAIAMTFIDDNQRRFTVLRSYYVPRATNSYSDLSMKMATYDGALNLADLEDVVAARFEKRALKARFAGIEVFDTYAAFAQTLYTRLGIGANGEGGKALRLLARIQAGQQVKTVDGLYKSMVLERPATYAAADKAVNHFEDLERSYGAMVTEAQKAQVLERLPELQKQFVEANDRADLVDTFGVTRSGDTPLRLWELATEQRLLDAADDVNRAERKRAQTELSAATAAEKDLKERLAESQRRQRANGGDVLDELKTEVARLTETRDDRVASRTRFDDRVAVLAQPMGTPVEFTVAQAIAADTLTAFADAQTQAEAHRETLRREQYPLEEQIRTLKKERDFLDGRHSLVPQHLHAARLAIAEAAGMASDELPFLAELIDVAPGEERWRQAAEVTLGSVARILLVDETKLAALGRAIDPLTLPVRIHFEGVPLGAVTDAAGESRDPGLVSGKLVHKASPFTTWVHERVRQASLDARCVETPAEFGGDGPYVALSGQTRNGSRGAHGMNRDQKPIIGFSSQARQDEIEQELAQLTVSVEQLGSQAHTLAAELAALRARRDASQSVADAVWALLDVDTAEAALAGKNAELERVLANSDVLRGLQEEEQRLEAELEAAQTQRFEAERAARVLASAQSELVDREDAVNAQLERIADEESVTLSEEQTALLDAEFEAVGDPDDLESFAAGLKRLRERLTEQSSSERARAVQAAGAMRSIFESYQRAWPDPTIGTGLDSFESYRDILDSVLTLGLHERRQEWKRRLAAWSGQDLVPLAGAFDSAISQIEDRLHPINEILATLPFGAGRDRLTITLRRLHRDDATAFRKELKQLSSGATEQFTDEQTEERFLRLQAFMAGIRKPEDESKPSPTRDLLLDVRRHVEVTASRLNADGEELSTYSSLGGKSGGESQELVAFVVGAALRFQLGDESRTRPRFAPVFLDEGFVKSDAEFAGRAVAAWKGLGFQLIVGAPLDKVTALEPYMDLVLSITKNHAAGYSYINPIADAATPVAPPTSPVEPVETTPPLVEPVETPELIPAD

SEQ ID NO: 36697 - protein, 487 aa, Microbacterium sp. Root322
MTGTRAEAAFSRAVTAFSTPTLDLLHGRFAPFVVASLSLLFTADRASIPIADAQAELSEILDELRGAGDDEDDRRVPAGTGRDVARNWVRLGWLVQQIDEDIEVYRLSAHAVEALEIAGRTGGGRTRVSNSRVRTLLEAVEHLADSAEADPLRRLARLREERAALDAEIDRIEESGRADPLDDEELYEEAENVLHLARELPADFTRVAESLKLMQRDVVAHLRRDERPTGEVLREYLQRAQDVMNSTPEGRAFAGALRLIGDPDRIDALTEQLHGLLRQPFARMLDATQRAELDAIGRRVELGVEEVLAAQRRASHVITGQVKTHDPLRDRQIDDLLRDVIAALHVWDGTGASAAPVRSLPLIDLGHLRQTVSSIRPPAVPAPLADAEDVEFPDVDTRAWGGPRYAELEEYVSNLGPEFDLATAFEDAADDTRRPVDLVGLLEIAHRNGMTESDAVSVVEALRPDGSTRRFAFGAVTARNPKEEAHA

SEQ ID NO: 36698 - protein, 220 aa, Microbacterium sp. Root322
MPEESHVTEAPVDDAFIAPVPMEDDIEEHFAGDRGTLDPEIRRLLAHILQRRFIAAERNRREWTLLLDHQQVIESRLNDLYLRLVVDHGRGFAYKQQLRSDEIDMPVLLKDAPYTRAETLVLVHLRTVYQRESAAGEASVRIDIEDLEQTVLSYFTDVDGGTARQQKAIRNAMDRLDREGIVQEETSGRYRISALVEVVLSAETLKELRDWLRSQEVVER

SEQ ID NO: 36699 - protein, 1119 aa, Microbacterium sp. Root322
MTMVDTLFGLIPAGSRGQQWVAEELQLINWGGYDAGPHRVRFSPDATLLCGGSGSGKSTLMDAYIALMMPHTTPFNGASNGGVTGRPRGDEQRNILSYGRGKIDESRTEDGTKLRVLRGDGEDTWSAIATTWLDHDGSRFTAVRAWYIPADARTLEDTTRVRATVNGAFDLGLLEKAATQRLSDASVRATGLETLATDREFSARLQAVLGIGAAGSGAKAISLLARIQAGQQITTVDDLYKKLVLEEPETMATADAVVAHFDELESTRTRMLTAKQQVSALEPIRGIKDRIAAAAERVRVIDEVGVFTDPSSLAALWNAQRRLDLLREVEVELGDRTRALSLAVREKRALVDAADLEREGLLDVLRQSGGDRLETAQRELRVAERRLEDVRRERAKFDAIAEELGVEVETAAQFDAFVAGTRGSSPKSDIRDARAAFADAETARRTAEAEMRSLRDERERTIRVRGSIPAHLDESRALLAQAVGLAPSDLPFVGELIEVRTEFEPWREAFNLALGGFARTLLIDVEHLAEFRSAINAVRTPERLNYEGVQTGLPEMRGADPKTLPGRLDHLPTPFTGWLQQRLQERFGYVCVDSSSQLGAHQRALTISGQVSQGSRGAHGGQGRANMLGFTNDRRLREIDEQLRQLSARHDECAASAADAEAALDRIEARSTAFARIDDLTWEQIDVAAVEAERERWVAVEAEVTTASPEIGQLRHQADDLRTRAARLRDDEARLSNELAQTQDHWGQVTDDVDACQSVIDAAAASGLEMGERHASFLDGRFLHSETGDTPSAAERLAHLDTALRTAAQRLHEDRREAAEAHEQQRESMRRLMTGFLERWDNLTILPDPDASVGEFESILEALQTNGLHELETEWRDSLLKLSGNDLTSLDSTLSRSLREIKDRIDPINRIMEELPFYDDDHRLQITPRENQTEARKRFRRELREVRGLIDAASTDAEREAVYRKMSRLIARMRRTAPDFAELIDVRNHVRVSAERVTAATREHVALYDHIGEKSGGESQELVAFIVGAALRYQLGDAGAARPRYAPVFMDEALIKADAHFTKRAIGAWRGLGFQLVIGAPNDKYSAIEPHVDVEYNILKDTRGRSWAKAKVGLPQEAV

SEQ ID NO: 36700 - protein, 475 aa, Pelomonas sp. Root1217
MSASAIFFHGACEHFFRPLTWADREACAAVLRGLHERVHGPEADYAQALTKDLVLEICLGVIAQPAYREGALSAAQAVNAEAERGYALNLLRALKEHGWLEDYKDPIDLQPVLKLTRAGKAFAETFAELDNARHKTRQRNMRSARKALLAFLDNHDEDELLDAHDYASRVVQDLQDDIEYFRALMQSLTREALTQKLAWDEFNDFLERRFGKEMSVRLVADSVDRHRGQIIELLDQIRAWPAEQRERADAALHQRADWLEPVLGNGRSATLWLCQRIEKLIDAACELKLPMLRSEMHNYVRRFTSLLRQALSLDYGAESPMGLTLDGIKAADAAGKQAWLELLGRRLATTELRLLPAGGLRWTQRERQQLEGDDTEWRIRADSRLEAALRRAEAEAFVISEEAVLRQLGHSGAVSLRLSDLAARRADEVLTSLHAVGAARSAQGRQRWQVKKLDERFETTSFIADDFELRRLPKT

SEQ ID NO: 36701 - protein, 227 aa, Pelomonas sp. Root1217
MTTDTFHALLETRLADRTAGNVSRRRFAEICNRLLAAGILWRDYSKPEQALYDDATLAEELLREWFDVLGFTLTHDVDANLMRLYPPGDDQEDEDGVKRLRARLSKDMVAAALGLRFLYTEGLTGKRELVNQELAISLEELSQTLVSLLGTTLPGSAAERGQLLRELRKHRLVRFREADAGFGQMEMLLGVLRPILSFVSDEALLEVRQLMQTKAQDVPLPVAAGDA

SEQ ID NO: 36702 - protein, 1211 aa, Pelomonas sp. Root1217
MRLQRLITVNWGTLETRDWPLADATLLTGESGSGKSTLLDAIQAVLTAARQGVFHFNAGQNESTQGRRGGKEPRTLHAYALGQCGSDVFLRQRSTSYVGLCFEPSDQEKDAVPFSALLGVEAHVDGGRAEGGKPLFYLLRGASLTLSHLSSGESVPGRVRPLPLKEAYAQLQLRLGLQAEQLMRFEGKDSYLQHLYGHLLGRKFVPEADATRCARAIVKAMAYREIGNVNELVRDEILDAHDFSQEVGKMRQLMQEIARLKADAERLKLNIDRLKLVDEAAGDVVALLRRHVVMLNAHALRMQLDTLAERERTERRRAQLQGHATESQRRLDAIALERKTLDHELALVQGELAQSGIAQEKQRLTTLEAQYAEQFRKDWSRVQQSARQMDQVLDHVNQLLALDLSLLPALQAAVQRLGSAAFRATKQWQPARVALLTDARLGDELAAFELEPLDQALRALEAVLLGADETTVMSALVTARSELLRQQSQLLDEQTGLRAEQAQLLEGRTSAPDDVQRALRLLEAELPESRPRLLAALIEPRPGSAWQAAVEGYMGRDRFALIVEPDFEEDAIRLVKRHFARRSPKVVQGAKAIEDTRGMAVAPRSLLSELVCEHPVAKAYLLALYGRVRQVASEAELRRTPQGLMQQGLGSRAYGMFACLAAEHELAFGVESRKRRLAWVNARLDTLVPELQGLKSMAQSLTTVQGWFSQSSAASLAQTLGEALETRLRHVDVEFHLQQLDTSSIEAQEQRRDALHERLDAKQAQWDAEQQAVGVQNKELGQVLKALGDLEGRLPELAQNIVTAQVWISRFADAGGAVASELQLLDEARSLGEADLPSAATLQNHATNASENLPDRLKTLRNHIATYLAGARTDEERFGWTEPPRSVEQIEAVLQSVLAVQQAAREQMRRQDGIGLAENVARLEKAEGTFNHVFTSDFCFKVRRDVKDGSNTLRKLSQELKAIQFGVDSYDVVQDWVPRYKDYYDFFEALDGVVDQLEKDRTAIFDAPQLSPEHRATAQEIKRLLLSQDQIAAERALKELADYRNYRRYDIHRIAGGHRTPMSTWGTGSGGELETPFYVIRAAVLAHALGHFGRAPNAPALRLMLSDEAFSKMDEARSRAVMRFLAQNMGLQLIVAMPTSKSGAIKPEFDKEYTFSKLEAEADGQVVHISEVQEKDFKREALSALWDAHAQAARAQATLAFEDQQNAERTA

SEQ ID NO: 36703 - protein, 462 aa, Methylobacterium sp. Leaf94; identical to SEQ ID NO: 36605

SEQ ID NO: 36704 - protein, 211 aa, Methylobacterium sp. Leaf94; identical to SEQ ID NO: 36554

SEQ ID NO: 36705 - protein, 1151 aa, Methylobacterium sp. Leaf94
MYRLTDIVLSNWYLIRREQIRIRGAAALVGPTGAGKSTIFDAVGTVLAGNNASRLALNASASGRSARTVRDYCLGWISDPAEGGRPTREACETLIVLVFENETTGRVVSAGLALAARAEDSRETTLSRFVHVGHRFEIADYVRETPGGSFVAPWAEIAKDLRTRGTTFDEYRASGERFTAELLGNLREGAAVPEPRHFLRTFSNAVAFKPIFDSSAFVRSFVLEPEPLDVARIRQSVETWRRLLETIDELERRLAHLARIVGRYETWAEASLASVLGDLRAADADLRRRIIDTVTARQTLKDVAERLRITRESVATSQGFVREIDGEIAGKKALLAGTAAEGRLAASNAGLAMLARDRRDLAARVAELVGIVLDTGKLAVILGTIRTVSPEAARSVEACARSGLRREANPEETLRSDGSLAALLAGLAEMPPIAAPLERAAEDAALRARALENEAQSRAPAPSAGRGAAPRLSSDVAAFREELSRLGIVATPICELAEIIDPKWGQALEGLLGGAREALVVQPDRLNEAFAHLEARKSQFYRCLLVKTTDTARRRGGRDDEGPLALIETADPHAQAFLGARLGGYDLAPNDAALAHMSRAVAPSGRSTSGMAYSVVRPVQLMMTRGHRGPTAESHQDWEQAVSEARRARAEADVLREAARIGAALARRLSETNLDLAELRAEADAIEGRRRSLTTERESVERAETGVLEAELAELAKERSAYLTELVQVLEPKRDLLLGEEAGLKAKVAASREAARAALQARRTAYQRWAGGDSMRIRLVRPDAFDPKALATLRAERADLDAKALASHANTGRARAREAAETARTQGRAAERDVAEYCVQWRVENPLGAGDVPASFGYGWAKRAHDEVASHELRRYRDQARRAESEMRRLMIEDLLTRLADKFERVRARLEALNERLSSQTFTGQTYAFEAEVDRRYAAVHALATEVARSPDAAQAILPDEGGAIPDGPLAAAIDEITALIAGEESAARLADYRNYFVYEIGMRDRAGNRTTMSNRALRGSGGEAQAPFYVAIAASLASAYYPGDRPGDENPGLGLCLLDEAFSKLDVRNSQALVDLYQAWGLQLLIAAPEDKRTTLTEVMDTIVTVYKSPDLSSVRIEAEHPLEAAKRALAAINPERQGIEGFRITDAAE

SEQ ID NO: 36706 - protein, 493 aa, Mycobacterium sp. Root135
MDDAAAASFASAAELLDVNRDIQGSPTIRLLATLNLGVYGTLMERHLSDGVVGETDLVVRLERDLDELGRPGGEQSGLALIKSWASQGWLHRVADQRAGVERNLCYLTQDARRALDFLRSMRRKDTIATGGSINGIASRLKQVALRVGNDPDRMRASIESEIAALHVALEALERGDDDVARPEPDLTDVYDEARAIALQMERLITDIGQYGTMIEQATAALDEPIDTNLEYRDRQRQMYADYQAAWDSKGRDSHRAFLRMINDPDQRAEFEADVAAVAEALPALDPALRRVMASFFELVGHQIDEVERIQQRCAQRVKRFTAFGTLEQSRGVARQLNEAIGAARALLKSSLTDSRIDLELPLARHAISSVGALSFRIGDLSNPRPAQTASTDVDLSSFSALTTQVDAPAMSELINTAITEGPLSLPAAVEMLDAAYLGHVIVLWSWALKQPDTVGASESVTVRFQSLDGRDREMEVPHLMFTEPISSLLGAAS

SEQ ID NO: 36707 - protein, 240 aa, Mycobacterium sp. Root135
MSPDEPGAHDYAGFSSLPEVDQAARAPHQRKPRFDGDVSELPDRACWALQHLLTRRYISAETERDLYTWVLEYRSQLTVRLSELDLVLKVIEGVSEAGDVAFVEQARYESARGVKLLRREPLGTYDSILALHLAQMMRASGDQSVLISRDEVHGLFAGVLNDVDRDVVTFTARIDGAIARLASLEILRKSRDDEDSYTVSPVITAVMTASVITELQQQFELLLSGGSTGLPSEVDVTLDV

SEQ ID NO: 36708 - protein, 1122 aa, Mycobacterium sp. Root135
MSEQFHLSRLQVVNWGVFDGYHSIPFSEGGALIAGASGSGKSSLLDAISLGFLPFNRRNFNASGDNSAAGSSAGRRTVDKYVRGAWGQRSEAGASKVMYLRGDGAAWSAVAVTYTSNTGRAVTGLVLKWLTGESRSDSSSRFVLADGDRDIEDVCNRWASSRFDAGVFKDNWRFSTKVESQYLAQLYATIGIRASDAAQQLLGKAKSLKSVGGLEQFVREFMLDEPASLTRLPDALKQIDPLVDARELLAVAQRKRKILGDIEKIQLRYGSESSDLGIIDLVDAPMVRAYTDHLRLAQAPTQIDQLDTTIDQLGNEYEDVTRSLNLAKAEADSLNAQISGSSSSIGPLQSQVAAAEAQAEEVSRRRAAYEAMLAPHDVDVPDTADEFWNLREELSAQANELLAKLDRGREASTDAEYAQKLARIARDDATKELRRVEHVGSALPESAITMRDHICAAVGVESSELPYIAELMDLRPEHSRWRVAVEKVLRGVGLRLLVPDSHHAAVLRFVNDTNMGGRLQLHHVRAKFVGAPPVDAEPNTLAGKLFVVDAKHPCAAEAADVVTAAGDHVCVDVPDVFPRFRRAVTDTGLYKDSDRLSIKDDRRPLRQADYIFQGDVAAKIDALTVDLAAAEEAYHQARSAADAIAAERQQWRDRAAACKAICEQFPQWNQVDTESADGHAERLRDQYELLIAEHPDIEALNARADECWDQIQSLMTRRGTIQTRRDDLDSRRTRLLELVERLTPAFVSEPLTDLLNRYASDVPVTLELLNPEPHRDAVFTAIRREREQLRESRRRSYDELARILNTFDTAFPDAIPNDSDAFDERVHDYVALCRHIDERELPEAYERMMRLVTEQAPDAILTLHRVAEQETRRISEQIKRVNTGLGAVEFNRGTRLTLRATPRSLTAVAELTDIVKAISRRIAEVGLGDKQAILDQYADILRLRNRLASTAPEDKAWTRDALDVRNRFTFDCAEWDTHTEELIRTHSNAGDNSGGEQEKLMAFCLAGALSFNLANPESTDNRPVFAQLMLDEAFSKSDPQFAQQALQAFRKFGFQLVIVATVQNATTIQPYIDSVVMVSKADATGRNARPVATVATKTISDFTALRQDMMASAAAARVPATV

SEQ ID NO: 36709 - protein, 484 aa, Variovorax sp. Root434
MSLDYATLDLLRQSHPAWRLLRSDHAPLVVSFLHRVFIAPNVRVMSQADLAEALEDELFELRERAGPGSFPKAAVEYLNDWAGNDKGWLRKFYALGSDEPQFDLTPPAEKAIAWLGTLTERAFVGTESRLLTLFELLKQMSQGSETDPAARIAELHKRRDEIDVEIVKILGGDIPLLDDTALKERFQQFTALARELMTDFREVEQNFRGLDRRVRERIALWDGAKGLLLEEIMGERDAIADSDQGRSFRAFWDFLMSSRRQEELSAMLERVLSLPAVSDLKPDTRTRRVHYDWLEAGEHAQRTVSQLSQQLRRFLDDQAWLENRRIMDILRGIEAKALALRESPPPDETMRIAVPVVDLELPMERPLHTPAFKPSIADTALESGESNVDAGALFSQVVIDKAQLERHVRHALQDRTQVTLKELTHMQPLRHGLAELVAYLQLADQTFAAVIDEATTDAVFWQVTGQDGFARSRQARLPRIIFVR

SEQ ID NO: 36710 - protein, 221 aa, Variovorax sp. Root434
MDENIEIPLPLTGAATHDLSAVVIPLLRGVIYREVDSGLWSSLYNLQARVRDYVSVLGLELVLDDAEGYAFLRSRTRLAEETEDPSAAKLPRLIVRRPLSFPVSLLLALLRKKLAEFDAGGGDTRLVLSRDQIVELMRVFLPEHSNEAKLVDQLESYLAKIVELGFLRRLKPGSGAHDGQVAAFEVRRILKAFVDAQWLSDLDARLAGYRLQLLTGGAADE

SEQ ID NO: 36711 - protein, 1124 aa, Variovorax sp. Root434
MNEEQTIGLDFVADDALSGFRLHRLEVFNWGTFDARVWALHPDGRNALLTGDIGSGKSTLVDAVTTLLVPAHRVAYNKAAGADNKERSLRSYVLGHYKSERNESSGAAKPVALRGHNSYSVILGVFHNAGYDQTVTLAQVFWMKDAQGQPERFFVAAEGNLSIAKDFANFGTDISALRKKLRATGAEVLPSFPPYGAWFRRRFGIENEQALDLFHQTVSMKQVGNLTDFVRSHMLEPFEVAPRIAALIGHFEDLNRAHAAVLKAKQQVKLLTPLIEDCDRHGDLLKQTDDLRVCREALKPYFAGLKLELLDRRIASLAEEWARQNAQVQRWEELRSGQRIQEKELRQSISDNGGDRLEQLSESIRSKKAEVERRRVKARNYNELARSVGLLHMESASDFLTQRQSLAGMKEEIQAREAALQNDLTEHAVRLRQGKSEHDELAAEIRSLKARRSNIPGEQVAMRATLCEALGLDEDAMPFAGELLQIRDDEREWEGAAERLMRSFGLSLLVPDRSYADVSEWVDRTHLRGRIVYYRVRAVQRGDVPGPHRDSLARKLSIKPDSSFYDWLEREVAHRFDVACCLTQEQFRRETHAITRTGQIKAKGERHEKDDRYRLDERSRYVLGWTNTAKIAALETKLRSLEKRLADEAGIVAGLMGEQSALKLRWDALSRLDVYDNFGELDWQSLAKDVARLEQDKAALESASDMLKTLASQLQELLEALEKTEMELEGHRDKRSKTEQKKVDAEAQHAQTQVLLDDPSLSLHAMNFERLEGTRAEALGEHQLTVESCDNREREMRDWLQAKIDAEDLKLKRLRDKIIQAMAAYKDAYKLETAEVDANVEAASEYREMLSSLQADDLPRFEAKFKELLNENTIREVANFKSQLDRERETIKDRIARINESLTQIDYNAGRYIVLEAQPALDVDVRDFQTELRACTEGTLTGSDDAQYSEAKFLQVKHIIERLRGREGLSEQDRRWTGKVTDVRNWFVFAASERWREDGTEHEHYSDSGGKSGGQKEKLAYTILAASLAYQFGLEWGEVKSRTFRFVVIDEAFGRGSDESAQYGLRLFAQLNLQLLIVTPLQKIHIIEPFVSSVGFVHNEEGRSSRLRNLSIDEYHAEKAKAAG

SEQ ID NO: 36712 - protein, 391 aa, Variovorax sp. Root434
MNWTRPSDLRDQLLKLWDRGDLLARLVTGESLFPRRLALKDPTSAEMTDHFDEVRDWSRDLRAATGYRIVMREFRHRVLGANAIPAEVWVDSLDQALALVGKQKEAVRFAALIELTRASQPLLLPWLARRPLRVLEVESQWSRFLEIVAWLQRHPRPGLYLRQVDIPGVHSKFMETHRGTLMELLDITLAPEAIDKTATGAGEFVRRYGFLGKPSRVRFRILDPELASRAACPAQDITVDAPGFARWDLGCSRVFVTENEINFLAFPAIKGSIVIFGSGYGFEMLSDVPWLARCAIHYWGDIDTHGFAILDQLRARFDHVESFLMDRATLMTFKMQWGDEATPTWRELLRLRPEEQALYDDLRDNRLGRHLRLEQERVGFDWVENALTALG

SEQ ID NO: 36713 - protein, 507 aa, Nocardioides sp. Root140
MSEIAGELARVKGAFSQPTLTLLHQRQAPVVITIFRAAFGRNNKPIPTARLHAQVEEHLAQIRLTGESLVPEGSGRDLCQKWMRGQWLVRALDERGHEVYTLTSHAQQALELVKGLARDRATLSEHRIATILGTVRRFNAEANPDRTARVSLLNEEIARLSAERDRLVDGAEMVSATEDYMLEGFTELQSLISALPSDFARVEERFAGIRAEILAAFRAEDRPPGDVIDDYLARADALMTATHEGRAFEGAFGLLRDDALVAQLREDLTALLEHPISDRILAESDRAELRGTVKLVRDGLDRVLTQRSRVTATLKEYIVSHDAARDRELEQTLRQVESELMTWMATTGPRATHDVPLLPLRAGIDHLRERFHDPADDRLPDPIEPVDPDDARSPSLAELMAQGGPQLPSLRQRLDDALSDLLPAATLGEVFDRLEPSLRRPVEIYGLLHLAADRGWTTDDVVETWATVRHDGSRRTFAVPRMPLPDPDLDAHRTQQSRTQQKSETPA

SEQ ID NO: 36714 - protein, 264 aa, Nocardioides sp. Root140
MSTDVDLNRPEPEDALEPDDALERDPAYDDSVSLFEGDEGGLEHSQRQALVVLLKQRFISARTHPRDWQVLVEHERVLRSRLNDVFLDLMVDREREVAWKRQAVPETGGRFPTLLHDTGWSREETLVLVHVRDRLRAGLASGDTRVFVDRDDILDYVASFRPAHATDESGDTKRAQNAVQSVVKSGLLIGATGDERFEISEAVEPLLPLELLQELLSALRSANDTTPEPEEPADLFDEDGADTDGAGKDRADKDGADADEERDA

SEQ ID NO: 36715 - protein, 1160 aa, Nocardioides sp. Root140
MSTDQINEHELGGDEVDEASDGLFARQVVDTPADDTVQWRAALLQLVNWGGFGGLTTVPLRGDTTMISGASGVGKSTILDAYTALMMPSDTKFNGASNDAVSGRARGVGQRNLLSYLRGAVDVIDDPRTGRPVEKLLRGKGADTWGAVAMTFVNDQGGRFTALRTYYVPRRATRSSDVQMQLATHEGALTLDTLEVAVPERFHANTLKKLLPGIRVHRTYAEFSAVLHARLGIGANGDGAKALRLLSRIQAGNQVRSVDELYKEMVLERPATYAAADRAIEHFDDLDAAYSAMRTEEEKLDLLGPITELHARKVAATRRQSQLDSYGVTLGGDTPLRLWLLRTHHRLLEAAVAANRDARTTNADDLSQTSSAEAALVADLENAKDSHRAAGGTTLQNLALSIEQEQVVRDDRAGRRAVLQERLLPLVDVADPHAVSVETALESDAGFGALQQQAREWLAGWQDQAASLKRERDIARDGLFPVKQRQAELREERASLQSRAGRMPSRMHEMREEVALASGLGIDELPFVAELVDVAPDESRWRTAVETVLGGTARLMLVPIDRLKDFSSAIDGLRLRGRLTFEGVELDLPDTGPADPERVAGKLLFKDSPFSGWVQAHLGEPSRNALCVETADGLAGGGFRVTLAGQTRNGRRGAHGRADTRNIIGFSNEDALSEIDSELAALEEKLQAFDADVAELDRQGRVLEQVRTAYDTIRAARFDDIDVAGSDERIAELGHRRAEILRADDKLHVLQGQIDDLSDRLEQARKKRFVLEERHKRLAAEHAELVDSEDLVNDRLDVMDRNGTVTLTEEQDAALAADFAAAATPDDPDDLDRFPVTSQRLAERLRDAVGETETEINRVDDELGAIFRMYKLKWESPNLAATPDSYADYARILDDIRGTGLAQRRTEWRRRLTEWSGQDLVPLVGAMAASIEEIEDRLEPINAILRRLEFGASGDRLRIRLRRLSPAHVQVFMKDLRMLSSGVTAEPDEADLEKRFLDLSRFMRQLRRPVPGGDPVTDRDRLLDVRRHVEISAERYDHHTGELRATYRTLGEKSGGESQELVAFIVGSALRFRLGDEMRSRPRFAPVFLDEGFVKADSEFAGRAVQAWKGLGFQLIIGVPLDKVTGLEPHMDELLAITKSTTTYQSWITPITDAEQTPAG

SEQ ID NO: 36716 - protein, 487 aa, Microbacterium sp. Root1433D1
MTGTRAEAAFSRAVTAFSTPTLDLLHGRFAPFVVASLSLLFTADRASIPIADAQAELSEILDELRGAGDDEDDRRVPAGTGRDVARNWVRLGWLVQQIDEDVEVYRLSAHAVEALEIAGRTGGGRTRVSNSRVRTLLEAVEHLADSAEADPLRRLARLREERAALDAEIDRIEESGRADPLDDEELYEEAENVLHLARELPADFTRVAESLKLMQRDVVAHLRRDERPTGEVLREYLQRAQDVMNSTPEGRAFAGALRLIGDPDRIDALTEQLHGLLRQPFARMLDATQRAELDAIGRRVELGVEEVLAAQRRASHVITGQVKTHDPLRDRQIDDLLRDVIAALHVWDGTGASAAPVRSLPLIDLGHLRQTVSSIRPPAVPAPLADAEDVEFPDIDTRAWGGPRYAELEEYVSNLGPEFDLATAFEDAADDTRRPVDLVGLLEIAHRNGMTESDAVSVVEALRPDGSTRRFAFGAVTARNPKEEAHA

SEQ ID NO: 36717 - protein, 220 aa, Microbacterium sp. Root1433D1
MPEESLVTEAPVDDAFIAPVPMEDDIEEHFAGDRGTLDPEIRRLLAHILQRRFIAAERNRREWTLLLDHQQVIESRLNDLYLRLVVDHGRGFAYKQQLRSDEIDMPVLLKDAPYTRAETLVLVHLRTVYQRESAAGEASVRIDIEDLEQTVLSYFTDVDGGTARQQKAIRNAMDRLDREGIVQEETSGRYRISALVEVVLSAETLKELRDWLRSQEVVER

SEQ ID NO: 36718 - protein, 1119 aa, Microbacterium sp. Root1433D1
MTMVDTLFGLIPAGSRGQQWVAEELQLINWGGYDAGPHRVRFSPDATLLCGGSGSGKSTLMDAYIALMMPHTTPFNGASNGGVTGRPRGDEQRNILSYGRGKIDESRTEDGTKLRVLRGDGEDTWSAIATTWLDHDGSRFTAVRAWYIPADARTLEDTTRVRATVNGAFDLGLLEKAATQRLSDASVRATGLETLATDREFSARLQAVLGIGAAGSGAKAISLLARIQAGQQITTVDDLYKKLVLEEPETMATADAVVAHFDELESTRTRMLTAKQQVSALEPIRGIKDRIAAAAERVRVIDEVGVFTDPSSLAALWNAQRRLDLLREVEVELGDRTRALSLAVREKRALVDAADLEREGLLDVLRQSGGDRLETAQRELRVAERRLEDVRRERAKFDAIAEELGVEVETAAQFDAFVAGARGSTPKSDIRDARAAFADAETARRTAEAEMRRLRDERERTIRVRGSIPAHLDESRALLAQAVGLAPSDLPFVGELIEVRTEFEPWREAFNLALGGFARTLLIDVEHLAEFRSAINAVRTPERLNYEGVQTGLPEMRGADPKTLPGRLDHLPTPFTGWLQQRLQERFGYVCVDSSSQLGAHQRALTISGQVSQGSRGAHGGQGRANMLGFTNDRRLREIDEQLRQLSARHDECAASAADAEAALDRIEARSTAFARIDDLTWEQIDVAAVEAERERWVAVEAEVTTASPEIGQLRHQADDLRTRAARLRDDEARLSNELAQTQDHWGQVTDDVDACQSVIDAAAASGLEMGERHASFLDGRFLHSETGDTPSAAERLAHLDTALRTAAQRLHEDRREAAEAHEQQRESMRRLMTGFLERWDNLTLLPDPDASVGEFESILEALQTNGLHELETEWRDSLLKLSGNDLTSLDSTLSRSLREIKDRIDPINRIMEELPFYDDDHRLQITPRENQTEARKRFRRELREVRGLIDAASTDAEREAVYRKMSRLIARMRRTAPDFAELIDVRNHVRVSAERVTAATREHVALYDHIGEKSGGESQELVAFIVGAALRYQLGDAGAARPRYAPVFMDEALIKADAHFTKRAIGAWRGLGFQLVIGAPNDKYSAIEPHVDVEYNILKDTRGRSWAKAKVGLPQEAV

SEQ ID NO: 36719 - protein, 488 aa, Microbacterium sp. Root53
MSVLARALAIRRLLDPAGGNAALRLLRSSNLPLAGALLPTHLGAPGARIPTAELHERLDIDLEELRPHLELPERTGKAYCDDWRAAGLLVRRAASDARGETYELSPDAIDALRVLEQLEAPRTALTESRLVSLAAAVRQLAIDTDPDVTRRIDGLRAERARLDAEIARLESGDIEPVDERRARERATEVLVMAQDLPTDFARVRAQFEALNHDLRARILDSSKTPGSVLDDVFRGVDLIESSDEGRTFTAFAALVRDAERSDELESDLSAVLSRDFALALAPEARRILRALVRQLKSGSREVQVVLTEFARGLRRYVQSHEFQRDRALRDAIQEALAAAVPASRRVKPYTAAGIELELTASSLRSAGELTPHDPAEFEPSAPLEDVEPGLIDFESLAAIARETEIDFVELTEAVNAVVARGEPASVGDVLEAHPASQGLASVIGLLSLATRHGAIDRGAVERLTWTGSDGAVRSADVERHVFTKEIPA

SEQ ID NO: 36720 - protein, 218 aa, Microbacterium sp. Root53
MTDTDAHADPAEHLESDGLWHGDLGRLHERSRRALLEVLKGPYLSGRQQPQLWAALVADERAIRSRLHELFLELVIDPVDEFAFVRKVRTDEIDVPSALRSEALTFIDTAMLLVLRQIQLSAMGDRRVIAGRDEVYDRLAVYRAGADEGTFERNLNAAWTRMKSRFRVIHDVGDDRVEISPVVRYLIDEERVRALAVVYGDIASGAGAGGRDDVEEKA

SEQ ID NO: 36721 - protein, 1109 aa, Microbacterium sp. Root53
MTDTDALRTAADGALAVGQWRLAEVQLANWGTFDGVIHRVPIARQGHLLTGPSGSGKSSLLDAIAAVLTPDKWLRFNQAAQGAGARTEQRGLVSYVRGAFSRTEDATDGRVVSTYLRPGSTWSGILLRYEDGGGGTASLARLFFLKKSGSALADLQDLCLIERGPVDLRDLEDFARGGIEARKAQARWPDALITTNRSHGRFYARLQSIFGIAQENALQLLHKTQSAKNLDSLDQLFRDFMLDRPATFDIAETAREQFGELRDAHDRVVDLRRQRDHLLQLRDASTALDAAQLDVGRSQVLIDANVPYQKGEALRLVREELGDLDERIAQLEIDAERARAVAARAEDTYLAARDAAMERGGAEAEHLQQRLDDARRAARDAGERWETLARQLATVGIEHAPETAEEFTELRAAIDRELGEATSATGATHPQHERLTVAKRELRRIDGEIDALRTSGTTVPRGLLEARRQIAAGVGVPASALPFAAELLEVRPEFDAWAGAIERVLRPLALTMLVRPEHLPAVRRWVDANEIAVRLVFEEAGGSAGPPRPAASSTSLVNRVRVAQGPFGTWLSARLSEQFDYACVETPDGMDEHVRAVTINGQIKSSRTRYEKDDRVRIRDRAAWVLGDRAAKLEALIALRATADAEVTAAQRDVDRAEERRAFEERRRGALATLREASWHSVDRSGAAMAVAALEQRLAELTKADGALRDAIVVCQAAERDRDEASAIDRAAQVALDASRAARAAAAEDEAGLMAEFDAGLVEQVGEQTRAELARRFRAVKRTLTRRELAEIGQRVGGVLIAERDAAIGRATHAGNDVTRLAAQFIDRWPEASAERIAAIDDRGGFIDMLDRILANGLPEQETRFRTLLRDRSRDLIGDLRGEILGATRAIQDRIDSVNAALRRSAFDEGRYLRLQVRQVHSATVKRFLAELKDIADDSWTDEDDASAERRFALLAELMRRFGSSDHIDRRWYAECLDTRLHATFRAHEVDEHDRVHATYDSGAAMSGGQQQKLVVFCLAAALRYQLADPDAPFSRYGTIVLDEAFDKADSGYTKMALNVFVEFGFQMILATPQKLLRTIEPYVGAATSVENPTRRRSVLSQVDWRGRR

SEQ ID NO: 36722 - protein, 355 aa, Microbacterium sp. Root53
MLTVPLRPPSEREARADQAAAQSWAREWLTWPVSDGADVEWASREWRTVGRQRLPVRLHLRDPDAVAAFVGGRAAAEWTRLRDRAATIRDHLHGADPAALATAIRRHAATLIGYGDREFDQVLAAAAWVIGEHVRGLRPRQLPIRGVDSKWFGAHRSVVSALAATSGVDDLGIVDADPLVRVRVLDPSLLPGGPLDFAAPVAQLQLLALAPRGAFVFENLESVLAMPAWPGAIAIHGSGYAVGRLRDVPWLARTPVVYWGDVDSNGFAILHQLRAHHDDVRSVLMDEETLRAHSDLWVVESQPARGRFAHLTESEERTLAALRAAGDVRLEQERVPWQTAVEALSVAWAGLPSVP

SEQ ID NO: 36723 - protein, 476 aa, Lysobacter sp. Root604
MGFALDANFPPPLFDRLPPALFRPLAAANNRRYWIILCRLIEEMWGDGGRSPGEEAPRAVVVRTIETFLAADDPWEEELETPVANRAHNIADVLVGSGWLAQRRRGLVDMITVRPVIAQFYVVLCEFAYHEPEFIGSKVRSILLNLRAVDSGEASGDQYVEAAKQAKRCMAHIANTGCRVQDLMEALLKRTSARDFVHGFFEEYIEKVFIADYSELRTRDHPLQYRSAIIALTLQFQHDPEKSAALIDWYQEKLAAGDRVKAETLYERDTRLLLRLRDVDDQLRRLDEEIRDANQRAVTFIEYKLRAPKQLDKLIAKALRSIDGIEEGAIALPAAPRGRHASEWGLARPRQLARPSVSTDVERTPPTIEELAMEALRRRMAESRMVKPVHLANYVGKHLSGRGSVSSDDLTITSINDLCCYQRLLLIASRGDCPPAMRRSDPQLQMLKRVWISFDDGITCNAYMEHRRFNIQLEPA

SEQ ID NO: 36724 - protein, 199 aa, Lysobacter sp. Root604
MANWERLAEQSQDYTVGDFQQAGYRLVMEQVLYAADRRSRVAYDLIVKHLATYRELLGKLGIVVVHNPHMSYLVATPNQYVAEKMRLSETRLALVLRRLYDDKIHATEIVAGEAFVELIELERAYKDLLSRELPDKAELRELLRAIKRYGLVKFEEADDDQPFQIVIRPGIVDVLGETALLQLANHAPVVGGEDDDEAA

SEQ ID NO: 36725 - protein, 1141 aa, Lysobacter sp. Root604
MKQLEAIGLIQFFLYERKDLELGWNTAFLGPNGTGKTALLDALQIVLLAADSNRTHFNASGEGKKRARGLRDYCLGIYGQTEAERYRAGANTYINLVFRDAESGVPVTAGVSLAAQADNPEVAFNGLYILPGVALDTGAHVEREGGRETILPWRRFQHVAGDLCRLAGTSAFFTANREEFSRRLYVEHLASPGEKPNVRAIRSAFARSLKLNKDVTDLSETLRDHLIEQRFTNVRQFRARLDQFRHVRELIRQITERIERVTAVTKGYAVVQRERTAQSNLECLQAVYETERVGEKLAENEDRIEALAKDLEAATLALERAELEVREADAARERALMARSLDPDFQKQAGHAERLTDLETSWKDKREALTSTLEIAIAAVALAGKLPEMADERGVFEDAVTQLLSLKEAATAGQLPPAEDILSVTRLLAEIHGLVLKASSSADLDLRAARDLRRDTKMALDRAQRGLTALREPTLALQRMLADAGIHATPVCDLVSVTDPEWQPALEAYLATHVDALLVPREQELAAIDLYKGLKGAQRVYRVKLALPSRGRPWQAPGGGKYAASLIAGESREAVWYLQGELGRLSLASSSQELQAGTKALSKEGMVSSGGGVERLLLPPQNELKIGRSDSDALRHRAELALREAEIQLQSTEQRARQLQAAFPRLAPYAEAEDVRVRLEGLFSAARENGRVVDELRMRLAASQTDQLANLQASLEAAGRLASGARDAEKHWVGRVAELKAQHEVATNSGKNLIQQLEVVRARETACRQQPLYDANEVERHRVRYDERFEEDMDARLHACAEAIRSAGTKADNADRDAWRDFSQYVADFQLQNHDISSNQWQRAYQYALEDKRRLEEMELAERLAQAEEAYDAAVKVFRTDVAQTLLEGFDAIGEQINNLNQVLKAAPEFSNGERYQFKYKPVDQHRALYDFLKRVREQGDAEEGIFGGSGKVPEEFRSLVEGDANSELLLESSPLNDHRRFFSYDVEIYHDGKSMGWLSKRFGPGSGGEHRTPLYVIFGAALAAAYGKARGAQTTGGIIMLDEAFEKMDAQNVRATAEYLNALGLQLIMAGPETDQPKMSSFLNVYYDMARFGSRTVQMTKNVVMDEARELLQSDNFLLHPELLEREKEALAESEDVPRG

SEQ ID NO: 36726 - protein, 392 aa, Lysobacter sp. Root604
MSLADDVLFRLLKRGESASLRASGRAIRERFQAPASGYWRLSLDQRDHCHERLRAAEKAGGIELKWAGQGGDDRPIELVQLHDTERLAAFLGVNSMAAAVASAAEVLAPWRKRILRVDELLDRWSHLKNVRGLSTVAATEFADALRVMDSLEERQGEDQIVRTLSAQLFGDSKRIEQLERHLDVLTGESITSPARHWSEVFGRLGLVKEPQPFLVAGTGALELVGGEVCPIVRPFVGVSNKAVLGYKGSPCWVLTIENLTTFHAASQLLDGRGALILYTAGMPSPTWTSAYSRILASLPESVLTYHWGDIDVGGFRIAAYIKQKCIGSRRFRPWLMDASRLVSVARGAPEAESTRALMAKHAASAGWASLSESMMPVCIEQEQIKVAVPGLE

SEQ ID NO: 36727 - protein, 494 aa, Nocardioides sp. Root614
MSLRQYSPAWRLLGADNAPLIIGFLESAFLSGNVRRLPAHQIRDLLDDHLEAVRAISLEGAYPKTADAYLADWSDARAGWLRRYYPAGTDVAHYEPTSPVETVAAFVRGLGPREFLGTASRILTVRDLLRQIAGGAGVDPDVRLAALKRQRDELDEQIAAVRAGEDVGLDETAVRERYQQALATARELLGDLRQVEENFRALDRDVRLRATTWNGPRGEFLESVFGTTTEIGDSDQGRSWAAFWAHLLAPKDQAELDELLTVLADIPALSGDSGAIGTVLKTDLFVAAEAAQRTVASLSSQLRRFLDEQTWAEGRLIHASIRNTLTLALAARDQLLKAPGADITSLRADISLPLERPLYTPRAAAELHTVVELPSDTEELDDLEDLLEVTSVDLDHLRNRIHEVVARRAGNATLRQVVDTHPIADGLAELVGYLRIAETEPGTYIDPGHTEQVSWDTDPGATRRATVPLVVFGEADDAEEDEPVTTVRPGGGDS

SEQ ID NO: 36728 - protein, 216 aa, Nocardioides sp. Root614
MATPEISIALAHLLRGPIHAEDQPAAWTTISTFTKQLRDHLDVLGLRLVIDDTERYAYLRAHDELPDGMPRLIRRHTLTFSSSVLLVMLRQQLATAESDGQMPRLVITGTDMVEMLRLYRHDDLTRDQINGDISVLDKLGYIRTLRGQDDTWEVRRIIKAIVTGEWINTYGQELLAAITAIEGKDESNDHGVDGDDARDGAPADAALPEASAPKGA

SEQ ID NO: 36729 - protein, 1161 aa, Nocardioides sp. Root614
MHGMVRQQTRRCPKHPHQRAPDVAIIESGQTQLDTESLETNDLEGVRLAEFQILNWGTFDGQVARLPMYGQNALLTGQVGSGKSTIVDAVTTLFAQASRVTFNRAAGAESRERTVTSYVLGHHRNTYDEITGTQKPEALRTPKTAFSVILARFTGVPTSATNTCTAGVIYWFSDGASVPNRFYFTSPAAIDIADHLIGHRTMRDVRAALRDLDAKVEDTFTNYARNLCRALGTSRPAFDLLVQTISMKQVGNLTEFVRDHMLEASDVDELITRILAHYADLVRSHELVQDARRQLDKLAPVVEHANRFDRADERITLQSAALRAVPQVVAGRRIDLLTMEIGVLDEELPKLDHSLIRLAKELQKREGEYLQLEIAVANEGGAELSEAEHGISNAKARLTSTRIAAAEMQELAATASVQAPETAADHPAFTRLLTQHLEQLTVDEVAANEQVFSARTNRDHAQQDVEALERELQQTGTRPSNVPEAEDRIRERVAQGVGIDPAELPFIAELVMVAPEHAAWELAAERLVRGFALSMLVPTEHYPAVASWVDENNLRGKLDYYPVADDVRTPRPAAEGTIAACLRVRPDHWMAAWVAGELARRFTHLLLEDPTQLRTHSRAVTVAGQIKERDRHTKDDRGTGRRSYVLGWDTAARRDAIIEDLAVKKPQLGELDAELGERHNRARSLRERQYATKQLTARFSDPDTIDVASAVRALVEAEQLLADLKEMAKDLAALTDRRDKALELVDALKEREGRLRDRRGGARERRSQYQRQLDAAHAEMTGALRVALTDEVQVALDEALARAGQEPAQVVDVQAWATKLTADIQGRIDSATATRERSGRDLVGAMKDFAGLWEALVTELDPTQVVSRDGFRELKDRIENDDLPRFEKNFREQLETNAIHELVAFAKFLEREEKSMTGRIETINQALNDIDYHPGTYIRLEPDPTPDPTVREFRGQLRNITQGALLGDDDTYAETRFLLVKDLLDRFAGREGSTTQDKAWTDRVTDVRNWFTFAAAERRRGDGDALVEHYTDSGGKSGGQKEKLAYTVLAAALSYQYGLASGNRDAFRFVMIDEAFGRGSDESTRFGLELFTRLGLQLMVVTPLQKIEAIEPHVKAVGYVRAGDPRSRLLSLTIEELRKKRELWRRASRAGDAFTVVAEDA

SEQ ID NO: 36730 - protein, 404 aa, Nocardioides sp. Root614
MRSDWATPATVTDAVRRKWDSGQLLAALHAAPHDQTRLFPLRVRLPRPDRDELSNDFKAATAWARRLQDAAIANGWTLDTRRTNVPGLGMQPVPYAAIVPSGEVALALLSSAERKQAQVFASAIAVTECHPVIADAARAVALQRPHDVVAAGDAWALLLSAALWVADNPRPGVYVREIPVAGMHTKVVETNRALFGRLLETTTNPASVPVGAKTMEEKYGFRVPQRRVRIRGPRHVLGMQAGPGDADVTWPIPDLGAFIPSSDVTEVVVVENQTSFLVVPDAPNRLVIWGAGYGADELVASLPWLAHVRLHYWGDIDTHGFAILDAVRCAVEHTESVLMDVETLTAHRDFYVTEARQSTRELNNLTPNERRVLDGLRIGAWGPRVRLEQEFIRFDRVRAAFQQP

SEQ ID NO: 36731 - protein, 481 aa, Pseudoxanthomonas sp. Root65
MTQPPSLFPLLPGGLFGPLASANREHYWLLLCRLFDEFFGPDAPVPPSMGFQRREITAALERYLLADDPWEDEDGQTPDTPLPVRVNSIYERFRSTGWLRQERIGAREMVTMPPVVHQFLSLLVEFAEHGPTFVSAKMRSIEHQLQQVADGRASGDALDEAADQARRLLVSLSSMSLQVRDLMPELSKAESTAQFARQWFERYVSAFFIGDYAELHKGDHPLARRSAILSVAQQIETGERRTALQAWYREHVGGGDDARGDQRFARSLRRLRELDRIDEYLGRLDDDIRQANRRALAFLDYRLRAPDKLDTLLRRACRGVQHAPEAALRLPVAPGALMDAARLRPPRQKPQSIPRSANATQPPTPEQLARLSLLRRMKRARLVNADDMARYIGTHLDNRDEVESGAFSIASIEDLRAYQTLLTLALRSHRTGGLRREDPLGRLLRGCRVELLDAGGRDDNGYLRAPRFVVRRIGQPSRKTA

SEQ ID NO: 36732 - protein, 213 aa, Pseudoxanthomonas sp. Root65
MKRSWTTLSQLSNGVYAVQDFERAAYRLVVEQVLYASDRSTRLAYHLVEDHYDDFVAALAPLGIRLERNAHYRYVVALPAHAEGVPVTLAETLLLLVLRQRYDEAMRQGLVEDEGVVTVELPELQEAYQALAGRPMPEVGALRELARTLKRWGTCRLVESEPDDPQPFHLHVRPAIVEIVGEQWLQRLDQHNRDDDADAADHDDVTEDGDAAA

SEQ ID NO: 36733 - protein, 1142 aa, Pseudoxanthomonas sp. Root65
MQQLERVHLVQFFLFEAQTLELDATTAIIAPNGAGKSALLDALQIVLLGGDRSRIRFNAQAGGSHRARTIRDYCLGVFRSGDDGRKRRTATTYISLVFRDTDTGDVLTAGIALGASVDEPDHRLHGLYLLPGVALELADHVEQVRGKELPLAWTTFREMALRRCKAAGGQPELHTVAERFVKDLLLRLRASPTANPDINAYRKAFLNALNLQRVEDVDLFVRTLVAEDRPTDIARFRALLESFRQIRDRIEQVRQRIDAAEGVEQQYNRIAAQAVRAASYRALAAEYARDLYGEQLEQAEGAVTTAEDALAATRRRLVDTRAERDILRDEQSRAHDRLQGSTGYGEQAQLDELANRDRERLGQVSKELLREIGFVREQFRQLDALALDGIDAVALQSARADWDDWHATLSALPDGDALPWTPEDLFARVRQALRATAPLREQVDHHARQLHAAHDKARDALATARQNQKRLAAGQAELHADTVRLMSYLREAGIDARPVCDLVRVADPAWQPAIEAYLRSNVEALLIPGEDEERAVKLYRSLSGGRSVYGVKLALSSQARDARNKDAAVGSVAALLEGVNADALAFLRRQLGELRCVETEAELVRSRQGLTRDGLLARGGSIERLRLPAASDLRIGASDNRARLRVLHEEIEKAERDVREIEPRLRRVDDSQRGLARLADADAVAQALHERALEHRQVAGRYRTAQENRLASLDPDLLRLSDAVRELAAQLGECEARTDALVGQEAVAVADLDRSRRLLAGLRQQEELVARRAVEAFKDPDVDPNLIERHRDELDSKVESLEERGKTCERRADESDRQLSKLLPEAWSALAQYARDHGLGVDFDASAWRPALTLLRRELTQLRDTDLVRYEGEARQAYDTAVETFRASVAAALNDNFIRLRQQIATLNRTLRSSPPFSNNERYQFHYEVVPEFRELERFIRRAVDVGGEDTLFGTAGEVPAAFRELIEDGAAARTATSPLDDYRRFFRFEVQIRQDDAVIGTLSERMRSGSGGEHRAPLYVIAGAALAAAYGKNEAHAGGMGLILLDEFGDKIDAQNARATTNYLRSLGLQLVLAAPDTAQGTLSGVLDSYIELFRDGDLLQAERIEVQAAARALLLSDQFDLHPELLAEETARIERQQAPV

SEQ ID NO: 36734 - protein, 408 aa, Pseudoxanthomonas sp. Root65
MSDPRRVLERLLRKGERARLRGDAAPASLPMTEASARDYLSLRTLVERETFHAQVALAERAGAIAVQRDRHRGDGEHLLRLTVTDLQALADHLGLPLLDSRVREAATVLSPWLPLFPVLAEVLEAWRGDRKVRGHGPEAAHDLADAALAVQARLADDAHERILRRESARLFAGRPQASKRLEQLTPWLDLLSGGALVADGVVEKEHVWAALGLRREPQPLLLAGTGTLLLDGGVELPLATAFLGVPVDAVQGVRTSATCLLSVENLASFHDAARATGADRTLLLYTGGMPSPAWRRAYARLLGSLPDDLPVWHWGDIDEGGFRIAAVLAETAAASGHRLQPWRMSPTDGDRVDGQQGHVPTPAVLAAMCRWAERAGWDGVALALRAHPLCREQEALPAELPHATDPPP

SEQ ID NO: 36735 - protein, 494 aa, Nocardioides sp. Root682; identical to SEQ ID NO: 36727

SEQ ID NO: 36736 - protein, 216 aa, Nocardioides sp. Root682; identical to SEQ ID NO: 36728

SEQ ID NO: 36737 - protein, 1161 aa, Nocardioides sp. Root682; identical to SEQ ID NO: 36729

SEQ ID NO: 36738 - protein, 404 aa, Nocardioides sp. Root682; identical to SEQ ID NO: 36730

SEQ ID NO: 36739 - protein, 507 aa, Devosia sp. Root685
MIFGTLHPNIFMLFAGENRRLYEEVLLRIYDDCFGSDLLFPTRNELVGIAYDVLASHPELWHDEGNLVTLDQVSSRGRRLRTRKRAEVDREATQEAMVRARHIYARLVDTGWLEESRYGMRVTVDMPSSAMRLADFLSTLRQGGSEQLGGLIVEVRNALDAVRVSAAHNALGLHKAAKDAVGFGRYLRSVLSSLREIERHVLASNDLSERLQHFFEDFVDRILLKDYAAISTTAHPYRFRYAILDSIQRLEDSPVDIDSLAAAYSDSGIAAGRDGARDLVFDDLYRIRRVLGQIDEAFLRIQQQRARLEVRLRNTVRYAGRRADAFLRLSEKLAIDLDRLIEHRKGVRRDLSVPGFLQPVVGPYSAGLLARPRGDRPVVDTESVTVAEPEPIHLLRRQLERDYLDRITIVPEKVLSFLDIRVSESVVFARDLGIADLDDFLAFEALRRAARGMLNGQYPDALSRRLKGVYEFRAIPESRVDNDWLDCEDFSIRRIGTLGMTEVARAG

SEQ ID NO: 36740 - protein, 202 aa, Devosia sp. Root685
MDRVTQTIHHLLRHQFLHTEDRGSPPMLEILRRPAVVAPIERFFDTAGYRLVIRESEGWAGIFPDVERVGHPRMSVNETMVLLVLARQWQEGVQDGNVGDYGSVLTTLNEAYDGYTDLVSRSRRQALRVEDFRDAVQDLGRRAVVKLHVFDDEGQDQELVIRPIVSLLAGEEFLVSLGAFLGQNPVPADDRTGPEETVEEER

SEQ ID NO: 36741 - protein, 1158 aa, Devosia sp. Root685
MIQLTGISLVHWHLFSVADIAFSGNTAVLGKNATGKSTLIDLIQAVMTGGSASFYKFNRSAGEGGGRSDRTLRSYCLGQTDQGVSLRRQGVSHLVLNFGGAGLERPIALGLCIEVAENEDVARVVGRYVATGVSIDSTMFLDREGDQTRPSSWPTLKGRLETECRASGGELFEHQSTSAPKFIREYMRVLFTGRRVPEPERFIKAFIMALSFEDMRSVEDFVCNYLLQRDDVDIAELRGSVQRYQQIQADIAELDRKLAALVPIREEIERLASLLEQEDTAECMRRLAELLDVAKEHYRLLGLRRRKADEKRRLDDEMARLGEEVISCTAELESVRAQIATSGVEAKRHQLKTEIDLDTAQHDKLVLRLRERHAPVAAALKLLDIREAIQSLGLGLGGLLDDLLRIREEGAGLVPPAWPRNPGLMEQLVASAAATAIDRLDRVAAKRDDTVALRVESARRAAELGTRLAESRKGRLSLNRSVTGLMEVLRERGMQPRAVSQVLDLSDERWRLAAEALLGKDRETIIVDPEHAEEAVTLLRRSRSEFPGCRIANTRKLQHSSHMPPPGSLASVFTGDDAIAMAFVTFRLGTVRLAGSQAELMADGRAVMADGTYYDGLVVEIRSAGEFKIGKVAASLMAGVLEKEFADESAVTRVHQANESLLVDVHSRLQRLGTTFEEEDALERLAIALADIDARRDEAWERLDRVDKLVDPELDASRQRLVARIADLREERETNQKALGSLETELGQLARMLHGAQEMRGSWWSVKHRLRLFRERVRSVALFSRLRPKYPELRGAKADLAVARDLEVILKRLASERQGSEAVIRDNVSDYLYKFGVQRPFDANSNIFGQIKPWLIQTLEILEGNDLVRYRRQADEAAERITFFFRTSFVQEINSRFRDLEREIDDVRLALRSKQLHGEVYSLHALVKPEFRQLYDLARASETDDKILSLLFSDQEMDPRYAEVVGQVERLLRDESSGFERYQDYRNYYTFELRMRDVDNGHETTYDRRRNVASGAERQVPFYVIIGAALSSIYHGTRRTEDLRGLGLAVFDEAFSKMDGQNQRTMLQFYNEIGLQVLIAAPTEKRAVVYENLDSVVDVYRFGNAAEAEVSKLKPRVRDAMWEANPDHLTDEQLLLRLAETVKDAADLPGADEDEAVH

SEQ ID NO: 36742 - protein, 400 aa, Devosia sp. Root685
MRRFTDIVALVDDLLSRVEERGEARRLLAYPGDFRSVAEEDAFLAGLRSLEVDGALRAKRARVDGVNTLVHVTLGDLDKLYAFRKRTPAAAMSRSALRPVRDMPELPDAAPTVLDAIEASWSRNVAWSGLRQGEVDDLVAAIKLAAALGRLRGQAGEFVSVDYRTFSRRNTGDSKALERRTRLVVELFRRFFPEIEADRGLEDADLLASLGVERFAQPLLLGGTLAIDGAPLPATPFFGLPADQVRRLTVEKASYVLLVENYASFVRHCREVNGHSGGLIIYTGGFPARAVLGAIVSLISQSVCPVFHWGDIDLGGLRIFAHLERSLAGVGITLLPHLMDPAVLDKHGSSADRSMTPLPAHLTTSLIGPLWTFMAGLTRPVELEQEELDPAMPGQADAAA

SEQ ID NO: 36743 - protein, 507 aa, Nocardioides sp. Root151
MSEIAGELARVKGAFDQPTLTLLHQRQAPVVITIFRAAFGRNNKPIPTARLHAQVEEHLAQIRLTGESLVPEGSGRDLCQKWMRGQWLVRALDERGHEVYTLTSHAQQALELVKGLARDRATLSEHRIATILGTVRRFNAEANPDRTARVSLLNEEIARLSAERDRLVDGAEMVSATEDYMLEGFTELQSLISALPSDFARVEERFAGIRAEILAAFRAEDRPPGDVIDDYLARADALMTATHEGRAFEGAFGLLRDDALVAQLREDLTALLEHPISDRILAESDRAELRGTVKLVRDGLDRVLTQRSRVTATLKEYIVSHDAARDRELEQTLRQVESELMTWMATTGPRATHDVPLLPLRAGIDHLRERFHDPADDRLPDPIEPVDPDDARSPSLAELMAQGGPQLPSLRQRLDDALSDLLPAATLGEVFDRLEPSLRRPVEIYGLLHLAADRGWTTDDVVETWATVRHDGSRRTFAVPRMPLPDPDLDAHRTQQSRTQQNSETPA

SEQ ID NO: 36744 - protein, 264 aa, Nocardioides sp. Root151
MSTDVDLNRPEPEDALEPDDALEHDPAYDDSVSLFEGDEGGLEHSQRQALVVLLKQRFISARTHPRDWQVLVEHERVLRSRLNDVFLDLMVDREREVAWKRQAVPETGGRFPTLLHDTGWSREETLVLVHVRDRLRAGLASGDTRVFVDRDDILDHVASFRPAHATDESGDTKRAQNAVQSVVKSGLLIGATGDERFEISEAVEPLLPLELLQELLSALRSANDTTPEPEEPADLFDEDGADTDGAGKDRADKDGADADEERDA

SEQ ID NO: 36745 - protein, 1160 aa, Nocardioides sp. Root151
MSTDQINEHELGGDEVDEASDGLFARQVVDTPADDTVQWRAALLQLVNWGGFGGLTTVPLRGDTTMISGASGVGKSTILDAYTALMMPSDTKFNGASNDAVSGRARGVGQRNLLSYLRGAVDVIDDPRTGRPVEKLLRGKGADTWGAVAMTFVNDQGGRFTALRTYYVPRRATRSSDVQMQLATHEGALTLDTLEVAVPERFHANTLKKLLPGIRVHRTYAEFSAVLHARLGIGANGDGAKALRLLSRIQAGNQVRSVDELYKEMVLERPATYAAADRAIEHFDDLDAAYSAMRTEEEKLDLLGPITELHARKVAATRRQSQLDSYGVTLGGDTPLRLWLLRTHHRLLEAAVAANRDARTTNADDLSQTSSAEAALVADLENAKDSHRAAGGTTLQNLALSIEQEQVVRDDRAGRRAVLQERLLPLVDVADPHAVSVETALESDAGFGALQQQAREWLAGWQDQAASLKRERDIARDGLFPVKQRQAELREERASLQSRAGRMPSRMHEMREEVALASGLGIDELPFVAELVDVAPDESRWRTAVETVLGGTARLMLVPIDRLKDFSSAIDGLRLRGRLTFEGVELDLPDTGPADPERVAGKLLFKDSPFSGWVQAHLGEPSRNALCVETADGLAGGGFRVTLAGQTRNGRRGAHGRADTRNIIGFSNEDALSEIDSELAALEEKLQAFDADVAELDRQGRVLEQVRTAYDTIRAARFDDIDVAGSDERIAELGHRRAEILRADDKLHVLQGQIDDLSDRLEQARKKRFVLEERHKRLAAEHAELVDSEDLVNDRLEVMDRNGTVTLTEEQDAALAADFAAAATPDDPDDLDRFPVTSQRLAERLRDAVGETETEINRVDDELGAIFRMYKLKWESPNLAATPDSYADYARILDDIRGTGLAQRRTEWRRRLTEWSGQDLVPLVGAMAASIEEIEDRLEPINAILRRLEFGASGDRLRIRLRRLSPAHVQVFMKDLRTLSSGVTAEPDEADLEKRFLDLSRFMRQLRRPVPGGDPVTDRDRLLDVRRHVEISAERYDHHTGELRATYRTLGEKSGGESQELVAFIVGSALRFRLGDEMRSRPRFAPVFLDEGFVKADSEFAGRAVQAWKGLGFQLIIGVPLDKVTGLEPHMDELLAITKSTTTYQSWITPITDAEQTPAG

SEQ ID NO: 36746 - protein, 484 aa, Arthrobacter sp. Soil736
MSALASALAYKRLLDDNATLRMLRTDQVAVSAALLSEHLGSPGIRLTSEDLYEVIDADLEELRPHFDLPKTAKAYCDDWRNASFLIRRPATEARGETYELSSDALSAIRVLDQLETPRSTLTESRLVSLAAGLRQLAVDTDPDATRRLEALHQERERIDAEIARIRDGEFAVLDERRALERVTDILLQAQDLPADFARVRARFEQLNHELRVSIVNTDDTQSTVLDDVFRGVDLIESSDEGRTFTAFSALIRDPERSAAFDTDVAAVLDRDFADRLAPEARRVLRTLVRELKAGSREVHGVLTEFARGLRRYVHSQEFQRDRALRGVLQEALAAAVAASKRIRPYADTGIEVELSAMRLFSVGEMIADDPSEFDTGARLADDEPGIIDFEKLAAIARESEIDFAELIRNVNELVAGSAPMTVSEILAFRPATQGLASIIGLLSLATRHGQVRRGETERLTWQGADGIRRHADVDTHIFTERIEG

SEQ ID NO: 36747 - protein, 216 aa, Arthrobacter sp. Soil736
MTTEQEHGSQEVGLWSGDIGTLHEQSRRALLEILKGPYLSGRQRPQLWAALIADERAVRSQLHNLFLELVIDRVDEFAFARKVRTTEIDVPSALRTERLTFLDTAMLLVLRQLLLAAPGERRVIVGQDEVYARLAVYRDGDEGAYLRNLNGAWGRMRDKFRVVHALGDNRAEISPVVKFIIDEEQVHALADVYRRVAGADDAETAATSITDETVAP

SEQ ID NO: 36748 - protein, 1131 aa, Arthrobacter sp. Soil736
MSETSPATPEVTAPVAPGQWRLAEVQLANWGTFDGAIYRVPIARKGHLMTGPSGSGKSSLLDAIAAVPTPDKWLRLNQAAQGDGTRADQRTIVSYVRGAWSRTTDENEDRVVSAYLRPGATWSGIVLRYENGVDRPVSLCRLFFLRGTAMASADIADLCLLERSAVDLRDLEPFTRSGIETRKVQANWPDAVVTSNRSHGRFYARMRSLFGIAHESALQLLHKTQSAKSIDSLDQLFRDYMLERPATYDLADTAVAQFGELRDAHEHVVQLRQRRDHLTELRAHSDAYDRANNAADAARSMADSVVPYQKHQSLRLALAEHGAVGEQLVSLRADAERADGSYRRADEDADLAQRRALELGGDEAEHLQHRIRTAQDAERATRQRWDALECQLTEAGVAHTPTTAAEFAELMAEIDRTLQSPSTSTGPSHAQQERFFIARAAKDRIETAIRTLRMSGTTVPDNLIGIRRAISTETGLPVTALPFAAEIIEVRPTFAEWTGAIERVLRPFALTMLVRSEHLPAVRRWAEAHRVNARLVFEEVSSEIPPPRPARSSLSLVNRISVAPGPFAEWVAGQLSERFDYACVDSPDELDDHTRAVTVNGQVKSSRTRYEKDDRVKIDERGYWVLGDRESKLEALIEQLRGAEREYSQAETDVDRAEKERNSDLERRATLKAVRGQMWHDIDRDAAAAAIADLQRRLNDLTREDGGLRDAVGAAQTAREARETAAKALQDAELSLRQATAKHEELGTAIRDLEEAIATGGVQDLDEHTTAALGRRFREVQRSITRQNIAEVGQEVIRRLQQQRDKDLEAARTSGNDVARLAAQFNERWSAAAAAADLSPTTADRRAYLEVLDSIVAHGLPEHESNFLRLLRERSRDMIGELVSDILGAPREIEERVAPVNASLKRSEFDEGRYLKLRVKVRRSETVTRFIADLRSISEGGWADNDLESAEERFATLADIMRRFASSDHVDRSWKRQCLDTRQHVTFLAEEIDAHGRVHATYDSGAAMSGGQQQKLVIFCLAAALRYQLADPDDEFPRYGTIVLDEAFDKADTRYTRMALDIFVEFGFQLILATPQKLLQTIEPYVGAATSIENPTRRRTAIANVPWRQDAASDVTTAGNADGEATSEAAQ

SEQ ID NO: 36749 - protein, 394 aa, Arthrobacter sp. Soil736
MITVAQARDTARARLQAKLGEWGSAGDRASTGALLSIALKPPTEREMLNDEAAAENWAKDWAALPLGNGATVDWEVRAWRSIGRQRVPVRLRLATLDDVAEFAGGEPARAWSRLRTRAAILRERFGDTDPINTVIRRHTETLIQFDESRFATVVEAVAWLVRHPVTGLRPRQLPIRGVDTKWFTAHRSIVSSLYAATTASTDLGIVNTDKLVRVRVLDEALAIGGIIDFAAPVSQLNVLSFSPAAVLVYENLETILAMPLWPDAIAVHGSGYAVDVVGRLPWVQQSPILYWGDLDSNGFAILHRLRSSHPDVTSVLMDESTLLDHRDLWVQEPTPNRGTFDTLTGSEQRALKRLRDEGDVRLEQERIPWQTALKSLQTAWEMIAERSQWKINSD

SEQ ID NO: 36750 - protein, 480 aa, Arthrobacter sp. Soil736
MDYYAINALRENHSGWSLLRAQNAPLAVSFFMAAFTGPNQRNLGRQQLIDGLDDLLFGLRDAYGEDRFPRPASEYLDDWAAPEKAWLRKYYVPGQDEPRYDLTPVAEDVVRWVENLRGRDFVATQSRLTSIFAVLKQLVQQSETDPEVRLAELQRQRDGIDAEMERIRGGNIRVMTAPEALDHFQQLTALAKDLLSDFREVEQNFRKLDRQVREQIATWDGSQGELLATIFANQQDISSSLQGRTFQGFWDYLMSPQSRKELQDLLERATRIEALSGMDNLHAVTNLHQDWLPAVEQTQATVRQLSQQMRRLLDDKVFLENKRIMQLIRSIESGALGTRAEPPSGVFMDVAAPSVDVALPFERPMYEPSQRVMVDDEVVAADDSGMDAGALFNQFHVDRERLQANIDAVLASAEQATLAEITGAYPLSQGLAEVVAYYQLATESEWADINPEVTQQVSWQLPDGTVREATVEQIIFGRPA

SEQ ID NO: 36751 - protein, 215 aa, Arthrobacter sp. Soil736
MNPAEAPETRTPEELPAVVTRLFKGVVYAETDEKIWQSLLGLASHVRDYVAVLGLDLILDESEGYAFLKSREDPDGTLPRLIPRRQLTFDVSLLLALLRGRMLEFDTNSSELRLIMTEQDIADMVSVFLPESSNEARILDRLSANIKKVVELGFLRRLRNQPGTYEVARILKAYVDAQWLEEFDARLADYRATLTKEPLAAARGAAPLATETESP

SEQ ID NO: 36752 - protein, 438 aa, Arthrobacter sp. Soil736
MPAESSPWTTLAMLRAQSLKAWNSGSLLRELLEPSGVYPRRRSLKRPTAAELLKDYAAAQAWATQLVAGAGKYSLETAEVGRTTIGSNRIPSAAVFASVEDEMAFVSKTRDAVRFRELAAGLCDLDPALRRWALKRPQQLLGLGEAALTAARVALWLRDHPAPGIYVRQLSLPGVHTKFIEGHRRVIDEMAAVLAAGGAGSEPAEARAPEDDGGVVEVEAADDASESAEAPSVPEAGDAVLGNGSARTPAARFAARHGFLHPPELVRFRLLDADRPLLGEGRDITVTAEAFSLLRLPVQTVIVTENLVNFLALPERPGTLALFGAGYGFSALRDAAWLQDCEVLYWGDLDTHGFHILDQLRAAHPHVTSVLMDEATLMAHRDVWGSEPKQSRAELARLSAEESELYEAFRNDTYGPAVRLEQELIRWDWALDRLLPGG

SEQ ID NO: 36753 - protein, 485 aa, Arthrobacter sp. Soil764
MPRSARSSADAISARLRDLELLTKGPAWALTRSAPWVIAVLQASFTRTRPQVPLEEFHADVDSFLEELRRQDPGLGGGANGKAFGDEWTRRQFLTRRNQSGQIVYEATEPAARVLAFLDSLSSERSTLNGSRLGTLLGDVEKLANETNPDQSARLEALEEEIEERQQLIQDISTGGFDGLLDDDEAVEAAGNILDLAASLPADYKKMRDRIEELVGGLRNQIIEESLTKGATMAQVLEADKRLRQSPEGRTFRSFTAFLEDPQQQVRFRSAIGEVLSRQFADDLSPDDRETLKNLVAELRQQHSQIQRIYGKLSESLNTYVQSDDFRQSVRLRQVLREAEQAIRSLPYERERPGLVPGPVLYNAGFESLSMVKLFDPDEFAAPPRLADPIAFTDSDRVRSPRTGKARPDIVRSAMAGAATLADAWQQLPPEEQHINTIRALLSEALHAGADFNRSAWDGLDFEQIDGSTRRAYLPVVTLAKDSDD

SEQ ID NO: 36754 - protein, 289 aa, Arthrobacter sp. Soil764
MTEEITTTAVDPIDNTEDNAVVESFEARAGASSGAGRPNPAVITPRDTFVDGAALFPGDTGVLSMKVRQALVKLLKGPYIDGGRDEKLWTVLLDNQVILRSRLSELFLTLQLDHERKIAVLRPVDPDIIGGSARSSILRQQRALSRVETIVLLRLRLLLDRHVTAQTDPTITREEITDLVAHYQPAGQQDALRDSDVVTRAITKLLARQLLLPTGLDDVYTISNALPLALPFENIGDIPAHIEALVAASSDPTGTEAMLDLDADSGAEDDDADAAPAAESKATKTEVTK

SEQ ID NO: 36755 - protein, 1157 aa, Arthrobacter sp. Soil764
MTIASMLPLGDVTNPGQMRLALVQVVNWGTFHGAHTMHVDRDGTLLTGNSGVGKSTLFDAMLRVFDARPRSNEAAAQRSGGAVEDKRTTFTYMRGKVGDKAVGEGSASAFQRPGATWSAVALTFDNAAGTRLTVSALFDLPKNGTESSVGRFYLIDNVPLDLEAVEGIADKRFTKGALEATFPHAQVFDVHKAFAERFRRLLGISSDQALPLLRVIQAGKGLGGSVNTFFRDQVLDAPATLAAADDVVEEFSNLMSIRQRLEDVRQQRDQLAPVPGLNREYAQSLLDANRLRDLVGEEFEAYRQQLAVTVHQKTLVRFRELAQAKAKELGAERAVRDNLAKELRQLETDYNNQGGNAISAIEQSLENARVGLKLRRQVEEAAQQALADAGLQLEWSAAGWEQAHEQAAARSTELKDDSQALQELRFEAFDAHAGRKRELAAAEQELVSLKTRKSLLPPSSIENRAAIAAATGVPEDRMPFAGELMDLAEGEERWRPAAERALRSLATTLLVPGEHFGAVTRYLNDHSVRGALRAVDVSKPLAGGALAVEDVRDGDLLTKLDILASGAAAEAGEWVRERIALDFAYQCVEDPDELAALDKGLSLGGVVKRNRHTVEKDDRFTSRQDYVLGFDNAAKLELVAGQVEDLRQEVAKAAELAQSREDSHQGMSRQLDALRRIAEDDRPWEQVSASVAADDLTRIEQRLKDALAAQADLEPLRATIEEVRQKHQSSTESAAVLQSEYKALDRQLTAADSLLEAARDRLAQAPPSDATVTALEPYFAEFGDVTEMHELDNLANRVRTALLGELHAAESRGQATAERLTRIFEGFVREWGSAISADHGTSIGAASEFEARYHAIVNDGLPAQEAEFRLFFNQRTHESFSTLLHLLDEERRSITSRILPLNGILSQVNFHEGSYLELDIKQTLPPTAKQFKDAIQNALKARHTRPARSDGSRAEGPDSDDAELTARYKTLETLVKRLGSQAPEDRRWRAEVLDVRGHLFIQCKEHREATAPVAGKKKGGAKKTEVFMHADTGSMSGGERQRFTAFIMAAALSYQLGIAEQGFTTYGTVMMDEAFVLASEEFAGAGIKALHEFGFQLLLAAPENVIDLSRHLGSVTEILRDRRTNRSGVLTAPVIRPRPGEEGAWRSEANPVDIVLR

SEQ ID NO: 36756 - protein, 480 aa, Arthrobacter sp. Soil764
MDFYAINSLRDNHAGWSLLRAQNAPLALAFFMAAFTGPNQRNLGRQELIDVLDDVLFGLRDSEGEDRFPRSAGEYLDDWAADERKWLRKYYVPGEDEPHYDLTAAAEDVVRWVETLRGRDFVATQSRLTSIFAVLKQLVQQSETDPEVRLAELQRQRDGIDAEMQRIRDGNIRVMTAPEALDHLQQLTALARDLLSDFREVEQNFRKLDRQVREQIATWVGTQGELLESIFDNQQDISSSLQGRTFQGFWDYLMSPTMRSELQDLLHRATQIEALAGSDSLHAVANLHQDWLPAVEQTQATVRQLSQQMRRLLDDKVFLENKRIMQLIRSIESAALGTREAPPSGAFMEIEAPSVDVVLPFERPLYEPSRKVTVEDSVENAEDLDVDAGALFNQFFVDKERLKANIDAVLAEADQATLVEITEKHPLSQGLAEVVAYYQLATESDWATINPEQSQHLSWRLPDGSVREATIEQIIFGRPA

SEQ ID NO: 36757 - protein, 213 aa, Arthrobacter sp. Soil764
MNPATDTETRTPEELPAVVTRMFKGVLNAEDDEKVWQSLLGLTSQVRDYVSVLGLDLVLDEAEGYAFLRSKDDPDSTLPRLIARRTLTFNVSLLLALLRRRMMEFDINSSEVRLIMTGQEIADMVAVFLPESSNEAKVLDRLGTDIKKVVELGFLRRLKGQQDTFEVARILKAYVDAQWLEEFDARLSDYKATLAGEPLAGERQAAPAVGEGK

SEQ ID NO: 36758 - protein, 253 aa, Arthrobacter sp. Soil764
MDLGADLQESLFSLDETADDAGTPPGFRLHRLELLNWGTFHQGVRTFRLDGANSLLTGDIGSGKSTVVDAITTLLLPAHKIEYNKAAGAQKKERSLTSYVRGFHKSARSTGGEYSKPVALRGTGQLTVVLGVFRNAVLGKWVTLGITLWAAQEAGTPNRFYSLAEAEQSIAADFSSFGQDPLKLKKKLRAAGAAVHDTFDPYSAAFKRHFGISGNQAMELFHRTVSMKQVENIPRSCAATCSRRTTLPPGSPT

SEQ ID NO: 36759 - protein, 504 aa, Nocardioides sp. Soil774
MSEIAGELARVKGAFAQPTLTLLHQRQAPVVITIFRAAFGRNNRPIPTARLHTQVEEHLAGIRAAGETDLPTGTGRDICQRWMRGQWLVRSLDEQGHEVYTLTSHAQQALELVKNLSRDRATLSEHRIATILGTVRRFNSEANPDRTSRVSILNEEIARLRAERDRLVDGAEMVGATEDYMHEGFTELLSLISALPSDFARVEERFGAIRGEILAAFRAEDRPAGEVIDAYLARADALMTATHEGRAFEGAFALLRDDAMVTQLRDDLTALLEHPLSDRLLSDADRAELRGTVSLVREGLDRVLSQRSRVTATLKEYIVSHDAVRDRELEQTLRQVESELMTWMATTGPRAVHAVPLLPARASVEHLRERFHDPADDVLPERIRPADPADAPPVSLDELIAHGGPQLDALRQRLDATRTDLAPAQSLGELFDSLEPSLRRPVEIFGLLHLAADLAREDGVRTPSDEPTESYVAVRHDGSRRIFAVPRVALPDPDLDPQQQEARA

SEQ ID NO: 36760 - protein, 263 aa, Nocardioides sp. Soil774
MSVDTDLDLAPDLDEDPDEQEDLASVSLWEGDEGGLEHAQRHALVTLLKQRFISARTHPRDWRVLVEHERVIRGRLNDLFLDLLLDRSREVAWKRQATSETGSRFPTLLYDAAWTREETLVLVHLRDRLRAGLAGGDSRVYVDRDDVVDYIESFRPAHATDEAGDEKRARNAVTSIVKAGLLIGAPGDERYEISEAVEPLLPLELLQELLEALRRANGGEPEAAPEGDLFAEGPEGVDADDDEAEAAYDADAPVAGQHGQGQA

SEQ ID NO: 36761 - protein, 1148 aa, Nocardioides sp. Soil774
MSIDEARPETGAEGLFSEHSVATPADDTMQWRAALLQLVNWGGFGGLTTVALRGDATMISGASGVGKSTILDAYTALMMPSDTKFNGASNDAVAGRARSLGQRNLLSYLRGAVDVIDDPRTGRPVEQLLRGRGSDTWGAVAMTFVNDRGGQFTVLRTYYVPRRATRSGEVQMQLVTHDGPLPLDTLEVAVAERFHANTLKKLYPGVRVHRTYAEFAAVLHARLGIGANGDGAKALRLLARIQSGNQVRSVDELYKEMVLERPATYAAADRAIEHFDDLDAAHAAMRTEQHKLELLEPITGVHERKVQAAKRLAELDSFGVTRTGDTPLRTWLLQEHLRLISAAVTTNRADRAATADALAATTAAERALVADVDTAQEAHRAAGGSSLQSLALSLEQEKVVRDDRASRRTVLHERLLPLIDVSDASAPDVDSALMSAESFAVLQMHARQWLAGWEREQERIKRERDGARDRRYPLSHRQAELRRERGSLESHKGRVGARMHELRAEVARASGLGEDELPYVAELVDLAPEESRWRTAVETVLGASARTMLVPLDRLDHFSRSIDGLHLRGRLVFEGVELDLPDLGPADPERVAGKLLFKDSPFSGWVQAHVAEPARNALCVEDAADLDGGSFRVTLAGQTRNGRRGAHGRGDSRNIIGFSNTEALDEIDAELASISSDLDAIDAEVSELDRRSAVLEHQRAAYDAVAVARFDDLDVDASERRLADLEARRSEILGADDQLQVLERQIEDLTGRLESTRRVRFGLEERQRELNERHGRLVDDEDLVNDRLEAAGPLALTDEQQAALAEDFRSAAAPGDPDDLERFTETSQRLAERLREAVGDAEDELRRADDELAATFRAYKLQWESPNLGATADSYGDYARILEEIRGTGLAGRRAEWRRRLTEWSGQDLVPLLGAMAASVEDIEDRLEPINAILRRLEFGGAGDRLRIRLRRLSPAHVQVFLRDLRALTARSAPDADEADLEQRFAELSRFMEQLRRPQGGDATGTTSERDRLLDVRRHVEVSAERYDSLTGELRATYRTLGEKSGGESQELVAFIVGSALRFRLGDEMRSRPRFAPVFLDEGFVKADSEFAGRAVRAWKGLGFQLVIGVPLDKVTGLEPHMDELLAITKNSTTHQSWITSITDAGAR

SEQ ID NO: 36762 - protein, 475 aa, Mycobacterium sp. Soil538
MDDHGGRSAADLLELNRDLQTSPTVRLLAATNLSLYSALMDRHLSAGVVAETELVVRLERDLVDLGDDQSGLGLIKAWASQGWLHRIVDERTDQNVCYLTQDARRALDFLRGMRRQDTIATGGSINGIAGRLRHVALKVGNDPARIRKHIEREIEALHRELDELDAGERPESDVTDAYDEARAIALQMERLITDIGQYGTMIEQATAALDEPIDSNVEYRDRQRQMYADYQAAWDSQGRDSHRAFLRMINDPDQRAEFEADVAAVAEALPHLDPALRAVMAGFFELVGHQIDEVERIQQRCAQRVKRFTAFGTLEQSRGVARQLNEAIGAARTLLKTSLTDSRLDLELPLARHAISSVGALSFKIGDLSNPKPAKPAGGEVDLASFAALTTQVDAAAMAEMINTALPLSLSQAVAKLDNAYLGHVIVLWSWALKQPNDDTGTSTTVRFRSLDGRDREIAVPELSFTEPITAGVAS

SEQ ID NO: 36763 - protein, 233 aa, Mycobacterium sp. Soil538
MSTDTEADFAAFSQLPQVDQSARPPHQRRPRFDGDVSELPDRACWALQHLLTRRYISAESDSDIYAWVLEYSQQLSVRLSELDLLLRVVDAGLGNDGVAFVEQARYESAKGIKLLRREPLGTYDSILALHLAQMMRASGGQSVLISREEMHGLFSGVLNDVDRDAVTFAGRIDAAIARLAGLEILRRSRDDEDSYTVSPVITAVMTASVITELQQQFELLANGGTSPQETDLD

SEQ ID NO: 36764 - protein, 1121 aa, Mycobacterium sp. Soil538
MTEQFHLSRLQVINWGVFDGYHSIPFSEGGALIAGASGSGKSSLLDAISLGFLPFNRRNFNASGDNTAAGSSAGRRTVDKYVRGAWGQRSDGGTSRVMYLRGDGTAWSAVAVTYASDSGRTVTGLVLKWLTGESRNDSSSRFVLGDGDLGIEDVCNRWAAGRFDTGVFKGDGWRFTTKVESQYLAQLYATIGIRASDAAQQLLGKAKSLKSVGGLEQFVREFMLDEPDSLARLPEALKQIDPLVEARELLAVAQKKRKILGDIEKIQQRYASESTDLGIIDLVDLPMVRAYTDHVRLAQCPAQIAQLDTTVDQLDNEYEDVTRALNLAKAEADSLNAQISGTSANIGPLQSQVTAAETEAEQVSRRRGAYEDMLAAQDLEVPDTADDFWNLREDLLAQATELLAKVERHREASTDAEYAQKAARIARDDAAKELKRVEHVGSALPEFALMMREQICAAVGVDAAALPYIAELMDLRPDQTRWRTAVEKVLRGVGLRLMVPDQHWTAVLQFVNETNMRGRLALHHVRAKMLGADPVDPEPNTLAGKLFAVDSAHPCAAEAVDVVAAAGDHICVDTPEVFARFRRAVTDTGLYKDSDRLAIKDDRRPLKQSEYLYQGDVSAKINALTVDLAAAEETYQKARRTADDIAAQRQQWRDRAAACKAICEQFPQWSQIDTETADGHADRLREQYELLLADNPDIEALNARADECWSQIQKLMTRRGAIQTRRDDLDARRTRLLELSERLSPAFVSEPLTELLGRYAGQVPVGLELLDPEPHRDALFSAIKKEREQLRESRRRSYDELARILNTFDTAFPDAIPNDSDNFDERVHDYVALCRHIDERELPEAYERMMRLVTEQAPDAILTLHRVAEQEARRIAEQIERVNTGLGAVEFNRGTRLTLRATPRSLTAVSELTEIVRAISRRIAEVGLGDKQAILDQYADILRLRNRLASTAPEDKAWTRDALDVRNRFTFDCAEWDVASDELIRTHSNAGDNSGGEQEKLMAFCLAGALSFNLASPESRDNRPVFAQLMLDEAFSKSDPQFAQQALQAFRKFGFQLVIVATVQNATTIQPYIDSVVMVSKTEATGRNARPVATVATRSIEEFTELRHQMRADAKIPALAR

SEQ ID NO: 36765 - protein, 485 aa, Arthrobacter sp. Soil761
MPRSARSSADAISARLRDLELLTKGPAWALTRSAPWVIAVLQASFTRTRPQVPLEEFHADVDSFLEELRRQDPGLGGGASGKAFGDEWTRRQFLTRRNQSGQIVYEATEPAARVLAFLDSLSSERSTLNGSRLGTLLGDVEKLANETNPDQSARLEALEEEIEERQQLIQDISTGDFDGLLDDDEAVEAAGNILDLAASLPADYKKMRDRIEELVGGLRNQIIEESLTKGATMAQVLEADKRLRQSPEGRTFRSFTAFLEDPQQQLRFRSAIGEVLSRQFADDLSPDDRETLKNLVAELRQQHSQIQRIYGKLSESLNTYVQSDDFRQSVRLRKVLREAEQAIRSLPYERERPGLVPGPVLYNAGFESLSMVKLFDPDEFAAPPRLADPIAFTDSDRVRSPRTGKARPDVVRSAMAGAATLADAWQQLPPEEQHINTIRALLSEALHAGADFNRSTWDGLDFEQIDGSTRRAYLPVVTLAKDPHD

SEQ ID NO: 36766 - protein, 270 aa, Arthrobacter sp. Soil761
MTEVSNAEGPELIEDQPRGEGAVAAPGVERPFAVSPRDTFVDGAALFPGDTGVLSMKVRQALVKLLKGPYIDGGRDEKLWTVLLDNQVILRSRLSELFLTLQLDHERKIAVLRPVDPDVIGGSARSSILRQQRALSRVETIVLLRLRLLLDRHVTAQTDPTITREEITDLVAHYQPAGQQDALRDSDVVTRAITKLLARQLLLPTGLDDVYTISNALPLALPFENIGDIPAHIEALVAASADQSGTEPLLDLEDTAAAETNGTTSEEDDQ

SEQ ID NO: 36767 - protein, 1157 aa, Arthrobacter sp. Soil761
MTIASMLPLGDVTNPGQMRLALVQVVNWGTFHGAHTMHVDRNGTLLTGNSGVGKSTLFDAMLRVFDARPRSNEAAAQRSGGAVEDKRTTFTYMRGKVGDKAVGEGSASAFQRPGATWSAVALTFDNAAGTRVTVSALFDLPKNGTESSVGRFYLIDNVPLDLEAVEGIADKRFTKGALEAIFPHAQVFDVHKAFAERFRRLLGINSDQALPLLRVIQAGKGLGGSVNTFFRDQVLDAPATLAAADDVVEEFSNLMSIRQRLEDVRQQRDQLAPVPGLNREYAQSLLDANRLRELVGGEFEAYRQQLAVTVHQKTLVRFRELAQAKAKELGAERAVRDNLAKELRQLETEYNNQGGNAISAIEQSLENARVGLKLRRQVEEAAQQALADAGLQLEWSAAGWEQAHEQAAARSAELKDDSQALQELRFEAFDAHASRKRELAAAEQELVSLKTRKSLLPPSSIENRAAIAAATGIAEDRMPFAGELMDLADGEERWRPAAERALRSLATTLLVPGEHFGAVTRYLNDHNVRGALRAVDVSKPLAGGALAVEDVRDGDLLTKLDILESGAAAEAGGWVRERIALDFAYPCVEDPDELAALDKGLSLGGVVKRNRHTVEKDDRFTSRQDYVLGFDNAAKLELVAGQVEDLRQEVAKAAELAQSREDSHQGMSRQLDALRRIAEDDRPWEQVSAAVAADELTRIEQRLKDALAAQADLEPLRATIEEVRQKHQTSTESAAVLQSEYKALDRQLTAADSLLEAARDRLAQAPPSDATVTALEPYFAEFGDVTEMHELDNLANRVRTTLLGELHTAESRGQGTAERLTRIFEGFVREWGSAISADHGTSIGAASEFEARYHAIVNDGLPAQEAEFRQFFNQRTHESFSTLLHLLDEERRSITSRILPLNGILSQVNFHEGSYLELDIKQTLPPTAKQFKDAIQNALKARHARPARTDAARGEGPDGDDAELTARYKSLETLVKRLGSQAPEDRRWRAEVLDVRGHLFIQCKEHREVAGPAAGKKKGGGTKTEVFMHADTGSMSGGERQRFTAFIMAAALSYQLGIADQGFTTYGTVMMDEAFVLASEEFAGAGIKALHEFGFQLLLAAPENVIDLSRHLGSVTEILRDRRTNRSGVLTAPVIRPRPGEEGAWRSEANPVDIVLR

SEQ ID NO: 36768 - protein, 486 aa, Arthrobacter sp. Soil762
MPPSARSSADAISARLRDLEILTKGPAWALTRSAPWVIAVLQASFTRTRPQLPLEEFHADVDSFLEQLRRQESGPGGAVIGTSSGRNYADEWTRKHFLTRRNQSGQIVYEVTEPAARVLAFLDSLSSERSTLNGSRLGTLLGDVEKLANETNPDQSARLESLEDEIGERQQLIRDISSGDFDGLLDDDEAVEAAGNILDLAASLPADYKKMRDRIEELVGELRNQIIEESLSKGATMAQVLDADKRLRQSPEGRTFRSFTAFLEDPQQQVRFRSAIGEVLSRQFADDLSPEDRETLKNLVAELRHQHSQIQRIYGKLSESLNTYVQSDDFRQSVRLRKVLREAEQAIRSLPYERERPGLVRGPVLFNAGFESLAMVKLYDPDEFAVPPKLADPIAFSDSDRVRSPRTGKARPDAIRAAVAGASTLAEAWVQLPPEEQHINSIRALLSHALQEGAAFDRDAWDGLDYEQIDGTTRTAYLPVVTLKKD

SEQ ID NO: 36769 - protein, 266 aa, Arthrobacter sp. Soil762
MGSETETPGISMSSITRGAGVTPRDTFVDGAALFPGDTGVLPMKVRQALVKLLKGPYVDGGRDEKLWTTLLDNQIILRSRLSELFLTLQLDHERKIAVLRPVDPEAIGGSSRSSILRQQRALSRVETIVLLRLRMLLDRHVTAQTDATITREEIADLVAHYQPAGQQDALRDSDVVTRAITKLLARQLLLTTGLDDVYTISNALPLALPFENIGDIPAQIEALVAATADPTGTEALIELDGDSSADDDGGDGDGAVASTTETEEAK

SEQ ID NO: 36770 - protein, 1159 aa, Arthrobacter sp. Soil762
MSIATMLPMGELTNPGQMRLALVQVVNWGTFHGAHTMHVDRNGTLLTGNSGVGKSTLFDAMLRVFDARPRSNEAAAQRAGGAVEDKRTTFTYMRGKVGDKAVGEGSASAFQRPGATWSAVALTFDNAAGTRITVSALFDLPKNGTESSVGRFYVIDSKPLDLPAIEDIADKRFTKAALETIFPDAQIFDVHKAFAERFRRLLGISSDQALPLLRVIQAGKGLGGSVNTFFRDQVLDAPATLAAADDVVEEFSNLMSIRQRLEDVRQQRDQLAPVPGLNKEYAQSLLDANRLRELSGEEFEAYKQQLAVTVHQKTLARFKELAQAKAKELGAERSVRDGLAKELRQLETDYNNQGGNAISAIEQSLDNAKVGLRLREQVEEAARKALSDAGLQLEWTAEGWEQAHEQAAVRSAELKDDSQALQELRFEAFDGHATKKRELAAAQQELLSLKTRKSLLPPSSIENRAAIAAATGVPEDRMPFGGELMDLAEGEEQWRPAAERALRNLATTLLVPGEHFAAVTRYLNDNKVRGALRAVDVSKPLAGGALAVEDVRDGDFLTKLDILASGAVADAGEWIRERIALDFAYPCVEDPDELATLDKGLSLGGVVKRNRHTVEKDDRFTSRQDYVLGFDNAAKLELVAAQVEDLQQELAKAAELAQSREESHQGMSRQLDALRRIAEDHRPWEQVSAAVAADELTRIEQRLKDALAAQADLEPLRANIETARQKHQASTEAAAVLQSEYKALDRQMSAADSLLEAARARLEQTPPSDATVTALEPYFTDFGDVSEMHELDNLANRVRTALLGELHAAETRGQSTSERLTRIFEGFVREWGSAISADHGTSIGAAGEFEGRYHAIISDGLPAQESEFRQFFNQRTHESFSTLLHLLDEERRSITSRILPLNGILSEVNFHEGSFLELDIKQTLPATAKQFKDAIQNALKARHTRPARAGSGPESGGGDDAELTARYKTLETLVKRLGSPTPEDRRWRAEVLDVRGHLFIQCKEHREVTGSPSGGKSARKSGGKRTDVYMHADTGSMSGGERQRFTAFIMAAALSYQLGIAEQGFTTYGTVMMDEAFVLASEEFAGAGIKALHEFGFQLLLAAPENVIDLSRHLGSVTEILRDKRTNRSGVLTAPVIRPSPGAEGQWRSEANPVDIVLR

SEQ ID NO: 36771 - protein, 480 aa, Arthrobacter sp. Soil762
MDFYAINALRENHAGWSLLRAQNAPLAVSFFIKAFTGPNQRDIGRQELIDHLDDVLFGLREVFGEDKYPRPAGEYLDEWAAPERAWLRKYYVPGQDEPRYDLTAAAEDVVRWVESLSGRDFVATQSRLTSIFAVLKALVQQSETDPEVRLAELQRQRDGIDAEMQRIKDGNIRVMTAPEALDHFQQLTTLAKDLLSDFREVEQNFRKLDRQVREQIATWDGTQGELLASIFANQQDISGSLQGRTFQGFWDYLMSPQLRTELRDLLQRATQIDALAKLDNLHAVTNLHQDWLPAVEQTQATVRQLSQQMRRLLDDKVFLENKRIMQLVRSIESGALGTREVPPSGVFMEIAAQSVEVALPFERPLYEPSRRIMVDDVVVAANDAEVDAGALFSQFHVDTERLKSNIDDVLAGAGQATLGEVAAAHPLSQGLAEIVAYYQLATESDWASINPDESQQLSWQLPDGNIREATVEQIIFVRPA

SEQ ID NO: 36772 - protein, 207 aa, Arthrobacter sp. Soil762
MTTTDAAETHTPEELPGVVTKLFKGVVYAETDEKIWQSLLGLSSHARDYVAVLGLDLILDESEGYAFLKSREDPDGTLPRLIPRRPLTFNVSLLLALLRGRMLEFDTNSSELRLIMTEQDIADMVAVFLPESSNEARILDQLGTNIKKVVELGFLRKLRGQAGTYEVARILKAYVDAQWLEEFDARLADYRASLSGAVTGSKEEDRI

SEQ ID NO: 36773 - protein, 1130 aa, Arthrobacter sp. Soil762
MTDEQEMLFSLDEKADDAGTPPGFRLHRLELLNWGTFHQEVRTFRLDGSNSLLTGDIGSGKSTVVDAITTLLLPANRIEYNKAAGAQKKERTLMSYVRGFHKSTRSAGGEYSKPVALRGTGKLTVVLGVFHNAVLGKSITLAITLWATQEAGQPNRFYSLVEGEQSIAGDFANFGQDPAKLKKQLRAAGASLHETFDPYAAAFKRQFGISGNQAMELFHRTVSMKQVENITNFVRTNMLEEDDVEARIGNLIHHFDDLKKAHDAVLRAKDQIALLTPITEGAAQHTALSRDDEFARQQRDQLHPWFTDRKLQLSIEHQTELQNTGLRLQEDSGKLATEITQLRLDLAAVKEDIRGNGGGRLAAIEAEAARLGEESRSQRVRFEKYAEAAAELGLQAPADRVQFDANRARLADVEKDLAAAANEVQDTRTELTMTRTVLTGRASDIAAELTSLQARPNLLPRPQVELRRRLCDGTGIQESELPYAGELLRVRDGEAAWEGAAERTLRGFALSLLVPSEHYAAVSGWVDGNNLRGRLVYLKIGESYTPKPAEAGTLATKIAIKQGTPFRNFLLDELSSRFDYFCCDTLEDFRRRSKALTANGQLKGGRGRHEKDDRQELSDRRNYVLGWDNLDKISRFRAEQDEVQGQLSVVAGQLTRVNDSLGAIGRQNQQLGIIGAVSDFAELSWQLTARRIEELKAEKARLESTSDVLRELTAKEAELTGKLDRLQVRADDVQRRIGSNEGAAKDIVEAIEDCREVLHETPLTDDVGVLAAVARLAAAELAGKPLTYKNTGTVESAVRNGLTDSIDALSKQIARAAEKTVRLMAEFRNKYPNETTEIDAALESAVDFGKLLEQLVGNDLPRFEAHFKESLNQNTIHEVVAFNAFLDSRRQDIVNRIGEINLSLAGIEYNTGRHIQLEHQNSTDLDVRQFGLDLRACSEGTIGDDDQYSEQKYLQVARLIERFRGRDGYTTLDERWTAKVTDVRNWFTFSASEKWTETGEEFEHFTDSGGKSGGQKEKLAYTILAAALAFQFGLASGKGAGKNAGSGRSFRFVVIDEAFGRGSDESARYGLELFQRMKLQLLIVTPLQKIHVIEPFVSHVGFVANTNGDDSQLRNMTIQEYRDERARRAG

SEQ ID NO: 36774 - protein, 429 aa, Arthrobacter sp. Soil762
MPGDGLSASAPGRAQAGRAQGWTTLADLRAQSLKAWGSGALLREVLEPNGLHPRRRPLKRPTAATLRSDYAAASAWAAELFAAVGPFSLETAEVGRTTVGANQLPAAAVFATVEDEIAFAGKAKEAARFVELAGSLASVHPSFRGWALKRPLKLLELGADALTAARVALWLRDNPEPGIYVRQLSLPGVHTKFIENHRAVISELAMVVQAHSVSAAVESVEPLPDVPAEPGSLLGLMPARTPAARFAAGHGFLHPPELVRFRLLDPAVPLLGQARDLTVTAEAFSTLSLPVTTVLITENLVNFLALPDRPDTLAIYGGGYGFSSLRDAGWLRDREVLYWGDLDTHGFRILDQLRAVHPHVVSVLMDEATLLAHRDAWVTEPSPSKASLSRLTPDESALYEGLRNDAFGTDVRLEQELIRWDWVLGRIGG

SEQ ID NO: 36775 - protein, 493 aa, Duganella sp. Root198D2; identical to SEQ ID NO: 36687

SEQ ID NO: 36776 - protein, 227 aa, Duganella sp. Root198D2; identical to SEQ ID NO: 36688

SEQ ID NO: 36777 - protein, 1115 aa, Duganella sp. Root198D2; identical to SEQ ID NO: 36689

SEQ ID NO: 36778 - protein, 386 aa, Duganella sp. Root198D2; identical to SEQ ID NO: 36690

SEQ ID NO: 36779 - protein, 480 aa, Hydrogenophaga sp. Root209
MYKFVMNLFDRLPNGLFGPLTGRYNRRAWELLVRLSERFFGADCVPPYAEGYLHEQVTKEIERFLLDDQWEEESADAAATPINVQANQWLARLAETGWLIEDRVGLRVFVSMRPVVARFFDALEQFALDGPQLVGGSIQMIYNQLKAAQSNPREQAAGFQTAAQSCSRLINSLNATTLRVRDLIRDLTQEQATPVFVKRFFSEHIEELYVRDFRQMRTENHPLMLRFEIIELVDTVATTAPSREQLLAGYRALPGARHEAVEDMLARDVSRFQRLLDVEKFLERMDRVIDSATQRALAYLGYRLKASERLEDVLADAVASACRLADQGQVISGRLLSPSPVVADYRLRMPNLPVAKPDRRAMVKREMTSRERAELMLRRAMVRHRDTTPAAIRRYVQAHVPVGAEIEGAHLPVHGVDDAVAVLVLMRLAAIGRVNPKALRANPLLRNLDFEAVMDEGGRVNTELFELPGFKVRRRSTNAA

SEQ ID NO: 36780 - protein, 211 aa, Hydrogenophaga sp. Root209
MPRDWNALAANSDGLYESSDFKHAMYQLVVQQCIYLRQRDQAVAYRLISAHRDAFAEAVALMGLRLGFVDRHELCYVTQDGGTQSPMDLQETLFLLTLRHVYHTRASAGDLTPDGDALIDIAEFEESYKSLCHRDFDGRVDTLRTLLKMSARHGVARAVDAPEGDPQPFAIMIWPGIVEVLSEYALNRFGADLKARAVNAEAAPAAQESTS

SEQ ID NO: 36781 - protein, 1129 aa, Hydrogenophaga sp. Root209
MKTLIAVHVVQFSLWDYETFQISPGGTGFIGPNGAGKTSLVDAVQIAMVGGHGQHLHFNAQSVHKDSRSIRAYALGTMRSGEGEQGVVSRKRDAALSYISLVFRGQEPGDVLSAGICIHATTVDQRVMGLYVLPGVELKLEHHLEDLGDRGKAPIDWELFAEFGRSHVRYAGRTPTITTRPETYMQELLHNVQQGVDVRKFLRAFGHSINLKAVSSVGDFLRGYLVEATPIDKRGTLQHIKTLRSLGRQIEDVTAQVARLEVIEKRYAKVAGLHRQTAVARAVGLQVRLEAADESAANLDEEITELERQLAKARQDLPHLAQRHQTLHAAYESLLARLGADPEAQQPAQLEQLRKAHGATVQQARKEVERLALQLREAMLETAVALEARHAQKASAVEEEMKRWEGWAKAGHIANQEQLKTALDILTACETQLSGERSLARQEEQDAKAAAQSAKAKLQAVNQGKRITDGDVATAAALFEQAGIAYEPVASLVQVTDPRWRGPIETFLGPHRLALVVEAGREDEAVDLIRRQRVNNVTVVQPEHLRADIDRAAAPDSVAALLDSTNAVALAYLRRILGRMKRVDSTEQLRHESRAMTVDYMLSANGGTKRIRPLDEQSWMLGVKLTNEDRVAAVNESRNAANAERSASLYLAQVEGAYAKVQSAVLQVTQVSYAAALAQHASAMRDLQATTDPAAVPVSERLKALRSDVEEARGQSVEAGNALHDHKLAINGKETRLSILSPQLSRARDDLAKLEASHAQAIRDPDCDHDILPQEYDRLQAAILSAGLEQALVELEQRARQLDSNIQTALGVARDGFVDFINEYSIGLVDERSDWRKAHAWIGRHIRKLNDSTLKDYRKQADDAREAAEQSFQSDVKFKMREAIQRVRQEIRDLNAILQTCPAFTNGEKYQFLAKPSPAHRDLYELIVAAPDAGGEDLFGQQGVQNNLMALLEDSESGKDRGNNPLEDYRLLFNFDLQIIQDGKVVDLLSKRMGVASNGEHRVPFYVIAGAALATAYRIRPGASHVGAGLMILDEAFYGMDAQNTYVTATFLKSLGLQLMMAGPDSDVGKLVPLMDNYYDLARYGADVFAEHVVVKEAAHALFSSDIPMLHPELIDVAESQLLAAAGGG

SEQ ID NO: 36782 - protein, 413 aa, Hydrogenophaga sp. Root209
MTEDDDKKAGHGAALARKALERLLARAENAASKGPAQTDRAGRSVTLPLSEKSFPEYLRLHRHADKAVCNANLQLAERDGAISIEWDSRAGERAHVQRIVLCDGARLAEHLGIEPRWDVVAQAERQFELHVTEHPVLTHVLEAWRKGNLVRGTRPGDVASWLDAIRVMESCAPRGGDDIAIRRLSASLFRDSKRIEAIWPALDALVQGDATMVQSEMEDLFSELGLVKFPPTLLVAGNAAVMYGNETVRASRPYVGFAPSVLRSVQIDPGFGQRLLTVENLTTFHEMAGQRPDDAIVIYTGGMPSPSWKRAYAVFLKALAPTATLHHWGDIDLGGFRIASHIAKCCEQEGRSLRLHGMRADAVLPGTVTQRELAPSARREILRVCERWGWGEEAAALGALAVEQEAMEPCWPE

SEQ ID NO: 36783 - protein, 487 aa, Acidovorax sp. Root217
MSLDHAKLDQLLQNHPAWRLLRSDHVALVASFLHRVFITPNVRTIAQADLCEALEDDLYLLREQLGEQAFPRTALEYLNDWAGVDKGWLRKFYRAGSDAPVFDMTPASEKAIAWLGTLTERSFVGTESRLLTLFELLRQISTGTQTDVNVRLLDLQRQRDAIDAEIARVLSGNLPVLGDTAVKERFAQFTQLSRELLADFREVEQNFRLLDRTVRERITLWRGSRGALLEDILGERDAIADSDQGRSFRAFWDFLMSSQRQQELSAMLEQVLQLEAVAAMQPDMRVRRVHHDWMEAGEHTQRTVALLSQQLRRFLDDQSWLENRRIMDLMRNIEGHALRLRDAPPQGPAMHLDTPGIDIALPFERPLHAPGVKTLIASIALQAGEADMDDAALYSQIVIDKAKLAQQIRRALQRQGQITLGDLCQAHPLQHGLAELIAYLQLASSSFASAVDETSTETITWSAAPGPASGDPPRLKRARLPRVIFVR

SEQ ID NO: 36784 - protein, 216 aa, Acidovorax sp. Root217
MQEDAEDAPPALPTHDLSTLVIPLLKGVMYQEGDANYWHALLGLQARVRDYVGVLGLALHIDEAEGFAYLRARPEPEEPTAPVPRLVARRPLTFQVSLMLALLRKKLLEFDAVGGDTRLVLSRDELVEMVRVFLPQHSNEARLIDQIDTHLNKVVELGFLRRHKSPVGGQSAVYEVRRILKAFVDAQWLGEFDERLAAYQAQLASAPMQTAEAPDE

SEQ ID NO: 36785 - protein, 1124 aa, Acidovorax sp. Root217
MNDLHAQHSAEQAGDVPPGVRLQRFEVFNWGTFDGHVWSLHPGGKNALLTGDIGSGKSTLVDAITTLLVPAQRIAYNKAAGAQGKERSLRSYVLGHYKSERNEASGSAKPVALRDTGTYSVILGVFHNAAYGHTVTLAQVFWMKEPHGQPARFYVCAESALSITSDFSDFGSDIGALRKKLRARGATLHESFPPYSAWFRRRFGIDNEQALELFHQTVSMKSVGNLTGFVRSHMLEPFDMAPPIAALIGHFDDLSRAHAAVLKAHKQVELLTPLVEDCGRHDAQTAHSEGLRECRDALKPWFAQHKLVLLEERIANLDDEWESHDGRVQRLQGQRSAKQALEGELRRSMADNGGDRLEQLAQEIADKEDQAQRRKAKADSYNELARAAGLLSMGSAADFLAQRQSLAGMQQLAQDREAALQNGQIEDEVAMAEGRRTHEKLLGEIASLKARRNNIPAHHIALRHQLCEALGLPARALPFAGELLQVHETERDWEGAAERLLGGFGLSLLVSDSHYAAVSEWVDATHLKGRLVYYRIRAGQRSDMPALHRESLVHKLQIHPDTPFYDWLERELAHRFDVACCTTPEQFRREAHALTRTGQIKSRGERHEKDDRHRLDDRSRYVLGWENTGKVSALQAQARQLENQLGDVGQRIAQRQLEQQALKLQMRNLTQLDVYADFRDLDWQPLVADIARLQHEQLALRAASDLLRHLGEQRDAVLQELKKIEADMDHQRDARARTEQRRSDAQALRSQTQALLAEHPLSGDAHLPAQLEALRAQAQLDQRLTLESCDARERDLRDWLQKKIDAEDLQLKRLRERIIRDMSAYKNTYPLETQEVDASIEASHEYRTMLDNLRADDLPRFEATFKNLLNENTIHEVAMFLSMLERERGTILDRIGRINTSLTQIDYNPGRTIRLEAQTAPDVDIRDFRNDLRACTEGGITGSDDAQYSEAKFLQVQRIIERLRGREGTGEADRRWAAKVTDVRNWFVFAASERWREDDSEHEHYSDSGGKSGGQKEKLAYTILAASLAYQFGLQWGAARSPRFHFVMIDEAFGRGSDESAQYGLQLFAQLQLQLLVITPLQKIHTIEPFVSSVGFVHNADGRSSQLRNLSIEEYRASRPEAGE

SEQ ID NO: 36786 - protein, 397 aa, Acidovorax sp. Root217
MNWSRPDDLLAQLQRLWDRGDLLASIVPAESHALQPAPLFPRRLSLRSPSSGDIADQFASVRAWVAQIRALPHCRVEMRSFRHRLFGTNEVPDQIWVDSLDDAMAWLGKRRDLAHFNALVETTRQQQPLLLPWLAQRPLQALALTHDWQRLLDVVQWLQQHPRPGIYARQIDVAGVHSKFVEAHRTVLADLLDLALPEDAIDRGASGAGLFEERYGLLRKPLRIRLRLLDPALLAGPWGQDVTLDAGPFAQLPLAGARVFMTENETNFLTLPAHPRSLVVFGAGYGFDVLRQAQWLAHCPLHYWGDIDTHGFAILDQLRHQWPHAQSFLMDKGTLQAHAPLWGQENQPTRRELPRLTEAEAALYDDLRDNRLQANLRLEQEHVGFGWVQAALQRLQD

SEQ ID NO: 36787 - protein, 487 aa, Acidovorax sp. Root219
MSLDHAKLDQLLQNHPAWRLLRSDHVALVASFLHRVFITPNVRTIAQADLCEALEDDLYLLREQLGEQAFPRTAMEYLNDWAGVDKGWLRKFYRAGSDAPVFDMTPASEKAIAWLGTLTERSFVGTESRLLTLFELLRQISTGTQTNVNVRLLDLQRQRDAIDAEIAQVLSGNLPVLGDTAVKERFAQFTQLSRELLADFREVEQNFRLLDRTVRERITLWRGSRGALLEDILGERDAIADSDQGRSFRAFWDFLMSSQRQQELSAMLEQVLQLEAVAAMQPDMRVRRVHHDWMEAGEHTQRTVALLSQQLRRFLDDQSWLENRRIMDLMRNIEGHALRLRDAPPQGPAMHLDTPGIDIALPFERPLHAPGVKTLIASIALQAGEADMDDAALYSQIVIDKAKLAQQIRRALQRQGQITLGDLCQAHPLQHGLAELIAYLQLASSSFASAVDETSTETITWSAAPGPASGDPPRLKRARLPRVIFVR

SEQ ID NO: 36788 - protein, 216 aa, Acidovorax sp. Root219
MQEDAEDAPPALPTHDLSTLVIPLLKGVMYQEGDTNYWHALLGLQARVRDYVGVLGLALHIDEAEGFAYLRARPEPEEPTAPVPRLVARRPLTFQVSLMLALLRKKLLEFDAVGGDTRLVMSRDELVEMVRVFLPQHSNEARLIDQIDTHLNKVVELGFLRRHKSPVGGQSAVYEVRRILKAFVDAQWLGEFDERLAAYQAQLASAPMQAAEASDE

SEQ ID NO: 36789 - protein, 1124 aa, Acidovorax sp. Root219
MNDLHAQHSAEQAGDVPPGVRLQRFEVFNWGTFDGHVWSLHPGGKNALLTGDIGSGKSTLVDAITTLLVPAQRIAYNKAAGAQGKERSLRSYVLGHYKSERNEASGSAKPVALRDTGTYSVILGVFHNAAYGHTVTLAQVFWMKEPHGQPARFYVCAESALSITSDFSDFGSDIGALRKKLRARGATLHESFPPYSAWFRRRFGIDNEQALELFHQTVSMKSVGNLTGFVRSHMLEPFDMAPPIAALIGHFDDLSRAHAAVLKAHKQVELLTPLVEDCGRHDAQTAHSEGLRECRDALKPWFAQHKLVLLEERIANLDDEWESHDGRVQRLQGQRSAKQALEGELRRSMADNGGDRLEQLAQEIADKEDQAQRRKAKADSYNELARAAGLLSMGSAADFLAQRQSLAGMQQLAQDREAALQNSQIEDEVAMAEGRRNHGQLLGEIASLKARRNNIPAHHIALRHQLCEALGLPARALPFAGELLQVHETERDWEGAAERLLGGFGLSLLVSDSHYAAVSEWVDATHLKGRLVYYRIRAGQRSDMPALHRESLVHKLQIHPDTPFYDWLERELAHRFDVACCTTPEQFRREAHALTRTGQIKSRGERHEKDDRHRLDDRSRYVLGWENTGKVSALQAQARQLENQLGDVGQRIAQRQLEQQALKLQMRNLTQLDVYADFRDLDWQPLVADIARLQHEQQALRAASDLLRHLGEQRDAVLEELKKIEADMDHQRDARARTEQRRSDAQALRSQTQALLAEHPLSGDAHLPAQLEALRAQAQLDQRLTLESCDARERDLRDWLQKKIDAEDLQLKRLRERIIRDMSAYKNTYPLETQEVDASIEASHEYRTMLDNLRADDLPRFEATFKNLLNENTIHEVAMFLSMLERERGTILDRIGRINTSLTQIDYNPGRTIRLEAQTAPDVDIRDFRNDLRACTEGGITGSDDAQYSEAKFLQVQRIIERLRGREGTGEADRRWAAKVTDVRNWFVFAASERWREDDSEHEHYSDSGGKSGGQKEKLAYTILAASLAYQFGLQWGAARSPRFHFVMIDEAFGRGSDESAQYGLQLFAQLQLQLLVITPLQKIHTIEPFVSSVGFVHNADGRSSQLRNLSIEEYRASRPEAGE

SEQ ID NO: 36790 - protein, 397 aa, Acidovorax sp. Root219
MNWSRPDDLLAQLQRLWDRGDLLASAVPAAPDALQPTPLFPRRLALRGPSSGDITDQFASVRAWVAQIRALPHCRVEMRSFRHRLFGTNEVPDQIWVDSLDDAMAWLGKRRDLADFNALVETTRQQQPLLLPWLAQRPLQALALTHDWQRLLDVVQWLQQHPRPGVYARQIDVAGVHSKFVEAHRAVLADLLDLALPEDAIDRGASGAGLFEERYGLLRKPLRIRLRLLDPALLAGPWGQDVTLDAEPFAQLPLAGARVFMTENETNFLALPAHPRSLVVFGAGYGFDVLRQAQWLAHCPLHYWGDIDTHGFAILDQLRHQWHHAQSFLMDKATLQAHAPLWGQENQPTRRELPRLTEAEAALYDDLRDNRLQANLRLEQEHVGFGWVQAALQRLQD

SEQ ID NO: 36791 - protein, 501 aa, Nocardioides sp. Root79
MSDIAGELARVKGAFAQPTLTLLHQRQAPVVITIFRAAFGRNNKPIPTARLHTQVEEHLAEIRLVGEGEVPNGTGKEICQRWMRGQWLVRSLDEQGNEVYSLTSHAQQALELVKNLARDRATLSEHRIATILGTVRRFNSEANPDRGARVTLLNEEIARLKEERDRLVDGAEMVSATEDYMVEGFTELLSLISALPSDFARVEERFATIRAEILGAFRAEDRPAGEVIDEYLARADALMTATHEGRAFEGAFTLLRDDALVTQLREDLTALLEHPLSDGILGDADRAELRGTVRLVRDGLDRVLAQRSRVTATLKEYIVSHDAARDRELEQTLRQVESELMTWMAETGPRATHDVSLLPSRVGIDHLRERFYDPADDVLPDRISAADPADAPGLSLAELMAQGGPQLGSLRERLDDALRDLLPAGSLGELFESLEPALRRPVEIFGLLHLAANRDLRTEADALEAFAAVRPDGSQRTFAVPRTPLPDPDLDRVPAPEESNA

SEQ ID NO: 36792 - protein, 233 aa, Nocardioides sp. Root79
MSVDTDEVEYDEVIDETSVSLFEGDEGGLDYVQRQALVALLKQRFISARTHPRDYDTLREHEQLLRSRLNDLFLDLQIDRDREVAWKRQASPEGGGRFPTLLHDTSWTREETLVLVHLRDRLRAGQAGGDLRVYVDRDDIIDYVASYRPTHATDESGDEKRARNAVLSVAKAGLLIGTASEDRFEISEAVEPLLPLELLQELLEALQKANGTESAEAAPEDADADLFDEENDE

SEQ ID NO: 36793 - protein, 1149 aa, Nocardioides sp. Root79
MSVDEAVSGLFAEEVVAVPADDTVQWRASLLQLVNWGGFGGLTTVPLAGEATMISGASGVGKSTILDAYTALMMPSDTKFNGASNDAVAGRARSVGQRNLLSYLRGAVDVIDDPKTGRPVEKLLRGKGADTWGAVAMTFVSDQGGRFTALRTYYVPRRAARSSDVHMQMWTHEGTLPLDKLEAAVPEKFHANTLKKLFPGIRVHRTYAEFSAVLHARLGIGANGDGGKALRLLARIQAGNQVRSVDELYKDMVLERPATYAAADRAIEHFDDLDAAHAAMRTEQQKLELLEPITDMYERRTAAARRLDELDSYGITQAGDQTPLRYWLLRTHLRLIESAVAANRDARAATVQALASAQAAELQLAGDLDAAKEAHRDAGGGDLQRLAALADAERNLRVERGNRLAELEDRVYPLIGLPDIDPPDLEAAVEDAGAFTVLQEQARERVVAGEKEQKRLQAERETVLREQQFPLTQEQSVLKQERASLESRAGRVPSYLHDLRTAVARASGLSVDELPFVAELIDVAPEEARWRTAVETVLGGSARMMLVPLDRLQDFSSAIDELRLPARLTFQGVELDLPETGPSDPERIAGKLLFKDSPFAGWVQQHVEDPSRNALCVANAADLDGPGFRVTLAGQTRNGRRGAHGRNDVRNIIGFSSEDAIAEIDAQLVEVESRLAEIDGRLAELGRRSSLIDLQRKAYDAIVMVRFDDVDVAGSDRRIADLEERRAAILASDDRLQVLQAQIDQLEADLGQARKERFSLDQRKDQLQDDQRELYDAEDTIKDRVFAIEDAGVVVLDEVQEAALAADFAAAAAPDDPEDLDRFNNNSQRLGERLRTALADAEAEIKRCDEDLAHIFRSYKFTWESPNLGATVESYADYARILDDIRGKGLADRHAEWRRRLTEWSGQDLVPLLGAMSSSVEEIEDRLEPINAILRRLEFGASGDRLRIRLRRLAPAHVQAFMKDLRELSTGTTSELKEEDLERRFAELSRFMRQLRRSEHSTDGPTERDKLLDVRRHVEISAERYDFLSGEVRATYRTLGEKSGGESQELVAFIVGSALRFRLGDEMRSRPRFAPVFLDEGFVKADSEFAGRAVQAWRGLGFQLIIGVPLDKVTGLEPHMDELLAITKNAQTHQAWITPISDVVEADPE

SEQ ID NO: 36794 - protein, 361 aa, Nocardioides sp. Root79
MTGAVWAPEIALGSSGLTGRRLADAWEDIHPLRSEWMGWAATAGEGVEVVWRDATLYGSGQPLPATLRVADVDTAARLLQDGWPDRLDEARTRAARLAADFPGHADPAGMLRATRELPAVDFDLVVRAARWFADPHPAGLTARQVPVEGMGTKWLDRRASVVRRLAGLESLDLEPGRPSRVHLTYLDPDHLDSGGRRHDVATVGDVHTVAYRPSVVLISENRDTAQQFPRVAGGIAIEGDGNGPGAVPQLPWVRACPDVVYWGDMDVKGLEILAAFRGTGLRARSMFMDLTSYRRWERFGVDHDHDGARLGPRPVREVDLEPGERELYEALCSPDWTGHRRIEQERIPLADAAAVLRLGRA

SEQ ID NO: 36795 - protein, 501 aa, Nocardioides sp. Root240; identical to SEQ ID NO: 36791

SEQ ID NO: 36796 - protein, 233 aa, Nocardioides sp. Root240; identical to SEQ ID NO: 36792

SEQ ID NO: 36797 - protein, 1149 aa, Nocardioides sp. Root240; identical to SEQ ID NO: 36793

SEQ ID NO: 36798 - protein, 361 aa, Nocardioides sp. Root240; identical to SEQ ID NO: 36794

SEQ ID NO: 36799 - protein, 470 aa, Mycobacterium sp. Root265
MRELLDANREVQGSRAVRLLATSNLAVYATLMERHLFEGLVGETELVVRLERDLEALHETGEQSGLALIKTWASQGWLHRVASQHQGSERNVCYLTQDARRALDFVRGMRRNDTIATGGSINGIASRLKQVAIRVGDDPDRIREGIEAEIAALHAELDELDAGLRPEPDVTGMYDEARAIAMQMERLITDIGLYGTMIEQATSALDDPIDTNLEYRDRQRQMYDDYQAAWDSAGRDSHRAFLRMINDPDQRAEFEADIATVAATLPELDPALRKVMAGFFELVGHQIDEVERIQQRCAQRVKRFTAFGTLEQTRGVARQLNEAIGTARALLKESFTDSRLPIEVPLARHAISSVGALSFRINDLSAPKPAEVADGVVDLTTFSSLTTQVDAPALSKMLNSSLPVSLPDALEMLDSPYLGHVIVLWSWALKQPSTTDAVPVTVRFHSLDGHDREMEVPHLMFTEPVSEVAS

SEQ ID NO: 36800 - protein, 219 aa, Mycobacterium sp. Root265
MTDSDIDFASLPDVDRNGGRTPTQRRPRFDGDVSAMPDRACWALQHLLTRRYVSSESDPDIYSWILEYRTELSVRLSELDLQLRIAEQVDIAYIEQARYEPTKGAKLLRREPLGTYDSILALHLAQMMRAGGDSSFLITRDEVHGLFAGVLNDTDRDTVTFTARVDAAIARLAGLDILRKTRDDEDSYTVSPVITAIMTASVITELQQQFEQLLKGGSE

SEQ ID NO: 36801 - protein, 1112 aa, Mycobacterium sp. Root265
MSEQFHLSRLQVINWGVFDGYHSVPISAGGSLIAGGSGSGKSSLLDAISLGFLPFNRRNFNASGDNTAAGSSAGRRTVDKYVRGAWGQRSDNGVSQVIYLRGEGTTWSAVAVTYTSNTGRSITGLVLKWLTGESRSDSSSRFVLGDGDLDIEEVCNRWAAGRFDSAVFKDSWRFSTKVESQYLAQLYASIGIRASEAAQQLLGKAKSLKSVGGLEQFVRDFMLDEPDSLARLPEALKQIDPLVEARELLAVAQRKRKILGDIETIQVRYASESSDLGIIDLVDTQMVRAYTDHVRLQQCPAQVENLDGTIDQLENEYADLTRQLNLAKAEGDSLNAQISGASTNVGPLQSQVAAAEAQAEEITRRYAAYEEMVSAQGVPVPESADEFWNLREDLSKQAAGLAVKLERGREASTDAEYAQKAARMTRDHAAKELKRVEHVGSALPEFAVTMREHICAAVGVDPSALPYVAELMDLRPEENRWRAAVEKVLRSVGLRLLVPDEHYAKVLRFVNETNMRGRLALHHVRINAPDREPEPNTLAGKLFVVNPDHPCAAEALDILSAAGDHICVDTPDLFARFRRAVTDAGLYKDSDRLAIKDDRRALKPSEYIYQGDITAKLDALTAELAEAEQAFEQARQAADDIAAGRQQWRDRAAACKAICEQFPQWSQIDTETADGHADRLREQYDLLMADNPDVEALSARADECWIDIQTLMTRRGAIQTRRDDLDGRRTRLMDLQDRLAPAAISDAATELLRRYSAEVPVALELLNPEPHREALLAAIRRERDQLTESRRRSHEELARIITTFDTSFPDAIPNDSEDFDERVHDYVAVCRHIDERELPDAYDRMMRLITEQAPDAILTLHRVAEQETRRISDQIDRVNTGLGSVEFNRGTRLTLRATPRSLVAVAELTDIVKSISRRIAEVGLGDKKAILDQYADILRLRNRLAGNTPEDRAWTRDALDVRNRFTFDCAEWDVRSEELIRTHSNAGDNSGGEQEKLMAFCLAGALSFNLANPESGDNKPVFAQLMLDEAFSKSDPQFAQQALQAFRKFGFQLVIVATVQNATTIQPYIDGVVMVSKTEATGRNARPVASVATKTISDFTALRKELKVPEPV

SEQ ID NO: 36802 - protein, 487 aa, Microbacterium sp. Root280D1; identical to SEQ ID NO: 36167

SEQ ID NO: 36803 - protein, 219 aa, Microbacterium sp. Root280D1; identical to SEQ ID NO: 36168

SEQ ID NO: 36804 - protein, 1117 aa, Microbacterium sp. Root280D1
MTMMDTLFGMIPASSRGQQWVAEELQLINWGGYDGGPHRVRFSPDATLLCGGSGSGKSTLMDGYIALMMPHTTPFNGASNGGVTGRPRGDEQRNILSYGRGKIDESRTEEGTKLRVLRGDGEDTWSAVSMTWLDHDGSRFTAVRGWYIPADARTLEDTTRLRATIDGAFDLSQLERAAVQRLSDASVRAVGLEPVATDREFSARLHAVLGIGAAGSGAKAISLLARIQAGQQITTVDDLYKKLVLEEPETMATADAVVAHFDELESTRTRMLVAKQQVAALEPIREISQRIAAASARMSVVDEVGVFSEPTSLASLWSAERRLDLLREVEADLRDRTQALQLAVREKNALIAAAEVEREGLLDVLRQSGGDRLETAQRELRGVERRLEDVQRERARFDSVARELGAEVRTASDFEELLARVGRELPQSGLRGARAAFADAESSRRAVESELSRARAEQDRTRELRGSIPAHLHEARTLLAQAAGLTPTDLPFVGELIEVRTEFEPWRDAFNLALGGFARTLLVDVADLGRFRAAIESVRIAERISYEGVPTGVAESRTADPRTLPGRLDHRSTPFTGWLQQRLRERFEYVCVDSSTELAEHPRALTLAGQVSHGDRGSHGGHGRANMLGFSNARRLRELDEQISQLESRRDAATQAAADAEADLDRIEATSKAHAKIEDLTWDQIDVEAVTAERARWVAVEAEVTDENPKIAELKSQAEELRRRVGRLRDESSRLGGDLTLAQDRWVEVTDQVDDCQRIVDAAEAAEIALEERHRSFLDARFLGADAAVSVTASERLAHLDAALRTAATRLLEDRTSAAAAHAEQREQMRRLMTGFLERWDTLTILPDPDESVAEFESILVALETNGLHELESEWRDSLLKLSGNDLTSLDSTLGRALREIKNRIDPINRIMEELPFYDDDHRLQITPRENQSEARRRFRKELREVRSLIDAAETDVDRESVYRRMSRLIGRMRRTAPDFAELIDVRNHVRVSAERVHATTREHVALYDHIGEKSGGESQELVAFIVGAALRYQLGDAGAERPRYAPVFMDEALIKADAHFTKRAIGAWRGLGFQLVIGAPNDKYSAIEPHVDVEYDILKDTRGRSWARPKVGLPAE

SEQ ID NO: 36805 - protein, 507 aa, Nocardioides sp. Soil796
MSEIAGELARVKGAFSQPTLTLLHQRQAPVVITIFRAAFGRNNKPIPTARLHAQVEEHLAQIRLTGESLVPEGSGRDLCQKWMRGQWLVRALDERGHEVYTLTSHAQQALELVKGLARDRATLSEHRIATILGTVRRFNAEANPDRTARVSLLNEEIARLSAERDRLVDGAEMVSATEDYMLEGFTELQSLISALPSDFARVEERFAGIRAEILAAFRAEDRPPGDVIDDYLARADALMTATHEGRAFEGAFGLLRDDALVAQLREDLTALLEHPISDRILAESDRAELRGTVKLVRDGLDRVLTQRSRVTATLKEYIVSHDAARDRELEQTLRQVESELMTWMATTGPRATHDVPLLPLRAGIDHLRERFHDPADDRLPDPIEPVDPDDARSPSLAELMAQGGPQLPSLRQRLDDALSDLLPAATLGEVFDRLEPSLRRPVEIYGLLHLAADRGWTTDDVVETWATVRHDGSRRTFAVPRMPLPDPDLDAHRTQQSRTQQNSETPA

SEQ ID NO: 36806 - protein, 262 aa, Nocardioides sp. Soil796
MTTDVDLNRPEPEDALEPDDALEHDPAYDDSVSLFEGDEGGLEHSQRQALVVLLKQRFISARTHPRDWQVLVEHERVLRSRLNDVFLDLMVDREREVAWKRQAVPETGGRFPTLLHDTGWSREETLVLVHVRDRLRAGLASGDTRVFVDRDDILDYVASFRPAHATDESGDTKRAQNAVQSVVKSGLLIGATGDERFEISEAVEPLLPLELLQELLSALRSANDTTPEPEEPADLFDEDGADTDGAGKDRADKDGADEERDA

SEQ ID NO: 36807 - protein, 1155 aa, Nocardioides sp. Soil796
MNEHELGGDEVDEASDGLFARQVVDTPADDTVQWRAALLQLVNWGGFGGLTTVPLRGDTTMISGASGVGKSTILDAYTALMMPSDTKFNGASNDAVSGRARGVGQRNLLSYLRGAVDVIDDPRTGRPVEKLLRGKGADTWGAVAMTFVNDQGGRFTALRTYYVPRRATRSSDVQMQLATHEGALTLDTLEVAVPERFHANTLKKLLPGIRVHRTYAEFSAVLHARLGIGANGDGAKALRLLSRIQAGNQVRSVDELYKEMVLERPATYAAADRAIEHFDDLDAAYSAMRTEEEKLDLLGPITELHGRKVAATRRQSQLDSYGVTLGGDTPLRLWLLRTHHRLLEAAVAANRDARTTNADDLSQTSSSEAALVADLENAKDSHRAAGGTTLQNLALSIEQEQVVRDDRAGRRAVLQERLLPLVDVADPHAVSVETALESDAGFGALQQQAREWLAGWQDQAASLKRERDIARDGLFPVKQRQAELREERASLQSRAGRMPSRMHEMREEVALASGLGIDELPFVAELVDVAPDESRWRTAVETVLGGTARLMLVPIDRLKDFSSAIDGLRLRGRLTFEGVELDLPDTGPADPERIAGKLLFKDSPFSGWVQAHLGEPSRNALCVETADGLAGGGFRVTLAGQTRNGRRGAHGRADTRNIIGFSNEDALSEIDSELAALEEKLQAFDADVAELDRQGRVLEQVRTAYDTIRAARFDDIDVAGSDERIAELGHRRAEILRADDKLHVLQGQIDDLSDRLEQARKKRFVLEERHKRLAAEHAELVDSEDLVNDRLEVMDRNGTVTLTEEQDAALAADFAAAATPDDPDDLDRFPVTSQRLAERLRDAVGETETEINRVDDELGAIFRMYKLKWESPNLAATPDSYADYARILDDIRGTGLAQRRTEWRRRLTEWSGQDLVPLVGAMAASIEEIEDRLEPINAILRRLEFGASGDRLRIRLRRLSPAHVQVFMKDLRMLSSGVTAEPDEADLEKRFLDLSRFMRQLRRPVPGGDPVTDRDRLLDVRRHVEISAERYDHHTGELRATYRTLGEKSGGESQELVAFIVGSALRFRLGDEMRSRPRFAPVFLDEGFVKADSEFAGRAVQAWKGLGFQLIIGVPLDKVTGLEPHMDELLAITKSTTTYQSWITPITDAEQTPAG

SEQ ID NO: 36808 - protein, 500 aa, Nocardioides sp. Soil797
MSDIEAELHRVRGAFATPTLTLLHQRQAPVVITLFRSAFGRSNTPIPTARLHTQVATYLDRLRAAGEDDLPNGSGKELCHRWMRGQWLVRSIDERGREVYTLTSHAQQALELVKNLTRDRATLSEHRIATILGTVRRFNAEANPDRTTRVTLLNEEIARLQAERDRLVDGAEMVSATEDYMHEGYTELLSLISALPSDFARVEERFARIRGEILAAFRAEDRPAGEVIDDYLERADLLMTRTHEGRAFEGAFALLRDDALVTQLREDLTALLDHPLSDRILGEADRAELRGTVRLVRDGLDRVLKQRSRVTATLKEYIVSHDGARDRQLEQTLRQVESELMTWMANTGPRATHDVALLPSRVTVDHLREKFHDPADDVLPERIAPPSPADAPSLTLAELKAQGGPRLGELRQRLDEALNDRLPADSLGALFDSLEPELRRPVEIFGLLHLAADRGWEGTEDLEEYAAQRHDGSRRSFAVPRLPLPAVHERADEQKSEHPA

SEQ ID NO: 36809 - protein, 242 aa, Nocardioides sp. Soil797
MSDVVDEIPTDLPDDHSAEPTGLEEEVEDTSVSLFEGDEGGLELAQRQALVALLKQRFISARTHPRDWQVLIDHERALRSRLNDLFLDLQVDRAREVAWKRQAVSETGSRFPTLLYDAPWSREETIVLVHLRDRLRAGVAGGELRVFVDREDVVNHVASFRPPHATDEAGDERRARNAVTSVAKSGLLIATASEDRYEISEAVEPLLPLELLAELLEALQKANGSAEAADHGDDELFEEDAE

SEQ ID NO: 36810 - protein, 1157 aa, Nocardioides sp. Soil797
MHREVANPVDDTVQWRAALLQLVNWGGFGGLTTVPLRGDATMISGASGVGKSTILDAYTALMMTSDTKFNGASNDAVAGRARSVGQRNLLSYLRGAVDVIDDPRTGRPVEKLLRGKGSDTWGAIAMTFVNDHGGRFTALRTYYVPRRATRSSDVQMRLFSLDGTVELDKLEVAVPDKLHANTVKKLYPGIRAHGTYAEFSAVLHARLGIGANGDGAKALRLLSRIQGGNQVRSVDELYKDMVLERPATYAAADRAIEHFDDLDAAYSAMRTEEAKLALLAPIEELNERRTSATRRLAQLDSYGVTAAGDTPLRLWLLGTHLRLIESALTTNSAARAATADELAKAASAEASLVSDLEAAKESHRTAGGSTLQSLGNALEQEKVVRDDRVSRRTVLEERMLPLLEAPLDAAHDQSDGGAFGGVRSSEAALSSAAGFAALQEQARTWLASWQDQHDALRKERDEALRGGYPLNQRQAELRQERASLEGRSGRVPSRLHELRAAVSEASGLSEDRMPFVAELLDVAPDESKWRTAIETVLGASARTMLVPIDELARFSAAIDGLHLRGRLTFEGVELDLPATEPADPERVAGKLAFKESPFSGWVQAHVAEPSRNALCVETSAGLDGGGYRVTAAGQTRKGRRGTHGRADSRNIIGFSNDDAIAEIDNELAAVGEQLTALDNRVHELDRQVSVLGQRHTAYDAVVAARFDDFDVTASDQRIADIGRRRREILGSDDQLQALQGQIEELTTSLDETRQQRFVLEQQRFDLNEVHGRLVDDEDSVKDRLEAMQRSGRAVLTEDQSSTLAADFAAASAPADPDDLDRFAENSQRLAERLRDAVGDAQSEIERADDELSGIFRMYKLQWDAPNLGATPEAYPDYARILEEIKQTGLAQRRTEWRRRLTEWSGQDLVPLVGAMAASIEEIEDRLEPINAILRRLEFGAERHRLRIRLRRLAPTHVQVFLKDLRALSSATAKDLDDAALERRFSELSRFMQQLRRSDQTSVGLTDRDRLLDVRRHVEISAEQYDHLTGELRATYRTLGEKSGGESQELVAFIVGSALRFRLGDEMRSRPRFAPVFLDEGFVKADSDFAGRAVKAWRGLGFQLIVGVPLDKVTGLEPHMDELLAITKNSATHQSWITPIRDRAPDATERSASDLPMV

SEQ ID NO: 36811 - protein, 453 aa, Yonghaparkia sp. Soil809
  MOD_RES (218)..(218): Any amino acid
MELDELDRLWERHAAWRLVRARNAPLVLSFLGTYFIEANRGAAPAGQLVSALDDFLYVVHRSEPDRYPAEPATYLEDWAAAESAWLRRFYPSGSEEVHYDVTPAVQKAYAWAEGLRVRSFVGTESRLQTVVELLRSIVHGAEVDPDSRIAQLERRRDAVEAELAEAREGKFEVLDETAVRDRYQQFASTARELLSDFREVEENFRTLDRSAREKIAGXDQGRSFQAFYDFLLSEGRQDELATLVATVQRMPQLSADHRLRSVHHDWSDAAERTQQTVRALSEQLRRFLDDQVWVENRRVIDLVRSVEASALALRDAQPRDIGLVVDEPGVPIALPFERPLYDPQPDVVVDSMLSPDEIDIAELGDLFTQRFVDTARLAENIRAVVPPRTTVALDEIVGLYPVQEGVAELLGYLALDEDDITIDVGDSEITIDFNDAFGETKRVRMRTVQVTRA

SEQ ID NO: 36812 - protein, 183 aa, Yonghaparkia sp. Soil809
  MOD_RES (22)..(22): Any amino acid
  MOD_RES (31)..(32): Any amino acid
MREVVYREVPSHEGAWQTLQRXPRRCRRPLXXATLGIDVVLDEAEGYAYLATREPEDGEEPLPRLVRRRSLTYNVSLLLVLLRKRMVEFESSGEEGKLVLTRDQLVDMFRVFQESSSNEARVADQADRTIAQAAELGFLRELRGDSGAWEVRRILKAYVDAQTLSDFAERLAAYAGAGERAPK

SEQ ID NO: 36813 - protein, 1123 aa, Yonghaparkia sp. Soil809
MTDTLFSALDIPTAAHQRTGYRLQRIELFNWGTFDKHVWSMNANGQTSLLTGDIGSGKSTLVDAITTLLLPANRIAYNKAAGADVRERTLRSYVEGHYKHERNEATGASRPVGLRDHRSYSVILGVFANEGYGESVSIAQVFHQKDRIGQPDRFFITASEALSIDPDFTGFGFELKTLRARLRTRGADVDTTFPDYHRRVRRLLGIRSEQAMELFHQTVSMKSVGNLNDFVRDHMLEPVDAQPRVKAIVDHFENLVKSHEAVRKATDQLAVLVPLVAAADRFDETAARHKELIDQRSAVAPYITERVRELLDGEIVARGAELAALDAQKSDLAQRRQAFVPTRDRLKLERAGVGGDRLKELDAEIPRADETHARRAERRRSYDELLNTAGFDPANDGDDFLARAEEAGLRRARLNDQRADITTRRDPLFERRTDTRRARDTAKQEIESLRLRRNSLPADLDRVRSTLCDALDLTEDELPFAGELLEVSDDFADWRGAAERVLRGFALTMLVPQDLYARISTWVNDNRLNAKLVYLRVPERRIRAVPTAHTGNRLVDALTIEPGPFGDYLASELAVRADHVLAASVDQLRKEDRAVTREGLVRDRDRHEKDDRNSAADPRRWVLGRGSEQKIAALQTELDGSIAELESLEQQLTAIDDEHRTLLSRAEALAALAQYRSWSEIDAEASASTASALKAERDRLVGGSSQLAAIDAQLEEIDARDAALGDESDEVVARIGAARDALAKARLRRRAEDEALAAMGPSVIEQARTLYSALADRVTRVNVRTVEDCDRMRGTLIDTLTSAIESAQREMNGYTTGIQQQMGEFLRRWAEHRGELDASVRSIPEFRALHERVTRDDLPRFEAEFRHELDTNAVRELAQFNMWLRRQAEEIRGRVEIINEALAAIDYNPGRIIVLVAEPTVNQDVRQFRSDLREATADVLAAEGNAADVEQRFEQIRHLIERLKGRVGHTDSDRVWMRRVTDVRNWYTFAASEKDRRSGEEFEHYTDSDGKSGGQKEKLAYTILAASLAYQFGLEWGVEKSRDFRFAVIDEAFGRGSDASTRYALDLFAKLGLQLLIVTPLQKVHVIEPYVSAIGFVDNPTGAASRVHTLTIEEFRTKQRSQG

SEQ ID NO: 36814 - protein, 384 aa, Yonghaparkia sp. Soil809
MSDPARWSTPANIAAAVRRRWTDGTLLRAFATDDPFRAIAIPLRGPSAGDLGDHFDAAREWSNDLRHASRGGRAYTLLTGRIGGRLTGSTEVPIRAVVESYEQAWLLLGSQADAAAFRQLVDSSEHVPRARKWALGSPLAAVALAPIWQSVLGAYTWLDTHRGSGHYLRQVSAPGVDTKFIERHRSALGSMLGVSTAAGAFARELGLASKPATVRLRFDPAVLDVPSGLSEAVLRTEELGALDAHPRRALIVENEITYLSVPVRPGCVVLWGKGYDADQPASLQWLSGTEVVYWGDIDTHGFAILDRVRAHLPNARSVLMDRETLLAHESTWGREPAPTDVGLSRLDAAERMLYSDLVTDRYGPTVRLEQERINWEWALERLEQ

SEQ ID NO: 36815 - protein, 496 aa, Pseudoxanthomonas dokdonensis
MHLQRRPGPADAMTAVPALFANLPGGIFGPLASPNREHYWLLLCRLFDEFFGPDAPLPPSDGIPRRDITAAVERYLLTDDPWESEDGEVSDAPLNVRANAIHDRFRGAGWLRQERIGAREMVSMPPLVSRLLATLIEFGEHGPTFVSAKMRSVELQLQQILEGKAAGDALDEAADQARRLLVSLSSMSLQVRDLMPELSKAETTAQFARQWFERYVGQLFIGDYAELHTSDHPLARRSAILAMARQLQEPAQRARLLDWYREHLTAGDEQRAALRLQRGLQRLHELERIDEYLGRLDDDIRQANRRALAFLDYRLRAPDRLDVLLQRAVRGVLVAAPEQQRMPVAAGALMDESRLRPPRRKPQPIPRSANSNAPPTPEQLARLSLLRQIKRARLVNAEDMARYVGRHLGQATQIDSRQLSIDSIPDLRAYQTLLTLALRSRRVGGLRREDPLSRLLRGFRVELIDAGTDDSSDNDFLHGPDFRIHRLGTAPNRKSA

SEQ ID NO: 36816 - protein, 219 aa, Pseudoxanthomonas dokdonensis
MKRSWNTLSQNSNGLYAVADFERAAYRLVSEQVLYASDARSRVAYHLIEDYFADFVAALEPLGIRLERNAHYRYVVALPSHGEGVPVTLDETLALLVLRQRYDKAMRQGLIEDHGEVVVELPDLQEAWQSMTGRPLPDIGSLRTLARSLKRWGVGRLVESDDDPQPFHLRVRPAIVDIVGEHWLQRLDQHNRDGGADDASADEPSNAGQDNMEDNDATA

SEQ ID NO: 36817 - protein, 1143 aa, Pseudoxanthomonas dokdonensis
MQLLERIHLVQFFLFEAQTLALDPTTAIIAPNGAGKSALLDALQIVLLGGDRSRIRFNAQAGGSHRARSIRDYCLGVYRSGEEGRKRRTATTYISLVFRDQDSGEALTAGIALGAAADEPEHRLHGLYLLPGVALALDEHLEQVKGKELPLTWAAFREHINRRCKQAGSSAELHTVSERFVRDLLLRLRASPSANPDLNAYRKAFLNALNLQRVEDVDLFVRTLVAEDRPTDIGRFRALLDSFRQIKEKIEQVRQRIEAADLVEQQYARIAQQATRAASARALAAEYARDLYSEQLQAAETGVEQAQTQLADRRRQLSDSRAEREHLRDEHARGQAQLQGSQGYGEQAQLEELAGRDREQLVRLKKDLLREVAFVRERLRGIAALAIDGIDDTLLQTALADWDGWHAQLAALAAEDGLPWSPEDLHAQVQRSLQQATPLLAAVDRHARRCHASHDKLRDALASARQNQKRLSAGQAELHPDTARLMNYLRDAGIEARPVCDLVRVSDSSWQHAIEGYLRGNVEALLVPARDEERAVKLYRGLKGSSSVYGVKLALSSHARHRRGNDSAEAGSVAALLEGDNLEALAFLRRQLGELACVDSEAELVSSRQGLTRDGLLARGGGIERLRLPAAGDLKIGASDNRARLRVLREEIETAEAQLRQIEPQLRSADEAQRGLARLADATTVAQSLHEQVLEHRQLAARYSSQQQRRQSSLDPDLLHLSEQLQALSTQLQAQEARTEQLVGQEALAANAVEQAQRLLDGLREQEQRVAREAVDAFKHPDVDPNRVERLREELDQKYQALEERARRCEERGKDGDAQLARLLPGAWSGLAQYARDHGIELDFDGDAWRPARKLLQHELSRLRDTELVRYQGEADAAYDTAVETFRASVAATLNDNFTRLKTQIATLNRTLRASPPFSNHERYQFHYEVVAEFRELHRFIQRAAEIGSEDSLFGNAGEVPAAFRELIEDASAARAASSPLDDYRRFFRFEVQIRQDDRVIGTLSERMRSGSGGEHRAPLYVIAGAALAAAYGKSEAHPGGLGLILLDEFGDKIDAQNARATSNYLRSLGLQLVLAAPDTAQGTLSGVLDSYIELFRDGDLLQAERIEVTEAARALLLSDQFDLHPQLLEEETERIQRESAVG

SEQ ID NO: 36818 - protein, 502 aa, Stenotrophomonas nitritireducens; identical to SEQ ID NO: 36534

SEQ ID NO: 36819 - protein, 208 aa, Stenotrophomonas nitritireducens
MKRSWNTLSQMSNGTYAVQDFERAAYRLATEQVLYATDARSRVAYHLVEDHYPDFVSALEPLGIRLERNAHYRYVVALPAHGEGAPVTLDETLALLVLRQRYDEAMRQGLIEDHGEVVVELPELQESWQALTGRAMPDVGALRALARTLKRWGVSRLVESEGDDPQPFHLRVRPAIVEIVGEQWLQRLDQHNRDEAGDADAEDDDAAA

SEQ ID NO: 36820 - protein, 1143 aa, Stenotrophomonas nitritireducens
MQQLERIHLVQFFLFEAQSLQLDATSAIIAPNGAGKSALLDALQIVLLGGDRSRIRFNAQAGGSHRARTIRDYCLGVFRSGDEGRKRRTATTYISLVFRDTETGVPLTAGIALGASVDEPEHRTHGLYLLPGVALELDEHLERVKGKELPLAWNTFREHIARRCKDVGETPQLHPNAERFLRDLLLRLRASPSASPDLNAYRKAFLNALNLQRVEDVDLFVRTLVAEDRPTDIARFRALLDSFRQIKEKIEQVRQRIDAAEGAERQYEKIAGQATRAASARALAAEYARDLYSEQLDQAEGAVARAEGTLADTRRLLVDARGERDTLREEHVRANARLQGSAGYGEQAQLDELSGRDRERLAQLKKDLLREVGFIGQQFRQLDALALDDVDAKALAAARADWDEWHAGLSTLSPEDALPWTPEELFARARQALRAAAPLREQVDRHARQLHAAHDKARDALETARQNQKRLAAGQAELHPDTVRLMSYLRDAGIDARPVCDLVRVTDASWQHAIEGYLRSNVEALLIPDKDEERAVKLYRGLSGARSVYGVKLALSSQARSSRGAEEPAAGSVAALLEGVNADALAFLRRQLGELRCVETEAELVRSRQGLTRDGLLSRGGSVERLRLPAAGDLRIGASDNRARLRVLHEEIEKAEAEVRRIEPSLRRADDCQRGLARLADADAVAQALHERVLEHRQVAERYRAAQESRQASLDPDLLRLSEQVRELGLHLADCEKRADDLLRKEAVAESNLASTRGLLDGLRQQEERVTRRAVEAFAEPDVDPNRVERQRQELDEKYPSLEERAQRCEERAKDSDAQLARLVPVAWGELAQYARDHGIELDFAADAWRPARALLQRELTQLRDTELVQYEEEARQAYATAVDTFRTGVASTLYDNFTRLKTQIATLNRTLRASPAFSNNERYQFHYEVVPEFRELHRFIQRAADIGGEDTLFESAGQVPEAFRALVEDKAATHVANSPLDDYRRFFRFEVQIRQDDRVIGSLSERMRSGSGGEHRAPLYVIAGAALAAAYGKSEAQPGGLGLILLDEFGDKIDAQNARATTNYLRSLGLQLVLAAPDTAQGTLSGVLDSYIELFRDGDLLQAERIEVTEAARTLLLSDQFDLHPELLAAETKRIEREQATA

SEQ ID NO: 36821 - protein, 483 aa, Stenotrophomonas daejeonensis
MSTTTPTTTPPLFTVVPAGIFGPLASANRQNYWSLLCRLFDEFFGPDAPVPPSHGFQRREITAAIERYLLTDDPWEDEDGQAPDAPLNTRANAIHDRFRAAGWLRQERIGAREMVTMPPMVAQLLSTLVEFSEHGPTFVSAKMRSVELQLQQVAEGRMDGGILDEAADQARRLLVSLASMGLQVRDLMPELSKAETTAQFARQWFERYVGQLFIGDYAELHRADHPMARRSSILAMVQQLETGAQRQTLVAWYREHVTGGDEARAQHRLSRSLGRLRELERIDEYLTRLDEDIRQANRRALAFLDYRLRAPDRLDVLLRRACRGVLSAPEEALRLPVAPGPLMDETRLRAPHRKPVPIPRSANATTPPTPEQLARLSLLRRMKRARLVNAEGMARYVGRHLQHGMAIESAQLDIASIEDLRAYQTLLTLALRGNRIGGLRREDPLGRLLRGFRVELLDAGDGNDNDYLRGLRFRVQRIGTMPS

SEQ ID NO: 36822 - protein, 208 aa, Stenotrophomonas daejeonensis
MKRSWNTLSQMSNGTYTVQDFERAAYRLATEQVLYAADARSRVAYHLVEDHLADFTAALEPLGIRVERNAHYRYVVALPSHGEGAPVTLDETLALLVMRQRYDEAMRQGLIEDHGEVVIELPELQESWQALTGRAMPEVGTLRTLARTLKRWGVCRLVESESDDPQPFHLRVRPAIVEIVGEQWLQRLDQHNRDEDGEMDVEDDDAAA

SEQ ID NO: 36823 - protein, 1143 aa, Stenotrophomonas daejeonensis
MQQLECVHLVQFFLFEAQSLRLDGTSAIIAPNGAGKSALLDALQIVLLGGDRSRIRFNAQAGGSHRARTIRDYCLGVFRSGEEGRKRRTATTYISLVFRDTETGTPLTAGIALGASSDEPEHRVHGLYLLPGVALELDEHVERINGKELPLAWNTFREHASRRCKEVGETPQLHPNAERFLRDLLLRLRAGPSVSPDLTAYRKAFLNALNLQRVEDVDLFVRTLVAEDRPTDIARFRALLESFRQIKEKIEQVRQRIDAAEGVERQYEKIAGQATRAASARALAAEYARDLYSEQLDQAEGALADAENVLADTRRNLADTRVERDTLREEQARANTRLQGSAGYGEQAQLDELAGRDRDRLAQLKKDLLREVGFIRDQYRQLDALALDGIDAETLAAARADWDGWHAELSALAAEDVLPWTPEDLFARARQALHTAVPLRERVDRYARQLHAAHDKARDALGTARQNQKRLAAGQAELHPDTVRLMSYLRDAGIDARPVCDLVRVTDATWQHAIEGYLRSNVEALLIPDKDEERAVKLYRGLSGGRSVYGVKLALSSQARNSHGGEEPAAGSVAALLEGVNDDALAFLRRQLGELRCVETEAELVRSRQGLTRDGLLSRGGSIERLRLPAAGDLRIGASDNRARLRVLHEEIEKAERTVREIEPQLRRADDCQRGLARLADADAVAQSLHERVLEHRQVGERYRSAQESRRASLDPDLLRLSEQVRELNLQLADCEKRADALVGQEAVAASNLERTRGLLDGLRQQEELVARRAVEAFADPDVDPNRVERQREELDEKYPSLEERARRCEERARDSDAQLARLLPEAWSGLAQYARDHAIELDFDASAWRPARSLLQRELAQLRDTELVQYQEEAQQAYATAVDTFRTGVASTLYDNFTRLKTQINTLNRTLRASPAFSNNERYQFHYEVLPEFRELHRFIQRAADIGGEDTLFESAGQVPEAFRALVEDKAAAHVANSPLDDYRRFFRFEVQIRQDDRVIGSLSERMRSGSGGEHRAPLYVIAGAALAAAYGKSEAQPGGLGLILLDEFGDKIDAQNARAITGYLRSLGLQLVLAAPDTAQGTLSGVLDSYIELFRDGDLLQAERIEVTEAARALLLSDQFDLHPELLAAETERIEREQAAT

SEQ ID NO: 36824 - protein, 489 aa, Stenotrophomonas chelatiphaga
MKHRERIIRYRHLREQPQWKLLAADHAPEIIGLLQALLMDGERTLAAPVLHERLQRALDQLNGEELSRELPRTAQAYVAHWLAQGWLERRLPEGADQEQYELSTQALQAIRFADSLEQSRVAATESRLALVINQLSQLAAQTEADPDARLSALRDERDRIDAEIARVGEGRVAALDGKRALERARQIIGLADELTEDFRRVRDDFERLNREFRERIIDDEGERGDVLSKLFEGVDVIGESDAGRSFQAFWRLLNDAEQSAQLDAALESVLARGFARRLDRNERAFLRGFTGTMLERGGQVHDVLQHFARSLRGFVQSRGYLEQRRLNQLLKQAQGEALALRDDFPAQRSIGRDLQLTTSRLRSWSQWKLHDPRSAQVDGSVQRNDAAAISLESVGDLVASSEIDFRTLRRDLHDLLGMQPKLSISQALSQREAPQGLGSVIGYLSLGTRFGTVVEGEQELAHWRGGDGQWRRARIPLVWFTQEKRHELE

SEQ ID NO: 36825 - protein, 233 aa, Stenotrophomonas chelatiphaga; identical to SEQ ID NO: 34289

SEQ ID NO: 36826 - protein, 1126 aa, Stenotrophomonas chelatiphaga
MAISKHTPALFTEGLPDPRTQQFRMRRLQVHNWGTFNGLTEVPIAERGFLFVGRSGSGKSTLLDAMSALLVPPAIVDFNAAAREAERSGRDRNLVSYVRGAWADQQDRGTGEIATQYLRKGATWTALVLEYRAGDGRVVSLVRLFWIAGNGATAGDVRKHYMVAERPFDIARDLGGFDLDLRKLKQKLADVHHFDSFAGYAERFRHLLGIENEMALRLLHKTQSAKNLGDLNVFLRDFMLDTPKTFDAAERLVNDFAELDGAHQAVVTARRQVETLLPAREHYTELKQIKRRRSDDEVLKLGIDSFRESRRQQLIDARLRELDTRDRGLLGEESQRRAALDNHTAKLGELELQRRQQGGERIEELEREQGRAEAERDRRQAKQAQARDAAAQLQLALPEDAHGFAALVEQASTELLDRKRASSALDDAISERLGGRRDDERRFGDVRAELDAMQRNTSSIPAPLQKLRARLVEETGLPEAALPFVGELIQVREDDLPWQGAIERVLFGFAQSLLVDDKHYNEVADWVNRTHLGMRFTYYRVRRNDEAFARDPSPRSLLHKLELRDHVFEGWLRRELGKRFDYECVDARQLRNVDRGITREGQVKHPGDRFEKDDRSAVTDRRRWLLGFNNRDKLAVYEKEAQELAKRIAGCDEDVARLRAQRDLDNERRLACHQLAGISWDEIDIATPQQRLADIEATLLDLREGNADLEKLARQIDAARSDIEQARRTYEDTRVERGQLVKERDRLDRARQQSRALVLPALGSTQEAGLQERLEAFGALSLETLEAHMRQVSNALNESLSSSQQDVNRVENQLLGCFRRFVQGWPEESGDFTVSVASADDFLARLERLERDGLPQHEERFFDLLQNQSKNNLLALQRHSAEARKSIGQRLDEVNASLEQVPFNRGTLLTIELSDRRLPEVLEFHQHLRDVLSQQQTEQRELAEAQFAVLRQLVTRLGSSEGEDKRWRELVLDVRMHVEFIGVELDAATRQQVEIYRSGAGKSGGQRQKLATTCLAAALRYQLGGADGQLPSYAAVVLDEAFDKADNEFTALAMNIFDNFGFQMVVATPLKSVMTLEPFIGGACFVEISGRHDSGVLLIEYDEEGKRLKLPERSRQQANEPEPADA

SEQ ID NO: 36827 - protein, 489 aa, Stenotrophomonas pavanii; identical to SEQ ID NO: 36204

SEQ ID NO: 36828 - protein, 233 aa, Stenotrophomonas pavanii
MSWHEDPIEAPQAEGAEDAYDAEPVATVAQPRRGNDVYYLGDTGRLPLDARRALCQLLIGPSIDQLRHPKLWPALIRSEAAIRSSLADLFLELVLDRDSGVAFTRQADTEDVDAPVLLRTSPLTFIDSVLLLYLRQQLAEADARGNRAVVADAEMAEALAIYEKNLSTDRAGFNRRVASAVQKMKDNHILTRLSGQDDRHEVSPALKLLFSAEDVSQLSAVYRQLRETPAAEA

SEQ ID NO: 36829 - protein, 1126 aa, Stenotrophomonas pavanii
MAISKHTPALFNEGLPDPRLQQFRMRRLQVHNWGTFNGLTEVPIAERGFLFVGRSGSGKSTLLDAMSALLTPPAIVDFNAAAREAERSGRDRNLVSYVRGAWADQQDSGTGEIATQYLRKGATWTALVLEYRAGDGRVVSLVRLLWISGNGTSAGDVRKHYMIAERPFDIAKDLGGFDLDLRKLKQKLPDLHHFDTFSGYAERFRDLLGIDNEMALRLLHKTQSAKNLGDLNVFLRDFMLDTPKTFDAAERLVSDFAELDGAHQAVVTARRQVETLLPARAYYNDLKEMHRRRGDDEALKLGVDSFRESRRQALIEARLREMDVRDRGLLGEEAQRRAALDNHTERLAELELQRRQQGGERIEELEREQGRAEAERDRRQAKREQASLAAQQLGAELPDDAHGFAELVERAQNELQDRQRASSALDDAISDRLGGKRDDERRFGEVRAELEAMQRTPSNIPAPMQKLRARLAEETGIAEAALPFVGELIQVRSEEQGWQGAIERVLGGFALSLLVDDKHYNEVAEWVNRTHLGMRFTYYRVRRNDEAFAREPSAKSLLHKLELREHVFESWLRRELGKRFDYECVDAKQLRNVDRGITREGQVKHPGDRFEKDDRSAVGDRRRWILGFNNHDKVGAFEREAQELAKRIASCETDIARLRGQRDRDNERRLACHELVSISWNEIDVAAPQQRLTDIEATLRDLREGNADLARLAKQIDAVRADIEQARRTYEDVRVERGQLVRERDRLDRARQQSRALVLPTLAQEQEAGLAERLQEQGPLSLETLEAHMRQVSNALNEQLSSSQQDLNRIENQLIGCFRRFIQQWPEESGDFTASVASAEDFLARLERLERDGLPQHEERFFDLLQNQSKNNLLALQRHSAEARKSIGQRLDEVNASLEQVPFNRGTLLTIELSDRRLPEVAEFHQQLREVLSQQQTEQRELAESQFTVLRQLVNRLGSQEGEDKRWRELVLDVRMHVEFIGVELDAETRQQVEIYRSGAGKSGGQRQKLATTCLAAALRYQLGGADSQLPSYAAVVLDEAFDKADNEFTALAMNIFDNFGFQMVVATPLKSVMTLEPFIGGACFVEISGRHDSGVLLIEYDEEGKRLKLPERSRQQANEPEEAEA

SEQ ID NO: 36830 - protein, 486 aa, Stenotrophomonas maltophilia
MTTTSPATFPSLFSVVPAGIFGPLASANRQNYWALLCRLFDEFFGPDAPVPPSHGFPRREITAAIERYLLTDDPWEDEDGQAPDAPLNVRAAAIHDRFRDAGWLRQERIGAREMVSMPRMVAELLSALVEFCEQGPTFVRAKMGSIESQLQKVTDGHADGGILDEAADQARRLLVSLASMSLQVRDLMPELSRAETTAQFARQWFERYVGQLFIGDYAELHRADHPMARRSSILAMVQQLEAGAQREALVAWYRDHLTGGDEARAQQRLSRSLGRLRELERIDEYLTRLDEDIRQANRRALAFLDYRLRAPDKLDVLLRRACRGVLSAPEEVLRLPVAPGPLMDESRLRPPHRKPVPIPRSANVTAPPTPEQLARLSLLRRMKRARLVNAEDMARYVGRHLQRAAVLDSDALDIASIEDLRAYQTLLTLALRGNRIGGLRREDPLGRVLRGFRVELLATGDTDTNNYLRGPRFRIVRVGAKLPETA

SEQ ID NO: 36831 - protein, 207 aa, Stenotrophomonas maltophilia
MKRSWNTLSQMSNGTYTVQDFERAAYRLATEQVLYAADTRTRVAYHLVEDHYPDFVAALEPLGIRLERNAHYRYVVALPVHGEGTPVTLDETLALLVLRQRYDEAMRQGLIEDHGEVVVELPELQESWQALTGRAMPDTGTLRALARTLKRWGVCRLVESEGDDPQPFHLRTRPAIVEIVGEQWLQRLDQHNRDDDGVETEDDDAAA

SEQ ID NO: 36832 - protein, 1143 aa, Stenotrophomonas maltophilia
MQQLERIHLVQFFLFEAQSLQLDATSAIIAPNGAGKSALLDALQIVLLGGDRSRIRFNAQAGGSHRARTIRDYCLGVFRTGEEGRKRRTATTYISLVFRDTASGEPLTAGIALGASVDEPEHRVHGLYLLPGVALELDEHLERVNGKELPLAWNTFREHVTRRCKEAGETPQLHPNAERFLRDLLLRLRAGPSVTPDLNAYRKAFLNALNLQRVEDVDLFVRTLVAEDRPTDIARFRALLESFRLIKEKIEQVKQRIDAAEGVERQYEKIAGQATRAASARALAAEYARDLYSEQLDQAEGALAEAENTLVDTRRQLADTRVERDTLREEQARANARLQGSEGYGEQAQLDELSGRDRDRLAQLKKDLARELAFAGEQFRQLDALALEGVDSDAFARVRGQWEQWHTELLALSAEAALPWTPEELYAQARQALRAAAPLREQVDRHARQLHGAHDKAREALETARQNQKRLAAGQAELNPETVRLMSYLRDAGIDARPVCDLVRVSDGAWQYAIEGYLRSNVEALLIPDQDEERAVKLYRGLSGGRAVYGVKLALSSQARNSRGAETPSAGSVAALLEGVNADALAFLRRQLGELRCVETEAELVRSRQGLTRDGLLSRGGSIERLRLPAATDLRIGASDNRARLRVLHEEIERAEQELRQIEPRLRRADDCQRGLARLADADAVAQALHERVLEHRQVAERYRSAQETRRAALDPDLLHLSEQLRELTAQLGQCEQRADALVGKEAVAASQLERTRGLLEGLRQQEELVVRRAVDAFADPDVDPNRVERQREELDEKYPSLEERARRCEERARDSDTQLARLLPEAWSGLAQYARDHALELEFDASAWRPARGLLQRELTQLRDTELVQYEAEAQQAYATAVDTFRTGVASTLYDNFTRLKTQIATLNRTLRSSPAFSNNERYQFHYEVVPEFRELHRFIQRAADIGGEDTLFESAGQVPEAFRALVEDKAAAHVANSPLDDYRRFFRFEVQIRQEDRVIGSLSERMRSGSGGEHRAPLYVIAGAALAAAYGKSEAQPGGLGLILLDEFGDKIDAQNARAITGYLRSLGLQLVLAAPDTAQGTLSGVLDSYIELFRDGELLQAERIEVTEAARTLLLSDQFDLHPELLAAETERIAREQATV

SEQ ID NO: 36833 - protein, 416 aa, Stenotrophomonas maltophilia
MSQMPGGGQDTPARRVLERLLRRAEAAALAGDPQPASLSMTGKRDAAEYRALRGMADFDAFHGRIALAERCGAITVERDRHRDDGERLLRLGVRDAAALAHDLGGELLHERVVRAEALLAPWQASAPVLARVLAAWRGGGKVRGKGPDAAVDLAAAAQAVDTLLAAARSDQILRKASTRLFGDSKRLEALTPWLDLLVTGELLPSGLENGEIWAALGLRKEPQPLLLAGPGVITLDDGSGHVLPQRWLGFPVDAIGGITTGARALLSIENLASFHEAASARGQAPVLLLYTGGMPSPAWRQAYVRLLAGLPDDAAVYHWGDIDRGGFRIAARLAEVASDGGRRLRPWLMAPDTLPAECRAAGQCPAPAVLATMCEWAHRAGWPEVAAGLQRTPLLLEQERLPPRLPWPDGAGMNPE

SEQ ID NO: 36834 - protein, 482 aa, Stenotrophomonas acidaminiphila
MATTTPPLFSVVPAGIFGPLASANRQNYWSLLCRMFDEFFGPDAPVPPSHGFPRREITAAIERYLLTDDPWEDEDGQAPDAPLNMRAGAIHDRFRAAGWLRQERIGAREMVTMPPMVAQLLSTLVEFSEHGPTFVSAKMRSVELQLQQVAEGRLDGGILDEAADQARRLLVSLASMSLQVRDLMPELSKAETTAQFARQWFERYVGQLFIGDYAELHRADHPMARRSSILAMVQQLESGAQREALVAWYGEHVTGGDAARAQQRLSRSLGRLRELERIDEYLARLDEDIRQANRRALAFLDYRLRAPDRLDVLLRRACRGVLSAPEDALRLPVAPGPLMDEARLRPPHRKPAPIPRSANATTPPTPEQLARLSLLRRMKRARLVNAEDMARYVGRHLQQGAAIDSARLDIASIEDLRAYQTLLTLALRGNRSGGLRREDPLGRLLRGFRVELLDAGDGDDNDYLRGPRFRILRVGAKLPETA

SEQ ID NO: 36835 - protein, 208 aa, Stenotrophomonas acidaminiphila
MKRSWNTLSQMSNGTYAVQDFERAAYRLVTEQVLYAADTRSRVAYHLVEDHYPDFVAALEPLGIRLERNAHYRYVVALPAHGEGTPVTLDETLALLVLRQRYDEAMRQGLIEDHGEVVVELPDLQESWQALTGRAMPDVGALRALARTLRRWGVCRLVESEGDDPQPFHLRVRPAIVEIVGEQWLQRLDQHNRDEAGDAGVEDDDAAA

SEQ ID NO: 36836 - protein, 1143 aa, Stenotrophomonas acidaminiphila
MQQLERIHLVQFFLFEAQSLQLDATSAIIAPNGAGKSALLDALQIVLLGGDRSRIRFNAQAGGSHRARTIRDYCLGVFRSGEEGRKRRTATTYISLVFRDTETGVPLTAGIALGASVDEPEHRTHGLYLLPGVALELDEHLEQVKGKELPLAWNTFREHIARRCKDAGETPQLHPNAERFLRDLLLRLRASPAANPDLNAYRKAFLNALNLQRVEDVDLFVRTLVAEDRPTDIARFRALLDSFRQIKEKIEQVRQRIDAAEGAERQYEKIAAQATRAASARALAAEYARDLYSEQLDQAEGALAAAENTLADTRRRLADTRVERDTLREEQARANARLQGSAGYGEQAQLDELAGRDRDRLAQLKKDLVREVGFVREQFRQLDALALDDVDSTALAAAREAWDVWHAELSALAAEDALPWAPQDLFARARQALHAAAPLRERVDRHARQLHAAHDKARDALETARQNQKRLAAGQAELNPDTVRLMSYLRDAGIDARPVCDLVRVTDATWQHAIEGYLRSNVEALLIPDKDEERAVKLYRGLSGGRSVYGVKLALSSHARRSRGADEPESGSVAALLEGVNADALAFLRRQLGELRCVETEAELVRSRQGLTRDGLLARGGSIERLRLPAAGDLRIGASDNRARLRVLHEEIEKAEQALRQIEPRLRRADDCQRGLARLADADAVAQALHERVLEHRQVAERYRSAQESRLAALDPDLLRLSEQLRELNAQLAGCEQRADALVGQEAVAAANLERTHGLLEGLRQQEELVARRAVEAFADPDVDPNRVERQREELDEKHPSLEERARRCEERARDSDAQLARLLPEAWSGLAQYARDHGLELDFDASAWRPARIVLQRELTQLRDTELVQYEEEARQAYATAVDTFRTGVASTLYDNFTRLRTQIATLNRTLRASPAFSNNERYQFHYEVVPEFRDLHRFIQRAADIGGEDTLFESAGQVPEAFRALVEDKAATHVANSPLDDYRRFFRFEVQIRQEDRVIGSLSERMRSGSGGEHRAPLYVIAGAALAAAYGKSEAQPGGLGLILLDEFGDKIDAQNARATTNYLRSLGLQLVLAAPDTAQGTLSGVLDSYIELFRDGDLLQAERIEVTEAARTLLLSDQFDLHPELLAAETERIEREQATS

SEQ ID NO: 36837 - protein, 489 aa, Stenotrophomonas maltophilia; identical to SEQ ID NO: 31707

SEQ ID NO: 36838 - protein, 233 aa, Stenotrophomonas maltophilia; identical to SEQ ID NO: 31708

SEQ ID NO: 36839 - protein, 1126 aa, Stenotrophomonas maltophilia; identical to SEQ ID NO: 36380

SEQ ID NO: 36840 - protein, 489 aa, Stenotrophomonas maltophilia
MKHRERISRYRHLREQPQWKLLAADHAPEIIGLLQGLLMDGERTLPSSVLNERLQRALDQLNGDELSRELPRTAQAYIAHWLAQGWLERRLPDGADQEQYELSTAALQAIRFADGLEQARVAATESRLALVIEQLSQLAAQTESDPDARLSALRDERDRIDAEIARVGAGRVIALDGKRALERARQIIGLADELTEDFRRVRDDFEQLNRDFRERIIDDEGERGDVLSQLFEGVDVIGESDAGRSFQAFWRLLNDAEQSAQLDAALEAVLARGFARRLDRNERNFLRGFTSTMLERGGQVHDVLQNFARSLRGFVQSRGYLEQRRLNQLLKQAQSEALALRDEFPAQRGIGRDLQLTTSRLRSWSQWKLHDPRSAQVDGNVEYNDAAAISLESVGDLVASSEIDFRTLRRDLHDLLDAQPRLSIAQALSQREAPQGLGSVIGYLSLGTRFGNVVAGEQELAQWRGGDGQIRRARIPLVWFTQERRHELA

SEQ ID NO: 36841 - protein, 233 aa, Stenotrophomonas maltophilia; identical to SEQ ID NO: 30657

SEQ ID NO: 36842 - protein, 1126 aa, Stenotrophomonas maltophilia
MAISKHTPALFNEGLPDPRLQQFRMRRLQVHNWGTFNGLTEVPIAERGFLFVGRSGSGKSTLLDAMSALLTPPAIVDFNAAAREAERSGRDRNLVSYVRGAWADQQDSGTGEIATQYLRKGATWTALVLEYRAGDGRVVSLVRLLWISGNGTSAGDVRKHYMIAERPFDIAKDLGGFDLDLRKLKQKLADLHHFDTFSGYAERFRDLLGIDNEMALRLLHKTQSAKNLGDLNVFLRDFMLDTPKTFDAAERLVSDFAELDGAHQAVVTARRQVETLLPARAYYNDLKEMHRQRGDDEALKLGVDSFRESRRQALIEARLREMDVRDRGLLGEEAQRRAALDNHTERLAELELQRRQQGGERIEELEREQGRAEAERDRRQAKREQARQAAQQLGAELPDDAHGFAELVERAQNELQDRQRASSALDDAISDRLGGKRDDERRFGEVRAELEAMQRTPSNIPAPMQKLRARLAEETGIAEAALPFVGELIQVRSEEQGWQGAIERVLGGFALSLLVDDKHYNEVAEWVNRTHLGMRFTYYRVRRNDEAFAREPSARSLLHKLELREHVFEGWLRRELGKRFDYECVDAKQLRNVDRGITREGQVKHPGDRFEKDDRSAVGDRRRWILGFNNHDKVGAFEREAQELAKRIAGCETDIARLRGQRDRDNERRLACHELVSINWNEIDIAAPQQRLSDIEATLRDLREGNADLAKLAKQIDAVRADIEQSRRTYEDVRVERGQLVKERDRLDRARQQSRALVLPTLAQEQEAGLAERLQEQGPLSLETLEAHMRQVSNALNEQLSSSQQDLNRIENQLVGCFRRFIQQWPEESGDFTVSVASAEDFLARLERLERDGLPQHEERFFDLLQNQSKNNLLALQRHSAEARKSIGQRLDEVNASLEQVPFNRGTLLTIELSDRRLPEVGEFQQQLREVLSQQQTEQRELAESQFTVLRQLVNRLGSQEGEDKRWRELVLDVRMHVEFIGVELDAETRQQVEIYRSGAGKSGGQRQKLATTCLAAALRYQLGGADSQLPSYAAVVLDEAFDKADNEFTALAMNIFDNFGFQMVVATPLKSVMTLEPFIGGACFVEISGRHDSGVLLIEYDEEGKRLKLPERSRQQANEPEEAEA

SEQ ID NO: 36843 - protein, 489 aa, Stenotrophomonas maltophilia
MKHRERISRYRHLREQPQWKLLAADHAPEIIGLLQGLLMDGERTLSSSVLNERLQRALDQLNGDELSRELPRTAQAYIAHWLAQGWLERRLPEGADQEQYELSTAALQAIRFADGLEQARVAATESRLALVIEQLSQLAAQTESDPDARLSALRDERDRIDAEIARVGAGRVIALDGKRALERARQIIGLADELTEDFRRVRDDFEQLNRDFRERIIDDEGERGDVLSQLFEGVDVIGESDAGRSFQAFWRLLNDAEQSAQLDAALEAVLARGFARRLDRNERNFLRGFTSTMLERGGQVHDVLQNFARSLRGFVQSRGYLEQRRLNQLLKQAQSEALALRDEFPAQRGIGRDLQLTTSRLRSWSQWRLHDPRSAQVDGNVEYNDAAAISLESVGDLVASSEIDFRTLRRDLHDLLDAQPRLSIAQALSQREAPQGLGSVIGYLSLGTRFGNVIAGEQELAEWRGGDGQVRRARIPLVWFTQERRHELA

SEQ ID NO: 36844 - protein, 233 aa, Stenotrophomonas maltophilia; identical to SEQ ID NO: 31708

SEQ ID NO: 36845 - protein, 1126 aa, Stenotrophomonas maltophilia
MAISKHTPALFNEGLPDPRLQQFRMRRLQVHNWGTFNGLTEVPIAERGFLFVGRSGSGKSTLLDAMSALLTPPAIVDFNAAAREAERSGRDRNLVSYVRGAWADQQDSGTGEIATQYLRKGATWTALVLEYRAGDGRVVSLVRLLWISGNGTSAGDVRKHYMIAERPFDIAKDLGGFDLDLRKLKQKLSDLHHFDTFSGYAERFRDLLGIDNEMALRLLHKTQSAKNLGDLNVFLRDFMLDTPKTFDAAERLVSDFAELDGAHQAVVTARRQVETLLPARAYYNDLKEMHRRRGDDEALKLGVDSFRESRRQALIEARLREMDVRDRGLLGEEAQRRAALDNHTERLAELELQRRQQGGERIEELEREQGRAEAERDRRKAKREQASQAAQQLQAELPDDAHGFAELVERAQNELQDRQRASSALDDAISDRLGGKRDDERRFGEVRAELEAMQRTPSNIPAPMQKLRARLAEETGIAEAALPFVGELIQVRSEEQGWQGAIERVLGGFALSLLVDDKHYNDVAEWVNRTHLGMRFTYYRVRRNDDAFAREPSAKSLLHKLELREHVFESWLRRELGKRFDYECVDAKQLRNVDRGITREGQVKHPGDRFEKDDRSAVGDRRRWILGFNNHDKVGAFEREAQELAKRIASCETDIARLRGQRDRDNERRLACHELVSISWNEIDIAAPQQRLTDIEATLRDLREGNADLAKLAKQIDAVRADIEQARRTYEDVRVERGQLVKERDRLDRARQQSRALVLPSLAQEQEAGLAERLQEQGPLSLETLEAHMRQVSNALNEQLSSSQQDLNRIENQLIGCFRRFIQQWPEESGDFTVSVASAEDFLARLERLERDGLPQHEERFFDLLQNQSKNNLLALQRHSAEARKSIGQRLDEVNASLEQVPFNRGTLLTIELSDRRLPEVGEFHLQLREVLSQQQTEQRELAESQFTVLRQLVNRLGSQEGEDKRWRELVLDVRMHVEFIGVELDAETRQQVEIYRSGAGKSGGQRQKLATTCLAAALRYQLGGADSQLPSYAAVVLDEAFDKADNEFTALAMNIFDNFGFQMVVATPLKSVMTLEPFIGGACFVEISGRHDSGVLLIEYDEEGKRLKLPERSRQQANEPEEAEA

SEQ ID NO: 36846 - protein, 456 aa, Kandleria vitulina DSM 20405
MNFWNLFDTFDNEKFFNPLTGENRTIYFQIIQALIAMANSREDLYEQDAKNKIFDYQSLLEEEAMGSTPNDILKYFEECGWIRREQSRNGLEYYVRITSECRILMDGLMSVRRGADNSKGHIFAMYEIVRAASDDTFGYRRLEPYKQILEPLEMHKNALKNELIDLRDNILALIKKLLDTNELSHMGHLLSKEEMIKDFFNNYFRLKNDGNVLAFIPVIINYCRKLEYEDDALIEKMVYDAPREDHVNQETIRLRLSSIISFLDYSYEDNMNIIENRIDEYYVLANQRIRMRLTYHDSLHPAIERFFQIVNNHPDLMEESVENINKKCINIVNQSFIARQSFDLKKKRDMHKGRVMPIKPIVIDEDTIKKEQELLSRSINRAYSKHNVAKYMDGWHIKEKVHINKDMIKNKKDVLTLIAALMYVNNEDFPYEINITDQRLVTDFCEMPDMIIRRRK

SEQ ID NO: 36847 - protein, 205 aa, Kandleria vitulina DSM 20405
MIVDEEMYKVAIRKLLGSTFIMRRKDKKVYDYIMDNEHREFIMSRLEEIGYGLEWNEEDEIVSLIDLSLQNGEETPYNFHRFSPHTIYMLFVLMLIYEEKKANWVERIIVNFEEVQDRLQSLHLDITPSEKRNAYKQFRRYNLISVKDRDLRLNVEEGGTLEIYPSIMFCMKEEQFALVLKDLEEKIKEREEGEDNDYNDENMAD

SEQ ID NO: 36848 - protein, 1081 aa, Kandleria vitulina DSM 20405
MTRTWLINWYGFENSIDRVGLMTDITGNNGSGKSAWLDAIKYAYIGDTGFNSSSDAKGTGSKKRTIDSYVRKLINASRNEYGRPVSQYNEVYAYIMLEWYDDLNDQYLITGCIIKDDAANTTETRWFNIENMSLDDIHPLSEDNIPYTFQQFRKVNDISYAPNKDEAFNEAMSLLGLKISTYNEGRKNYLRKLKSILTYDPKEVGKISDFIKNYVLDDEKKVDISKLKKTKEDIDELNRTLTRLDEEISFIKKIIDQYDQYHHYDHILLLDEIKNAYKRVVEAKNTIEDINNQIEENKEKRAICEKENESLNDEILLLAQEIEGLDETLDEWDVTKSLHHYKDRESQLEEKRRQLQFKKRDLEELMGQLSYIEKKINTFSEENHLDALDHKIISQIKTKKKEAIFNLRRIVEECASINNAKIPLLEQKKRNVHTQSVEEKDIIEALSKNKFVYHEAKENLALIKDIKDVFKKKNIDSPVEMVCKYVTEIDEEWRAVIENYLGWRRYDIIVDPSYLDIAQQVRNKGNYPHARLVNTYQLKDFECVEQSLMEKLSVSNIHAARYLKFLLGKIVAIEDDNVKEYPRGMKKDGTASLNMTIFSLDFHHVNDYVFGESALSLNIEKHEKHLNELMACLSSLEKNQQYAQDFKNDFQAMLSILHDQYDFDIDLHIEENNEALLACQSHVEELTRQMHENIDFENIRHQRELALEKKKNNEQKVANNRYEMDNIDRQIKKLKSVLDTRKKEVEEAKLALEDAREKNEITANEAINQYEDYLSSHKEGNVLPESKAKSLHKKREQLVAGIMGLQGEFGGKYYSEATIVNTLEAEKMFRHRYNDIQMGNIEMIKTDLIEKKSHYRENFKNEFALKILKFCNDAMMELKRLNKELSETGYDTQYVFDVHFKDDSSDYASIIRFGKTLSEGLLTFTSGNVNIEELDQEMDQIVDDIINSDDIDDYADYRNYLSYDILFSNDTIKQGSLSKQIGSNSGAELQIPYTLILISALLMIYNHRDNSSRILFIDEPFEKLSPDNVMKMVRFFKEKKLQCFFCSASNLGDIGQEADVILQAIKYGKDNSMKLLPYHFK

SEQ ID NO: 36849 - protein, 486 aa, Mycobacterium sp. H001
MTDLTIEELFAHNDDVQKSRAVRLLAAKNLAPYITLMERHLDRSAKVSEPQLVAKLDRDLHAVGLGEQSGLALIKSWASDGWLHRASDGAGPDAENVCSLTEDARSALAFVRRLRRADSVATGGSIAGIAAGLKRVATQLDGDPSRLRADIEAQIAELQSYVHAIDDGYRPEPDIVDLEDETRAIAYQMEQVITDIVRYGSMQNEITAGLIDAAEDSDSGFRDRARRMFADYDALFDSRERASYAAFTRTIQDPDQRAALRSDIACVAEGLPELDPGLRDVMKNFFKLVSQQIAEVSRIEQRCAQRIRRFFAAGTTEQARGRARQLNDALASGHALLKVSTADSPIDAELPIGRSAAASIGALSFTIKDTAPPVLAQEAPSGPLDLSGFSALATQVDMAALAETVNRAVIGGPVSLPDMISHVDAPYLGDVIVLWSLALKQDNTLDRESVKVKFRSLDGQDRVMEVPQLMFREPVLATLEEEGAAL

SEQ ID NO: 36850 - protein, 241 aa, Mycobacterium sp. H001
MTTTPLGNINFDDLPGVEPDASAPRTVKGPRFDGDTSELTDKACWALQNLVARRYLSKDGQPELWASMMEHRKVLASRLSELDLRLRVFDDLEVAYAEPAPLENPSAYGARVLRREPLGTYASIVALHLAKIARTAHDEQVLVSRDDIHELFANVSHDIDRDEAMLRDRVDEAIKRLSKAEILQRTRDDEHSYTISPVINALMSAQMIEALQRQYEQLQRGGTAPEDSTDDEEDGDTDDDE

SEQ ID NO: 36851 - protein, 1121 aa, Mycobacterium sp. H001
MNEGLPGRPGDAATQQFWLSRLQVINWGVFDGYHTIEFSRRGTLITGSSGSGKSSLLDAISLAFLSSNRRNFNASSDTTAAGSSMGKRTVDKYVRGLWGELKNPGERPTQMFLRGKGAAWSAIAVTYSGTDGRVITGLVLKWLAPGSDSDSSSRYYLIDADADIRDLCNAWASKGYSAAVFDGAGWRGHKSERWYLEQLYAAVGIQGSSAAQQLLGKAKSLKSVGGLEQFVREYMLDEPESMAAISEALGQITPLVDARAALAVAQRQRQTLGDIEQIQQTYASDAAQLATVDVVDHHTVRDYVDQQRLALAGPEIDLLDTEITRLGGECDEIQSRQDILTGERDKLLGRIAAADSNLAPLKSELAHARARAEEVSRRRTAYDSALWDLGHDEDVESAEEFEAMRVESLRAVTRINAELEAGHDAYVMAAGALSTARDQLRAASSELKRVEHVGTSVPPDEDRMRGEIAAALGLTAKELPYVCELMDLRPGQERWRRSVEKVLRSTGLCLLVPDQHHRQVLRYVNENPMRGYLQMERVIPSGAPRRAEPGTLADCLRLTNPNHECASAAMNLVAAVGDYVLVDSPDEFSKHRRAVTDQGLRKDGDRRAVKDDRRELRASQYIYQGNAGDKRAALSDDVVEAQQAVGDAEKFIGEMDTKREELRSEVVRWSKLHSQYEYWSQIDTDSAEAAVARLQDQYDAMLEANPDLTGLQQQADSYLDEIKKLSERIGALRRQESEHDSRRTRLLDLLDNLNPREVGGHTRSGIEAYVPQLSSSLDVLEPDTYRLELWRQIEKDQSVLRESVTRSRNELNRILNAYDRDFPDSIPNDSENFDEKIHDYVALCRRIDERDLPAAYEQMLRLITEQAPTAVLRLHQLAEEEAHRITDQIDRVNSGLGSVEFNRGTRLTLRAEPKALEAVGELNERARRISGRAVAVSMGDEKAIHDQYQDILQLRNLLAAETPEARQWTRDALDVRNRFVLYCEERDAATGEAIRTYSNAGANSGGEQEKLMAFCLAGALSFNLANPETGDNRPVFAQLMLDEAFSKSDPQFAQQALSAFRKFGFQLVIVATVQNTTTIQPYIDSVVMVSKPDGPGVRPVASTRTVPIGELGDVRKAVNAR

SEQ ID NO: 36852 - protein, 508 aa, Bradyrhizobium pachyrhizi
MALFRHLHDDAFLAFSRDHKHLYAACLLDLHERFFSGAPAFPAPQQVVHAIYDVMRANPALWDDGDDFGALPEMISARRRRIRKVDVALTSEKGDKALGLARQLYTRLVAWGWLEEEEYGLRVTVDMAMGPLLVIQRLASLNKDLSQRFGGLIVQIRLNLEAVEKLTPEITDRKQREAALAVREARNQADQFTKSLRAILADLKRIRRTVMESKTVGTRLEAFFEEFVDQLLLKDFESILTVNHPYRFRDVIVDLARRISYTSETMQVLAEEYAAASMASDLEEGRMAAADDLLAIESIFEQIGEMFDRIETFRRQLEARVRNTIKYAERGAQGLVGRAGDLVRRLDALLRKGRHDEATVEWNVEPLRSPWSEHHQAPARQPRRPVEARELAGPPSDPLYELRKQLRLEYIARIAPRPEDVKRFLEGQVPPFATKEARFMQIGTVDDFLAFDCARRYALTGDVPAQIAAGFDLEPSPDTPPHDSEWLRCANFVVRRSGTTAKGRAVHA

SEQ ID NO: 36853 - protein, 212 aa, Bradyrhizobium pachyrhizi
MLSEFDNIERSAGAEKAADLRKALHFLLRRQFVFAGDPRTGTVYNTMMDGRFRDVVDGFFDSCGYRVHRDPEAQWAGIVAMDEDVPLPRMKLDETIVMLVLAAYWQQEVNVGAVEDRAVVVATLNDLFDRYREMAQHSGGGAISAARFRDILREAAQRSLVEIGDFDDEQQDWEVRIRPMIKLISGGDALQRLERYVKSEEARFPQVAGDDA

SEQ ID NO: 36854 - protein, 1145 aa, Bradyrhizobium pachyrhizi
MMQLRHLTMVNWHLFDVADIEVTGHVGVLGENRSGKSTILDMAQVVLTGGNRRFLRLNAVAGDGGRSRGGSKRSVVDYCLGTLGEDQRRRDEARTYIALGFEDTDGARPSVTIGMALEARKSDSRETVLALFIAVGAVLTSNDFIEQRGKALFPAQWEDARARIISAVGEGNFVNHRDRASDYVREYMRHLLPHSPYGEQNANALQKSIVNAMTLDHNQTATQFVRNYILEDSPIGIKELRESIQTYRNISDTIRKMRLKLEALKELKAILTALEEALETKFREQWIGKRAEWLAARAINRDFRVRLRLANAQRDAAAGELKFLNEDIRAIDDELQRLTEAIAEHDAKTGRKSLQQTAAVAEQSAQRAAADFKARIDTIRRLQPLCAMGGRGFDDFIPAVDRLLAAVGAASVAAVSDELVAAENALTILGGQRIAKIDEARQEVIAKASQLRTQRDDLMERVRQHASGGARAHLEPDTERLCLRLRQKGMAPRVLCELIEVAEPGWTGAAEALLGRDRDAVFVDRPHIGDATAIFKEGRREFRRTSLVSLNKLEQFRAKPEPGTFPSIFRTEDPDALSFIMRRYGSVRLADTLDQFNRPGRAIMKDGLYDDGLVRTHRSIEPSQHKIGKAAQANALRALHEQADELEVSLRQAAKEAEIADEAFMALKALCDAPAGDLKTCAAAFAAVQAKMADAQAKLAALDDAGDGGLRQKKRAQQQLKDRRIAERETQQTAFNKHDGDVRAAKSRLGDGENVPGSELNLKIAWSLFVKNLPLYSASKGRPVYRARLDARAHKNEADRHRSMAEKAVKDADAANDERGRIERQVREFLDGYFDDFGVSSQIGIESEPLQEVKPWMAQLIEEIESNELRRYERQARDAAEKASMLLRGEFINALSARIGKMERELQSLNRSLYAHPFHNERYSFHRTQVVEFQPILKIIEIGKTSPEALDMLFRGDVSDDFPHKDTILALEALLEDPDKDFTQFEDYRNFYTFEIHMEDVGTGRSTRWEQRRGTGSGAEQQVPIYVAIGASLAAVYGSAERRAGKPAGFALAMFDEVFSKMDGKNQRQMMSFYKNLGLQFVIAAPFEKRVAVLEHMDTIVEVDRIGEQSRATVVSLKEKAKRELRAIDPDLMSADDLAARLAAE

SEQ ID NO: 36855 - protein, 392 aa, Bradyrhizobium pachyrhizi
MVRRFSEANGLLNDLLDRYEGGTANPIAHPDYDAFPNVVAADVFLRQIARAEAVGAVSLARGRGTRRDQIVHVRLQAADALYHYLGRVPAAQIAQEAGRRLCADIALDWRLVEAAAAIAETWGRAKSWHGFASSDVDKLRDAFALAQAILENRHLDVDYRTFSRRTVGDSKALERIEGAVVRLLGGILELPPGARPREALRTIGLERFAPPLLIAGRIDLDGADLSQISPRYLGIPPKEADRIRFRRPPAYLLTIENFASFNRHVAEADPDREGVTMYVGGYPSLATQQALRTITQMVSGNTPIFHWSDIDPDGTWIFHTIERAVGRPIRPHLMSVEIAERSGQVPLRKAAPARCPPDSGIAMLAAYLAGDGAKTLEQEELNPVLPDPTAPP

SEQ ID NO: 36856 - protein, 509 aa, Bradyrhizobium manausense
MSLFRHLHDDAFLAFSRDHKHLYAACLLDLHERFFSGAPAFPTPQQVVHAIYDVMRANPALWSEGDDFGNLPEMISAGRRRIRKADVALASEKGDKALGLARQLYARLLAWGWLEEEEYGLRVTVDMAMGPLLIIQRLASLNKDLSQRFGGLIVQIRLNLEAVEKLRPEITDRKQREAALAVREARNQADQFTKSLRAILADLKRIRRTVMDSKTVATRLEAFFEEFVDQLLLKDFESILTVNHPYRFRDAIVDLARRISYTPDTMQVLAEEYTASSMAADVEDGRMAAADDLLAIENIFEQIGEMFERIEAFRRQLEARVRNTIKYAERGGQGLVGRAGDLVRRLDALLRDGRHEKATVEWSIEPLRSPWSEHHQAPARQPRRPVETRELAGPPSDPLYELRKKLRLEYIARIAPRPEDVRRFLEGQVPPFATKEARFIEIDSVDDFLAFDCARRYALTGEVPALIAAGFDLEPCPDTPPHDSEWLRCANFVVKRSGPHRNARAAHAQ

SEQ ID NO: 36857 - protein, 212 aa, Bradyrhizobium manausense
MLSEFENIERSSGAEKAADLRKALHFLLRRQFVFAGDPRTGTVYNMLMDGRFRDVVDGFFDSCGYRVHRDPEAQWAGIVAMDEDVPLPRMKLDGTIVMLVLAANWQQEVNVGAVEDRAVVVATLNDLFDRYREMAQHGGGGAISAARFRDILREAAQRSLVEIGDFDDEQQDCEIRIRPMIKLISGGDALQRLERYVRSEEARFPQPAGHEA

SEQ ID NO: 36858 - protein, 1144 aa, Bradyrhizobium manausense
MMQLRHVTMVNWHLFDIADIDVTGHVGVLGENRSGKSTILDMAQVVLTGGSRRFLRLNAVAGDSGKSRSGSKRSVVDYCLGTLGEDQRRRDEARTYIALGFEDTEGARPPVTIGMALEARKSDSRETVLALFVVIGAVLSSKDFIEQRGQSQFPAQWEEVRARVVAMVGDGNFVNHRDRAGDYVREYMRHLLPHSPYGEQNASALQKSIVNAMTLDHNQTATQFVRNYILEESSIGIKELRESIQTYRNISETIRKMRLRLEALRALRVVLAALEEALETKFREEWIAKRAAWLAARATNLDFKTKRRTEMARRDAAATELESIDEDVRAIDNEIERLTAAIAEHDAKTGRKSLQQTADVAAQAAHRASADFKARLDNIHRLHPLRAMCADAFEDFVPALERLLTVATGVDIALASDELSAAEKSFAVSGAKWLPKIDEARQMIIADLSGLRGRRDEVLERIRQHASGGARAYLGDDTELLCRRLRQKGMAPRVLCDMIEVAEPEWAGAAEALLGRDREAVFVDRAVISAATAIFKEGRREFRHASLVSLNKLEQFRAKPERGTFPSIFRSQDPDAMAFIMRRYGTVRLADTLDQFNRPGRAIMKDGLYDDGLVRTHRWIEASQHKIGKAAQANALRALQDRAEELDRILTDKSKEAQAAEQAFAALKNICDGQDDLNACAAAFAAAQTEIAEAQAMLDALDGVGDGGLGDKKRAQQKLKDKRLGERKTQQRVFGEHDGEVRSAERRLGEGENVPGSELNLRVARSIYRKTFPLYSAAKGRVVYRERLDAVAQKGFAEKHRAIADKALKDADNSDTERSRIERRVRELLYDYFDQFGMSSQVGAESEPLREVKPWMEQLISDIESNELHQYERQAREAAEKASTLLRGEFINALTARIGKMERELQSLNRSLYAHPFHNERYSFHRTQVVEFQPILKIIEIAKTSPEALDMLFRGDVPDDFPHKDTILALEALLEDPDKDFTQFEDYRNFYTFEIHMEDVATGRSTRWEQRRGTGSGAEQQVPIYVAIGASLAAVYGSAERRAGKPAGFALAMFDEAFSKMDGKNQRQMMSFYKNLGLQFVIAAPFEKRVAVLEHMDTIVEVDRIGEQSRATVVELKEKAKRELMAIDPDLMSEDELATRLAAE

SEQ ID NO: 36859 - protein, 399 aa, Bradyrhizobium manausense
MARRFTDANGLLNDLVDRFEAGAASPIAHPDYAAFPSVVVADAFLKQIRDVESAGAVFLGWGRGAKRDQVAHVRLASAEILYRYLGRTPASRIAEDAAARLVAGSALHGQLKNSASQIAELWGRGKTWHGFASSDVDTLRHAFVLAQAILDNKHLDVDYKTFSRRTVGHSKTLERIEGAVVRLLSGIMQFPPGARPREALRAIGLERFAPPLLIAGKIDLQGADLSTIAPLYLGIAPKEADRVRFREPPAYVLTIENFASFNRHIAEADPGRLGMTMYVGGYPSLATQQALRTIGGMVSEQTPIFHWSDIDPDGTWIFHTIERAIGRPIRPHLMSVEIAERSGQVPSKKSAPARCPPDSGIAALAAYLAEDGAKTLEQEELDPILPGVATLTSAQTRRD

SEQ ID NO: 36860 - protein, 486 aa, Mycobacterium sp. H002; identical to SEQ ID NO: 36849

SEQ ID NO: 36861 - protein, 241 aa, Mycobacterium sp. H002; identical to SEQ ID NO: 36850

SEQ ID NO: 36862 - protein, 1121 aa, Mycobacterium sp. H002; identical to SEQ ID NO: 36851

SEQ ID NO: 36863 - protein, 486 aa, Mycobacterium sp. H072; identical to SEQ ID NO: 36849

SEQ ID NO: 36864 - protein, 241 aa, Mycobacterium sp. H072; identical to SEQ ID NO: 36850

SEQ ID NO: 36865 - protein, 1121 aa, Mycobacterium sp. H072; identical to SEQ ID NO: 36851

SEQ ID NO: 36866 - protein, 486 aa, Mycobacterium sp. H054; identical to SEQ ID NO: 36849

SEQ ID NO: 36867 - protein, 241 aa, Mycobacterium sp. H054; identical to SEQ ID NO: 36850

SEQ ID NO: 36868 - protein, 1121 aa, Mycobacterium sp. H054; identical to SEQ ID NO: 36851

SEQ ID NO: 36869 - protein, 486 aa, Mycobacterium sp. H003
MTDLTIEELFAHNDDVQKSRAVRLLAAKNLAPYITLMERHLDRSAKVSEPQLVAKLDRDLDAVGLGEQSGLALIKSWASDGWLHRASDGAGPDAENVCSLTEDARSALAFVRRLRRADSVATGGSIAGIAAGLKRVATQLDGDPSRLRADIEAQIAELQSYLRAIDDGYRPEPDIVDLEDETRAIAYQMEQVITDIVRYGSMQNEITAGLIDAAEDSDSGFRDRARRMFADYDALFDSRERASYAAFTRTIQDPDQRAALRSDIACVAEGLPELDPGLRDVMKNFFKLVSQQIAEVSRIEQRCAQRIRRFFAAGTTEQARGRARQLNDALAAGHALLKVSTADSPIDAELPIGRSAAASIGALSFTIKDTAPPVLAQEAPSGPLDLSGFSALATQVDMAALADTVNRAVAGGPVSLPDMISHVDAPYLGDVIVLWSLALKQDNTLDRESVKVKFRSLDGQDRVMEVPQLMFREPVLATLEEEGAAL

SEQ ID NO: 36870 - protein, 241 aa, Mycobacterium sp. H003
MTTTPLGNINFDDLPGVEPDASAPRTVKGPRFDGDTSELTDKACWALQNLVARRYLSKDGQPELWASMMEHRKVLASRLSELDLRLRVFDDLEVAYAEPAPLENPSAYGARVLRREPLGTYASIVALHLAKIARTAHDEQVLVSRDDIHELFANVSHDIDRDEAMLRDRVDEAIKRLSKAEILQRTRDDEHSYTISPVINALMSAQMIEALQRQYEQLQRGGAAPEDSTDDEEDGDTDDDE

SEQ ID NO: 36871 - protein, 1121 aa, Mycobacterium sp. H003
MNEGVPGRPGDSVTQQFWLSRLQVINWGVFDGYHTIEFSRRGTLITGSSGSGKSSLLDAISLAFLSSNRRNFNASSDTTAAGSSMGKRTVDKYVRGLWGELKNPGERPTQMFLRGKGAAWSAIAVTYSGTDGRVITGLVLKWLAPGSDSDSSSRYYLIDADADIRDLCNSWASKGYSAAVFDGAGWRGHKSERWYLEQLYAAVGIQGSSAAQQLLGKAKSLKSVGGLEQFVREYMLDEPESMAAISEALGQITPLVDARAALAVAQRQRQTLGDIEQIQQTYASDAAQLATVDVVDHHTVRDYVDQQRLALAGPEIDLLDTEITRLGGECDEIQSRQDILTGERDKLLGRIAAADSNLAPLKSELAHARARAEEVSRRRTAYDSALWDLGHDEDVESAEEFEAMRVESLRAVTRINAELEAGHDAYVMAAGALSTARDQLRAASSELKRVEHVGTSVPPDEDRMRGEIAAALGLTAKELPYVCELMDLRPGQERWRRSVEKVLRSTGLCLLVPDQHHRQVLRYVNENPMRGYLQMERVIPSGAPRRAEPGTLADCLRLTNPNHECASAAMNLVAAVGDYVLVDTPDEFSKHRRAVTDQGLRKDGDRRAVKDDRRELRASQYIYQGNAGDKRAALSDDVVEAQQAVGDAEKFIGEMDTKREELRSEVVRWSKLHSQYEYWSQIDTDSAEAAVARLQDQYDAMLEANPDLTGLQQQADSYLDEIKKLSERIGALRRQESEHDSRRTRLLDLLDNLNPREVGGHTRSGIEAYVPQLSSSLDVLEPDTYRLELWRQIEKDQSVLRESVTRSRNELNRILNAYDRDFPDSIPNDSENFDEKIHDYVALCRRIDERDLPAAYEQMLRLITEQAPTAVLRLHQLAEEEAHRITDQIDRVNSGLGSVEFNRGTRLTLRAEPKALEAVGELNERARRISGRAVAVSMGDEKAIHDQYQDILQLRNLLAAETPEARQWTRDALDVRNRFVLYCEERDAATGEAIRTYSNAGANSGGEQEKLMAFCLAGALSFNLANPETGDNRPVFAQLMLDEAFSKSDPQFAQQALSAFRKFGFQLVIVATVQNTTTIQPYIDSVVMVSKPDGPGVRPVASTRTVPIGELGDVRKAVNAR

SEQ ID NO: 36872 - protein, 486 aa, Mycobacterium sp. H063; identical to SEQ ID NO: 36869

SEQ ID NO: 36873 - protein, 241 aa, Mycobacterium sp. H063; identical to SEQ ID NO: 36870

SEQ ID NO: 36874 - protein, 1121 aa, Mycobacterium sp. H063; identical to SEQ ID NO: 36871

SEQ ID NO: 36875 - protein, 486 aa, Mycobacterium sp. H070; identical to SEQ ID NO: 36869

SEQ ID NO: 36876 - protein, 241 aa, Mycobacterium sp. H070; identical to SEQ ID NO: 36870

SEQ ID NO: 36877 - protein, 1121 aa, Mycobacterium sp. H070; identical to SEQ ID NO: 36871

SEQ ID NO: 36878 - protein, 486 aa, Mycobacterium sp. H079; identical to SEQ ID NO: 36869

SEQ ID NO: 36879 - protein, 241 aa, Mycobacterium sp. H079; identical to SEQ ID NO: 36870

SEQ ID NO: 36880 - protein, 1121 aa, Mycobacterium sp. H079; identical to SEQ ID NO: 36871

SEQ ID NO: 36881 - protein, 486 aa, Mycobacterium sp. H092; identical to SEQ ID NO: 36869

SEQ ID NO: 36882 - protein, 241 aa, Mycobacterium sp. H092; identical to SEQ ID NO: 36870

SEQ ID NO: 36883 - protein, 1121 aa, Mycobacterium sp. H092; identical to SEQ ID NO: 36871

SEQ ID NO: 36884 - protein, 486 aa, Mycobacterium sp. H101; identical to SEQ ID NO: 36869

SEQ ID NO: 36885 - protein, 241 aa, Mycobacterium sp. H101; identical to SEQ ID NO: 36870

SEQ ID NO: 36886 - protein, 1121 aa, Mycobacterium sp. H101; identical to SEQ ID NO: 36871

SEQ ID NO: 36887 - protein, 486 aa, Mycobacterium sp. H110; identical to SEQ ID NO: 36869

SEQ ID NO: 36888 - protein, 241 aa, Mycobacterium sp. H110; identical to SEQ ID NO: 36870

SEQ ID NO: 36889 - protein, 1121 aa, Mycobacterium sp. H110; identical to SEQ ID NO: 36871

SEQ ID NO: 36890 - protein, 486 aa, Mycobacterium sp. HXVII; identical to SEQ ID NO: 36869

SEQ ID NO: 36891 - protein, 241 aa, Mycobacterium sp. HXVII; identical to SEQ ID NO: 36870

SEQ ID NO: 36892 - protein, 1121 aa, Mycobacterium sp. HXVII; identical to SEQ ID NO: 36871

SEQ ID NO: 36893 - protein, 486 aa, Mycobacterium sp. HXXIII; identical to SEQ ID NO: 36869

SEQ ID NO: 36894 - protein, 241 aa, Mycobacterium sp. HXXIII; identical to SEQ ID NO: 36870

SEQ ID NO: 36895 - protein, 1121 aa, Mycobacterium sp. HXXIII; identical to SEQ ID NO: 36871

SEQ ID NO: 36896 - protein, 504 aa, Bradyrhizobium retamae
MSLFRHLHDDAFLVFSRDHKHLYAACLLDLHERFFTGAPAFPTPRRVVHAIYDVMRANPSLWNEGDGGLPDVISAGRRRIRKADLAFASEKGDKALGLARQLYSRLVDWGWLEEEEYGLRVTVDMAMGPLLVIQRLASLNKDLSQRFGGLIVQIRLNLEAVEKLTPEVTDRKQREAALAVREARNQADQFTKSLRAILADLKRIRRTVMESKTVGTRLEAFFEEFVDQLLLKDFQSILTVNHPYRFRDAIVDLARRISYTPDTMQVLAEEYAAASMASDVEDGHTAAADDLLAIENIFEQIGEMFERIETFRRQLEARVRNTIKYAERGAQGLVGRAGDLVRRLDALLRDGRHDQATVEWSVEPLASPWSEHHQAPTRQPRRPVEARELSAPPSDPLYELRKQLRLEYIARIAPRPEDVRKFLEGQVPPFGTKEARFVEIETVDDFLAFDSARRYALTGDVPPQVAGGFDLQPSPDTPPHDSEWLRCANFVIRRGGLRKGVAHA

SEQ ID NO: 36897 - protein, 212 aa, Bradyrhizobium retamae
MLSEFENIERSAGADKAADLRKALHFLLRRQFVFAGDPRTGIVYNTIMDGRFRDAVDGFFDTCGYRIHRDPEAQWAGIVAMDDNVPLPRMKLDETIVMLVLAAYWQQEINAGAMEDRAVVVTTLNDLFDRYREMVQPNGGSAFSSQRFRDILKEAAQRSLVEIGDFDNEQQDCEVRIRPMIKLISGGDALQRLERYVRSEEARFPRDAGDEA

SEQ ID NO: 36898 - protein, 1145 aa, Bradyrhizobium retamae
MMELRHLALVNWHLFDVADIAVAGHIGVLGENRSGKSTILDMAQVVLTGGNRRFLRLNAVAGDSGKSRSGSKRSVVDYCLGTLGEDQRRRDEARTYIALGFEDTERERPSVTIGMALEARKSDSKETVLALFVAVGTVLTAKDFIERKGAQQFPAQWEDVRARIVAAVGEQNFVNHRDRAGDYVREYMRHLVPHAPYGEQNASGLQKSIVNAMTLDHNQTATQFVRDYILEDSRIGIKELRESIQTYRNISETIRRMREKLDALKALRAILAGLERTLETKFREEWIARRANWLAARATNRDLRARLRDETAQRAAATAELAFIDEDVKAIDREIERLTTAIAEHDARTGRKELAQTAIMADQAAQWALSEFRGRVENIQRLRPLLAMYGCGFDEFIPSVAKLLGAAKNAEIGAVADELSAAEQGFVSSAPAWSAKVDEARQAIMAEASKLRAQRGDLLERIRQHASGGARAHLEPDTERLCLRLRQKGMAPRVLCELIEVADPEWAGAAEALLGRDRDAVFVDRPDIGAATAIFKEGRREFRHTSLVSLNKLEQFRAKPDRGTFPSIFRTEDPDALSFIMRRYGSVRLADTLEQFNKPGRAIMKDGLYDDGLVRTHRSIDPSQHKIGKAAQANALRALQDQTEALEDAVSQKAREAEAADAAFAALRSLCTDGSAGLKSCAAAFSAAEAEKADAQARLSALHGAGDGGLREKKEAQLDLKERRRVERETQQRAFNKHNGEVRLIEGKLGDGENVPGSELNLRVAQSIFLKNRSLYAAMKGRAAYRSRLDTRLQKSEAEKHCSIADKALKDAEASDVERKGIERRVREFLDGYFDDFGMSSQVGIESEPLQEVKPWMEQLIDDIESNELRRYERQAREAAEKASTLLRGEFINALTSRIGKMERDLQSLNRSLQAHPFHNERYSFHRTQVVEFQPILKIIEIGKTSPEALDMLFRGDVPDDFPHKDTIVALEALLEDPEKDFTQFEDYRNFYTFEIHMEDVATGRSTRWEQRRGTGSGAEQQVPIYVAIGASLAAVYGSAERRAGKPLGFALAMFDEAFSKMDGRNQRQMMAFYKKLGLQFVIAAPFEKRVAVLEHMDTIVEVDRIGEQSRATVVSLKVKAKRELMAIDPDLMSDEDLAARLAAE

SEQ ID NO: 36899 - protein, 396 aa, Bradyrhizobium retamae
MPRRFTDAKELLGDLLDRFEAGASSPIAHPDYAAFPSVVAADAFLKQIKEAEEIGAVSLGWGRGARRDQVAHVRLMSAGVLYGRLGRTPASRIAEDAAGRLVAGLSLHDGLKESAAGIADVWGRGKTWHGFASFDVERLREVFALAQAILDHKHLDVDYKTFSRKTVGDSKTLERNEGAVVRLLSGILEFPPGARPREALRTIGLERFAPPLLIAGRIDLDGADLSRISPHYLGITPKEADRIRFREPPVYVLTVENFASFNRHIAEADPGRLGTTMYVGGYPSLATQEALRVIAGMVSECTPIFHWSDIDPDGTWIFQTIERAIGRPIRPHLMSIEIAKQFGQVPAKKAAPARCLSDSGIAALATYLAEEGAKTLEQEELDPVLPQVTARRLALT

SEQ ID NO: 36900 - protein, 471 aa, Bradyrhizobium lablabi
MKLFGYLPETLFKPLSGPKKHVYARLLMRLYERLYSARILETPLREEVVKQIEIGLSEFAIRSTGELSEGDPEEDQTTSQAHYLAYYRLRDTGWLTEETEKWRTYVDMNPDAFMVLGAITDFGNSRVRVAGAVVDVKNNLEAANREPETMAQGLANAHDTALRFARSMRRILAGMREIEDRILGNPNAAAILRTFFQDFVDGLLIADYKQLKTSNNPYRHRRTIASLAGDMLADAERIGKIARAYIEQGVMAPGATVATAEERVIAELEKIKSVFEDVGPFMDKIEDFRDRLERRIRTTVHYMDVMGEGAAERIVRLIEQLSKIGTDEVEIRLRSPDVGLPITSLALYTPPPPKAPPERTRFKVPKQDPYLRAYVQATTEFDRMVRVSDQKLLEFARRHMQGRDAVSSSEIEIESIPDLFAYRAIPNLAAVGRSVRLGEFTITLEEGRTTNDWIDVTAFRIDRTRTTADAA

SEQ ID NO: 36901 - protein, 213 aa, Bradyrhizobium lablabi
MLRDLSKIIDDADSEGQYGDQLQKELRQAAQTLWRAQFIYENDWGVKTSYELLRRYTGYFENLFDALGYRVVGRPNDGYVGLVANELPQRQSMKLDESLLLLVLRLHYEEAFTRFEAKEFGEVEVESEQILQIYEDRTHRERPNFGRVKEILAGFRQRGLVRIEDRDDRNFTLFLRPALPMVVSKDTLGSLEEFVSRSTAATAKTDAASEVQA

SEQ ID NO: 36902 - protein, 403 aa, Bradyrhizobium lablabi
MTDVRTTDAGVEFLERLLERSERNPDRSRPASAAPEYDLLSTAQQVSRFHDLMSAAERFGAVEVQRGKRDRSHLIERVRVLNPELLARHLGRPTASATAQRVRQELQRVAATGEPWVATLLDEMAVRWARGEAAYRLTAAQADAAKEFFTLLASISREEARGLDARTFSLKATDDTKAFDRHASRLAAIIAVRIGQPGAAADVVWTHIGLERFSHPIYLRGPVAVEGASGRLADGRAKPFASIHPEMLSQLSVFEQPTAILTIENYASFNRQVREIEDGSLVVYTGGFPAAGVTELLSKVLVTVPAEVPFLHWGDVDAGGLRIFRHLEENLPRGPRPHLMTKELAEKAGQPANPEPSLASIARSESAIRNLADWLAFGSDVRHLEQEALEPRSVVPAADHGLG

SEQ ID NO: 36903 - protein, 502 aa, Aureimonas sp. AU20
MKARPPAREPTAVTRPTPQVRTPELRTTKVRMPLFDVLPPDLFKPLASSSRRLYADLLLHLHHRTFTLSASVPRRAEVIAEIDAFLARRAPEDAALEDEGPNTKAEERARTAYERLVETGWLVEYRERYLKLVDLDPEASGLLHLLSDIERGETVSYGGAVLSVLSALESAAADPAERSENLRNALRGASEFMAHMRTVSVSLRQAEERILRQPSLREVFRHFFESFVERHLIRDFKTLHTRDNPFRFRGGILRQAADMSASAEMVAALGAAYTREGRALNVEAGVARVREELATIASVFEAAEEHLAGIDATVSRIERRIANTARYMDRIQHRSEVGLVDAMKAVAAAKGDEIPVGIALLPRILPLGPVHIPAPRRDKPAIIRTVLTERAPDPAALRYAKAKEEYVRRTRVTPERLSSYVERALASRPEMRGRDMPIESVDDFVAFQRLREIPSIFNGALARSYEIVLLTDRCANDWISCQDFLIRRRTLAETSKASQNAA

SEQ ID NO: 36904 - protein, 250 aa, Aureimonas sp. AU20
MQREIDEFRDIVDGEWAGGHMAGRRPTGEELTRALQVLITRQCVYSHTPGIGRTYDMVRAYPTFFERYFGSLGYRLVISPRDQMVALTVPADEARYDGVFERLRKDETLVLLALRLLWEEALRAHEVGDGGVVETNTDDLVDRLVAVTQTPPPEETRLLDILRMFARHGALRLGERDRTRRVSTLAILPGIAILVPDSYVRDLLLWAVEPPPGTSSAAGDEGAEAVSDDANEPAGDEPANETKTEGEDDV

SEQ ID NO: 36905 - protein, 1139 aa, Aureimonas sp. AU20
MYSLSRISLINWYLIDAKDIEIRGEAALIGPTGAGKSSIQDAIQSVITGVNQNRLNLNASASGRSSRSVLEYCLGMTGDPAEDGKPLRASCETILALTFRNYYTEEPITVGVALSARHGDSREEVLSRFVIPGHAFSVAHVRRRVKGVTTVAPWSEIASALRAEHPGMEEFRNSAEKFTAHMLGLMRGGAAVPNPKHFLRAFSNALAFKPIFDPTLFVRDFVLEPDPLDVERVRTSISTWRELERLIADVEARHKHALRIADRFRLWAGARLSADRQRWRAAALESRRLAHELKASRAVLDAREGELRLERGVLDSRRDWIRGWDEEIRSKEALLGAAGGEAQLRQIDAEDKLAARDLAEAEKQWTRLREALAHLVRLHDALKPSDPRASDAARQALALVPAELPPGEALRGRGERLQALVEEATRAESWQHELDAKADALLDETRRLQERLERVEGGLQRPQGALLSREATKLLSALQSDGIPAMPLCDVVEVADPSWQYAAEALLGRGREAIIVQPPLLQRAFDLMWSDRNTFSGCTLVKTSATRSTNAHVPAGSIVEALRTVDEHAKAFLAVRIGAFRKAETDAELDRLDRGVMRNGKTSSGMGLSVQRDLRELLFGRGGGGGDLTDLKAEAIALRARLTEARDRLRTVRDAGRLLGPLLDTLRAEPGPFDLEHRLGTAARRRDTLSRDRALVEESDAKGLRAELADIRAERDAHAKELREEVEPRVQALQQMVATARAKLDMARGQFRAAVTQRRRTFALLDSETNRELLAIDREGGDQTAPAFCGALRDEVKAGEAKRADVMSWLAALRNEARTGAEEASAAARREQLSALRDLADYAATWRVSVPPIDADGMAAGCRFVFAEAERLETNELRGYRDSCAKAGEEMRRILREDLLTRLSDKLGKVTYRLEGINRLLKRHRFTGQTYAFTFAVNGKFQRMHDLALKAGEGELTDEIFETSMDEVEAMIEGGEDAALLADYRQYYTFEIVMTDANGGRTTLSSRALKGSGGEAQVPFYVAIAASLALAYFPGHIAGRPVGMGLALFDEAFNKLDVPNTQALLRFFRDLGLQVLIAGPEDKRATFTEVLDTIILVNKALDGRAVYIDTEHPGEAAKAALAELNPDHRGVEGFRSAAE

SEQ ID NO: 36906 - protein, 450 aa, Pseudomonas aeruginosa; identical to SEQ ID NO: 32527

SEQ ID NO: 36907 - protein, 220 aa, Pseudomonas aeruginosa
MDGEQPAMSANIQVDERRTPQRVREAVQEMLKYGLLEESHKPNLYRSALTNIEVVDRILEPLDLAMGVDEVRGLVFVTVRQGEVAEQDDWSHPLVRRQRLNLEQSLLIAILRQHFIAYEQESGTGASQALVAVDELIPQLQVYLGELGSEAKERNRIITLLDQLKGHGLVSALDAHDRVIIRPIITHLANPENLQALVVWLREQVEGAVTPAAGGEEDEA

SEQ ID NO: 36908 - protein, 979 aa, Pseudomonas aeruginosa
MGAVLWFEGTSSSASDLKKLWLLSESPEQTLEHWLSQHHAGGMRALRQMEKDGMGIWPYPSKKAFLARLRDYFEVGENAFTLLNRAAGLKQLNSIDEIFRELVLDDRSAFERAAEVASSFDDLTDIHRELETARKQQRSLQPVADGWERYRALQEQLQDKQALEGILPVWFAEQGYRLWLAETNRLEKEHKQAELDQAQCRSQLEIQKGVVDQHRQRYLRVGGAGIDQLRGRIADWVRECDKRRLKAEQYQRLAKGLGLADELSAAALEENQQQIAARLEILAQQTTDARQKAFDAGLVQQELNGRLQSLQQERAEVERRPGSNLPGHFHAFRGDLAQELGVDESALPFVAELVQVKPEELAWRGAIERAIGSHRLRILVPQGSSQAALRWVNQRHNRLHVRLLEVKEPSSRPVFFDDGFTRKLTFKEHPYREAVKALLADNDRHCVESTEQLRHTPHAMTAQGLMSGKERFFDKQDQKRLDEDWLTGFDNRDRLAFLAEQIREVNEQLVPAKLALDAAQGDVGQLESQASLLQRIEELQFDDIDRPGAERQLQSLRTQLDTLTRPDSNLAVIKAELDQAEALRESLDQQLQRLIEQCVQLKTQFDQAASATRKAYRGAEKGLSDTQRELAQAHFPILSTDDLGDIDELERKHTRELQGQLKTLGEKLGDQKTELAKRMSDALKADTGALAEVGRELVDVPRYLERLRVLTEEALPEKLKRFLEYLNRSSDDGVTQLLSYIDHEVSMIEERLDDLNSTMQRVDFQPGRYLRLVAKKVIHESLRTLQHAQRQLNSARFIDDEGESHYKALQALVGLLKDACEHSRNQGAKALLDPRFRLEFAVSVIDREGNNLIETRTGSQGGSGGEKEIIASYVLTASLSYALCPDGSSRPLFGTIVLDEAFSRSSHAVAGRIIAALREFGLHAVFITPNKEMRLLRHHTRSAVVVHRRGVESSLVSLSWEALDEHHQQRIRAMHEVAH

SEQ ID NO: 36909 - protein, 381 aa, Pseudomonas aeruginosa; identical to SEQ ID NO: 30518

SEQ ID NO: 36910 - protein, 206 aa, Pseudomonas aeruginosa
MGDSGELALDTRRALVQLLAGPSLDGRRHPKLWPILVRDEAVIRRRLAELFLELVIDRDVQVAFTRQADTGDLEVPLLLRRAQLTFIDSILLLHLRQRLTQADSQGDRAVVSTDEIMEFLTLYERASNTDRAGFVKRVHASIEKIKKHSILQKIRSSEDRFEISPTLKLLFSAEEIQALTHLYQRMAAGETPAQLAQTESDEEADQ

SEQ ID NO: 36911 - protein, 1124 aa, Pseudomonas aeruginosa; identical to SEQ ID NO: 32953

SEQ ID NO: 36912 - protein, 387 aa, Pseudomonas aeruginosa; identical to SEQ ID NO: 32954

SEQ ID NO: 36913 - protein, 450 aa, Pseudomonas aeruginosa; identical to SEQ ID NO: 31994

SEQ ID NO: 36914 - protein, 220 aa, Pseudomonas aeruginosa; identical to SEQ ID NO: 33787

SEQ ID NO: 36915 - protein, 979 aa, Pseudomonas aeruginosa; identical to SEQ ID NO: 33788

SEQ ID NO: 36916 - protein, 450 aa, Pseudomonas aeruginosa; identical to SEQ ID NO: 31994

SEQ ID NO: 36917 - protein, 220 aa, Pseudomonas aeruginosa; identical to SEQ ID NO: 33787

SEQ ID NO: 36918 - protein, 979 aa, Pseudomonas aeruginosa
MGAVLWFEGTSSSASDLKKLWLLSESPEQTLEHWLSQHHAGGMRALRQMEKDGTGIWPYPSKKAFLARLRDYFEVGENAFTLLNRAAGLKQLNSIDEIFRELVLDDRSAFERAAEVAGSFDDLTDIHRELETARKQQRSLQPVSDGWERYQVLQEQLHDKQALEGILPVWFAEQGYRLWLAETNRLEKEYKKAELDQEQCKSQLEAQKGVVDQHRQRYLRVGGAGIDQLRERIADWVRECDKRSLKAEQYQLLAKGLGLADELSAAALKENQQHIAARLEILDQQITDARQKAFDAGLVQQELNGRLQTLQQEGAEVEKRPGSNLPGQFHAFRSDLAQALGVNESALPFVAELVQVKPEELDWRGAIERAIGSHRLRILVPQDSSQAALRWVNQRHNRLHVRLLEVQEPTSRPVFFDDGFTRKLTFKEHPYREAIKALLADNDRHCVESPEQLRHTPHAMTAQGLMSGKERFFDKQDQKRLDEDWLTGFDNRDRLAFLAEQIREVNEQLEPAKLALDAAQGDVRQLETQASLLNRVKELQFEDIDLPGAQSQLESLRTQLATLTRPDSNLAMIKVELDAAEALQESLDQQLRQLIEQYVQLKTQFDQAASATRKAYNSAEKGLNDTQRELAQAHFPTLTADDLGDIVELERKHTRELQGQLKALGEKLGDQKSELAKRMSDALKVDTGALAEVGRELVDVPRYLERLRVLTEEALPEKLKRFLEYLNRSSDDGVTQLLSYIDHEVSMIEERLDDLNSTMQRVDFQPGRYLRLVAGKVIHESLRTLQRAQRQLNSARFIDDEGESHYKALQDLVGLLKDACEHSRNQGAKALLDPRFRLEFAVSVIDRESRNVIETRTGSQGGSGGEKEIIASYVLTASLSYALCPDGSSRPLFGTIVLDEAFSRSSHAVAGRIIAALREFGLHAVFITPNKEMRLLRHHTRSAVVVHRRGLESSLVSLSWEALDEHHQQRIKAMHEVAH

SEQ ID NO: 36919 - protein, 393 aa, Pseudomonas aeruginosa; identical to SEQ ID NO: 32927

SEQ ID NO: 36920 - protein, 450 aa, Pseudomonas aeruginosa; identical to SEQ ID NO: 31994

SEQ ID NO: 36921 - protein, 220 aa, Pseudomonas aeruginosa; identical to SEQ ID NO: 33787

SEQ ID NO: 36922 - protein, 979 aa, Pseudomonas aeruginosa; identical to SEQ ID NO: 33788

SEQ ID NO: 36923 - protein, 393 aa, Pseudomonas aeruginosa; identical to SEQ ID NO: 32927

SEQ ID NO: 36924 - protein, 450 aa, Pseudomonas aeruginosa; identical to SEQ ID NO: 32527

SEQ ID NO: 36925 - protein, 220 aa, Pseudomonas aeruginosa; identical to SEQ ID NO: 36907

SEQ ID NO: 36926 - protein, 979 aa, Pseudomonas aeruginosa; identical to SEQ ID NO: 36908

SEQ ID NO: 36927 - protein, 381 aa, Pseudomonas aeruginosa; identical to SEQ ID NO: 30518

SEQ ID NO: 36928 - protein, 450 aa, Pseudomonas aeruginosa; identical to SEQ ID NO: 31994

SEQ ID NO: 36929 - protein, 220 aa, Pseudomonas aeruginosa; identical to SEQ ID NO: 33787

SEQ ID NO: 36930 - protein, 979 aa, Pseudomonas aeruginosa; identical to SEQ ID NO: 36918

SEQ ID NO: 36931 - protein, 393 aa, Pseudomonas aeruginosa; identical to SEQ ID NO: 32927

SEQ ID NO: 36932 - protein, 482 aa, Arthrobacter alpinus
MRSTDNAVAQWHAQKQLRLSPAWKLLQGAPWTLAFLRAEFTATTQRVPLEEFHADLADFMKELREENLSLNEAWQASHYADSWVRSQFLARPMVDGKFHYEPTAATARVLAFIDTLGGRHTNLNSSRLSTLLNSIETLSLQSDPNPESRIAALEAEILDRQREITALKNGANPAVLSNDSAVAATRSVLDLAASLPADFKRMRDGVEVMLHSIRTEIMESSLSKGVAVGQVLAGDKALRGTAEGETFRGFTEFLNDPVQQARFRQSVNEVLERDFTDALTAEERNNLASLVREMRRQAGEVHAIYGRLSESLHAYVQSAEFQESVLLRKAIHAAELAVATAPLVSRTPVVAPLLYSPNFETLAGLGIFNPEDHVPPPKLAAPPALSDADIHRTPSTPAPDMPKLLAAVEHARETRNGTATLADVYTSLPAELQHINTIRGLILAARGSSNSIDPDRTETLTFTQIDGTTRTATVPLFTFTKD

SEQ ID NO: 36933 - protein, 220 aa, Arthrobacter alpinus
MSTERTLFPGDTGSFPLDMRQALVRLLRGPYIDGTADPALWTTILTHAVSLQQYLSEIFLLLSVDTERKIALLAPAEMDAVHTQPIVARKPLRREETLLALRLRVLLDRHAGSGTDVSISRDGAREILAEHRQPGAVDDKRMDEQTDAALARLLNLKLILPTELPHEYRVSNALALALPFDSIEQIPAYLAALDAGTQNEPFDLDPDHPDDTNQPLQEIF

SEQ ID NO: 36934 - protein, 1097 aa, Arthrobacter alpinus
MSIATTLPIGEELNPGQFRLSQIQIINWGTFHGRHSMYVDRAGTLLTGHPGVGKSTLFDGIQHIFYAAPRLNESAHDASNRKDRRTTFSYMRGRKIKTADGVEYQRPSATWSATALVFEDGLGRHVTIAALFDLPANGLEGQVGKHYLIHNKPLDTEALEKHGSRRFSPSSLHAALPGAEAFDVHKTFAERFRRKLGIHNDKAFSLLRTLQNGKGLDKGVNRFFRYEVLDKPATLSAAAAAVEDFSHLSGIYRQLEDARGQRDALAPVPELHQKLRELGQQHNRTVELKNIQLPLLRQQFQSELLAARAVALTEAKTLKQVEIVSATHAKDALSETVAALASQHASHGGQAIDGLEKDIRAGKRELAERTRIEAAVRDDLDGAGLVYDWSAQGLAGARAGAAAGVDHQQQETASARALEYQAVATSVNVKAQEAALRAEIASYQRRGSNIDSRSAAARRAICAATGLDIEDMPFAGELVDIGSEHSAWRPAAEKVLRSLATTLLVRGADIGAVTTAINSLDGHGKLRWINLGIPAKPAKAGRAHLVTKLDFHASDAGSWLREKIASDFAFTCVDDDAALHDHVKAVSRTGTLKLSSSLFERDTRTINPSDYLLGFNNVAKIAELEEQARLLAAEQAAAEASATQSSLAKDSSARRLATLKRIAEDDRSFEQLDSAGLAVSLAGLTATLEQTIAGSTTLAQLRDSLTTAQTELEAAVGRVAVLHHDLSSIEKDLTSAQDVLAGGVPGSAAEEWAQEAFAPYLSDGDPATLDELEVLLSHVAVDLGERIATIKERQFRAEGALTEIFKAFARQFGPSMSASHGTGAEAAPHYEELYARIVSDGLPQRQDEFKEYFNNRSYERFSDLLQLLEEERRSIEERILPLNQILEDVPFEKGSRLRLEVKTSIPDEARVFRQELKEALGNAYTQATEETMASSYQQLERLVNALADPALAHWADTVLDVRQHVTISCNEHRPNGEVETGLEPGTLSGGEGQRFTSFIMGAALAYQLGIDVQGYSTYGTVMIDEAFIQANSEYAGAGINALQEFGFQLLLAAPEDKVDLSRHLGSVTDIIKHPQANVSGFVSTGQSPATATDIILR

SEQ ID NO: 36935 - protein, 543 aa, Bifidobacterium longum subsp. longum; identical to SEQ ID NO: 30420

SEQ ID NO: 36936 - protein, 224 aa, Bifidobacterium longum subsp. longum; identical to SEQ ID NO: 31043

SEQ ID NO: 36937 - protein, 1181 aa, Bifidobacterium longum subsp. longum
MQATDVQMIADRWMLESRRLINWGSYEGYHEFRPSTDHKLPVTLLAGASESGKSTLVDAQISLLYPTGTPFNKASNSGRSERSDYTYLRGMVGVGSTETGDEPLYLRGRDENGAPQPVWGAIVDTYRNQTTGQVLSCAKFLYLMPGDGRGDVRRQYVVWGKPVDPRRMDQYRDAPFTPAQLKATYPDCLTFPSAEAFHTHIWSAMGLSEAACRLLHKIQSADAPSRLDDIFKQGVLGVPEALDLARTTVEDYERYDENFHAMDEKTRRMDTLRGIQQAYGEYAAARGKARAFEPVKPAVDGTVPAVLRDWALARMRGEVAVQLPADRAEQQNSEAEAKLLRRRTEDLHTRLDMIRGQMQGLDGGNLTRLELELDQARRTLEDVQANRTRIEQTFASIGETLPGDEQAWNERRINAVNFKREYNKRDGECEEALTAAINARAGARGDLERLQRDFDRQRSQRTRISQQMDETRAMLCRATGLTPAELPYVAELMDVNEHEEDWRLAMNVAYAPIAQTILVDKLHEQGFAAKVSTIDPRTMPRRTWQFVDTARHYDDTGAHANILTGEQDGDWLSGKLRYRDDSPFADWLRSQTQDERFDALCVTAIDDTDRTNRQVQADGQIKSGARGQHGTKDRAQVIGFVNETYLNALAAQVDAARNALSQADTDYTAAKTQSDNLHRELELANQLAYTSWERIDIAGAQRTITDTQDAIASIKNDPKLAELAKQRDELNAELDRVERQRIESDQAAARAGSAVEAALIWLRDHADTGTTDAAGATADNDDDAASGPLPDEVTAALAESYDNRFAGLADAAMRAHMIIGAGAAGTQAPGESFPERTIAGIGKDMASRINLLNGQADAARTGVESKMSTYIALYAADDDSLTASVEDYRYYLDELASLTQLAAVAATDAEYRRCLEQLLRSFLTIKRAIDTDASDIHDQLDRINAMLKGQQFGPKHGSLSLHADVRRPERTFWAQLIRVIGTLNDWKSADVNDSDASRKAFAACAPMVGLLRAELAQVKDANGVKSYGARNLDPRCRSSFYAIVHHADGPDERITSTGGRSGGALQELTSFVYGAALIYLLGGGLTSEPSYTTLFLDEALIKADGRYTQRALTVLPRLGFQVIVSAPESKTGEILEVSTKAYVTYKDPDTGLTSLREAVLHQNDMDDESSSDILKDDGVAE

SEQ ID NO: 36938 - protein, 394 aa, Bifidobacterium longum subsp. longum; identical to SEQ ID NO: 31243

SEQ ID NO: 36939 - protein, 543 aa, Bifidobacterium longum subsp. longum; identical to SEQ ID NO: 30420

SEQ ID NO: 36940 - protein, 224 aa, Bifidobacterium longum subsp. longum; identical to SEQ ID NO: 30393

SEQ ID NO: 36941 - protein, 1181 aa, Bifidobacterium longum subsp. longum
MQATDVQMIADRWMLESRRLINWGSYEGYHEFRPSTDHKLPVTLLAGASESGKSTLVDAQISLLYPTGTPFNKASNSGRSERSDYTYLRGMVGVGSTETGDEPLYLRGRDENGAPQPVWGAIVDTYRNQTTGQVLSCAKFLYLMPGDGRGDVRRQYVVWGKPVDPRRMDQYRDAPFTPAQLKATYPDCLTFPSAEAFHTHIWSAMGLSEAACRLLHKIQSADAPSRLDDIFKQGVLGVPEALDLARTTVEDYERYDENFHAMDEKTRRMDTLRGIQQAYGEYAAARGKARAFEPVKPAVDGTVPAVLRDWALARMRGEVAVQLPADRAEQQNSEAEAKLLRRRTEDLRTRLDMIRGQMQGLDGGNLTRLELELDQARRTLEDVQANRTRIEQTFASIGETLPGDEQAWNERRINAVNFKREYNKRDGECEEALTAAINARAGARGDLERLQRDFDRQRSQRTRISQQMDETRAMLCRATGLAPAELPYVAELMDVNEHEEDWRLAMNVAYAPIAQTILVDKRHEQGFAAKVSTIDPRTMPRRTWQFVDTARHYDDTGAHANILTGEQDGDWLSGKLRYRDDSPFADWLRSQTQDERFDALCVTAIDDTDRTNRQVQADGQIKSGARGQHGTKDRAQVIGFVNETYLNALAAQVDAARNALSQADTDYTAAKTQSDNLHRELELANQLAYTSWERIDIAGAQRTITDTQDAIASIKNDPKLAELAKQRDELNAELDRVERQRIESDQAAARAGSAVEAALIWLRDHADTGTTDAAGATADNDDDAASGPLPDEVTAALAESYDNRFAGLADAAMRAHMIIGAGAAGTQAPGESFPERTIAGIGKDMTSRINLLNGQADAARTGVESKMSTYIALYAADDDSLTASVEDYRYYLDELASLTQLAAVAATDSEYRRCLEQLLRSFLTIKRAIDTDASDIHDQLDRINAMLKGQQFGPKHGSLSLHADVRRPERAFWTQLIRVIGTLNDWKSADVNDSDASRKAFAACAPMVGLLRAELAQVKDANGVKSYGARNLDPRCRSSFYAIVHHADGPDERITSTGGRSGGALQELASFVYGAALIYLLGGGLTSEPSYTTLFLDEALIKADGRYTQRALTVLPRLGFQVIVSAPESKTGEILEVSTKAYVTYKDPDTGLTSLREAVLYQNDMDDESSSDILKDDGVAE

SEQ ID NO: 36942 - protein, 394 aa, Bifidobacterium longum subsp. longum
MAGMKDIAAITTCVKKHMRSHMYDIEPAWPFPVPVGLPDQAFLETNAIAVHDNNNEIRQWASKNGCEIITKHRTIGTSVELISKVVVPDESIAMRVVGRTLAAEYREAHRRIACLVAACDVAPETIESAARMTGHEQPDDFDLLVSAVRYFRHHDVTGMTPRQIPLTGFSGKWLNESKTNRRKAICRLLGVETLGLSKRPTELRFRYLDPVRDDAELERIIWCPWEGEALSGIKYAVIVENKDTYQTMPPIAQGICIWGSGRAVSDAVPAVPALRDMRIVYWGDMDADGLEILSTLRESGIECDSILMDCDAYDRYHRFGTDRTERSAKIAMREPKPTPGLQSAERRLYERLCADKTIAYRRIEQERIPMRDAVDELRKLGIPVESIENQDLPI

SEQ ID NO: 36943 - protein, 490 aa, Pseudomonas citronellolis; identical to SEQ ID NO: 32137

SEQ ID NO: 36944 - protein, 224 aa, Pseudomonas citronellolis; identical to SEQ ID NO: 33507

SEQ ID NO: 36945 - protein, 1125 aa, Pseudomonas citronellolis
MNDFSPQELDFVADDSRVGFRLQRLEVLNWGTFDRRVWRYELDGRNGLLTGDIGSGKSTLVDAVTTLLVPAQRIAYNKAAGAETRERSLRSYVLGHYKSERNETTGSTRPVSLRDTTSYSVILSVFRNEGYGQAVTLAQVFWFREPQGQPARLFVAVERELSITEHFSGFGSDINGLRKKLRAMGCELNDSFPPYGAWFRRRFGIEHEQALELFHQTVSMKSVGNLTDFVRSHMLEPFDVGRRIEALLGHFDDLDRAHQSVLKAKRQIELLAPLVEDGLRHGQITGEIQALRQGRDALRPYFAGLKAALLERRLELLTQDATRWDARIKQLGEQRDNARIEQGKLEGALRENGGDRLQQLAAAIQQQEAEKQQRQEKADAYTTLLTRIGEAAPGDEAAFMTQRSTIGEHAEALRTSIADHDTQINEDGYALRRGQEEHKALSDEIDSLARRKSNIDAAQVRIREALCTALSIAEEDLPFAGELIQVREDERDWEGAAERLLHGFGLSLLVPDVHYKDVADWVERQHLGTRLVYFHVRARKSTQAVSLPPQSLVRKLLIKPDTPHYDWLERELHHRFDLACCDNTEQFRRETRAITRAGQIKDPSGRHEKDDRRRIDDRSRYVLGWSNADKLRILRDEREGLEQQLGDIGLRIANTQRLRGQCQAQLEALAKLEVFTRYSEIDWQAPAREIARLTEERDRLKAASDTLRELESQLAQVVERLKEIEDDLGEAQGKRGEIRSKHETAQAQHAQALEIQTQAALDDMLLQSLEGWRAEVLGDHQLTVESCDNREQDVRNGLQARIDAEDKRLSRLTERIINAMRGFKEAFKAETAEIDISLAALPEFERLMKDLQHDDLPRFEARFKELLNVNTINEIANFNAQLARERETIKERVDVINQSLQVIDYNPGRYIRLLAQPSPDAEIRDFLQDLRACTEGALSGSEDEQYSETKFLQVKAIIDRFRGREGLAEIDRRWMQKVTDVRNGFLFSASERWREDDAEHEHYSDSGGKSGGQKEKLAYTVLAASLAYQFGLEWGAVRSRSFRFVVIDEAFGRGSDESAQYGLELFRQLNLQLLIITPLQKIHIIEPYVSSVGFVHNEGGRESRLRSLSIEEYRAQKAAARGGAV

SEQ ID NO: 36946 - protein, 401 aa, Pseudomonas citronellolis; identical to SEQ ID NO: 32140

SEQ ID NO: 36947 - protein, 490 aa, Pseudomonas citronellolis; identical to SEQ ID NO: 32137

SEQ ID NO: 36948 - protein, 224 aa, Pseudomonas citronellolis; identical to SEQ ID NO: 33507

SEQ ID NO: 36949 - protein, 1125 aa, Pseudomonas citronellolis; identical to SEQ ID NO: 36945

SEQ ID NO: 36950 - protein, 401 aa, Pseudomonas citronellolis; identical to SEQ ID NO: 32140

SEQ ID NO: 36951 - protein, 498 aa, Marinobacter sp. LQ44
MDEQTHLRTRSYLVARHQNPAWKLLSATRGPLVLSCLQALVEQNREEILFEDAQQMLTDILREHANSDDLDLSTDDPAADARKELRSWIRKGLIVERDGRLVATDALQKALVFVEGLDEKIMTSTASRLATVQREIENLETRLNPNAQSRADHIRRKIKDLEHELAEVEAGRFKVLQGAEAAEGIREVYNLATSLRADFRRVEDSYREADRQLRQSIVSEQHHRGEIVDRLLDGHDTLLETAEGKVFHNFNEQLSRSTELDNMKHRLRTILKNPATRHALSRQQQDELRWLVIRLIQESAAVIRARARSEKDVKGFLKTGLAAENHRVGELLNGILNTALNIDWSSHKVRKGDTPLPPIAVAVSSLPLVERLRFKSAKEEQAQGLELTDQGVNLEEVDEEFWRAFDGLDREALYQETVELLKVTDRPMSIGDLATHLPPTHDLETIALWLAMAREAEVEITDDREAVDITDSNGYKLRFHVPQLTLTRQAAESIDWEL

SEQ ID NO: 36952 - protein, 219 aa, Marinobacter sp. LQ44
MDHVDEQAAAEAGHYTPGNVKATAQELLKFGLLEADRKPNLYQIAITQTAAINEILEPFDLRLKVDDVRGLAFLVVSEQLFSEGEENDDEWSHPLVRRQRLTMEQSLLVAILRQHFIAHEQEAGLGAGEATVELDELLPQLQLYLGDTGSDTRDQKRLRSLLDNLKNHGIVSDTDANDQVVIRPIITHLANPENLQNLLHHFRQLAGQPTPQDADGEDV

SEQ ID NO: 36953 - protein, 1107 aa, Marinobacter sp. LQ44
MSQPQTDLFAAEMLPPTAYILTHLDLYNWGPFGGRHCAEIDPKGTAIIGPTGSGKTTLVDALMTLLTHQPRYNLASTGGHESDRDLISYIRGVSGAGNNSGDNSHIARPGKTVTAISARFANGDKAIRIGALFWIDGSSSAASDLKRLWLFSEQDDQSLDTWLAIHHEGAARELKQHAKDNPGLQANDSKKAYLAQVRRFFEVGENAFTLLNRAAGLKQLNSIDEIFRELVLDDHSAFDRAAEVASEFDDLAAIHSELETARKQHQSLLPIAETYEKHQSATNELDQQLLLKDILPIWFAQTGYELWNGRKQDLERQLDEGKETFESLGITVAQLNSKADTLKDIYLQAGGASIEQLKDQISQQKRWTEERDRHARDYQTLTGKLDLDSTLSPEALARNRQLSEEKLRELSELAEAQDESLLDLRLRHGKLNETLTELSEEIDRIKARPGSNIDGRYQEFRSELAEALNLDEDSLPFVAELVEVKAEERDWRGAVERAIGGHRLRLLVPPAAMQSALDRINNRDNRLHVRLLEAQTPQSPAQFMDDGFTRKLNFKDHAHREALKQLLAGIDRHCVDSPETLRQTPHGMTRQGLMSGKKGHFEKRDNQRLDKGWMTGFNNRDRLAALNNELSETRKEAGALEQQLKAARKNLRDTQDQIKLYELLGDTEFNAIDLPCAQRELDALQSRLEALTAPDSDVEKARREFETVSQQLEESRKQLSKQETNQALLEEKRNQATARCTELLDRIGEGLTDDQQSLAAKHFRTPKPDQYERLEALERGQREQLDKTIGKLGKQIQGYELSLTQLMEKALTIDTGALIETGSNIQDIPEYLERLRVLEEEALPQKLERFLSYLNQSSDQGVTQLLAHIQNQVAIIEERIADLNATLRRVDFQPGRYLRLEPRRVTHESLRRLERAQRQLRADALKDDQGESHFKALQAMVALLRDAADNKRTVGARALLDPRYRLQFEVSVLDRESGTVIETRTGSQGGSGGEKEIIASYILTASLSYALCPDGATQPLFGTIVLDEAFSKSSHAVAGRIISALNEFGLHPLFVTPNKEMRLLRAHTRSAILVHRKDLRATLTSLSWEELEAHAEKMTRKAHEVPG

SEQ ID NO: 36954 - protein, 381 aa, Marinobacter sp. LQ44
MKSPAELASRLARQWQNADLREQRLLRPESWPLTLPIGKPTGAAVRDKIGQVREHLRQWREVTIGQVQWQPVRFQSTSEAIDIPTHWTLESPSQWVQATRSIEVKREYDALSRLASAMDPRFHALIIRRRSLVMDKPESDVVRSGEVALQLQPGCADEKPLRALSIAGTDSKFFERNRQLVTLMLDILFDGQASETGLEAFLGAEDEGHHWLLVTDLDGTLLPFSQMRVRARELQSTPLPGERLILVENERCLHQLPRLSDTVAVLGSGLNLSWLNATWLKDRATAYWGDIDTWGLTMLARARKHLPLLTPLLMDGVTFDTFAGARSVEEPQPATSIVPAGLTKSEAELYQRLKQSDRGRLEQEFLPAGIVHRAIGDWADR

SEQ ID NO: 36955 - protein, 495 aa, Corynebacterium glutamicum
MTVVSHALGFKRFRQESLELSLLRSDNFPVVLAVVAQYFPQGAIAKPASELYQLLSDDFRVLREEGFELPKSPSDYVSDWVKSRWFVRRPGSSQTGETVEPSEELLAVLDSVQRWDNPHRSISASRIESLTQALQTLALESDPSTAKRLAELERERDRIERQIEAVHAGEFEVLTTVQIGDRVADILDLAASIPADFARVRHELSDLNRKLRRQLLDPEDSRGDVLEEIFRGVDLIGDSDAGRSFNSFFDVLLDRERSSLIDRWIREVLGRDEAIDLDSKLRTGLYRIFRDMEDASFEVNGEMTGLARSLRHYVTTEEFAESRRMIQLLRDTRSAAAKAAEAGEVTSLNHMDTPLVRIGMDVRSIAGLKLKNPGEERVEDLPEPVEEQELDTEVLMEQIRASEIDFEELEEAVSLVLAEQSHATITEVLEHFPATQGLASIVGLLYLAMRDGVPTGHAQIVEWESDDATHRRRITGWQFIRGLNSEDLAESEINK

SEQ ID NO: 36956 - protein, 212 aa, Corynebacterium glutamicum
MNDQLWEGDTGTLTFGSRKALVQLLKGPMVNALQHVEVWRAITTDQDALNAVLNNLFLELVLDEDAGVAFTRPANGGQEVLVGNNKTEAMPKVLRTETLSHFDTLIILILRQELTMAPPGERVIVDREEIREQVLLYRVDEERDEAKLAKRFDAAFRRIVDYSLAKKTETPERFEVSPALRQIFDADTVAGVRAEYEKFNKAAHDGNEEEQK

SEQ ID NO: 36957 - protein, 1111 aa, Corynebacterium glutamicum
MTSEQALDPIHPGQFRLSRIQLINWGTFHGTVDIPVTREGILVTGGSGSGKSTLIDAITAVLLPQGKLRFNSAAQANTPRNKGRSLVTYIRGAWRAQEDPLQDQIVSTYLRPRATYSLVGLTYSNGEGVEHTLVAIFYLKSGHNLTSDISSYYGVFPVDQDINALLDFLKEGIDKRQIRAAFKEAIFSEQHSVFSGRFRSRLGISSEEALLLLHRAQSAKDLQSLDDLFRDYMLVEPDTFSIAKTAVEQFQDLEGAYEQVEDIKRQIHTLDPLVQLKNRREKAQQSKDHANALKKALPTVGNRIKKEEQETLVRQFTVEQTQAKSKVESAKIETDRAREMETLAHDNVKQIVGAQHGILSAKREGAVDKLRTISAARAGLDALVKGLGGTAPESAEELLELNNAARLTVDEYPAAREALESAGQRNVEDRTRAVDEFKAADQELSSLSKGSSNIEYRLLQVRENLCQDLGVSPRDMPFAGELIDPNNAEWEPVVQRILGGFAAEMLVSHGLLPRVRDWVNAKHLAALLKFNGVVTTGEYKTSRFPADSLIRKVDVVESPFRDWVNQELGKRFNIRCVRTPAELSALGPRDQGVTILGVRKFAQQTGDPTTRWEKDDRRKLGDRSTYRLGSTNDAKVETLREAVKAGKAVVQAADNRIAANRAELRELERQYQASQEILKVSWAQIDVESADAAIAELDRLLEELNNTPEATELSARHEAAKQTLARVSDLLVAAQSEETVASMNLKRAETELKRLESLPVTEVSEEIAREVEKLFLANTRRVHAANVDEQTIALREDLDKQIDANEAELRRCENQIVGILRSYIETWPANRADLQAEPEFVGEAINRLGELRSDRLAEFTAKFLGLMNEMSTRNLGQISRRLRDARREIEERIEPINASLAQSEFNEGRFLHIDIRDQSGPIVREFQQKLDAATSGDLGTSTEKQAFARYALIAEIISKLASHDSADARWRNTVLDTRRHVRFIGLERDSDGATVNTYVDSASLSGGQAQKLVFFCLAAALRYQLAELGAHYPTYATVILDEAFDRADPAFTRQTMNVFHSFGFHMVLATPLKLIQTLGDYVGSTIVVSYTEKPNAQGAIQGNSSFSRIEK

SEQ ID NO: 36958 - protein, 368 aa, Corynebacterium glutamicum
MPLLIDDALHRSKKYFHAHLSELLLGEFAGLSLPLHPPTAAKAAADIDATREFIRQWEGRDDVEYAVRNWSPVGLGKTEVPVRLTLNTIEELVVFAQVEDEWSSLHERFSQLSGFTAEVVAKHVSLWRSLSNEDLSKAVLVVEWFLENPNSGLLKRAVAVEGVHTKWLENHRVLIETLVADKRGEPGRADLGLGDAEARVRLRFHSVDAPAGLTDIEVPLSSLCELQEPQVILMVENLDSFLALLTWPGVTIAWGAGYRAVDIVRGPYFSNGRLLYWGDLDLDGFKILDAVRSHVPHTESVLMNPETVSRWRYLGVADREFKAESFDNLHDFESDALDLLITGGELRIEQERIRLDVAVEEIEKVIRG

SEQ ID NO: 36959 - protein, 543 aa, Bifidobacterium longum subsp. longum; identical to SEQ ID NO: 30420

SEQ ID NO: 36960 - protein, 224 aa, Bifidobacterium longum subsp. longum; identical to SEQ ID NO: 30393

SEQ ID NO: 36961 - protein, 1182 aa, Bifidobacterium longum subsp. longum
MMQATDVQMIADRWMLESRRLINWGSYEGYHEFRPSTDHKLPVTLLAGASESGKSTLVDAQISLLYPTGTPFNKASNSGRSERSDYTYLRGMVGVGSTETGDEPLYLRGRDENGAPQPVWGAIVDTYRNQTTGQVLSCAKFLYLMPGDGRGDVRRQYVVWGKPVDPRRMDQYRDAPFTPAQLKATYPDCLTFPSAEAFHTHIWSAMGLSEAACRLLHKIQSADAPSRLDDIFKQGVLGVPEALDLARTTVEDYERYDENFHAMDEKTRRMDTLRGIQQAYGEYAAARGKARAFEPVKPAVDGTVPAVLRDWALARMRGEVAVQLPADRAEQQNSEAEAKLLRRRTEDLRTRLDMIRGQMQGLDGGNLTRLELELDQARRTLEDVQANRTRIEQTFASIGETLPGDEQAWNERRINAVNFKREYNKRDGECEEALTAAINAWAGARGDLERLQRDFDRQRSQRTRISQQMDETRAMLCRATGLTPAELPYVAELMDVNEHEEDWRLAMNVAYAPIAQTILVDKRHEQGFAAKVSTIDPRTMPRRTWQFVDTARHYDDTGAHANILTGEQDGDWLSGKLRYRDDSPFADWLRSQTQDERFDALCVTAIDDTDRTNRQVQADGQIKSGARGQHGTKDRAQVIGFVNETYLNALAAQVDAARNALSQADTDYTAAKTQSDNLHRELELANQLVYTSWERIDIAGAQRTITDTQDAIASIKNDPKLAELAKQRDELNAELDRVERQRIESDQAAARAGSAVEAALIWLRDHADTGTTDAAGATADNDDDAASGPLPDEVTAALAESYDNRFAGLADAAMRAHMIIGAGAAGTQAPGESFPERTIAGIGKDMASRINLLNGQADAARTGVESKMSTYIALYAADDDSLTASVEDYRYYLDELASLTQLAAVAATDAEYRRCLEQLLRSFLTIKRAIDTDASDIHDQLDRINAMLKGQQFGPKHGSLSLHADVRRPERTFWAQLIRVIGTLNDWKSADVNDSDASRKAFAACAPMVGLLRAELAQVKDANGVKSYGARNLDPRCRSSFYAIVHHADGPDERITSTGGRSGGALQELTSFVYGAALIYLLGGGLTSEPSYTTLFLDEALIKADGRYTQRALTVLPRLGFQVIVSAPESKTGEILEVSTKAYVTYKDPDTGLTSLREAVLHQNDMDDESSSDILKDDGVAE

SEQ ID NO: 36962 - protein, 394 aa, Bifidobacterium longum subsp. longum; identical to SEQ ID NO: 31243

SEQ ID NO: 36963 - protein, 543 aa, Bifidobacterium longum subsp. longum; identical to SEQ ID NO: 30420

SEQ ID NO: 36964 - protein, 224 aa, Bifidobacterium longum subsp. longum; identical to SEQ ID NO: 30393

SEQ ID NO: 36965 - protein, 1182 aa, Bifidobacterium longum subsp. longum; identical to SEQ ID NO: 36961

SEQ ID NO: 36966 - protein, 394 aa, Bifidobacterium longum subsp. longum; identical to SEQ ID NO: 31243

SEQ ID NO: 36967 - protein, 450 aa, Pseudomonas aeruginosa; identical to SEQ ID NO: 32924

SEQ ID NO: 36968 - protein, 220 aa, Pseudomonas aeruginosa; identical to SEQ ID NO: 33787

SEQ ID NO: 36969 - protein, 979 aa, Pseudomonas aeruginosa; identical to SEQ ID NO: 33788

SEQ ID NO: 36970 - protein, 393 aa, Pseudomonas aeruginosa; identical to SEQ ID NO: 32927

SEQ ID NO: 36971 - protein, 450 aa, Pseudomonas aeruginosa; identical to SEQ ID NO: 31401

SEQ ID NO: 36972 - protein, 220 aa, Pseudomonas aeruginosa
MEDDQPVMSAAVQVDERRTPQRVREAVQEMLKYGLLEESHKPNLYRSALSNIEAVDRILEPLDLAMGVDEVRGLVFVTVRQGEVAEQDDWSHPLVRRQRLNLEQSLLIAILRQHFIAYEQESGTGASQALVAVDELIPQLQVYLGELGSEAKERNRIITLLDQLKGHGLVSALDAHDRVIIRPIITHLANPENLHALVAWLREQVEGAATPAAGDEEDEA

SEQ ID NO: 36973 - protein, 979 aa, Pseudomonas aeruginosa
MGAVLWFEGTSSSASDLKKLWLLSDSPEQTLQHWLSQHHAGGMRALRQMEKDGTGIWPYPSKKAFLARLRDYFEVGENAFTLLNRAAGLKQLNSIDEIFREMVLDDRSAFARASEVASSFDDLTDIHRELETARKQQRSLQPVADGWERYRALQEQLQDKQTLEGILPVWFAEQGYRLWLAETSRLQKEYEQAELDQEQCRSQLEIQKGVVDQHRQRYLRVGGAGIDQLRERIADWVRECDKRSLKAEQYQRLAKGLGLADELSAVALEENQQQIAARLEILTQQTTEARKKAFNAGLVQQELNGRLQTLQQERAEVERRPGSNLPGHFHAFRGDLAQALGVDESSLPFVAELVQVKPEELAWRGAIERAIGSHRLRILVPQGSSQAALRWVNQRHNRLHVRLFEVKEPSSRPVFFDDGFTRKLTFKEHPYREALKALLADNDRHCVESTEQLRHTPHAMTAQGLMSGKERFFDKQDQKRLDEDWLTGFDNRDRLAFLAEQIREVNEQLAPAKLGLDAAQDDVRQLESQASLLQRVEELQFEEIDRPGAERQLASLRTQLDTLTRPDSDLAMIKAELDEAEVLQDSLEQQMQQLIRQCVQLKTQFDQAASATRKAYRGAEKGLSDTQRELAQTHFPTLTADDLGDIVELERQHTRELQGELKTLGEKLGDQKSELVRRMSDALKADTGALSEVGRELVDIPRYLERLRVLTEEALPEKLKRFLEYLNRSSDDGVTQLLSYIDHEVSMIEERLDDLNSTMQRVDFQPGRYLRLVAKKVIHESLRTLQQAQRQLNSARFIDDEGESHYKALQALVGLLKDACEHSRNQGAKALLDPRFRLEFAVSVIDRESRNVIETRTGSQGGSGGEKEIIASYVLTASLSYALCPDGSSRPLFGTIVLDEAFSRSSHAVAGRIIAALREFGLHAVFITPNKEMRLLRHHTRSAVVVHRRGVESSLVSLSWEALDEHHQQRIKAMHEVAH

SEQ ID NO: 36974 - protein, 385 aa, Pseudomonas aeruginosa
MKSPTDIGRSLARQWQRSSIRLDRLLNPGSWPQCFNIGKPSARVFAENIHAVLQHVENWRSLKVGKVDWESVSYRAGLAPISLPMRWHLGSPSEWIAAANDPTVSREYAQLEYLVEQVDSAFHALLVAQRSLWLTKPFEEVVATAQLATRLSPGCARGRPLRLLAEHGVDTKFFERNASLLTRLLDERFEGAASEQGLTTFLDAFEESSHWVLVVPLQPELLPFKRLRLTTAELAETPLPGSRLLVVENEQCVHLLPETLPDTLAVLGAGLDLQWLASAHLAGKQIAYWGDMDTWGLLMLARARLHQPAVEALLMEQELFEQHSPGNAVVEPAKARESAPPGLLADEADFYRYLLVQERGRLEQEYLPKVQVERAIEQWARAVPV

SEQ ID NO: 36975 - protein, 473 aa, Pseudomonas aeruginosa
MDPNIPPLFEHLPKDLFRPLAAANNLRYWDVLCRLMDAMWGEGGLSAGEEVPKSVVIRTIESFLVADDPWEEMDSTLNVTGRAHLIFASLQASGWLSQRRRGVVDHVTVRPVVARFFNHLTEFANQTPELLGIRVHSIFVSLREVNTGKAPGLYHEAARQAKQCMAHISNTSCRIQDLMGELATKTSMGEFVRGYFEDYIEKVFIADYSDFRTNNHPLQFRSQIIALVRQFQHDEDQRQALIGWYAANKTDNDDFLRAEVLYERDTQQLLRLRDVEEHLQRLDEEVRDAHQMAIALFEYKLRSPGNFDKLIERAIDAVEVLGEGHDALPGMSGLYHASEVGLAKPRTAPRVHEPTVVEEYIPTIEELAMEALRQRMNANRHVTPLKLADYVTRHIGPELRVSSSQLVIESITDLCCYQRLLLIASRDACPPGKRKDDVHLQMIPAMHVEFVPDAMTRNEYMEHQEFMIHVRVP

SEQ ID NO: 36976 - protein, 200 aa, Pseudomonas aeruginosa
MVSWERLAEQSDVGHVSADFERAAYRLMVEQILYANDKFSRVAYHLIVKHLAAFREVMSMLGVHLIHNAHHSYVAAIPNHNVAEKMRLSETRLALVLRRIYDDRMQSAEIADGEAFVSLEELERAYKEWLKRELPERGELRELTQAMKRYGLVRILEADDVQPYKIVIRPGIVDVLSEGALHQLAAHAPIKDEGADDDLA

SEQ ID NO: 36977 - protein, 1141 aa, Pseudomonas aeruginosa
MILLERINLIQFFLYEAKDVDIGRNTAFLGPNGTGKTALLDAIQVVMLAADGNRISFNAASDSKKKRSRSLRDYCLGSIVPGGSSYQRTSANTYVGLVFRDSVTGVPFTAGVSLQAHVEDAKADVNGYFILPGVALTARQYLQTEGQRETVMPWRIFQHMASELCRSGAHTTAHITPHNRDDFIRRLLIDHLAGPGDKPNSQSFRAAFSRSLKLNEDIVDLNETLRQHLIEPMPTKITEFRERLNEVRDMRDLIRRLRTRIDEAATAASTYAVVLQERTSEANLAALKHVYATERTAEAVDAGEIEQEKLEKSRERARQELERARTQASLASTARDLALTALISNPEYQQQAGHAGELSLLEKHFGEKQEQIRAQFEAMQNALAAACDLPEVESSRSSFEEASEQLRGLEQLIESDSIPALESLQRALQAVSQAFDVVRRATADAETKAEQAREQYRDAEIARTRAGHGLTSLSEKTTTLLRILANAGIDATPVCDLVTVSDPEWQGAIESWLGRHVEALLIPEGKELEAIKVYRSRAADGIYRVKLALPSRIRDWRASDSEPYAAQLIQGQNQLAVRYLQGELGRTTLAESNEQLRVGTKAISKDGMVSSGGGVERRQLPKASELKLGRKDVSAMRQHAEQAFQAAEAQCSQADKAAARLENALQRLTPFADAESLQASLESTVLAKAQASAHASHLREQLTRTQSVALSELNEKKLRADEAAAAASGQVVSWAEEGAGLDKQLTLLGGQLGALRAQLVLDTARERESRQNPLYNPNEVERHRKRLDGRHSDDWSAKLNGLEQAIASAGGRAGNCDRDAWNLLSTYLKDYNLQNTDIKSSDWMGAYRFILEDQQRLVDLELVEHEERAEEAYQAAARVFRSDVAQALLAGFDRIEEQIAGLTSILTSAPAFSNNERYEFKYKVVEEHKSLHEFLLRVRTHGSEDDLFGGPGEVPEEFRALVEGDSSSPLLNEASPLNDHRRFFSYDVEVFHGSESLGLLSKRFEQASGGEHRTPVYLIFGAALAACYGKSKDSLSGGGIMLLDEAFEKMDPQNIRATVQFLNALGLQLILAGPESDQGKLGAFLSIYYDMSRFGGRNVFMKKNVVHDAARELLQSDNYLLNPELLQQEIDRLKEEQNEPG

SEQ ID NO: 36978 - protein, 450 aa, Pseudomonas aeruginosa; identical to SEQ ID NO: 31994

SEQ ID NO: 36979 - protein, 220 aa, Pseudomonas aeruginosa; identical to SEQ ID NO: 33787

SEQ ID NO: 36980 - protein, 979 aa, Pseudomonas aeruginosa; identical to SEQ ID NO: 33788

SEQ ID NO: 36981 - protein, 393 aa, Pseudomonas aeruginosa; identical to SEQ ID NO: 32927

SEQ ID NO: 36982 - protein, 450 aa, Pseudomonas aeruginosa; identical to SEQ ID NO: 31994

SEQ ID NO: 36983 - protein, 220 aa, Pseudomonas aeruginosa; identical to SEQ ID NO: 33787

SEQ ID NO: 36984 - protein, 979 aa, Pseudomonas aeruginosa; identical to SEQ ID NO: 33788

SEQ ID NO: 36985 - protein, 393 aa, Pseudomonas aeruginosa
MKSPTDIGRSLARQWQRSSVRLDRLLNSASWPQSFNIGKPSARLFSDNIRTVLRHVENWRSVKVGKVDWEPVSYRAGLAPISLPMRWHLRSPSKWIAATDDPSVSQEYAQLEYLVEQVDSSFHALLVAQRSLWLTKPSEEVIATAQLATQLSPGCAQGRPLRLLAEHGVDTKFFERNAILLTKLLDERFEGAASEQGLTTFLDAFEETSHWVLVVPLQPELLPFKRIRLTTSELAETSLPGSRLLVVENEQCVHLLPETLPDTLAVLGAGLDLQWLASAHLAGKQIAYWGDMDTWGLLMLARARHHQPAVEALLMDRELFDQHSLGSAVVEPAKAQELAPEGLMTDEADFYRYLLAQERGRLEQEYLPRRQVEQAISKWFGESVAPAHPERTA

SEQ ID NO: 36986 - protein, 484 aa, Pseudomonas aeruginosa; identical to SEQ ID NO: 32845

SEQ ID NO: 36987 - protein, 251 aa, Pseudomonas aeruginosa; identical to SEQ ID NO: 32980

SEQ ID NO: 36988 - protein, 1128 aa, Pseudomonas aeruginosa
MLEASEVSLSELFSTGQIRLAELSVYNWGSFHGLHSAKIDPEGTLITGDNGAGKSTLIDGLMALLLPSSKASFNIAAAQGDRTDRTLMSYVRGNYGKAHDGSETATLLKRSGATATGLRALYQADDGSKITLAALFWITQASNSLNDLKRLFVVGKRDVGLDELLHLFGEGNARVLKQHLKEDPLVEAFDSFTEYQETYVRLLCMENRNAPALLSRALGLKKIDDLTSLIRDLVLEPSQVKEHARLAVSEFDDLVSVHSELDDARRQRDALIELPETSQALNQAREEMRRISAELAGLPVYFGEQCSRLWQMRLKKYEAELLQLAEEMTRLGALEEQATERVQALFHAYQSQGGERLEGLRKDLKAATQVHHDSVRDARLYQMDVRDLSLPDTLSLDVFKQNQVRAQTELADMPALRQARQDQFASSAANLSREQTQLKELVGEIEDMESRPDSNIEPSYQKLRDQLVESLSLDPAEVVFVGELIDVLEAHRPWQGAIERALGGHRTTLLVPDERYRLVTKWLNTRHTGLHVRVQVVPLNQHPQVAEFLPDGFLKMLDWKPHPYRDWLKKHLSRFDLHCVASTEILDQTDFSMTIQGLVHLDKGRFEKKDQQRIDNPRFWCLGFSNKGRLATLRKDRVELEADVKKLAQLTANARTAMDDLEKHTRVWERITQLTWAAIDVQSAQDRMQSLRADLEALERPDSELGVAKARWEQAGAELKEVQGKKELVSKKVGGLESDKLKANQQLELALDAARTGLVDEVRELLSKRVGQLDLDDLEMVSELENRHRSALEEARKGVHNREFRASNKASGIVSEFKTKWPLIANDWLAGVDALEEYVDHLAHLEQEGLPDLVERFRERLNRNATQSLARISQTIQAEREDIQDRIETINDVLERTEFRQGTYLRLGSRPEIFEHVKAFNAKLMRVLARAGSDDHEARFVELKELIEKLEKATNPATSGNLESLRLLDSRYQLSFFAEEVEKGSKKVRDVLESSSGKSGGEKESFAGTIVAASLAYVLTPDGSDRPLYCTVFLDEAFSNTAEAVSRRVLKVFRELKIHVNLITPYKNLNLARESARSLLIAERDQDKHESRLCEVTWKEIDEQLARHEQQGLQKAASSLGIEVEPDL

SEQ ID NO: 36989 - protein, 397 aa, Pseudomonas aeruginosa; identical to SEQ ID NO: 32982

SEQ ID NO: 36990 - protein, 450 aa, Pseudomonas aeruginosa; identical to SEQ ID NO: 32505

SEQ ID NO: 36991 - protein, 220 aa, Pseudomonas aeruginosa; identical to SEQ ID NO: 33036

SEQ ID NO: 36992 - protein, 979 aa, Pseudomonas aeruginosa; identical to SEQ ID NO: 34267

SEQ ID NO: 36993 - protein, 393 aa, Pseudomonas aeruginosa; identical to SEQ ID NO: 32927

SEQ ID NO: 36994 - protein, 450 aa, Pseudomonas aeruginosa; identical to SEQ ID NO: 32505

SEQ ID NO: 36995 - protein, 220 aa, Pseudomonas aeruginosa; identical to SEQ ID NO: 33036

SEQ ID NO: 36996 - protein, 979 aa, Pseudomonas aeruginosa; identical to SEQ ID NO: 34267

SEQ ID NO: 36997 - protein, 393 aa, Pseudomonas aeruginosa; identical to SEQ ID NO: 32927

SEQ ID NO: 36998 - protein, 468 aa, Pseudomonas aeruginosa
MNSSRRELFATCLRLLYDRLHGPAADYAHNLGRDDLTELVLPVVKEHLARPVEAADQDEFSSADANDPLQMTGLVIRALLKDGWLEKGIEREGLVTSFRFSRTGKLFAEAFWSLHRPSRSRQRNMRSCRNALAAALSRNDAHDLVDAYEFAEKVIEDLTEGIDLFKDLARSLMREASLVVRWDDFVEFLQRFRRDYSKQLTADSATLNRQSIRQNLEKLRTEVTAAQYRRFENDLREIANWAVSEHTGDSVFEWMLERIGEMVDAACDTKQPMFVKSMEAYVRRVTGLIQQSMMLRTGHNRHSFMAVIQRLANSPQDIQDSILSRIAADMAAVEIRLLDPSALKLRSATQRRKSLTVTIRPRPTREARLEAAMMRAEAETFSIPNEDIVAVLRQELRLVGRGIRLSSLPRETARQAVRLFQAVEAVRSAKCNDLVATKLALRFDTDFYSGCDYLIDFRERGNEPDFHR

SEQ ID NO: 36999 - protein, 225 aa, Pseudomonas aeruginosa
MNLISTVNSQLNLHNLSLDRFRQIVTRLLAQGVIVRDDDRNEQFLYDDARRVEPLLLDYFDIAGLRLHHDSHACFFRLYAPGARVDGLPDDDVDPVPALKAKLTPDFVAAALALRFIYQEHLNAGSIELNGEAMISLEDLAATMQTQLRRNLPSTAGEKMELLGQLRRHKILRFNASFSITDEDAFLAIRPMILGVVTNDALLSALDADGVIEVQATVEEQDRED

SEQ ID NO: 37000 - protein, 1215 aa, Pseudomonas aeruginosa
MKIDHLILGNWGQIEPGDYQLGDMTLLTGGSGAGKSTFLDALQMLMTAGYKGILHFNPAQGEVTQDQRQKTKRNLESYVVGAEYSKFSRPDGAQTYVGAVFMPDKGEEGGKPFTALVAASARVDTVGSSRIPVLERSEVLIILDGVRLSVAELFKDGSQQEWVAVEEVVRMLRGKGYNPIQFPGKRDYLCALYGRFRGKSGITWEDARAAAKAWVESIAYKKIGSVNDLVKDEILAFDGKALQEGIERISGLMKQVTNLRKESERLQATHDRLALLTEKITDTIIGHESVLKHEVALRHLNVLRVDAALESYRNQVEHQRAAILESETQLVGLNDQKIELNRQVGALNTKLMGFQVHQEKQSLEAQAKLAATAAAQCVSALLHGLDQARNLSTAAENVLGRHIPVEMAGMSQAMEAVTAAHRGLERVQLQGMNSQLLMLAAQSDLDTGMLRDVAAQCTSIQTGWGRLYSALAGTDEPSLLLQCYAAQSPVSEAIRQLGNELRDKESARARIVTGGGNYPKWVSVALDRMREAMPSANVQVLCDLIEPASDQWQAAIEGYLADARFNFVVPAEFEREAIDTAQRLGLKTKVIQGEYCQQHADPSRVPAESIIHELTTEHRIAKAYLIEQYGRVVKVASSKELRHTPRGLTMNGKGSGSRTMFSAKDVELVFGKKARAVAIERLSAEIAELEQQLSTVRGHQTDLQEIITVVQRLQKPVLEFQSLQDAATDLEKIRQALARLDLTEIVNLEAEIAKLNTDLQAVEVASNKLVGAVAVSMSSIEEWNGTITSLEERRPAVVQSLTNEVDRVQNLCDVNRAHVVNLFLDSTYELAATWQGREDNLESAIPSMRAKTSLKAGNVRHDLAEHNRVARQDERFTSGVPDVLEQDRFDPVYGHLVLLRGEVLATLADLKNIGLLNNAQDLADAEASFRDVFTKQFCVEIRGKVEEGVRELRILNNELRNLKFGSDRFEIEWSKWVPEFYEYYTFFGAVAEMAASNEAHDLFGSASLTENQIAVRDRLIDLLLDDDHERATKELMRIADYRNYRVYDIANHSDSGGAIKLSEWGTGSGGQLETPAYIVRAAVVTNKLKVFDKGPSLKLLVNDESFARMDETRARAVLGFLRDNLNLQVICAVPTMKAGAIRDEFTREFTFTRLSPVENGELDFISECDSRELRPDKMRSMWEQQRRVAREQARMRFEMENPLEPDEEPAQEAVP

SEQ ID NO: 37001 - protein, 234 aa, Pseudomonas aeruginosa
MAAVVQQLNRLTGLAKEPLFLREVSAQLFWGMSKVLDNRQAMVAAILGLPECPFAEAPVQLQVFLPHGGWDGVLFIENQVSFERAIRSVNAETHRLAMVHTSGFKGSAIRLRQVATSSLFFSNLGSQEPLHTEGFGRWLYGQESGESQFWGDLDWAGMAILVALRLSFPGTVAWQPGYQPMLVSLTSGDGHHPEEADKRGQTPVCSTGCEYADNSLIPALQTLNVFVDQEAFRI

SEQ ID NO: 37002 - protein, 484 aa, Pseudomonas aeruginosa; identical to SEQ ID NO: 32845

SEQ ID NO: 37003 - protein, 251 aa, Pseudomonas aeruginosa
MNEEEQHSQQAPALFDQYRTNRPETPSISGEVETFEDAPVERPVVGGAEVGMPLEARRALVLLLRQGVVMAESKRLAFEALCRHEVLIAEHLGNMFMRMLLDMKAGIAILLQQEVAEQDEETDEASRLINKRTLSLYDTLLLLVLRKYYQERETAGEQKIIIDIERIEALMTPFLPLTYSSRSERRTLNGSLALLKDKRLISAVRGDDERFEITSVIRYVVNADFLERLLKEYERLAGNAGVKTGDEVQDA

SEQ ID NO: 37004 - protein, 1128 aa, Pseudomonas aeruginosa
MLEASEVSLSELFSTGQIRLAELSVYNWGSFHGLHSAKIDPEGTLITGDNGAGKSTLIDGLMALLLPSSKASFNIAAAQGDRTDRTLMSYVRGNYGKAHDGSETATLLKRSGATATGLRALYQADDGSKITLAALFWITQASNSLNDLKRLFVVGKRDVGLDELLHLFGEGNARVLKQHLKEDPLVEAFDSFTEYQETYVRLLCMENRNAPALLSRALGLKKIDDLTSLIRDLVLEPSQVKEHARLAVSEFDDLVSVHSELDDARRQRDALIELPETSQALNQAREEMRRISVELAGLPVYFGEQCSRLWQMRLKKYEAELLQLAEEMTRLGALEEQATERVQALFHAYQSQGGERLEGLRKDLKAATQVHHDSVRDARLYQMDVRDLSLPDTLSLDVFKQNQVRAQTELADMPALRQARQDQFASSAANLSREQTQLKELVGEIEDMESRPDSNIEPSYQKLRDQLVESLSLDPAEVVFVGELIDVLEAHRPWQGAIERALGGHRTTLLVPDERYRLVTKWLNTRHTGLHVRVQVVRLNQHPQVAEFLQDGFLKMLDWKPHPYRDWLKKHLSRFDLHCVESTEILDQTDFSMTIQGLVHLDKGRFEKKDQQRIDNPRFWCLGFSNKGRLAALRKDRVELEAEVKKLAQLTADARMAMDDLEKHTRVWERIAQLTWAAIDVQSAQDRMQSLRADLEALERPDSELGVAKARWEQAGAELKEVQGKKELVSKKVGGLESDKLKANQQLELALDAARTGLVDEVRELLSKRVGQLDLDDLEMVSELENRHRSALEEARKGAHNREFRASNKASGIVSEFKTKWPLIANDWLAGVDALEEYVDHLAHLEQEGLPDLVERFRERLNRNATQSLARISQTIQAEREDIQDRIETINDVLERTEFRQGTYLRLGSRPEIFEHVKAFNAQLMRVLARAGSDDHEARFVELKELIEKLEKATNPATSGNLESLRLLDSRYQLSFFAEEVEKGSKKVRDVLESSSGKSGGEKESFAGTIVAASLAYVLTPDGSDRPLYCTVFLDEAFSNTAEAVSRRVLKVFRELKIHVNLITPYKNLNLARESARSLLIAERDQDKHESRLCEVTWEEIDEQLARHEQQGLQKAASSLGIEVEPDL

SEQ ID NO: 37005 - protein, 397 aa, Pseudomonas aeruginosa; identical to SEQ ID NO: 32942

SEQ ID NO: 37006 - protein, 450 aa, Pseudomonas aeruginosa; identical to SEQ ID NO: 32505

SEQ ID NO: 37007 - protein, 220 aa, Pseudomonas aeruginosa; identical to SEQ ID NO: 33036

SEQ ID NO: 37008 - protein, 979 aa, Pseudomonas aeruginosa; identical to SEQ ID NO: 34267

SEQ ID NO: 37009 - protein, 393 aa, Pseudomonas aeruginosa; identical to SEQ ID NO: 32927

SEQ ID NO: 37010 - protein, 450 aa, Pseudomonas aeruginosa; identical to SEQ ID NO: 32505

SEQ ID NO: 37011 - protein, 220 aa, Pseudomonas aeruginosa; identical to SEQ ID NO: 33036

SEQ ID NO: 37012 - protein, 979 aa, Pseudomonas aeruginosa; identical to SEQ ID NO: 34267

SEQ ID NO: 37013 - protein, 393 aa, Pseudomonas aeruginosa; identical to SEQ ID NO: 32927

SEQ ID NO: 37014 - protein, 450 aa, Pseudomonas aeruginosa; identical to SEQ ID NO: 32505

SEQ ID NO: 37015 - protein, 220 aa, Pseudomonas aeruginosa; identical to SEQ ID NO: 33036

SEQ ID NO: 37016 - protein, 979 aa, Pseudomonas aeruginosa; identical to SEQ ID NO: 34267

SEQ ID NO: 37017 - protein, 393 aa, Pseudomonas aeruginosa; identical to SEQ ID NO: 32927

SEQ ID NO: 37018 - protein, 450 aa, Pseudomonas aeruginosa; identical to SEQ ID NO: 32505

SEQ ID NO: 37019 - protein, 220 aa, Pseudomonas aeruginosa; identical to SEQ ID NO: 33036

SEQ ID NO: 37020 - protein, 979 aa, Pseudomonas aeruginosa; identical to SEQ ID NO: 34267

SEQ ID NO: 37021 - protein, 393 aa, Pseudomonas aeruginosa; identical to SEQ ID NO: 32927

SEQ ID NO: 37022 - protein, 450 aa, Pseudomonas aeruginosa; identical to SEQ ID NO: 32943

SEQ ID NO: 37023 - protein, 220 aa, Pseudomonas aeruginosa
MDDEQPLMSAAVQVDERRTPQRVREAVQEMLKYGLLEESHKPNLYRSALANIEAVDTILEPLDLAMGVDEVRGLVFVTVRQGEVAEQDDWSHPLVRRQRLNLEQSLLIAILRQHFIAYEQESGTGATQALVAVDELIPQLQVYLGELGSEAKERNRVITLLDQLKGHGLVSALDAHDRVIIRPIITHLANPENLQALVVWLREQVEGATTPAAAAEEDEA

SEQ ID NO: 37024 - protein, 979 aa, Pseudomonas aeruginosa
MGAVLWFEGTSSSASDLKKLWLLSESPEQTLEHWLSQHHAGGMRALRQMEKDGTGIWPYPSKKAFLARLRDYFEVGENAFTLLNRAAGLKQLNSIDEIFRELVLDDRSAFGRAAEVATSFDDLTDIHRELETARKQQRSLQPVADGWERYKALQEQLQDKQVLEGILPVWFAEQGYRLWLAETNRLEKEHKQAELDREHCERRLDAQKGVVDQHRQRYLRVGGAGLDQLRGRIADWLRECDKRRLKAEQYQRLAKGLGLAEALSAAALEENQQQIAARLEILTQQITDARQTAFDAGLVQQELNGRLQALQQERAEVERRPGSNLPGHFHAFRGDLAQALGVDESALPFVAELVQVKPEELAWRGAIERAIGSHRLRILVPHGASEAALRWVNQRHNRLHVRLLEVKEPSSRPVFFDDGFTRKLTFKEHPYREAVKALLADNDRHCVESPEQLRHTPHAMTAQGLMSGKERFFDKQDQKRLDEGWLTGFDNRDRLAFLTEQIREVNEQLAPAKLALDAAQGDVRKLEDQASLLQRVEELQFEEIDLPGAERQLESLRAQLDTLTRPDSDLALIKAELDEAEALLDSLDRQRQQLIEQCGQLKIQFEQAASATRKAYRGAEKGLSDTQRELALAHFPTLSAADLGDIVELERKHTHELQGQLKALGEKLGDQKSELAKRMSDALKVDTGALSEVGRELVDVPKYLERLRVLTEEALPEKLKRFLEYLNRSSDDGVTQLLSYIDHEVSVIEERLDDLNSTMQRVDFQPGRYLRLVATKVIHASLRTLQQAQRQLNSARFIDDEGESHYKALQELVGLLKDACEHSRNQGAKALLDPRFRLEFAVSVIDRESKSVIETRTGSQGGSGGEKEIIASYVLTASLSYALCPDGSSRPLFGTIVLDEAFSRSSHAVAGRIIAALREFGLHAVFITPNKEMRLLRHHTRSAVVVHRRGVESSLVSLSWEALDEHHQQRSKAMHEVAH

SEQ ID NO: 37025 - protein, 385 aa, Pseudomonas aeruginosa; identical to SEQ ID NO: 32946

SEQ ID NO: 37026 - protein, 450 aa, Pseudomonas aeruginosa
MEDALQALSEMLAAYASQDLYEIDPDATHIQAGRELREWIKRRLVVEREGRIYATDALESAIQFVDSLDSRIMTSTASRLSVVQREIENLETGLNPSPSGRIASLRRRIQDLEHELAQVEAGHVVVLDEAQAIEGIREVYNLATSLRVDFRRVEDSWREADRALRQSIISEQSHRGEIVDRLLDGQDALLNTPEGRVFESFQQQLRQSAELEVMRERLRTILRHPAVPKALNRPQQRELRWLALRLVRESQAVLQARARSERDVRGFMKTGLAAEHHRVGQLLNDFFNLALSVDWQRQAVRRSTVRLPPVGVAITGVPAIERLRFKTLDDDDTGELDLSLKPAGLEQIDDDFWDAFDGLDREALIHDTLAVLVEQGRPVSLGELASLLPPAHDLETFALWLAMAREAGTEVLTEERQLVELVDEDEQRWRFNLPYVGLDHEALKDIDWEL

SEQ ID NO: 37027 - protein, 220 aa, Pseudomonas aeruginosa; identical to SEQ ID NO: 33787

SEQ ID NO: 37028 - protein, 979 aa, Pseudomonas aeruginosa
MGAVLWFEGTSSSASDLKKLWLLSESPEQTLEHWLSQHHAGGMRALRQMEKDGTGIWPYPSKKAFLARLRDYFEVGENAFTLLNRAAGLKQLNSIDEIFRELVLDDRSAFERAAEVAGSFDDLTDIHRELETARKQQRSLQPVADGWERYQVLQEQLHDKQALEGILPVWFAEQGYRLWLAETNRLEKEYKKAELDQEQCKSQLEAQKGVVDQHRQRYLRVGGAGIDQLRERIADWVRECDKRSLKAEQYQLLAKGLGLADELSAAALKENQQHIAARLEILDQQITDARQKAFDAGLVQQELNGRLQTLQQEGAEVEKRPGSNLPGQFHAFRSDLAQALGVNESALPFVAELVQVKPEELDWRGAIERAIGSHRLRILVPQDSSQAALRWVNQRHNRLHVRLLEVQEPTSRPVFFDDGFTRKLTFKEHPYREAIKALLADNDRHCVESPEQLRHTPHAMTAQGLMSGKERFFDKQDQKRLDEDWLTGFDNRDRLAFLAEQIREVNEQLEPAKLALDAAQGDVRQLETQASLLNRVKELQFEDIDLPGAQSQLESLRTQLATLTRPDSDLAMIKVELDAAEALQESLDQQLRQLIEQYVQLKTQFDQAASATRKAYNSAEKGLNDTQRELAQAHFPTLTADDLGDIVELERKHTRELQGQLKALGEKLGDQKSELAKRMSDALKVDTGALAEVGRELVDVPRYLERLRVLTEEALPEKLKRFLEYLNRSSDDGVTQLLSYIDHEVSMIEERLDDLNSTMQRVDFQPGRYLRLVAGKVIHESLRTLQRAQRQLNSARFIDDEGESHYKALQDLVGLLKNACEHSRNQGAKALLDPRFRLEFAVSVIDRESRNVIETRTGSQGGSGGEKEIIASYVLTASLSYALCPDGSSRPLFGTIVLDEAFSRSSHAVAGRIIAALREFGLHAVFITPNKEMRLLRHHTRSAVVVHRRGLESSLVSLSWEALDEHHQQRIKAMHEVTH

SEQ ID NO: 37029 - protein, 393 aa, Pseudomonas aeruginosa
MKSPTDIGRSLARQWQRSSVRLDRLLNSASWPQSLNIGKPSARLFSDNIRTVLRHVENWRSVKVGKVDWEPVSYRAGLAPISLPMRWHLRSPSEWIAATDDPSVSQEYAQLEYLVEQVDSSFHALLVAQRSLWLTKPSEEVIATAQLATQLSPGCAQGRPLRLLAEHGVDTKFFERNAILLTKLLDERFEGAASEQGLTTFLDAFEETSHWVLVVPLQPELLPFKRIRLTTSELAETSLPGSRLLVVENEQCVHLLPETLPDTLAVLGAGLDLQWLASAHLAGKQIAYWGDMDTWGLLMLARARHHQPAVEALLMDRELFDQHSLGSAVVEPAKAQELAPEGLMTDEADFYRYLLAQERGRLEQEYLPRRQVEQAISKWFGESVAPAHPERTA

SEQ ID NO: 37030 - protein, 484 aa, Pseudomonas aeruginosa; identical to SEQ ID NO: 32845

SEQ ID NO: 37031 - protein, 251 aa, Pseudomonas aeruginosa; identical to SEQ ID NO: 32980

SEQ ID NO: 37032 - protein, 1128 aa, Pseudomonas aeruginosa; identical to SEQ ID NO: 33348

SEQ ID NO: 37033 - protein, 397 aa, Pseudomonas aeruginosa; identical to SEQ ID NO: 32942

SEQ ID NO: 37034 - protein, 450 aa, Pseudomonas aeruginosa; identical to SEQ ID NO: 32924

SEQ ID NO: 37035 - protein, 220 aa, Pseudomonas aeruginosa; identical to SEQ ID NO: 33787

SEQ ID NO: 37036 - protein, 979 aa, Pseudomonas aeruginosa; identical to SEQ ID NO: 33788

SEQ ID NO: 37037 - protein, 393 aa, Pseudomonas aeruginosa; identical to SEQ ID NO: 32927

SEQ ID NO: 37038 - protein, 450 aa, Pseudomonas aeruginosa; identical to SEQ ID NO: 32924

SEQ ID NO: 37039 - protein, 220 aa, Pseudomonas aeruginosa; identical to SEQ ID NO: 33787

SEQ ID NO: 37040 - protein, 979 aa, Pseudomonas aeruginosa; identical to SEQ ID NO: 33788

SEQ ID NO: 37041 - protein, 393 aa, Pseudomonas aeruginosa; identical to SEQ ID NO: 32927

SEQ ID NO: 37042 - protein, 450 aa, Pseudomonas aeruginosa; identical to SEQ ID NO: 30847

SEQ ID NO: 37043 - protein, 220 aa, Pseudomonas aeruginosa
MDDEQPVMSAAVQVDERRTPQRVREAVQEMLKYGLLEESHKPNLYRSALSNIEAVDRILEPLDLAMGVDEVRGLVFVIVRQGEVAEEDDWSHPLVRRQRLNLEQSLLIAILRQHFIAYEQESGTGASQALVAVDELIPQLQVYLGELGSEAKERNRIITLLDQLKGHGLVSALDAHDRVIIRPIITHLANPENLQALVAWLREQVEGAATPVAGAEEDEA

SEQ ID NO: 37044 - protein, 979 aa, Pseudomonas aeruginosa
MGAVLWFEGTSSSASDLKKLWLLSESPEQTLEHWLSQHHAGGMRALRQMEKDGTGIWPYPSKKAFLARLRDYFEVGENAFTLLNRAAGLKQLNSIDEIFRELVLDDRSAFERAAEVASSFDDLTDIHRELETARKQQRSLQPVADGWERYKALQQQLHDKQTLEGILPVWFAEQGYRLWLAETNRLEKAQKQAELNQEQCRGQFDIQKGVVDQHRQRYLRVGGAEIDLLRARIADWVREFDKRRLKAEQYQRLAKGLGLVVELSAAALEENQQQITARLEVLAEQITEARQKAFDAGIVQKELDGRLQSLQHERAEVERRPGSNLPGHFHAFRGDLAQALCVDESALPFVAELVQVKPEELAWRGAIERAIGSHRLRILVPQGSSEAALRWVNQRHNRLHVRLLEVKEPSSRPVFFDDGYTRKLTFKEHPYREAVKVLLADNDRHCVESTEQLRHTPYAMTAQGLMSGKERFFDKQDQKRLDEDWLTGFDNRDRLAFLTEQIREVNEQLAPAKLALDAAQGDVRKLEDQASLLQRVEELQFEEIDLPGAERQLESLRAQLDTLTRPDSDLALIKSELDEAEALLDSLDRQRQQLIEQCGQLKIQFEQAASATRKAYRGAEKGLSDTQRELALAHFPTLSAADLGDIVELERKHTHELQGQLKALGEKLGDQKSELAKRMSDALKVDTGALSEVGRELVDVPKYLERLRVLTEEALPEKLKRFLEYLNRSSDDGVTQLLSYIDHEVSVIEERLDDLNSTMQRVDFQPGRYLRLVATKVIHASLRTLQQAQRQLNSARFIDDEGESHYKALQELVGLLKDACEHNRNQGAKALLDPRFRLEFAVSVIDRESKSVIETRTGSQGGSGGEKEIIASYVLTASLSYALCPDGSSRPLFGTIVLDEAFSRSSHAVAGRIIAALREFGLHAVFITPNKEMRLLRHHTRSAVVVHRRGVESSLVSLSWEALDEHHQQRIKAMHEVAH

SEQ ID NO: 37045 - protein, 385 aa, Pseudomonas aeruginosa; identical to SEQ ID NO: 32974

SEQ ID NO: 37046 - protein, 450 aa, Pseudomonas aeruginosa; identical to SEQ ID NO: 32505

SEQ ID NO: 37047 - protein, 220 aa, Pseudomonas aeruginosa; identical to SEQ ID NO: 33036

SEQ ID NO: 37048 - protein, 979 aa, Pseudomonas aeruginosa; identical to SEQ ID NO: 34267

SEQ ID NO: 37049 - protein, 393 aa, Pseudomonas aeruginosa; identical to SEQ ID NO: 32927

SEQ ID NO: 37050 - protein, 450 aa, Pseudomonas aeruginosa; identical to SEQ ID NO: 31994

SEQ ID NO: 37051 - protein, 220 aa, Pseudomonas aeruginosa; identical to SEQ ID NO: 33787

SEQ ID NO: 37052 - protein, 979 aa, Pseudomonas aeruginosa; identical to SEQ ID NO: 33788

SEQ ID NO: 37053 - protein, 393 aa, Pseudomonas aeruginosa; identical to SEQ ID NO: 32927

SEQ ID NO: 37054 - protein, 484 aa, Pseudomonas aeruginosa; identical to SEQ ID NO: 32845

SEQ ID NO: 37055 - protein, 251 aa, Pseudomonas aeruginosa; identical to SEQ ID NO: 32980

SEQ ID NO: 37056 - protein, 1128 aa, Pseudomonas aeruginosa; identical to SEQ ID NO: 32981

SEQ ID NO: 37057 - protein, 397 aa, Pseudomonas aeruginosa; identical to SEQ ID NO: 32982

SEQ ID NO: 37058 - protein, 450 aa, Pseudomonas aeruginosa; identical to SEQ ID NO: 32505

SEQ ID NO: 37059 - protein, 220 aa, Pseudomonas aeruginosa; identical to SEQ ID NO: 33036

SEQ ID NO: 37060 - protein, 979 aa, Pseudomonas aeruginosa; identical to SEQ ID NO: 34267

SEQ ID NO: 37061 - protein, 393 aa, Pseudomonas aeruginosa; identical to SEQ ID NO: 32927

SEQ ID NO: 37062 - protein, 450 aa, Pseudomonas aeruginosa; identical to SEQ ID NO: 32505

SEQ ID NO: 37063 - protein, 220 aa, Pseudomonas aeruginosa; identical to SEQ ID NO: 33036

SEQ ID NO: 37064 - protein, 979 aa, Pseudomonas aeruginosa; identical to SEQ ID NO: 33037

SEQ ID NO: 37065 - protein, 393 aa, Pseudomonas aeruginosa; identical to SEQ ID NO: 32927

SEQ ID NO: 37066 - protein, 484 aa, Pseudomonas aeruginosa; identical to SEQ ID NO: 32845

SEQ ID NO: 37067 - protein, 251 aa, Pseudomonas aeruginosa; identical to SEQ ID NO: 32980

SEQ ID NO: 37068 - protein, 1128 aa, Pseudomonas aeruginosa; identical to SEQ ID NO: 32981

SEQ ID NO: 37069 - protein, 397 aa, Pseudomonas aeruginosa; identical to SEQ ID NO: 32982

SEQ ID NO: 37070 - protein, 484 aa, Pseudomonas aeruginosa; identical to SEQ ID NO: 32845

SEQ ID NO: 37071 - protein, 251 aa, Pseudomonas aeruginosa; identical to SEQ ID NO: 32980

SEQ ID NO: 37072 - protein, 1128 aa, Pseudomonas aeruginosa; identical to SEQ ID NO: 32981

SEQ ID NO: 37073 - protein, 397 aa, Pseudomonas aeruginosa; identical to SEQ ID NO: 32982

SEQ ID NO: 37074 - protein, 450 aa, Pseudomonas aeruginosa; identical to SEQ ID NO: 32924

SEQ ID NO: 37075 - protein, 220 aa, Pseudomonas aeruginosa; identical to SEQ ID NO: 33787

SEQ ID NO: 37076 - protein, 979 aa, Pseudomonas aeruginosa; identical to SEQ ID NO: 33788

SEQ ID NO: 37077 - protein, 393 aa, Pseudomonas aeruginosa; identical to SEQ ID NO: 32927

SEQ ID NO: 37078 - protein, 450 aa, Pseudomonas aeruginosa; identical to SEQ ID NO: 31401

SEQ ID NO: 37079 - protein, 220 aa, Pseudomonas aeruginosa; identical to SEQ ID NO: 36972

SEQ ID NO: 37080 - protein, 979 aa, Pseudomonas aeruginosa; identical to SEQ ID NO: 36973

SEQ ID NO: 37081 - protein, 385 aa, Pseudomonas aeruginosa; identical to SEQ ID NO: 36974

SEQ ID NO: 37082 - protein, 486 aa, Pseudomonas aeruginosa; identical to SEQ ID NO: 32951

SEQ ID NO: 37083 - protein, 235 aa, Pseudomonas aeruginosa; identical to SEQ ID NO: 32952

SEQ ID NO: 37084 - protein, 1124 aa, Pseudomonas aeruginosa; identical to SEQ ID NO: 32953

SEQ ID NO: 37085 - protein, 387 aa, Pseudomonas aeruginosa; identical to SEQ ID NO: 32954

SEQ ID NO: 37086 - protein, 450 aa, Pseudomonas aeruginosa; identical to SEQ ID NO: 32924

SEQ ID NO: 37087 - protein, 220 aa, Pseudomonas aeruginosa; identical to SEQ ID NO: 33787

SEQ ID NO: 37088 - protein, 979 aa, Pseudomonas aeruginosa; identical to SEQ ID NO: 33788

SEQ ID NO: 37089 - protein, 393 aa, Pseudomonas aeruginosa; identical to SEQ ID NO: 32927

SEQ ID NO: 37090 - protein, 450 aa, Pseudomonas aeruginosa; identical to SEQ ID NO: 32924

SEQ ID NO: 37091 - protein, 220 aa, Pseudomonas aeruginosa; identical to SEQ ID NO: 33787

SEQ ID NO: 37092 - protein, 979 aa, Pseudomonas aeruginosa; identical to SEQ ID NO: 33788

SEQ ID NO: 37093 - protein, 393 aa, Pseudomonas aeruginosa; identical to SEQ ID NO: 32927

SEQ ID NO: 37094 - protein, 486 aa, Pseudomonas aeruginosa
MKADKAIATYRRMRAQPLWRLLASTTGPTVIGLLQSHLYESERSLPASIFHERIARDLEELRAQGEDFPQTAQAYVASWLADGFLERRFPAGASEEEYELSTAAVEAIRFVSGLAQPHSAATESRLTLVIEALARLAEDTDTDKFRRIDRLMAEQARIDKEIDAIQKGQMRVLPHTTALERTREIITLADDLAGDFRRVRDQFDQLNRDLRERIMDNDGNRGDVLDSLFAGIDLISESDAGRTFSAFWRLLTDPEQAATLDQALDSVMSREFVGQLEAKERRFLLRLTRTLLEQGGMVHEVLQTFARSLKHFVQSREYLEQRRLNHLLKDAQRAALSLKDEVRATETLQYTLELTSSRLRSLSQWVLHDPSLQALPGQMAEGDAPPIDLESVSELVAQSEIDFRTLKANVLAVLEQRSQASIADVLEQFPAAQGLGSVVGLLALGSRHGFKADHTETVGWVGGDDKRRSARIPKIFFLRERANELV

SEQ ID NO: 37095 - protein, 235 aa, Pseudomonas aeruginosa
MNWSENDESAMPVEAQAPDDAQAPANTLFLGDSGELALDTRRALVQLLAGPSLDGRRHPKLWPILVRDEAVIRRRLAELFLELVIDRDVQVAFTRQADTGELEVPLLLRRAQLTFIDSILLLHLRQRLTQADSQGDRAVVSTYEITEFLSLYERAANTDRAGFVKRVHASIEKIKKHSILQKIRSSEDRFEISPTLKLLFSAEEIQALTHLYQRMAAGEAPAQLVQTEADEEADQ

SEQ ID NO: 37096 - protein, 1124 aa, Pseudomonas aeruginosa
MISEPQTASLFAREQFRMTRLQVYNWGTFSGLHDVPISERGFLFVGRSGAGKSTLLDAFSALLTPPRWIDFNAAAREADRSGRDRNLVTYIRGAWAEQKDGESGEIATRYLRAGTTWSSLALTYQNALGQSVVLVQVFWLRGNANGSTDVKRHYLVMERAFDLRELEDFGQSNFDIRKLKQSFPEAFARDEFRPYCERFCRLLGIESEMALRLLHKTQSAKNLGDLNTFLRDFMLDKPETFEVADRLVSEFGELNAAHQAVVTAREQVQTLAPAREQYQRRDSLMLQRNGLDELRLGVDGYRETRRIELLKEHVASLEVQADGSEGEVGRRQSTLDNHAAILRDLERQHREAGGDQIEQWEAEKSGLEGQRTDRLRKRGQAEEACKKLEWSLPDSPQAFAELLGNARQEVENWEQRSNDSRAEQFRLDREKKDAETAFSQALKEVQALQRQPSNIPADMLEMRRNIAAAIGISESALPFVGELIEVKPDEAEWQGAIERVLHGFALSLLVDERQYSALANHINTTHVGQRLVYYRTGRPETWQAKPIGANSLVLKLNVKEGTYADWLQAELRQRFDYACVDSIQSFRSADRAITREGQVKHSKTRHEKDDRRNVGDRRNWVLGFDNREKLALFQTQAQELADTISRLGGEIDKLSDQDKNRAARAMQCQTLVNLQWQEIDVLPLLDRISTIERQIREARECNTALLQISQRIDKQKDLVEQADKDLREAKVAHDSVLKQIKDSTQKLESLLQDASRVSLPPHQIKGLDERFTKQSDVIRLDSLDKVTTAVERGLNTEISEIKDEIADCEKEIEARFADFKRQWPMDAGDMDTSLASAPDFFAKLVRLETDGLPAYEQRFFELLQNQSHQNLAALSTYLNDARKAILERMDLVNDSLGQVPFNQSTNQRTYLHIDASDRQLVDVKEFKQEIQQALSHAWTEDREFAEARFLALRRLVDRLASQDPEQKRWRETVLDVRQHVEFIGREIDESGVEVEIYRSGAGKSGGQRQKLATTCLAAALRYQLGGNDHGVPMYAPVVLDEAFDKADNEFTALAMNIFTNFGFQMVVATPLKSVMTLEPFIGGACFVDISDRRVSGVLLIEYDGDRQRLKLPEHAREEASVEAS

SEQ ID NO: 37097 - protein, 484 aa, Pseudomonas aeruginosa; identical to SEQ ID NO: 32845

SEQ ID NO: 37098 - protein, 251 aa, Pseudomonas aeruginosa; identical to SEQ ID NO: 32980

SEQ ID NO: 37099 - protein, 1128 aa, Pseudomonas aeruginosa; identical to SEQ ID NO: 32981

SEQ ID NO: 37100 - protein, 397 aa, Pseudomonas aeruginosa; identical to SEQ ID NO: 32982

SEQ ID NO: 37101 - protein, 484 aa, Pseudomonas aeruginosa; identical to SEQ ID NO: 32845

SEQ ID NO: 37102 - protein, 251 aa, Pseudomonas aeruginosa; identical to SEQ ID NO: 32980

SEQ ID NO: 37103 - protein, 1128 aa, Pseudomonas aeruginosa; identical to SEQ ID NO: 33348

SEQ ID NO: 37104 - protein, 397 aa, Pseudomonas aeruginosa; identical to SEQ ID NO: 32942

SEQ ID NO: 37105 - protein, 450 aa, Pseudomonas aeruginosa; identical to SEQ ID NO: 32924

SEQ ID NO: 37106 - protein, 220 aa, Pseudomonas aeruginosa; identical to SEQ ID NO: 33787

SEQ ID NO: 37107 - protein, 979 aa, Pseudomonas aeruginosa; identical to SEQ ID NO: 33788

SEQ ID NO: 37108 - protein, 393 aa, Pseudomonas aeruginosa; identical to SEQ ID NO: 32927

SEQ ID NO: 37109 - protein, 450 aa, Pseudomonas aeruginosa; identical to SEQ ID NO: 32924

SEQ ID NO: 37110 - protein, 220 aa, Pseudomonas aeruginosa; identical to SEQ ID NO: 33787

SEQ ID NO: 37111 - protein, 979 aa, Pseudomonas aeruginosa; identical to SEQ ID NO: 33788

SEQ ID NO: 37112 - protein, 393 aa, Pseudomonas aeruginosa; identical to SEQ ID NO: 32927

SEQ ID NO: 37113 - protein, 450 aa, Pseudomonas aeruginosa; identical to SEQ ID NO: 32505

SEQ ID NO: 37114 - protein, 220 aa, Pseudomonas aeruginosa; identical to SEQ ID NO: 33036

SEQ ID NO: 37115 - protein, 979 aa, Pseudomonas aeruginosa; identical to SEQ ID NO: 34267

SEQ ID NO: 37116 - protein, 393 aa, Pseudomonas aeruginosa; identical to SEQ ID NO: 32927

SEQ ID NO: 37117 - protein, 450 aa, Pseudomonas aeruginosa; identical to SEQ ID NO: 32505

SEQ ID NO: 37118 - protein, 220 aa, Pseudomonas aeruginosa; identical to SEQ ID NO: 33036

SEQ ID NO: 37119 - protein, 979 aa, Pseudomonas aeruginosa; identical to SEQ ID NO: 34267

SEQ ID NO: 37120 - protein, 393 aa, Pseudomonas aeruginosa; identical to SEQ ID NO: 32927

SEQ ID NO: 37121 - protein, 450 aa, Pseudomonas aeruginosa; identical to SEQ ID NO: 32527

SEQ ID NO: 37122 - protein, 220 aa, Pseudomonas aeruginosa; identical to SEQ ID NO: 36907

SEQ ID NO: 37123 - protein, 979 aa, Pseudomonas aeruginosa; identical to SEQ ID NO: 36908

SEQ ID NO: 37124 - protein, 381 aa, Pseudomonas aeruginosa; identical to SEQ ID NO: 30518

SEQ ID NO: 37125 - protein, 450 aa, Pseudomonas aeruginosa; identical to SEQ ID NO: 32924

SEQ ID NO: 37126 - protein, 220 aa, Pseudomonas aeruginosa; identical to SEQ ID NO: 33787

SEQ ID NO: 37127 - protein, 979 aa, Pseudomonas aeruginosa; identical to SEQ ID NO: 33788

SEQ ID NO: 37128 - protein, 393 aa, Pseudomonas aeruginosa; identical to SEQ ID NO: 32927

SEQ ID NO: 37129 - protein, 450 aa, Pseudomonas aeruginosa; identical to SEQ ID NO: 32924

SEQ ID NO: 37130 - protein, 220 aa, Pseudomonas aeruginosa; identical to SEQ ID NO: 33787

SEQ ID NO: 37131 - protein, 979 aa, Pseudomonas aeruginosa; identical to SEQ ID NO: 33788

SEQ ID NO: 37132 - protein, 393 aa, Pseudomonas aeruginosa; identical to SEQ ID NO: 32927

SEQ ID NO: 37133 - protein, 450 aa, Pseudomonas aeruginosa; identical to SEQ ID NO: 32527

SEQ ID NO: 37134 - protein, 220 aa, Pseudomonas aeruginosa; identical to SEQ ID NO: 36907

SEQ ID NO: 37135 - protein, 979 aa, Pseudomonas aeruginosa; identical to SEQ ID NO: 36908

SEQ ID NO: 37136 - protein, 381 aa, Pseudomonas aeruginosa; identical to SEQ ID NO: 30518

SEQ ID NO: 37137 - protein, 484 aa, Pseudomonas aeruginosa
MSLHEQQARFRRLLFEHAAWRLLHAENAPIILAFINDLFAQDSEVPFGKARVALEAELPIWQEVYGLHDNAGTYLRQWIQAGWLRELDDKLTRTDAFELALRFAQSLDQRDSNTTASHLRIVQDTVRDLAVALSPNPEERITLLTARRQELDLEIERLQMGEVPELSAPEQRERIRGLYQLTSVLTGDFRRLEDEIRQLDQRMRIRMIESESGRGEVVKALIEHEGELLQTDAGQAFDGFYQLLCDQNRITEFREQIRSILARPASQYLKSDELRYLSHLVRELGKESERVFQVRRRTEESLRAFVESGVQQERRAVERLLRQLERLAVNFKDQEVSLREPVVVDLPTGSLRVRSPSSIHLRLPEERLDTRQVAANTNSHVASLGMLDHLNTVKVLEVAQDVKQLLTEHGPMTVASIVSHRPITGGLEELVAHVRIAKAVSAVVLEHPESLVVVDRTGNWIRANIPSLLMSAEQFPTDLEELAL

SEQ ID NO: 37138 - protein, 251 aa, Pseudomonas aeruginosa
MNEEEQHSQQAPALFDQYRANRPDTPSVSGEVETFGDAPVEPPVVGDSGVGMPLEARRALVLLLRQGVVMADSKRLAFEALCRHEGLIAEHLGNMFMRMLLDMKAGIAILLQQEVTEQGEEADEASRLINKRTLSLYDTLLLLVLRKYYQERETAGEQKIIIDIERIEALMTPFLPLTYSSRSERRTLNGSLALLKDKRLISAVRGDDERFEITSVIRYVVNADFLERLLKEYERLAGDADVKTREEVQDA

SEQ ID NO: 37139 - protein, 1128 aa, Pseudomonas aeruginosa
MLEASEVSLSELFSTGQIRLAELSVYNWGSFHGLHSAKIDPEGTLITGDNGAGKSTLIDGLMALLLPSSKASFNIAAAQGDRTDRTLMSYVRGNYGKAHDGSETATLLKRSGATATGLRALYQADDGSKITLAALFWITQASNSLNDLKRLFVVGKRDVGLDELLHLFGEGNARVLKQHLKEDSLVEAFDSFTEYQETYVRLLRMENRNAPALLSRALGLKKIDDLTSLIRDLVLEPSQVKEHARLAVSEFDDLVSVHSELDDARRQRDALIELPETSQALNQAREEMRRISSELAGLPVYFGEQCSRLWQMRLKQYEAELLQLAEEMTRLGALEEQATDRVQALFHAYQSQGGERLEGLRKDLKAATQVHHDSVRDARLYQMDVRDLSLSDTLSLDVFKQNQVRAQTELADVPALRQARQDQFASSAANLSREQTQLKELVGEIEDMESRPDSNIEPSYQKLRDQLVESLSLDPAEVVFVGELIDVLEAHRPWQGAIERALGGHRTTLLVPDERYRLVTKWLNTRHTGLHVRVQVVRLNQHPQVAEFLPDGFLKMLDWKPHPYRDWLKKHLSRFDLHCVASTEILDQTDFSMTIQGLVHLDKGRFEKKDQQRIDNPRFWCLGFSNKGRLAALRKDRVELEAEVKKLAQLTADARTAMDDLEKHTRVWERIAQLTWAAIDVQSAQDRMQSLKADLEALEQPDSELGVAKARWEQAGAELKEIQEQKGAVSKRIGGLDSNVTQANQQLDQAFEQAKAGLTDEVRELLILRVGQLHLEDLDGVAELEGRHRSELEDTRKRTQTREVRASTKASGIVSDFKAKWPLIANDWLAGVDGLEEYLDHLTHLVQEGLPDLVERFRERLNRNATQSLARISQTIQAEREDIQDRIETINDVLERTEFRQGTYLRLGSRAETFEHVKAFNGQLMRVLARAGSDDHEARFVELKDLIEKLEKATNPATSGNLESLRLLDSRYQLSFFAEEVEKGSKKVRDVLESSSGKSGGEKESFAGTIVAASLAYVLTPDGSDRPLYCTVFLDEAFSNTAEAVSRRVLKVFRELKIHVNLITPYKNLNLARESARSLLIAERDQEKHESRLCEVTWEEIDEQLARHEQQGLQKAASSLGIEVEPAL

SEQ ID NO: 37140 - protein, 397 aa, Pseudomonas aeruginosa
MRDWGRLPDDVVEELRRLEWDHTGRLRERLLGARPFPIPCLLKPPTGSQALEDLDHFHGYIAAWRKWPWPHQVAWVTKRFRQLGECEVPIRLEIESTQALIAALGAEAVERSRGWAERMEPLLSLDKALFTTLIKQLGELEKLCMTDIHLLACLLPQLQCGMGQRRYLRALPLQRVDTKFVELNQSLIAALLDSMHDQEVSAHGGLEAWLGCRATPSNWLHVKPLCPDVKGRLAGLDLVRLSFEQLMTYPLPARSVLVIENLQAGYGLPELPDTIAVFGGGANTAWLQAEWLKDRRVGYWGDLDTWGLKFLADARLRQPHVEAVMMDRDTLIAHVERGVCEDRPAELPDYGLTLAERSLFEELRSATHGVGRLEQERLSQDYVEQQLAAWTHASAGL

SEQ ID NO: 37141 - protein, 450 aa, Pseudomonas aeruginosa; identical to SEQ ID NO: 32505

SEQ ID NO: 37142 - protein, 220 aa, Pseudomonas aeruginosa; identical to SEQ ID NO: 33036

SEQ ID NO: 37143 - protein, 979 aa, Pseudomonas aeruginosa; identical to SEQ ID NO: 33037

SEQ ID NO: 37144 - protein, 393 aa, Pseudomonas aeruginosa; identical to SEQ ID NO: 32927

SEQ ID NO: 37145 - protein, 450 aa, Pseudomonas aeruginosa; identical to SEQ ID NO: 32943

SEQ ID NO: 37146 - protein, 220 aa, Pseudomonas aeruginosa; identical to SEQ ID NO: 37023

SEQ ID NO: 37147 - protein, 979 aa, Pseudomonas aeruginosa; identical to SEQ ID NO: 37024

SEQ ID NO: 37148 - protein, 385 aa, Pseudomonas aeruginosa; identical to SEQ ID NO: 32946

SEQ ID NO: 37149 - protein, 450 aa, Pseudomonas aeruginosa; identical to SEQ ID NO: 30847

SEQ ID NO: 37150 - protein, 220 aa, Pseudomonas aeruginosa; identical to SEQ ID NO: 37043

SEQ ID NO: 37151 - protein, 979 aa, Pseudomonas aeruginosa; identical to SEQ ID NO: 37044

SEQ ID NO: 37152 - protein, 385 aa, Pseudomonas aeruginosa; identical to SEQ ID NO: 32974

SEQ ID NO: 37153 - protein, 484 aa, Pseudomonas aeruginosa; identical to SEQ ID NO: 32845

SEQ ID NO: 37154 - protein, 251 aa, Pseudomonas aeruginosa; identical to SEQ ID NO: 32846

SEQ ID NO: 37155 - protein, 1128 aa, Pseudomonas aeruginosa; identical to SEQ ID NO: 32941

SEQ ID NO: 37156 - protein, 397 aa, Pseudomonas aeruginosa; identical to SEQ ID NO: 32942

SEQ ID NO: 37157 - protein, 450 aa, Pseudomonas aeruginosa; identical to SEQ ID NO: 32505

SEQ ID NO: 37158 - protein, 220 aa, Pseudomonas aeruginosa; identical to SEQ ID NO: 33036

SEQ ID NO: 37159 - protein, 979 aa, Pseudomonas aeruginosa; identical to SEQ ID NO: 34267

SEQ ID NO: 37160 - protein, 393 aa, Pseudomonas aeruginosa; identical to SEQ ID NO: 32927

SEQ ID NO: 37161 - protein, 484 aa, Pseudomonas aeruginosa; identical to SEQ ID NO: 32845

SEQ ID NO: 37162 - protein, 251 aa, Pseudomonas aeruginosa; identical to SEQ ID NO: 37003

SEQ ID NO: 37163 - protein, 1128 aa, Pseudomonas aeruginosa; identical to SEQ ID NO: 37004

SEQ ID NO: 37164 - protein, 397 aa, Pseudomonas aeruginosa; identical to SEQ ID NO: 32942

SEQ ID NO: 37165 - protein, 484 aa, Pseudomonas aeruginosa; identical to SEQ ID NO: 32845

SEQ ID NO: 37166 - protein, 251 aa, Pseudomonas aeruginosa; identical to SEQ ID NO: 32980

SEQ ID NO: 37167 - protein, 1128 aa, Pseudomonas aeruginosa; identical to SEQ ID NO: 32981

SEQ ID NO: 37168 - protein, 397 aa, Pseudomonas aeruginosa; identical to SEQ ID NO: 32982

SEQ ID NO: 37169 - protein, 450 aa, Pseudomonas aeruginosa
MEDALQALATILAAYASQELYEISPEDTHLQAGRELREWIKRRLIIEREGRIYATDALEVAIQFVESLDSRIMTSTASRLSVVQREIENLETGLNPSKESRIASLRRRIKDLELELEQAEAGQISVLDEAQAIEGIREVYNLAIGLRADFRRVEDSWREADRALRQSIISEQYHRGEIVDRLLDGQDALLNTPEGRVFDSFQQQLRQSIELDNMRVRLRTILRHPTIPKALNRSQQVELQWLVLRLVQETQSVLQARARSERDVKGFMKTGLAAEHHRVGHLLNEIFNLALNIDWQRQSVRRQAIPLPPVGVAITSVPAAERLRFKALDDEVRSELNLHDKQAGLDQIGDDFWDAFDGLDRETLIRNTLSVLAEQRRPVSLGELAHLLPPAHDLETFALWLGMAREAGIEVLDKEKETVELVDEEQRRWIFHLPYAGLESEALKDIDWEL

SEQ ID NO: 37170 - protein, 218 aa, Pseudomonas aeruginosa
MELAEALDKSVDEPRTPRRTRETVQELLKYGLLEESHKPNLYRTALTQHEDIARVLEPLDLRMGVDEVRGLVFVTVRQDETAEQDEWSHPLVRRQRLNLEQSLLIAILRQHFITYEQESGTGASHTQVAVDDLIPQLQVYLGDLGSDARERTRVIGLLDQLKGHGLVSALDTHDRVIIRPIIAHLANPENLQALLAWLQAQIEKSNETTEPAAGEEME

SEQ ID NO: 37171 - protein, 380 aa, Pseudomonas aeruginosa
MKSPSDIGQSLARQWQQPRIRRERLLDPGGWPRDFTIGKPSAGLFSANPQAVQRHVEAWRQVRIGEVTWEPVDYRAALGPVQMPMTWRLRSPSEWVAASGDPEVMREYRILEALVEQTDRCFHTLLVSQRSLWLKKSADEVITTARLAARLSPGCAQGRPLRMLAELGVDTKFFERNTALLTKLLDERFEGEVSAQGLTTFLDAFEDSSHWVLVAPLSPGLLPFKRLRLTTAELAEVDLPCSRVLVVENEQCIHQLPELPDTIAILGAGLDLQWLGSPYLAGKSLGYWGDMDTWGLLMLARARQRQPAIKALLMARSIFDRYESTSAVAEPVKAQDAAPDGLQPCEADFYRYLLRRERGRLEQEYLPKDLVENAIATWTM

SEQ ID NO: 37172 - protein, 450 aa, Pseudomonas aeruginosa; identical to SEQ ID NO: 32527

SEQ ID NO: 37173 - protein, 220 aa, Pseudomonas aeruginosa; identical to SEQ ID NO: 36907

SEQ ID NO: 37174 - protein, 979 aa, Pseudomonas aeruginosa; identical to SEQ ID NO: 36908

SEQ ID NO: 37175 - protein, 381 aa, Pseudomonas aeruginosa; identical to SEQ ID NO: 30518

SEQ ID NO: 37176 - protein, 484 aa, Pseudomonas aeruginosa; identical to SEQ ID NO: 32845

SEQ ID NO: 37177 - protein, 251 aa, Pseudomonas aeruginosa; identical to SEQ ID NO: 32980

SEQ ID NO: 37178 - protein, 1128 aa, Pseudomonas aeruginosa; identical to SEQ ID NO: 32981

SEQ ID NO: 37179 - protein, 397 aa, Pseudomonas aeruginosa; identical to SEQ ID NO: 32982

SEQ ID NO: 37180 - protein, 450 aa, Pseudomonas aeruginosa; identical to SEQ ID NO: 32505

SEQ ID NO: 37181 - protein, 220 aa, Pseudomonas aeruginosa; identical to SEQ ID NO: 33036

SEQ ID NO: 37182 - protein, 979 aa, Pseudomonas aeruginosa; identical to SEQ ID NO: 34267

SEQ ID NO: 37183 - protein, 393 aa, Pseudomonas aeruginosa; identical to SEQ ID NO: 32927

SEQ ID NO: 37184 - protein, 450 aa, Pseudomonas aeruginosa; identical to SEQ ID NO: 32505

SEQ ID NO: 37185 - protein, 220 aa, Pseudomonas aeruginosa; identical to SEQ ID NO: 33036

SEQ ID NO: 37186 - protein, 979 aa, Pseudomonas aeruginosa; identical to SEQ ID NO: 34267

SEQ ID NO: 37187 - protein, 393 aa, Pseudomonas aeruginosa; identical to SEQ ID NO: 32927

SEQ ID NO: 37188 - protein, 484 aa, Pseudomonas aeruginosa; identical to SEQ ID NO: 32845

SEQ ID NO: 37189 - protein, 251 aa, Pseudomonas aeruginosa; identical to SEQ ID NO: 32980

SEQ ID NO: 37190 - protein, 1128 aa, Pseudomonas aeruginosa; identical to SEQ ID NO: 33348

SEQ ID NO: 37191 - protein, 397 aa, Pseudomonas aeruginosa; identical to SEQ ID NO: 32942

SEQ ID NO: 37192 - protein, 450 aa, Pseudomonas aeruginosa; identical to SEQ ID NO: 32505

SEQ ID NO: 37193 - protein, 220 aa, Pseudomonas aeruginosa; identical to SEQ ID NO: 33036

SEQ ID NO: 37194 - protein, 979 aa, Pseudomonas aeruginosa; identical to SEQ ID NO: 34267

SEQ ID NO: 37195 - protein, 393 aa, Pseudomonas aeruginosa; identical to SEQ ID NO: 32927

SEQ ID NO: 37196 - protein, 450 aa, Pseudomonas aeruginosa; identical to SEQ ID NO: 31401

SEQ ID NO: 37197 - protein, 220 aa, Pseudomonas aeruginosa; identical to SEQ ID NO: 36972

SEQ ID NO: 37198 - protein, 979 aa, Pseudomonas aeruginosa; identical to SEQ ID NO: 36973

SEQ ID NO: 37199 - protein, 385 aa, Pseudomonas aeruginosa
MKSPTDIGRSLARQWQRSSIRLDRLLNPGSWPQCFNIGKPSARVFAENIHAVLQHVENWRSLKVGKVDWESVSYRAGLAPISLPMRWHLGSPSEWIAAANDPTVSREYAQLEYLVEQVDSAFHALLVAQRSLWLTKPSEEVVATAQLATRLSPGCARGRPLRLLAEHGVDTKFFERNASLLTRLLDERFEGAASEQGLTTFLDAFEESSHWVLVVPLQPELLPFKRLRLTTAELAETPLPGSRLLVVENEQCVHLLPETLPDTLAVLGAGLDLQWLASAHLAGKQIAYWGDMDTWGLLMLARARLHQPAVEALLMEQELFEQHSPGNAVVEPAKARESAPPGLLADEADFYRYLLVQERGRLEQEYLPKVQVERAIEQWARAVPV

SEQ ID NO: 37200 - protein, 450 aa, Pseudomonas aeruginosa; identical to SEQ ID NO: 32924

SEQ ID NO: 37201 - protein, 220 aa, Pseudomonas aeruginosa; identical to SEQ ID NO: 33787

SEQ ID NO: 37202 - protein, 979 aa, Pseudomonas aeruginosa; identical to SEQ ID NO: 33788

SEQ ID NO: 37203 - protein, 393 aa, Pseudomonas aeruginosa; identical to SEQ ID NO: 32927

SEQ ID NO: 37204 - protein, 450 aa, Pseudomonas aeruginosa; identical to SEQ ID NO: 32505

SEQ ID NO: 37205 - protein, 220 aa, Pseudomonas aeruginosa; identical to SEQ ID NO: 33036

SEQ ID NO: 37206 - protein, 979 aa, Pseudomonas aeruginosa; identical to SEQ ID NO: 34267

SEQ ID NO: 37207 - protein, 393 aa, Pseudomonas aeruginosa; identical to SEQ ID NO: 32927

SEQ ID NO: 37208 - protein, 450 aa, Pseudomonas aeruginosa; identical to SEQ ID NO: 32505

SEQ ID NO: 37209 - protein, 220 aa, Pseudomonas aeruginosa; identical to SEQ ID NO: 33036

SEQ ID NO: 37210 - protein, 979 aa, Pseudomonas aeruginosa; identical to SEQ ID NO: 34267

SEQ ID NO: 37211 - protein, 393 aa, Pseudomonas aeruginosa; identical to SEQ ID NO: 32927

SEQ ID NO: 37212 - protein, 450 aa, Pseudomonas aeruginosa; identical to SEQ ID NO: 31994

SEQ ID NO: 37213 - protein, 220 aa, Pseudomonas aeruginosa; identical to SEQ ID NO: 33787

SEQ ID NO: 37214 - protein, 979 aa, Pseudomonas aeruginosa; identical to SEQ ID NO: 33788

SEQ ID NO: 37215 - protein, 393 aa, Pseudomonas aeruginosa; identical to SEQ ID NO: 32927

SEQ ID NO: 37216 - protein, 450 aa, Pseudomonas aeruginosa; identical to SEQ ID NO: 31994

SEQ ID NO: 37217 - protein, 220 aa, Pseudomonas aeruginosa; identical to SEQ ID NO: 33787

SEQ ID NO: 37218 - protein, 979 aa, Pseudomonas aeruginosa; identical to SEQ ID NO: 33788

SEQ ID NO: 37219 - protein, 393 aa, Pseudomonas aeruginosa; identical to SEQ ID NO: 32927

SEQ ID NO: 37220 - protein, 450 aa, Pseudomonas aeruginosa; identical to SEQ ID NO: 32924

SEQ ID NO: 37221 - protein, 220 aa, Pseudomonas aeruginosa; identical to SEQ ID NO: 33787

SEQ ID NO: 37222 - protein, 979 aa, Pseudomonas aeruginosa; identical to SEQ ID NO: 33788

SEQ ID NO: 37223 - protein, 393 aa, Pseudomonas aeruginosa; identical to SEQ ID NO: 32927

SEQ ID NO: 37224 - protein, 450 aa, Pseudomonas aeruginosa; identical to SEQ ID NO: 32924

SEQ ID NO: 37225 - protein, 220 aa, Pseudomonas aeruginosa; identical to SEQ ID NO: 33787

SEQ ID NO: 37226 - protein, 979 aa, Pseudomonas aeruginosa; identical to SEQ ID NO: 33788

SEQ ID NO: 37227 - protein, 393 aa, Pseudomonas aeruginosa; identical to SEQ ID NO: 32927

SEQ ID NO: 37228 - protein, 484 aa, Pseudomonas aeruginosa; identical to SEQ ID NO: 37137

SEQ ID NO: 37229 - protein, 251 aa, Pseudomonas aeruginosa; identical to SEQ ID NO: 37138

SEQ ID NO: 37230 - protein, 1128 aa, Pseudomonas aeruginosa; identical to SEQ ID NO: 37139

SEQ ID NO: 37231 - protein, 397 aa, Pseudomonas aeruginosa; identical to SEQ ID NO: 37140

SEQ ID NO: 37232 - protein, 450 aa, Pseudomonas aeruginosa; identical to SEQ ID NO: 32527

SEQ ID NO: 37233 - protein, 220 aa, Pseudomonas aeruginosa; identical to SEQ ID NO: 36907

SEQ ID NO: 37234 - protein, 979 aa, Pseudomonas aeruginosa; identical to SEQ ID NO: 36908

SEQ ID NO: 37235 - protein, 381 aa, Pseudomonas aeruginosa; identical to SEQ ID NO: 30518

SEQ ID NO: 37236 - protein, 450 aa, Pseudomonas aeruginosa; identical to SEQ ID NO: 32943

SEQ ID NO: 37237 - protein, 220 aa, Pseudomonas aeruginosa; identical to SEQ ID NO: 37023

SEQ ID NO: 37238 - protein, 979 aa, Pseudomonas aeruginosa; identical to SEQ ID NO: 37024

SEQ ID NO: 37239 - protein, 385 aa, Pseudomonas aeruginosa
MKSPTDIGRSLARQWQRSSVRLERLLNAASWPQSLNIGKPSPRLFTDNIQAVLLHVENWRSVNVGKVDWEPVSYRAGLVPISLPMRWHLRNPSEWIAATNDPRVCEEYAQLEHLVEQVDSAFHALLVAQRSLWLTKPFEEVVATAQLATRLSPGCARGRPLRLLAEHGVDTKFFERNASLLTRLLDERFEGAASEQGLTTFLDAFEESSHWVLVVPLQPELLPFKRLRLTTAELAETPLPGSRLLVVENEQCVHLLPETLPDTLAVLGAGLDLQWLASAHLAGKQIAYWGDMDIWGLLMLARARLHQPAVEALLMEQELFEQHSPGNAVVEPAKARESAPPGLLADEADFYRYLLVQERGRLEQEYLPKVQVERAIEQWARAVPV

SEQ ID NO: 37240 - protein, 450 aa, Pseudomonas aeruginosa; identical to SEQ ID NO: 32527

SEQ ID NO: 37241 - protein, 220 aa, Pseudomonas aeruginosa; identical to SEQ ID NO: 36907

SEQ ID NO: 37242 - protein, 979 aa, Pseudomonas aeruginosa; identical to SEQ ID NO: 36908

SEQ ID NO: 37243 - protein, 381 aa, Pseudomonas aeruginosa; identical to SEQ ID NO: 30518

SEQ ID NO: 37244 - protein, 484 aa, Pseudomonas aeruginosa; identical to SEQ ID NO: 32845

SEQ ID NO: 37245 - protein, 251 aa, Pseudomonas aeruginosa; identical to SEQ ID NO: 32980

SEQ ID NO: 37246 - protein, 1128 aa, Pseudomonas aeruginosa; identical to SEQ ID NO: 32981

SEQ ID NO: 37247 - protein, 397 aa, Pseudomonas aeruginosa; identical to SEQ ID NO: 32982

SEQ ID NO: 37248 - protein, 450 aa, Pseudomonas aeruginosa; identical to SEQ ID NO: 31994

SEQ ID NO: 37249 - protein, 220 aa, Pseudomonas aeruginosa; identical to SEQ ID NO: 33787

SEQ ID NO: 37250 - protein, 979 aa, Pseudomonas aeruginosa; identical to SEQ ID NO: 33037

SEQ ID NO: 37251 - protein, 393 aa, Pseudomonas aeruginosa; identical to SEQ ID NO: 32927

SEQ ID NO: 37252 - protein, 450 aa, Pseudomonas aeruginosa; identical to SEQ ID NO: 32943

SEQ ID NO: 37253 - protein, 220 aa, Pseudomonas aeruginosa; identical to SEQ ID NO: 37023

SEQ ID NO: 37254 - protein, 979 aa, Pseudomonas aeruginosa; identical to SEQ ID NO: 37024

SEQ ID NO: 37255 - protein, 385 aa, Pseudomonas aeruginosa; identical to SEQ ID NO: 32946

SEQ ID NO: 37256 - protein, 484 aa, Pseudomonas aeruginosa; identical to SEQ ID NO: 32845

SEQ ID NO: 37257 - protein, 251 aa, Pseudomonas aeruginosa; identical to SEQ ID NO: 32846

SEQ ID NO: 37258 - protein, 1128 aa, Pseudomonas aeruginosa; identical to SEQ ID NO: 32941

SEQ ID NO: 37259 - protein, 397 aa, Pseudomonas aeruginosa; identical to SEQ ID NO: 32942

SEQ ID NO: 37260 - protein, 450 aa, Pseudomonas aeruginosa; identical to SEQ ID NO: 32505

SEQ ID NO: 37261 - protein, 220 aa, Pseudomonas aeruginosa
MDDEQPLMSAAVQVDERRTPQRVREAVQEMLKYGLLEESHKPNLYRSALSNIEAVDRILEPLDLAMGVDEVRGLLFVIVRQGEVTEQDDWSHPLVRRQRLNLEQSLLIAILRQQFIAYEQESGTGASQASVVVDELIPQLQVYLGELGSEAKERNRIITLLDQLKGHGLVSALDAHDRVIIRPIITHLANPENLQALVAWLREQVEGAATPAADGEEDMA

SEQ ID NO: 37262 - protein, 979 aa, Pseudomonas aeruginosa
MGAVLWFEGTSSSASDLKKLWLLSESPEQTLEHWLSQHHAGGMRALRQMEKDGTGIWPYPRKKAFLARLRDYFEVGENAFTLLNRAAGLKQLNSIDEIFRELVLDDRSAFERAAEVAGSFDDLTDIHRELETARKQQRSLQPVADGWERYQVLQEQLHDKQALEGILPVWFAEQGYRLWLAETNRLEKEYKKAELDQEQCKSQLEAQKGVVDQHRQRYLRVGGAGIDQLRERIADWVRECDKRSLKAEQYQLLAKGLGLADELSAAALKENQQHIAARLEILDQQITDARQKAFDAGLVQQELNGRLQTLQQEGAEVEKRPGSNLPGQFHAFRSDLAQALGVNESALPFVAELVQVKPEELDWRGAIERAIGSHRLRILVPQGSSQAALRWVNQRHNRLHVRLLEVQEPTSRPVFFDDGFTRKLTFKEHPYREAIKALLADNDRHCVESPEQLRHTPHAMTAQGLMSGKERFFDKQDQKRLDEDWLTGFDNRDRLAFLAEQIREVNERLEPAKLALDAAQGDVRQLETQASLLNRVKELQFEDIDLPGAQSQLESLRTQLATLTRPDSNLAMIKVELDAAEALQESLDQQLRQLIEQYVQLKTQFDQAASATRKAYNSAEKGLNDTQRELAQAHFPTLTADDLGDIVELERKHTRELQGQLKALGEKLGDQKSELAKRMSDALKVDTGALAEVGRELVDVPRYLERLRVLTEEALPEKLKRFLEYLNRSSDDGVTQLLSYIDHEVSMIEERLDDLNSTMQRVDFQPGRYLRLVAGKVIHESLRTLQRAQRQLNSARFIDDEGESHYKALQDLVGLLKDACEHSRNQGAKALLDPRFRLEFAVSVIDRESRNVIETRTGSQGGSGGEKEIIASYVLTASLSYALCPDGSSRPLFGTIVLDEAFSRSSHAVAGRIIAALREFGLHAVFITPNKEMRLLRHHTRSAVVVHRRGLESSLVSLSWEALDEHHQQRIKAMHEVAH

SEQ ID NO: 37263 - protein, 393 aa, Pseudomonas aeruginosa; identical to SEQ ID NO: 32927

SEQ ID NO: 37264 - protein, 450 aa, Pseudomonas aeruginosa; identical to SEQ ID NO: 31994

SEQ ID NO: 37265 - protein, 220 aa, Pseudomonas aeruginosa; identical to SEQ ID NO: 33787

SEQ ID NO: 37266 - protein, 979 aa, Pseudomonas aeruginosa; identical to SEQ ID NO: 33037

SEQ ID NO: 37267 - protein, 393 aa, Pseudomonas aeruginosa; identical to SEQ ID NO: 32927

SEQ ID NO: 37268 - protein, 484 aa, Pseudomonas aeruginosa; identical to SEQ ID NO: 32845

SEQ ID NO: 37269 - protein, 251 aa, Pseudomonas aeruginosa; identical to SEQ ID NO: 32846

SEQ ID NO: 37270 - protein, 1128 aa, Pseudomonas aeruginosa; identical to SEQ ID NO: 32941

SEQ ID NO: 37271 - protein, 397 aa, Pseudomonas aeruginosa; identical to SEQ ID NO: 32942

SEQ ID NO: 37272 - protein, 450 aa, Pseudomonas aeruginosa; identical to SEQ ID NO: 32527

SEQ ID NO: 37273 - protein, 220 aa, Pseudomonas aeruginosa; identical to SEQ ID NO: 36907

SEQ ID NO: 37274 - protein, 979 aa, Pseudomonas aeruginosa; identical to SEQ ID NO: 36908

SEQ ID NO: 37275 - protein, 381 aa, Pseudomonas aeruginosa; identical to SEQ ID NO: 30518

SEQ ID NO: 37276 - protein, 450 aa, Pseudomonas aeruginosa; identical to SEQ ID NO: 32924

SEQ ID NO: 37277 - protein, 220 aa, Pseudomonas aeruginosa; identical to SEQ ID NO: 33787

SEQ ID NO: 37278 - protein, 979 aa, Pseudomonas aeruginosa; identical to SEQ ID NO: 33788

SEQ ID NO: 37279 - protein, 393 aa, Pseudomonas aeruginosa; identical to SEQ ID NO: 32927

SEQ ID NO: 37280 - protein, 450 aa, Pseudomonas aeruginosa; identical to SEQ ID NO: 32505

SEQ ID NO: 37281 - protein, 220 aa, Pseudomonas aeruginosa; identical to SEQ ID NO: 33036

SEQ ID NO: 37282 - protein, 979 aa, Pseudomonas aeruginosa; identical to SEQ ID NO: 34267

SEQ ID NO: 37283 - protein, 393 aa, Pseudomonas aeruginosa; identical to SEQ ID NO: 32927

SEQ ID NO: 37284 - protein, 450 aa, Pseudomonas aeruginosa; identical to SEQ ID NO: 32505

SEQ ID NO: 37285 - protein, 220 aa, Pseudomonas aeruginosa; identical to SEQ ID NO: 33036

SEQ ID NO: 37286 - protein, 979 aa, Pseudomonas aeruginosa; identical to SEQ ID NO: 34267

SEQ ID NO: 37287 - protein, 393 aa, Pseudomonas aeruginosa; identical to SEQ ID NO: 32927

SEQ ID NO: 37288 - protein, 450 aa, Pseudomonas aeruginosa; identical to SEQ ID NO: 32505

SEQ ID NO: 37289 - protein, 220 aa, Pseudomonas aeruginosa; identical to SEQ ID NO: 33036

SEQ ID NO: 37290 - protein, 979 aa, Pseudomonas aeruginosa; identical to SEQ ID NO: 33037

SEQ ID NO: 37291 - protein, 393 aa, Pseudomonas aeruginosa; identical to SEQ ID NO: 32927

SEQ ID NO: 37292 - protein, 484 aa, Pseudomonas aeruginosa; identical to SEQ ID NO: 37137

SEQ ID NO: 37293 - protein, 251 aa, Pseudomonas aeruginosa; identical to SEQ ID NO: 37138

SEQ ID NO: 37294 - protein, 1128 aa, Pseudomonas aeruginosa; identical to SEQ ID NO: 37139

SEQ ID NO: 37295 - protein, 397 aa, Pseudomonas aeruginosa; identical to SEQ ID NO: 37140

SEQ ID NO: 37296 - protein, 450 aa, Pseudomonas aeruginosa
MEDALQALSEMLAAYASQELYEIDPDATHLQAGRELREWIKRRLVVEREGRIYATDALESAIQFVDSLDSRIMTSTASRLSVVQREIENLETGLNPSPTGRIASLRRRIQDLEHELAQVEAGHVIVLDEAQAIEGIREVYNLATSLRADFRRVEDSWREADRALRHSIISEQSHRGEIVDRLLDGQDALLNTPEGRVFESFQQQLRQSAELEAMRERLRTILRHPAVPKALNRPQQRELRWLALRLVRESQAVLQARARSERDVRGFMKTGLAAEHHRVGQLLNDFFNLALSVDWQRQSERRKPVRLPPVGVAITGVPAIERLRFKTLGDDDTGELDLSLKPAGLEQIDDDFWDAFDGLDREALIHDTLAVLVEQGRPVSLGELASLLPPAHDLETFALWLAMAREAGIEVLTEERQLVELVDEDEQRWRFNLPYVGLDHEALKDIDWEL

SEQ ID NO: 37297 - protein, 220 aa, Pseudomonas aeruginosa
MDDQQALMSSTTQVDDRRTPQRVREAVQEMLKYGLLEESHKPNLYRSALSNIEAVDRILEPLDLAMGVDEVRGLVFVTVRQGEVAEQDDWSHPLVRRQRLNLEQSLLIAILRQHFIAYEQESGTGASQALVAVDELIPQLQVYLGELGSEAKERNRVITLLDQLKGHGLVSALDAHDRVIIRPIITHLANPENLQALVAWLREQVEGAAMPAADGEEDMA

SEQ ID NO: 37298 - protein, 979 aa, Pseudomonas aeruginosa
MGAVLWFEGTSSSASDLKKLWLLSESPEQTLEHWLSQHHAGGMRALRQMEKDGTGIWPYPSKKAFLARLRDYFEVGENAFTLLNRAAGLKQLNSIDEIFRELVLDDRSAFDRAAEVASSFDDLTDIHRELETARKQQRSLQPVADGWERYRVLQEQLQDKQALEGILPVWFAEQGYRLWLAETNRLEKEHKQAELDQGQCRSQLEIQKGVVDQHRQSYLRVGGAGIDQLRERIADWVRECDKRSLKAEQYQRLAKGLGLADELSAAAFEENQQQIAARLEILAQKTTDARQKAFDAGLVQQELNGRLQTLQQERAEVERRPGSNLPGNFHAFRSDLAQALGVDESALPFVAELVQVKSEELAWRGAIERAIGSHRLRILVPQGSSQAALRWVNQRHNRLHVRLLEVKEPSSRPVFFDDGFTRKLTFKEHPYREAVKALLADNDRHCVESTEQLRHTPHAMTAQGLMSGKERFFDKQDQKRLDEDWLTGFDNRDRLAFLAEQIGEVNQQLAPAKLALDSAQGDVRQLENQASLLQRVEELHFEDIDLPAAERQLQSLRTQLDTLTRPDSDLAMIKAELDQAEALLDSLDQQLQRLIEQCVQLRTQFEQAASATRKAYRGAEKGLNDTQRELAQTHFPTLTADNLGDIVELERQNTRELQGQLKALGDKLGDQKTELAKRMSDALKVDTGALAEVGRELVDLPRYLERLRVLTEEALPEKLKRFLEYLNRSSDDGVTQLLSYIDHEVSMIEERLDDLNSTMQRVDFQPGRYLRLVAKKVIHESLRTLQQAQRQLNSARFIDDEGESHYKALQALVDLLKDACEHSRNQGAKALLDPRFRLEFAVSVIDRESKSVIETRTGSQGGSGGEKEIIASYVLTASLSYALCPDGSSRPLFGTIVLDEAFSRSSHAVAGRIIAALREFGLHAVFITPNKEMRLLRHHTRSAVVVHRRGLESSLVSLSWEALDEHHQQRIRAMHEVAH

SEQ ID NO: 37299 - protein, 385 aa, Pseudomonas aeruginosa
MKSPTEIGRNLARQWQRSSVRLERLLNPGSWPQTLNIGKPSARLFTDNIQAVLRHVENWRSVNVGTVDWEPVSYRAGLAPISLPMRWYLRGPSEWIAATNDPTVSQEYAQLEYLVEQVDSAFHALLVAQRGLWLTKPPEEVVATAQLATRLSPGCARGRPLRLLAEHGVDTKFFERNASLLTRLLDERFEGAASEQGLTTFLDAFEESSHWVLVVPLQPELLPFKRLRLTTSELAETPLPGSRLLVVENEQCVHLLPETLPDTLAVLGSGLDLQWLASAHLAGKQIAYWGDMDTWGLLMLARARLHQPAVEALLMEQELFEQHSLVSAVVEPTKALESAPPGLLADEADFYQYLLVQERGRLEQEYLPKVQVERAIEQWARKVPV

SEQ ID NO: 37300 - protein, 450 aa, Pseudomonas aeruginosa; identical to SEQ ID NO: 32505

SEQ ID NO: 37301 - protein, 220 aa, Pseudomonas aeruginosa; identical to SEQ ID NO: 33036

SEQ ID NO: 37302 - protein, 979 aa, Pseudomonas aeruginosa; identical to SEQ ID NO: 34267

SEQ ID NO: 37303 - protein, 393 aa, Pseudomonas aeruginosa; identical to SEQ ID NO: 32927

SEQ ID NO: 37304 - protein, 450 aa, Pseudomonas aeruginosa; identical to SEQ ID NO: 32531

SEQ ID NO: 37305 - protein, 220 aa, Pseudomonas aeruginosa
MDDEQPVRSAAVQVDERRTPQRVREAVQEMLKYGLLEESHKPNLYRSALSNIEAVDRILEPLDLAMGVDEVRGLVFVTVRQGEVAEQDDWSHPLVRRQRLNLEQSLLIAILRQQFIAYEQESGTGASQASVVVDELIPQLQVYLGELGSEAKERNRIITLLDQLKGHGLVSALDAHDRVIIRPIITHLANPENLQALVAWLREQVEGAATPAADGEEGMA

SEQ ID NO: 37306 - protein, 992 aa, Pseudomonas aeruginosa
MAATLERDGAQVRLGAVLWFEGTSSSASDLKKLWLLSESPEQTLEHWLGQHHAGGMRALRQMEKDGTGIWPYPSKKAFLARLRDYFEVGENAFTLLNRAAGLKQLNSIDEIFRELVLDDRSAFERAAEVAGSFDDLTDIHRELETARKQQRSLQPVADGWERYQVLQEQLHDKQALEGILPVWFAEQGYRLWLAETNRLEKEYKKAELDQEQCKSQLEAQKGVVDQHRQRYLRVGGAGIDQLRERIADWVRECDKRSLKAEQYQRLAKGLGLADELSAAALKENQQQIAALLEILDQQITDARQKAFDAGLVQQELNGRLQTLQQEGAEVEKRPGSNLPGQFHAFRSDLAQALGVNESVLPFVAELVQVKPEELDWRGAIERAIGSHRLRILVPQDSSQAALRWVNQRHNRLHVRLLEVQEPTLRPVFFDDGFTRKLTFKEHPYREAIKALLADNDRHCVESPEQLRHTPHAMTAQGLMSGKERFFDKQDQKRLDEDWLTGFDNRDRLAFLAEQIREVNEQLEPAKLALDAAQGDVRQLETQASLLNRVKELQFEDIDLPGAQSQLESLRTQLATLTRPDSDLAMIKVELDAAEALQESLDQQLRQLIEQYVQLKTQFDQAASATRKAYNSAEKGLNDTQRELAQAHFPTLTADDLGDIVELERKHTRELQGQLKALGEKLGDQKSELAKRMSDALKVDTGALAEVGRELVDVPRYLERLRVLTEEALPEKLKRFLEYLNRSSDDGVTQLLSYIDHEVSMIEERLDDLNSTMQRVDFQPGRYLRLVAGKVIHESLRTLQRAQRQLNSARFIDDEGESHYKALQDLVGLLKNACEHSRNQGAKALLDPRFRLEFAVSVIDRESRNVIETRTGSQGGSGGEKEIIASYVLTASLSYALCPDGSSRPLFGTIVLDEAFSRSSHAVAGRIIAALREFGLHAVFITPNKEMRLLRHHTRSAVVVHRRGLESSLVSLSWEALDEHHQQRIKAMHEVTH

SEQ ID NO: 37307 - protein, 381 aa, Pseudomonas aeruginosa; identical to SEQ ID NO: 32534

SEQ ID NO: 37308 - protein, 440 aa, Pseudomonas aeruginosa; identical to SEQ ID NO: 33722

SEQ ID NO: 37309 - protein, 220 aa, Pseudomonas aeruginosa; identical to SEQ ID NO: 33036

SEQ ID NO: 37310 - protein, 979 aa, Pseudomonas aeruginosa
MGAVLWFEGTSSSASDLKKLWLLSESPEQTLEHWLSQHHAGGMRALRQMEKDGTGIWPYPSKKAFLARLRDYFEVGENAFTLLNRAAGLKQLNSIDEIFRELVLDDRSAFERAAEVAGSFDDLTDIHRELETARKQQRSLQPVADGWERYQVLQEQLHDKQALEGILPVWFAEQGYRLWLAETNRLEKEYKKAELDQEQCKSQLEAQKGVVDQHRQRYLRVGGAGIDQLRERIADWVRECDKRSLKAEQYQLLAKGLGLADELSAAALKENQQHIAARLEILDQQITDARQKAFDAGLVQQELNGRLQTLQQEGAEVEKRPGSNLPGQFHAFRSDLAQALGVNESALPFVAELVQVKPEELDWRGAIERAIGSHRLRILVPQDSSQAALRWVNQRHNRLHVRLLEVQEPTSRPVFFDDGFTRKLTFKEHPYREAIKALLADNDRHCVESPEQLRHTPHAMTAQGLMSGKERFFDKQDQKRLDEDWLTGFDNRDRLAFLAEQIREVNERLEPAKLALDAAQGDVRQLETQASLLNRVKELQFEDIDLPGAQSQLESLRTQLATLTRPDSNLAMIKVELDAAEALQESLDQQLRQLIEQYVQLKTQFDQAASATRKAYNSAEKGLNDTQRELAQAHFPTLTADDLGDIVELERKHTRELQGQLKALGEKLGDQKSELAKRMSDALKVDTGALAEVGRELVDVPRYLERLRVLTEEALPEKLKRFLEYLNRSSDDGVTQLLSYIDHEVSMIEERLDDLNSTMQRVDFQPGRYLRLVAGKVIHESLRTLQRAQRQLNSARFIDDEGESHYKALQDLVGLLKDACEHSRNQGAKALLDPRFRLEFAVSVIDRESRNVIETRTGSQGGSGGEKEIIASYVLTASLSYALCPDSSSRPLFGTIVLDEAFSRSSHAVAGRIIAALREFGLHAVFITPNKEMRLLRHHTRSAVVVHRRGLESSLVSLSWEALDEHHQQRIKAMHEVAH

SEQ ID NO: 37311 - protein, 393 aa, Pseudomonas aeruginosa; identical to SEQ ID NO: 32927

SEQ ID NO: 37312 - protein, 450 aa, Pseudomonas aeruginosa; identical to SEQ ID NO: 32505

SEQ ID NO: 37313 - protein, 220 aa, Pseudomonas aeruginosa; identical to SEQ ID NO: 33036

SEQ ID NO: 37314 - protein, 979 aa, Pseudomonas aeruginosa; identical to SEQ ID NO: 34267

SEQ ID NO: 37315 - protein, 393 aa, Pseudomonas aeruginosa; identical to SEQ ID NO: 32927

SEQ ID NO: 37316 - protein, 450 aa, Pseudomonas aeruginosa; identical to SEQ ID NO: 32505

SEQ ID NO: 37317 - protein, 220 aa, Pseudomonas aeruginosa; identical to SEQ ID NO: 33036

SEQ ID NO: 37318 - protein, 979 aa, Pseudomonas aeruginosa; identical to SEQ ID NO: 34267

SEQ ID NO: 37319 - protein, 393 aa, Pseudomonas aeruginosa; identical to SEQ ID NO: 32927

SEQ ID NO: 37320 - protein, 450 aa, Pseudomonas aeruginosa; identical to SEQ ID NO: 32505

SEQ ID NO: 37321 - protein, 220 aa, Pseudomonas aeruginosa; identical to SEQ ID NO: 33036

SEQ ID NO: 37322 - protein, 979 aa, Pseudomonas aeruginosa; identical to SEQ ID NO: 34267

SEQ ID NO: 37323 - protein, 393 aa, Pseudomonas aeruginosa; identical to SEQ ID NO: 32927

SEQ ID NO: 37324 - protein, 450 aa, Pseudomonas aeruginosa; identical to SEQ ID NO: 32505

SEQ ID NO: 37325 - protein, 220 aa, Pseudomonas aeruginosa; identical to SEQ ID NO: 33036

SEQ ID NO: 37326 - protein, 979 aa, Pseudomonas aeruginosa; identical to SEQ ID NO: 34267

SEQ ID NO: 37327 - protein, 393 aa, Pseudomonas aeruginosa; identical to SEQ ID NO: 32927

SEQ ID NO: 37328 - protein, 450 aa, Pseudomonas aeruginosa; identical to SEQ ID NO: 32505

SEQ ID NO: 37329 - protein, 220 aa, Pseudomonas aeruginosa; identical to SEQ ID NO: 33036

SEQ ID NO: 37330 - protein, 979 aa, Pseudomonas aeruginosa; identical to SEQ ID NO: 34267

SEQ ID NO: 37331 - protein, 393 aa, Pseudomonas aeruginosa; identical to SEQ ID NO: 32927

SEQ ID NO: 37332 - protein, 450 aa, Pseudomonas aeruginosa; identical to SEQ ID NO: 32505

SEQ ID NO: 37333 - protein, 220 aa, Pseudomonas aeruginosa; identical to SEQ ID NO: 33036

SEQ ID NO: 37334 - protein, 979 aa, Pseudomonas aeruginosa; identical to SEQ ID NO: 34267

SEQ ID NO: 37335 - protein, 393 aa, Pseudomonas aeruginosa; identical to SEQ ID NO: 32927

SEQ ID NO: 37336 - protein, 450 aa, Pseudomonas aeruginosa; identical to SEQ ID NO: 32505

SEQ ID NO: 37337 - protein, 220 aa, Pseudomonas aeruginosa; identical to SEQ ID NO: 33036

SEQ ID NO: 37338 - protein, 979 aa, Pseudomonas aeruginosa; identical to SEQ ID NO: 34267

SEQ ID NO: 37339 - protein, 393 aa, Pseudomonas aeruginosa; identical to SEQ ID NO: 32927

SEQ ID NO: 37340 - protein, 450 aa, Pseudomonas aeruginosa; identical to SEQ ID NO: 32505

SEQ ID NO: 37341 - protein, 220 aa, Pseudomonas aeruginosa; identical to SEQ ID NO: 33036

SEQ ID NO: 37342 - protein, 979 aa, Pseudomonas aeruginosa; identical to SEQ ID NO: 33037

SEQ ID NO: 37343 - protein, 393 aa, Pseudomonas aeruginosa; identical to SEQ ID NO: 32927

SEQ ID NO: 37344 - protein, 450 aa, Pseudomonas aeruginosa; identical to SEQ ID NO: 31994

SEQ ID NO: 37345 - protein, 220 aa, Pseudomonas aeruginosa; identical to SEQ ID NO: 33787

SEQ ID NO: 37346 - protein, 979 aa, Pseudomonas aeruginosa; identical to SEQ ID NO: 36918

SEQ ID NO: 37347 - protein, 393 aa, Pseudomonas aeruginosa; identical to SEQ ID NO: 32927

SEQ ID NO: 37348 - protein, 450 aa, Pseudomonas aeruginosa; identical to SEQ ID NO: 32505

SEQ ID NO: 37349 - protein, 220 aa, Pseudomonas aeruginosa; identical to SEQ ID NO: 33036

SEQ ID NO: 37350 - protein, 979 aa, Pseudomonas aeruginosa; identical to SEQ ID NO: 34267

SEQ ID NO: 37351 - protein, 393 aa, Pseudomonas aeruginosa; identical to SEQ ID NO: 32927

SEQ ID NO: 37352 - protein, 450 aa, Pseudomonas aeruginosa; identical to SEQ ID NO: 32505

SEQ ID NO: 37353 - protein, 220 aa, Pseudomonas aeruginosa; identical to SEQ ID NO: 33036

SEQ ID NO: 37354 - protein, 979 aa, Pseudomonas aeruginosa; identical to SEQ ID NO: 34267

SEQ ID NO: 37355 - protein, 393 aa, Pseudomonas aeruginosa; identical to SEQ ID NO: 32927

SEQ ID NO: 37356 - protein, 450 aa, Pseudomonas aeruginosa; identical to SEQ ID NO: 32505

SEQ ID NO: 37357 - protein, 220 aa, Pseudomonas aeruginosa; identical to SEQ ID NO: 33036

SEQ ID NO: 37358 - protein, 979 aa, Pseudomonas aeruginosa; identical to SEQ ID NO: 34267

SEQ ID NO: 37359 - protein, 393 aa, Pseudomonas aeruginosa; identical to SEQ ID NO: 32927

SEQ ID NO: 37360 - protein, 486 aa, Arthrobacter sp. YC-RL1; identical to SEQ ID NO: 34883

SEQ ID NO: 37361 - protein, 230 aa, Arthrobacter sp. YC-RL1; identical to SEQ ID NO: 34884

SEQ ID NO: 37362 - protein, 1107 aa, Arthrobacter sp. YC-RL1; identical to SEQ ID NO: 34885

SEQ ID NO: 37363 - protein, 456 aa, Methylobacterium sp. GXS13
MLFAQLPDELFKPLASPSRGFNAALLLHLHRRVLGAEPVRKAELLAEIGDFAAGWSDPEILGDEPISADPAERRNALYRRLLETGWLIERRERYVPVVEFDPEARLLLEELSRLERGETRSYGGAVLEVLGGLESAVSDPGSRSEALSNAARASAAFLAHVRGLAAGMRKVEERILREPDRAKTFRLFFEDFVERHLISDYRTLHTRFNPFRFRASVVREAGRALRDALTVRALAEGLIREGRSPDLDTAQRAVRADLAQILSVFEGLDNHLDAVDAVVARLERRFGAALHAMDRPDPTGIERTAAMLRAVGAAEVAPDVPPVVSLLRPPIGQAHLQTPRARRSAIDVEPLPDIDDDPAVDAFAAAKAEFRRRTTVTPETMTAFVEARLGKAVSLRGSQITIAGVDDFVVFQRLREIDVLFDARLRDRYAVVRLPERLANGWLDCPDFVVERRAGA

SEQ ID NO: 37364 - protein, 208 aa, Methylobacterium sp. GXS13
MLEGFRAIIDGDEPPPPGARAPDAEELCRALQVMLKGQVIYADTPGIGRSYELARHYAPFFTDYFACLGYALTVAHRDQMVSLSPAADAPRHDIASERLRKDETLVLLALRLLYEEGLRDNRAGTDGIVECTTDEIVEKIRAVARNDPPEEGRLADILRLYARRGGLRMGERDRVERVTPLSLLPGLAVLASDAWLERLRAWSEAGEL

SEQ ID NO: 37365 - protein, 796 aa, Methylobacterium sp. GXS13
MYVLTDIAISNWYLIRREQIRLRGAAALVGPTGAGKSTIFGAFGTVLAGNNASRLALNASASGRSARTVRDYCLGWISDPAEGGRPTRESCETVLALVFENPASGRTVTVGLALAARAVEPRETVLSRFIAVGHRFEIADYARTAPGGSFTAPWSEIAADLRARAASLTEYRTSGERFTADILATLREGAPSPEPRHFLRSFANAVAFKPIFDTSAFVRAFVLDPEPLDVERVRLSIANWRRLLETIGELESRPARLRRLRDRYEAWSEAVLAATNHEFRAACAELRRRSLDLTAVRLRLNEGADILRIARERVAASRGHVREIDGEIAEKKALLAGSAAEGRLAASTLGLSMLERDRKELVARISDLVGVVGQMGKLQPVAPILRQACPPAARLAESCARAGLRRESSPEEILRPDGPLAELIDGLARLPEFDEALERAAEDAALKARAQESEAERTAPRTGAGPAARLSSDTVAFRGELERRGIEALPICELAEIVDPHWGPALEGLLGRAREALVVSPDRLSEALGVLQSGRDRFHRCILVKTTDTAKQRPRRYDDGPLTVIETSDPHAEAFLGVRLGGYDLARDDAELARLSRAVAPSGRTTAGMAYSVTRSVDLLMTRGHRGPTVDSRRAHEAAVAEARRLRGEAAVLREAARTAAAIRARISRGLDDVDALRGELDGLEGRRRTLQTEREGIEKRDNAGLTAEIAALTTERMGYLRELSEELEPKLDRLLADEAALRARLGTVREAARAALSARRSALRQLMGGDAARVRLARSEPFSVAAIAARRRALA

SEQ ID NO: 37366 - protein, 509 aa, Gordonia sp. SGD-V-85
MEFSAFPAPVEAPGTSSGAESVQLTLADAWESNRSIQKSAVGRLFAATNSALYVTLMERHLDYGAKLSETELTVRLDRDLADLDLTDQATGLELVKLWARQGWLHRVTDTTDPHAPNLCHLTSEARSVLDFMRRQRREDSIATGGSITGIAAELRRVAGQVSNDPDQIRLEIEAQMSDLDAELADLDAGRRPPVDLRVAEDAARTIGYQMEQIISDIGQYGTMLDRITTALLDDPGDSDLAYRDRQRQLFDDYEALLDSPQSASYQAFSHLIQDPERRARLKSDIETIIASFPSMDAGLRSVMDNFFGLVTQQMAEVGRTRQRCARRIRRFVASGTLEQSRGLARQLNDALATANELLKTSLADRRIGYELPLAAPTVNSIGRLAFEIREHVPPAPALPATLDADLTSFASLSGQVDTTELTDTVNAAVAAGPVALADVIDGLEEPYLAHVIVLWSWAQKQQAQKQQAAGDKVPMTTVRFRSLIGDDHAIEVPDLTFTEPIPTAEVDAE

SEQ ID NO: 37367 - protein, 309 aa, Gordonia sp. SGD-V-85
MTTTDETNPGSGETPPPLPEVRAQRATKGPESDPATDADSLPPEVRAERATKGTPTTPDEFAGFDDLPTVANRAATHTPNAPRFDGDVSELPDRACWALQNLLTRRYISGDRQPQLWSWVAEYQDVLRGRLSELDLRLRIVDELQVAFVEQAGYDSRWGRKILKRETIHTYDAILALHLAKYVRAARDEPVLITREEIHELFAGVTNTIDRDLALFDTRIERALDKMEELEFLRKQRDDADTFIVSPVISAVMTASVITDLQRQFEQFIGSGDTGEVPPEDLADEPAERDDDAADLDGAYGENDEGDDW

SEQ ID NO: 37368 - protein, 1115 aa, Gordonia sp. SGD-V-85
MVSGQVDQYHLSRLQLINWGVFDGYHSIPFSPNGSLITGSSGSGKSSLLDAISLAFLPDHRRNFNASGDATAAGSSSGKRTVGKYVRGAWGERRDGTNAHREIMYLRGTGPAWAAIAVTYTSSSGEAITGLVLKWLAAGKMTDAHSSYFIYDGDADIVEACNEWAANNYNSAKFRDRGWRGGPGEGKYLSTLYSLIGIRGSDAAQQLLGKAKSLKSVGGLAQFVREFMLDAPTSIVGIADALDQIDPLVEARELLDVARRKRTILGNIEEVQERYAGEAATFSVLDTIDNTTIRSYVNNLRIHNAQPEVADLDDQITRLDGDLAALTTQHDQLRQDHSLLLSRIATSTGDLAPLREQLGGAQKLSTEVTARRNAYEDKVSALGFTPPTRAEGFWLLREELTEEAAKIDGQLDAGRAHYAEALASEVAARTRRDAAMEELGRVENAGSALPRTEHEMRRAIAHGLQIDESELKYVAELVELDPDEERWRLAVEKVLRNVGLRLLVPDKHFRAALRFVNSHDMRGRIQLHQADSRPMPVLEPGTLASKLRPVDASHPCAAEAMTVLSKLGNHMCVDSPGEFSQHAKAVTDQGLRKDSAKLAVKDDRQQLRRSQYIFVGDVASKIAALRDELEYEERAFEDARQDCAELDRERSAKERRRDAYRRVCEQFTQWNEIDVDSVDDRVDQLTDQYDLLIEENPDVEALQRKAEDLWEQVRNAISQAALVKDKIARQDSRRTQLLDLIDRLKPEDVPAQAEKTLDGFREDLSATLDVLNPEPYRQEIVKAASRERDRMRSDARRSRDELARILDTYDEEFPDAIPNDSDDFDERLHDYVAVCRRIDERELPAAYERMRRLITEQAPGAILGLHMAADAEERRIVEQIERVNTGLGAVAFNRGTRLRLRPGRKKLAAVEELTEKARQISNRATAVSFGDEQAILEQYSDILLLRERLAGNTPEDRQWTRDALDVRNRFDFYCEEHDAESGETIRTYSNAGDNSGGEQEKLMAFCLAGALSFNLASPHGNDNRPIFAQLMLDEAFSKSDPQFAQQALSAFRKFGFQLIIVATVQNTSTIQPYVDNVVMVSKTEAGPELRPIATATSTGIKAFSELRRSGSQFVV

SEQ ID NO: 37369 - protein, 486 aa, Arthrobacter sp. NIO-1057
MQPSHRANSLWLQAQQFKGSAAFRLLTAQPWAVAFIRAEFTADRSRVALELFHASLDSFLKQARKSDEQIPQSYSAQDFAESWVKQGILARPLIDGRFVYEPSAQTLRTLRFLADFSTDDSHLNSSRLNTLLSSLESLVHETDPDPEARIRALESQIAQRQAQIEQLRSGDDPAVLSRTTALSATRSLLDLASSLPADFRRMRDGVQDMLHSLREGILDASTAKGVAVGQVLEADRQLRSTAEGETFRGFTEFLNSPEAQQRFRSALAEVLERDFVDDLDATERQILTNLLRELRRQAAEVHASYGKLSESLHAFVQSEEYKQAELLRQAVREAELAISKSSALKPRSGLTPMDLYTPQLMTLSGLGIYDSSEHVAPPPLAQAPEYSEADIVRNPTTPQANMALLRESITTQLKNSSTAAVGMNEVFAALDDEHRHLNTIRALVEIGRTNGESLNDAELINIEFQQLDGSMRTAILPALSFTKEPL

SEQ ID NO: 37370 - protein, 228 aa, Arthrobacter sp. NIO-1057
MTTSDAYAAPIAEPLFEGDTGKYSLPLRQLLVRLLRGPYLDGSLDAAAWQLLLDQQQSISDYFSEIFLALTLDMDRKIAMLAPVQIEQVHTAPIAPRRPLKRDETLLALRLRLLLEQQSGSGNDAVISRSAMHEILAEHRQASDRDDKRFAESCEAAIARLQSLRLLTSTELENEFRISPALAMALPLKNIADIPRYIAAIDANEPAFNLSADENDELAEQTPELVQE

SEQ ID NO: 37371 - protein, 1108 aa, Arthrobacter sp. NIO-1057
MSIEMTLPLGGAINPGQHRLSRVQIVNWGTFHGLHDLSVDRAGTLVTGHPGVGKSTLFDAMGHVFFATPRLNESANDAATREDRRTTFSYMRGRQFKTTEGTVYQRPGATWSAIILSYDDGMGNTVSAGAVFDLPDAGLEGQVSKHYLLCEGKVEIAELENHGPRRFTVSSLSKALAPSEAFDTHKAFIERLRRRLGVESDKAFALLRTLQNGKGLAKGVNQFFRHEVLEEPATLKAAAAAVEDFAHLRGIYRQLDTARAQRDALAEVPHQDQAYRQLAQQITETRQLLESDVQDLEAQVRQLVLRNDLQSHQGELAALQSEEEELRTRKEQLDDQLQSLEAAHDSAGSASLMLLEREADVARKALSEKENTIRALQQQASDAGLSFEFSATGLDELRANAARTLQQLASITQDAQTVEYEAMASLVNLRKRAETLAEQIRSYQRRASNIDDRSIAARRAIASACSLQEEQLPFAGELMDVSADASTWRLAAEKALHSLARTLLVPGELISQVTHAIDQLDGLGRVRWTDISQRPKDAEAGPADLVTKLDFAPGEAGSWLKAKITADYPLTCVDTDAAMHVHPKAITPAGTMKTGNGTFERDTRGLPASEYLLGFTNESKIAELESKAARLEEKITKAQASADERSAAKNKVVAKSQLLKAIIADERSFTQLDSSPALEALRRGEQKLGDALSLSGDSSRVRQQIEAAKAEAEKLVGDLALVRSRIQDLQLQVQRAEQVLSTAQAPGVDWEQSIPLSLRQHQLLGPVLDQVISGNCPSSENISEAFAEVKLQLGSQMNSLNSQRQDIGSALSETFRRFARDFGTSHAQTHGTSAEAAEHYTQLHDQIVADGLPHHEAQFREYFANRSYERFSDLLQLLDEERRMISERIKPLNQILAEVTFEHGSILRLEVQNAIPVEAGNFRKELKDALQEAYTTKDETTLATSYQALESLVTALSDPALNAWRSTVLDVRQHVIISCNEHKTNGEIETGLEPGTLSGGEGQRFTSFIMGAALAYQLGFASAGFTSFGTVMIDEAFIQANSEYAAAGIRALQEFGFHLVLAAPEDKIDLSRHLGSITDIIKHPGSNISGFVTTGRSPAMATTITLRN

SEQ ID NO: 37372 - protein, 491 aa, Microbacterium enclense
MTRTRAEAAYLRSVTAFKNPTLDLLHGRFAPFVVAVLSVVFSPDRPAVAVADAHVEVAEAIDELRTAGYDTDDDRRIPAGSARDICRGWVRVGWLGLQIEDDVEVYRLSAHAVGALEIAGRAGGGRARVSRSRVRTLLDAVDRLARDAESDPTRRREALLEERAALDAELAALDEGIVEPLDDDHLLEEAENVIHLARELPADFSRVAESIAAMQRDVVAELRRDVRPTGEVLREYLERGRQVMQATPEGRAFQGALRLIGDPENIDDLTDQLHAVLTQPFSRLMTQEQRGELDAIARRVEAGVQEVLTAQRRASHVITAQVRTHDPIRDRHVDDLLRGVMAGLHRWSQTRSPGRVEPVRTLPLADVGHLRQSISDIRPAGAPEPLASGADDVEFAGVDTRAWGGPHYAELEAYVARLGDGFDLAEAFSGADAETRRPVDLVGLLEIVHRGGLTETDDVSIVEAVRPDGTTRRFAFGAVRAGNLTEQDADE

SEQ ID NO: 37373 - protein, 209 aa, Microbacterium enclense
MENDPDALFAGDRGTLDAEVRRVLVRILQRRFLLAENSPAEWKLLLEHQQMIESRLNDLFVRLVVDHARGVAYKEQVRSDEVDVPILLKDEAYSRAETLVLVYLRTVFQRETTAGTASARVDVEEVEQTVLTYFAESDGTRASQQRAVRTAIARLDREGIIEEESEGRYRIGPLIEVVLSADVLRDLQRWLDEQTESSPAADTPEGVLP

SEQ ID NO: 37374 - protein, 1116 aa, Microbacterium enclense
MTMLETLFGLIPAASRGQQWVAEDLQLINWGGYDGTHRVRFAPTATLLCGGSGSGKSTLMDAYVALMMPHTTPFNGASNGAVVGRPRGQEQRNILSYGRGKLDESRTDEGTKVRVLRGDGVDTWTAIAMTWADHDGARFTAVRAWYIPAAARTLDDAVKVRATVHGAFDLRSLETAAQSHLADSAVRATGLETLATDREFSARLHAVLGIGAAGAGTKAMSLLARIQAGQQITTVDDLYKRMVLEEPETLAVAEAVVSHFDGLESTRTRMLEARQQVRALQPIRTMKARIDEASERLRLLDELGRFGDPESRASLWRAQRRVDLLGAVEDELRERTHATDALVRERQALADAAEAEREGLGDVLRAAGGDRLDAAQRELRALEQRLAGMRRDRERFETAVSVLSVEVSSAKQFDALVAEARRTLADADAKTAVRDAFVAASSTHTDLRRQLAALETEHRRTQTRDDNIPPRLHEAREALAEAAGLTAAELPFVAELVDVRTEFEPWRGAFTLALGGFATTLLVDAAHLASFRSAIDGVRLSERLRFEGVSTGLPERTGLDPAALPGRLEYRRSPFTGWLQDRLEQQFAFVCVDSPAELAVHRLALTISGQTSQGSRGAHGGSTRHSVLGFSSRVRLTELGEQIVTVRRDLATAKAAVDEAGAALDAFDERRSAFEKIADLSWGQVDTASVLRDLERWNETIVEITAGNPRIAELQEQISGTRSRAARLREEIGGAKTEQQALAARWAEITDDVDAANERIERAEDADLVLSAEEAAYLDGLFVAPSDDASPSQLLSRFDAALESASKRLLEEQRAAQETFADQRESLRRTLTAFTDRWPSPNLLADPDESLGDFERILADLEASGLHELEAEWRDSLLRLSGNDLTSLDSALTRALREIRERIAPINDIMQDLPFYDDEHRLQIVPRENQSEVRRRFRRELRDVRAAIDAASSDEEREAVYGRMARLIGRIRPTAPDYADLVDVRNHVRVSAERFRAGTGEHVALYDHIGEKSGGESQELIAFIVGAALRYQLGDAGAERPRYAPVFLDEALIKADAHFTKRAIGAWRGLGFQLVIGAPNDKYSAIEPHVDVEYDILKDTRGRSWAKAKVGLPAEG

SEQ ID NO: 37375 - protein, 476 aa, Mycobacterium smegmatis
MDYDAITALRDRHPAWRLLRAGNASLVLSFLGEFFVEANRGACPAGQVAEALDNHLYALSAGSGESRYPKEPRAYLEDWAATDAGYLRRFYPPGDDEVHYEVTPAFEKAYAWVVNLQSRSFVGTESRLHTVVALLRQIVHGTEVQPDVRLAELRRRRAELEAEIAAVEAGDIAVLDPTAVRDRYQQLSTTARELLSDFREVEENFRLLDRAARERIAAWEGSKGGLLEELVGSRSEITGSDQGRSFQAFYDFLLSEQRQAELAELIAKVSALDVLEADPRIRRIHHDWSEAADRAQRTVRQISEQLRRFLDDQVWLENRRVLDLVRAVESIALEVRDAPPTFGLEVDEPGIEIALPFERPLYQPPAEVAVESHVSAATEEVNADLLFAQTYIDQARLADTIRAVLPEDSSALLSDVVAVHPIEQGAAEIVGYLALNEDDLAIDVDDTEETVLEYPDPADPDITKRARLPKVTVRRR

SEQ ID NO: 37376 - protein, 192 aa, Mycobacterium smegmatis; identical to SEQ ID NO: 33828

SEQ ID NO: 37377 - protein, 1127 aa, Mycobacterium smegmatis
MSETISRTAELSVRPGAGYRLQYAEIYNWGTFDGQVWRFTPGAETALLTGDIGSGKSTIVDALTTLLVPSHKAAYNKAAGADAKERTLRSYVEGHYRSERNEATGKSRPKGLRENRRTYSVILGVFRNHGHDETVTLAQVFQQRESTGQPYRFFVTATKELSIAVDFADFGSDLRELRKRLRSAGAEIFDEFPKYATSLRRLLGIRSEQALELFHQTVSMKSVGNLNDFVRDHMLEPSDSTERIREIISHFDDLTRAHDAVKRAREQLEALEPIADTAAKYDAALAERDGLEHERSAVRLFIAELRSGLLADEIGRLEADGAALWQQQDAAEADQRRLNHERDSLIEERAKAGGDRIGELERLAHEARAQAESRRQARTLFDSAVGEAGLTTVADEEAFLNLPTLVAAERTRLAAEKREVDAATVDAIGRERDCERKCTTLSAEIESLEQRTSNLPHEQVVMREELCAAIGLTPEQLPYAGELLDVYDERAEWRGAAERVLRGFALSLLVPQPHYDAVTRWVNERRLTVAGRGAKLVYERVAARRVRLQPAESDGLLLADCIEVREGPFEEYLRNELMKRADFRCATTLQEFRDLRRAVTREGQVRSGDRHEKDDRHRVDDPRRWVLGWVNERKLTALRDEFADLERDRQEAAAVAAALSARREVLQHRLDALVRIEGFRSWTELDADEAVSRAGAHDAERARLQSGSSRLEEITRALERNAEEAGVVAERIRQLTGQLATTAAAVQRAQQDRKRDQEFVTAQSPEQLEVARASYPALDRRLAASRPTRADDCAAAESALSEDLYRRIERLTRELGGYGQSLAQYMLEVLRRWPELRADMDATVDARGDFLAFRHRVATDDLPRFESEFKEQLNKNAIQELAGFNNWLNRQASAIDERIDRINEALGAVPYNPGRFIRLEKEPTTNQDVAQFRSDLRNLTNDALAVDGDQYSEQRFLDVKRIIERFRGREGYAESDRNWTRRVTDVRNWFVFSASERDVDTGAEWEHYSDSDGKSGGQKEKLAYTILAASLAYQFGLEWGAEESRDFRFAVIDEAFGRGSDVSTRYALDLFATLGLQLLIVTPLQKVHVIEPYVKAIGIVDNPTGTYSRLQTMTIEEYRARRNGTRP

SEQ ID NO: 37378 - protein, 386 aa, Mycobacterium smegmatis
MWATPGDIAAKVRRRWDDGSLLRAYGKGEPFAPIELPLRGPTPAQIGDDVARVRDWVTALDAGRHDDARYMLEWKSVGGKKFGRNMLPARAVICSYGQAWTLLGVTAAVGRFDELLASAHDHPRIRQWVIANPHRALALAADMPKLIAACEWLDRHRHSQRYLREISAPGVDTKFVERRRSDLAGILGVPSSAQGFLTELGLRSKPSLVRLRPAPSLGLPAPLSELAVRPDELAQLDLRPRTAVIVENEISYLSVDVPEAGVVIWGKGFDVDNVGRLPWLAGVRVVYWGDIDTHGFAILDRLRAWLPTVESVLMDRATLIAHRDRWVVEDRPARSILPRLSPEEQQLYRELVEDSLGDRVRLEQERIDWGWVEGRLKAIYQGRIDS

SEQ ID NO: 37379 - protein, 488 aa, Mycobacterium smegmatis; identical to SEQ ID NO: 30534

SEQ ID NO: 37380 - protein, 240 aa, Mycobacterium smegmatis; identical to SEQ ID NO: 30535

SEQ ID NO: 37381 - protein, 1118 aa, Mycobacterium smegmatis
MASEPTNQFYLSRLQVINWGVFDGYHSIPFSPAGTLITGSSGSGKSSLLDAISLAFLPSHRRNFNASGDTTAAGSGTGKRTVDKYVRGAWGERRDGTSRQIMYLRGTGPAWSAVAVTYSDRTGRAVTGLVLKWLAAEKTSDPGSRYYLIDDDRDIFDLCNRWAAGGYDASVFREAGWNGGRSESQYLAQLYSIIGIRASEAAQQLLGKAKSLKSVGGLEQFVREFMLDEPASLAGVDEALEQINPLVEARGMLDVARRKRNTLGNIEAVQARYADEAAKFGVIDTIDNAMVRDYVDQLRLQQAGPEIENLDDQINQLGAQRDDFGAQQRQLKNEHNALMAQINSASVDLVPLQQRLSEAEKLADEVGRRRGAYEDKVTALQLTPPDTAEEFWSLRETLMEEADRLHRELFTGNQAYVEASAKEVRAREARDAVQTELERVRRLGSSLPKTEYEMRARIARAIGIPERDLMYVAELMELKPDESRWRMAVEKVLRGAGLRLLVPEAHLDAALRFVNENDMRGRIQLQHVKHDAQLRTPLEGTLASKLQVVDPTHDSAVEALNVIASVGDYMCVDSPDEFTTHTRAVTDQGLRKDSGRLSIKDDRSKLRPSDYIFVGGTEAKVAALQADLAAAEDVYAAARKARERLDQHRAALQARERACRALCDQYMQWTDIDTDSADEALTRLQDELDLLVSDNPDVEKLQQRADECWGRVEKVIQQIGSLNERETLLDNRRTALLELTERLKPGEISQHARDTLDGYAADIALPLDLLDSEPFRNELVRVIGRERDRLRADRNRSHDELAGIMAAYDSSFPDAIPNDSDDFDERVHDYVALCRRIDERELPDAYERMQRLITEQAPGAILNLHMIADNEARRITEQIARVNTGLGAVEFNRGTRLTLHAGTRHLAAVDELNEMAQRISARVSLVSFGDETAMFEQYTDILQLRKLLAGNTPEDRQWTRDALDVRNRFVLYCEERDAETGVVIRTYSNSGDNSGGEQEKLMAFCLAGALSFNLASPGSADTRPMFAQLMLDEAFSKSDPQFAQQALSAFRKFGFQLVIVATVQNTTTIQPYIDSVVMVSKSDASAPNARPVASVTAASIAEFGELRRGAEPEAVPAP

SEQ ID NO: 37382 - protein, 468 aa, Phaeobacter sp. CECT 7735
MVASIFGSLEPSQFRIFSTENATFYADLVEYLATEVFRFAAETIRKKQVQRAIEDFILAREWQASLSSEEGLLDGPVHYAVYRHLVKSKWLEEGRDGLRTVVDLNSEARLLLQALLDIKSGKVRSFGGEVLQVKTLIDAVRRDPESTSENLTWAGAHAERFMTNLRAIVGAMRKVEQSMKGQSSVSGMMDAFFHNYITDNYIADFRKLRGENSPYRFRHDLVEDVRAMMEDALLINVLSSAFVREGRAPSLEEAEDNIINSLSTISEVFSSIDSHIDMIEATNSRIERRVLNINRFLSRMGDDQTGQFIDAAKRLGRSKLTSKCKLPVRYDVMDVLPHYDRGSLHKSRPPRKIPAPVIARKRMKDPALVAYEAAKRHYIDRTRVNPDRVRQFLDVKMGKEISIRASDIKIGSLDEFFIFERLLIIKTIFPDDLKEVEIKRLPTPLQNEWISCSDFEIKKRAETLEISQ

SEQ ID NO: 37383 - protein, 280 aa, Phaeobacter sp. CECT 7735
MMMLDDFERALDREIKYRQQGGDNITKDDDDLIVEQFQKAARQLIERQVLHADDRHKSVYRLICRHEPYFDRLMHGLGYVLLIDSIYEYIIVMPGNVDGATRRGKLKKDESLLLLTLRIMWEESSRDGEMDDLGRILIDTDSLLDRLTTLGGGNTPSKSRLKEMMDLWRTKGFVRIGEEDREEEIIPVTIMPAIKHLVTPDLVKEIEIFLDAEDPESDVFVNIEKNRVAAEDAVRQKALNTSKKEEVLETNFFDDLHADIPQEEDTQMSNSKVAEEMPDV

SEQ ID NO: 37384 - protein, 1200 aa, Phaeobacter sp. CECT 7735
MFELKRISVMNWNLLDLEDIEIDGITAIIGMMGSGKSTLLDAIQTVKTGNQVSKLSLNRAASSIKSTRSVKEYCLGVTEDTIRLGVTRDACHSMLVLSYRDDKLNAECAVGITMFADKDEPREHTTCRFIAEGTMFSFEEFADREADGTLVVDSPEIILERVREKSGRGYSVHNNSAKGFIENYLRAMRPKGATPNADDYIRRFRNAIAFQEIKDPTDFVRTFVLDEDPIQTDRLRSNLQTWDEISDSLETLKKKIGDARSLRAAYASEAESIFTTQENAYQAAWSKAQISEIKSEEARGKARQADVDLADLSQERSRVDQKIEREEAAREAKREQHMASSYTQSQAVAEARIASQEKDVKISAGKLKGILEQGASLRNIDDLKRFLPASAGCMKIAAERLEQIRREFTGSGTLPVDTAEISKLITTVSDTERVVASLNAQYEDMVVEQRKTEDQRSEKLRQLRSREQGGKGMDQQVQDFIEYLVEEGIVAEALPMMVEVTPGMEDWVRALETRLGAFKQAVYVDPKNFDQAYQILRNRKQATGRGYEREHRNWKVRLINTQKLARGKGLRNAASNAIVSILETDNDLIRKFLDSQFGGTVMVDTLAELKQQSDAIMKDGSQSQGFSVRVNRMGSPILGRVAQESLMYELQTQVQDLTSQIERRKTDIQRLKSGASIFHSVGQLDPGAAGAFIGEIEEGIKTLKNLENERDAELSDDERELIADIKTHGANINQLKIYRDGDLEDRKNKLIREQARASEKVREEDSARARHQAECDNLAEVDKGPENMRWRNALYHMDHPARGRSIAALTARLGQISRQDEAWHIDNIERLRKEKREELDANSEAAGRRARRMRGIATYLSEYGEDIELAKKSAPDILNWLVSHVLHMEDNELLKYQTQIEEFRKITRREVREVFMTKLNDNLKIALSEMRKLNKRIRRHKFEGMTYVFDWKIDPTMKPLYQMAKRVSDEADKAGTLLMEGGDEVLNEAVEIIREIFKSEEGAAKFEDYRQYFEFELVMTRDEVTDADIDNQGVDGLKTDIAVTGNLTDRIGKGSGGQKQTPYYVAIAASMAAAYYPNARPGESMGMGLVCFDEAFNKLDIRSTQELIRLYRDLDLQILIAAPEEKRTSFMEVADTIVTISKAPGAPELFIDVERIGEKTKDELRKANPEHVGIAGFRQNVLSGYIGQMAPNNASTEPAE

SEQ ID NO: 37385 - protein, 391 aa, Phaeobacter sp. CECT 7735
MSARKRHQVAGELFAKLLDRYEAAERDGRLGPKIREFVFQAFRDPAKQKRFQEAVQHAQRIGAVHVEMGNGDLSHLMKCVVLADADVLYKMTGRQPKAGKLTGAKGAMESFLGTLPDKHRRHATQAMERLLEHWELNKRPHRLSEDNLPPVKEYLKAYGAALSKDVTDGRDLRTYSRVECGDSKLIERQLTRIMAELRAIEFYGADVEDDMIRSDLGLEKFPHLVQFTADIPFSLAHFEKKLHMGIHPSIIETLEVTPLRALVTIENYASFNRYIAEAMAPNTAVLYTGGWPGSGEKQLIAKLSEHVSQGVFHWGDIDMAGAAIADAVARSSKAPVFLHQMSPDLAREHGQPRIAKAISVSRNSPASELILWLSCEGAFTLEQEELDPVPV

SEQ ID NO: 37386 - protein, 492 aa, Rhodococcus pyridinivorans KG-16
MSTADLYRLTRLRDQHAAWTLLRADHAPAILGMLGRHFDRGTRRLPAPELFARLDADLQDLRDQGFDLPRTAQAYCADWVRAGFLLRRADTGSREETLEPTESAFVALNFVAQLTTDTSSITESRLTTLSSQLQALARDSDPRSETRLATLRAERDALDRQIAAVESGDFPVLDGPRAAERVSEILALAGEIPGDFARVRAELEGLNRELRARILDDEGDRGDTLGEVFRGVDLIGSSDAGRSFTGFYDMIIDPERSAQLDDWIEAVLTRPFARSLSPEQRHRFRSLLTEMEDAGGEVHATMTSLSRSLRHFVQSRHYEEHRRLQRLLRSAQQHALQVAPHRKPYEPLDLDLVRIGMSIESVAALQLHNPADDLVAEPVVSQTPGEVDLDDLRRIVRESEIDMDELVGSIAATLRVRGSATIGEVLREHPATQGLASAIGLLVLAVEHGHRVEGDEEICWSSPSGVERVATVRRHLFDPTDPAFTTLEQDSL

SEQ ID NO: 37387 - protein, 199 aa, Rhodococcus pyridinivorans KG-16
MTDTTTGLYPGDTGELELDTRRALVQLLKGPLITAGKHPEVWRTVIRDERVLRSRLADVFLDLVVDEDEQLAFTRPAETGDHKAPAVLRTERLTFMDTVMLLSLRQLLLRAQPGDRVIVDFDEMAGQLEMYRAATSTDPAGFRRRVNASWEKLKKYSLLASTSTEGRMEVSPVLRQLFDADQVAAVEAEFRHIVAESQP

SEQ ID NO: 37388 - protein, 1102 aa, Rhodococcus pyridinivorans KG-16
MTATPPHPSQFRLARVQVVNWGTLHGHHDIPIARKGFLITGASGSGKSTLIDAISTVLMPGGSVRFNAAAQESAAGSGRNFVSYIRGAWRREADVDTDSLTASYLRTGATWSAVALTYRTGDGAAPVTLVKLMHLRRGANANNDVSHLHLIFDFDFDLIDLEPFAGRGIDTRGIRKRWPEATVNPSYTPFARAFRAKLGISSEAAQRLLHRTLSAKSLNSLDQLLRDYMLDEPDTFAMADRATSQFRDLREAHRVVVDARRQVEALDPLVGLAEVRRRGLQQQRELQEENDHLDAVHARMTVDLLREKLDEAYAQIGLLQTAVDKTSVEAERAAERTLDLRVRLETTDGGRLSTLRLQRDAAEADLTRTVQSRSRFDTAVGSWEAEAPTTAEEFAHLRAQLETELRELDATVGTRRNDVYEVVRALGTLRSEHRQLIADRELLARRRSNLDPALLRIRELVCTAAGLSEDMLHFAGELLEVRSEHAEWTGPIERVLGGLARTMLVPDEYYSRVAAVVDAQHLGTRLVYRRVRTRSGRPATPASGDESLVRKLDVRPGPLAAWLQHHLAERFDYACVATVDDLRGVPRGVTRTGQVKHGGERHEKDDRYRVDDRSRWVLGFDNETKLSDLRRRIGEVESEIARLQRRQELLEHAECTVQQRRHAAEIILDTTWADIDVEAAEAAVGAIEHRLEGWLQGNAEYASLTLDLARAETEEKEARAAYTAAGSGLERHRGDVEHTRQRLAEVEAHADSAVPDGIDKRIRARFDAAARRPTSENIDRLLHTVGRTITDEHRAALTRTTDAERRITAILTAYLAEWESRRAEMRSDAEYVDDALAVLTRLRNDGLPAYEDEFFRLLNDQSSRNIGELARAIRRAPGEIRSRIEPVNESLRRSPFDTDRTLRIDVKDRRSPAAADFLAELQRIVSGSFKEEDRVAAEQRFEQMERILERLDSGEPADRRWRQLVLDTRLHVGFIGVEVDGEGVDVNFHDSSSGLSGGQAQKLVFFCLAAALRYQLAASGEELPRYGTVILDEAFDRADPAYTRRALDVFTRFGFHMVLATPLKLLQTLDDYIDGVAAVSIRDKKYSQLALLPIRSAEEPRE

SEQ ID NO: 37389 - protein, 490 aa, Pseudomonas sp. ADP; identical to SEQ ID NO: 32137

SEQ ID NO: 37390 - protein, 224 aa, Pseudomonas sp. ADP
MNDMHQDDPEGSTESRPPVVAELSQLMVHLLKGVLYRQDDERLWASLLSLQARVREQAAVLLLDLVLDEAEGYAFLKSQPEPEHADATPRPPRLIARRPLSYPVSLMLALLRKRMAESDASGSDTRLVLSREEIAELMRVFLPDGTNEARLIDQVDSTITKVVELGYLRKLKPAAGAAQQATRYEVRRILKAFVDAQWLADFDARLEGYRTALSGADRDKEAGR

SEQ ID NO: 37391 - protein, 1125 aa, Pseudomonas sp. ADP; identical to SEQ ID NO: 34097

SEQ ID NO: 37392 - protein, 401 aa, Pseudomonas sp. ADP; identical to SEQ ID NO: 32140

SEQ ID NO: 37393 - protein, 490 aa, Rathayibacter toxicus; identical to SEQ ID NO: 34298

SEQ ID NO: 37394 - protein, 243 aa, Rathayibacter toxicus; identical to SEQ ID NO: 34575

SEQ ID NO: 37395 - protein, 1115 aa, Rathayibacter toxicus; identical to SEQ ID NO: 34300

SEQ ID NO: 37396 - protein, 490 aa, Xanthomonas oryzae pv. oryzae; identical to SEQ ID NO: 36273

SEQ ID NO: 37397 - protein, 232 aa, Xanthomonas oryzae pv. oryzae; identical to SEQ ID NO: 36262

SEQ ID NO: 37398 - protein, 1143 aa, Xanthomonas oryzae pv. oryzae; identical to SEQ ID NO: 36275

SEQ ID NO: 37399 - protein, 393 aa, Xanthomonas oryzae pv. oryzae; identical to SEQ ID NO: 36276

SEQ ID NO: 37400 - protein, 481 aa, Legionella birminghamensis
MALDYYYLNQLKKNNPAWRLLQADHAPLIASFLDKAFIQTNERILAQSQLVSILDDVLFQLKNEDGTAVFSKSATSYLDDWSQNNKGWLRKFYPQGSDEPHYDLTPATEKALVWLENLAEKNFVGTESRLLIVFELLRQIIHGIETDVEVRIAELEKKKRDIDKEIQSLRMGDLAVMDDAALKDRFFQVQSTARDLLSDFRTVEHNFRVLDRDVREQIASWDGSKGQLLQQIFGERDAISDSAQGRSFRAFWDFLMSPASQDELSALLQQVTQLDSLAEFAKDTRLQRIHFDWLEAGEYTQRTVAKLSQQLRRFLDDQAYLENKRIIQILDRINLHALQVKSCPPKEDFMSLDGAAPSLHVPMGRPLFTPPLKIRLQTHMYTDELDNIVPETLYNQMVVDKEALLAQIKRARGLAPQISLAHVIQTYPLEHGLAELITYLSIAANDKHAVFDEENKEVISWFDEHGIVRQASLPRIIFTRT

SEQ ID NO: 37401 - protein, 195 aa, Legionella birminghamensis
MNQESNTLSLVLIKLFKGVLYLEEEPSLWQHLLKLQAKVRDYVRIIGLDLILQEDEGVAWLKPKIAEDGEEPLPSLVPKRQLSYPVSLLLALFRRKLVEHDASSGDSRLILNKEDIVEQLRLFLPPGSNEARIMDQIDTYINKIVELGFVRRLHNDSSKIEVKRIIKAFVDAQWLHDFEQKLQAYALHAGAAQGE

SEQ ID NO: 37402 - protein, 1112 aa, Legionella birminghamensis
MNGFRLQQIEVFNWGTFHQRVWRLTLEGKNGLLTGDIGAGKSTLVDAITTLLVPAHRIAYNKAAGAEAKERSLLSYVQGYYKSERSEAGQSAKPVALRNNSHYSVILGVFHNQATQQSVTLAQVFWIKDSGGQPARFFVVADEVLSIASHFTHFGQNINQLKKRLRLLSSSELLFDSFPPYAAAFKRRFGIQHDQALELFHQTVSMKSVGNLTEFVRDHMLEAFDVASRIESLIQHFDDLNRAHDAVVKAKAQIQKLSPLVKDLDLHSQVIHQKEHWRICREGLRYYFAHLKSGLLRQRLENLQEEIQKGTNRIAVLNETRASALAERDHLTRELLVNGGDRAERLRLEIEGNVREQNKRKQTAKDYEFLARDLELPFPDSFEQFIQNQAALKERLQNGEIRESAIQNEITELTVRFKTEQQRHRVLEEEIQSLQQRQSNISAQQIALRTHLCQALKLPEEDMPFIGELLQVQESEARWEGVAERLLHQFGLSLLVPDRHYQTVSAWVEGTHLKGRLVYYRVPAAIDARQLKTIQPGSLVEKIQIKPDTEFYTWLEMELSKRFDFLCCEDLDDFRKAQQAVTPAGQIKFSGQRHEKDDRFPINDKSRYILGWSNQKKIKTLLLQRQEQEQYLHQLSIQISRQQNARKAIDQEKIKILRLEAFKEFEALCWQELTRIIASLEKEKESLEQASDVLKELNAALEKTTTHIKSLEQQLDQQKDKTSRSEAKMEWAQQQLSICEQECLPKECGEAAALITALERYRTEALGSQQLTIESCDNKQQDLRSWIQKKIDSQDSKIKTLEERIIKSMEGYRRDYPAETQEVDARLEAGNEFKLMLSSLQADDLPRFEERFKALLNENTIREIANFQSQLNREVQDIKERIAQINRSLEEIEYNPGRYIALEIQDTRDMELRQFRSDLRQCTEGSLSSQEAAQYAEHKFLQVKAIIERFRGREGTTELDKRWTRKVTDVRQWFVFAASERWLEDHSEHEHYTDSGGKSGGQKEKLAYTVLAASLAYQFGLQAERASQQSFRFVVIDEAFGRGSDESARFGLDLFKTMGLQLLVVTPLQKIHIIEPYVASVGFVHSKEGGESLLRHLTIEEYKKEKEAYLAT

SEQ ID NO: 37403 - protein, 395 aa, Legionella birminghamensis
MQPDKRWASKLLIQKKLEALWDSGRLLTELLEPSDFFPLRFPLKAPSPADLGQRFADAQNWVSEIRSLSSIPGFHLEWQVVNHRLLGRNELPKSLFIASVQDVLAWLGKRRKGELFLRVASQILAEIPALRTWIIKKPHQVLIYHEVMPRLLRVMQWMLQNPKPGIYMRQLSLPEIDSKFIEQHQSILSEWFDLLLPVDAIQQQWSARANFAARYGFNEKPNLVRFRILDETCHIQGLSDLSITTKAFSKLALPVQTVFIVENDINALVFPRIPRSLVIFGRGYGFDFLEQASWLSDKAVWYWGDIDTHGFAILNQCRKILPQTKSFLMDENTLLSHKMHWTIEPKQNQSSLNYLTADEQLLYEALQTQRFGTRLRLEQEYISYAGIMQFLSSLG

SEQ ID NO: 37404 - protein, 481 aa, Legionella quinlivanii
MSLDYYYLNQLKKNNPAWRLLQADHAPLIASFLHKAFIQTNERILAQSQLVSILDDVLFQLKNEDGSALFSKSAISYLDDWSQNNKGWLWKFYPQGSDEPHYDLTPATEKALVWLENLAEKNFVGTESRLLIVFELLRQIAHGVETDVEVRIAELEKKKRDIDKEIQSLRLGDLAVMDDAALKDRFFQVQSTARELLSDFRTVEHNFRVLDRDVREQIASWDGSKGQLLQQIFGERDAISDSAQGRSFRAFWDFLMSPASQDELSALLQQVTQLESLAEFTRDTRLQRIHFDWLEAGEYTQRTVAKLSQQLRRFLDDQAYLENKRIIQILDRINLHALQVKSHPPKEDFMNLDEASPALHVPMGRPLFTPPTKIKLQTHMYTDELDNIVPETLYNQMVVDKEELMAQIKRARGLSPQISLAHVIQMYPLEHGLAELITYLSIAANDKHAVFDEEVKEVISWFDEQGIVRQASLPRIIFTRT

SEQ ID NO: 37405 - protein, 195 aa, Legionella quinlivanii
MNEESNTLSLVLIKLFKGVLYLEEEPSLWQHLLKLQTKVRDYVRIIGLDLVFLEDEGVAWLKPKLVEDGEEPLPSLVPKRQLSYPVSLLLALFRRKLVEHDASSGDSRLILNKEDVVEQLRLFLPSGSNEARIMDQIDTYINKIVELGFVRRLHNDSSKIEVKRIIKAFVDAQWLHDFEQKLQAYALHAGAAQGN

SEQ ID NO: 37406 - protein, 855 aa, Legionella quinlivanii
MSGFRLQQIEVFNWGTFHQRIWRLALEGKNGLLTGDIGAGKSTLVDAITTLLVPAHRIAYNKAAGAEAKERSLLSYVLGYYKSERSEAGQSARPVALRNNSHYSVILGVFYNQATQQSVTLAQVFWIKDNGGQPARFFVVADEVLSISSHFTHFGQNINQLKKRLRLLSSSELLFDSFPPYAAAFKRRFGIQHDQALELFHQTVSMKSVGNLTEFVRDHMLEAFDVASRIESLIQHFDDLNRAHDAVVKAKAQIQKLSPLAKDLDLHTQLINQKEHWRVCREGLRYYFAYLKSGLLRQRIENLQDDIQKGTNRIAVLNDNRANALAERDHLTRELLVNGGDRAERLRLEIEGHIREQNKRKQTAKDYELLARDLELPFPDSFEQFIQNQAALKQRLQNGQIRESVMQNEITECTVRFKTEQQQHKILEEEIQSLQQRQSNISAKQVVLRTQLCQALNLPEEDMPFVGELLQIQDSESRWEGVAERLLHQFGLSLLVPDRHYQTVSAWVEGTHLKGRLVYYRVPAAIDARQRKTIQPGSLVEKIQIKPDTEFYTWLELELSKRFDFLCCEDLDDFRKSQQAVTPAGQIKFYGQRHEKDDRYPINDKSRYILGWNNQKKLNTLLLQKQEKEQSLHELSIQISQTQSARKELDQEKINILRLEAFKEFEALCWQKLTRIIATLEKEKECLEQASDVLKELNAALEKTTEHIKSLEQQLDQQKDKTSKSEAKMEWAQQQLSTCEQECLPEDCGEISALITALERYRAEALGSHQLTIEACDNKQQDLRFWIQKKIDSQDSKIKTLEERIIKAMEGYRRDYPAETQEVDARLEAGNELNSCYLTCKPMIYLALKNVLRLY

SEQ ID NO: 37407 - protein, 480 aa, Desulfitobacterium hafniense; identical to SEQ ID NO: 30431

SEQ ID NO: 37408 - protein, 202 aa, Desulfitobacterium hafniense; identical to SEQ ID NO: 30679

SEQ ID NO: 37409 - protein, 1159 aa, Desulfitobacterium hafniense; identical to SEQ ID NO: 30433

SEQ ID NO: 37410 - protein, 417 aa, Desulfitobacterium hafniense; identical to SEQ ID NO: 30434

SEQ ID NO: 37411 - protein, 489 aa, Xanthomonas vesicatoria
MKHQARIAGYRQLRDQPAWKLLAADHAPELIGLLQTLLLDGERRLPSAVLHARLQRQLDALRGDELSRELPRTAQAYLAHWLAQGWLERRLPEGAAEEDYELSRAAIQAIRFIAGLRESGSSATESRLSLVIQQLVQLAGQTEADPATRLAALREERDRIDAEIERVSTGRIAALDGKRALERTRDVIHLADELAEDFHRVRDDFEQLNRQFRERIIDDEGARGDVLEQLFSGVDVIADSEAGRTFEAFWSLLNDTQQSSQLDQALDALLARGFARKLDRRERAFLRGLTGTLLERGGEVHTVMQHFARSLRGFVQSRGYLEQRRLNQLLKQAQGEALQLRDSLHATAATGYTQALSASRLRSLSQWRLHDPRLTQVDGRVYAADAAEISLDSVGDLVAQSEIDVRTLRNDLYVLLGQQPRLTIGDALQQRPAPQGLGSVIGYLSLGTRHGVVIDGHMETVQWEGGDGIVRRARIPLVWFTREKRNELV

SEQ ID NO: 37412 - protein, 234 aa, Xanthomonas vesicatoria
MNWSEQAPLDADDDNDAARDAALALPASDAANAAQGGSLFLGDTGTLPFDARRALCQLLAGPSIDAHRHGGLWPALLRNEVAIRQVLCELFLELVLDREGGVAFTRQADTAELESPTLLRSAPLTFVESVLLLYLRQQLAEADTRGERAVVDEAQLVEALSVYEKNVSTDKAGFTRRVMTAIGKMRDNQLLSRLRGSEERYEVSPVLKLLFSAEDVQALVVAYRELREGEVALD

SEQ ID NO: 37413 - protein, 1337 aa, Xanthomonas vesicatoria
MNSQSNLSPASPGASLFAETLAEQRAQQFRMRRLQVHNWGTFNGLTEVPIAEKGFLFVGRSGSGKSTLLDAMSALLTPPSIVDFNAAAREAERSGRDRSLVSYVRGAWADQQDSASGEIATQYLRKGATWTALVLEYRNVQGEAVSLIRLFWIAGSGNAAADVRRHYMVAPRSFDVASELDGFDLDLRKLKARLGDEVAHFDGFAGYAERFRHALGIGNEMALRLLHKTQSAKNLGDLNAFLRGFMLDEPRTFEAADRLVEDFAELDGAHHAVVTARRQVETLTPAREHHAALMALRHSVGELRELQLGVDSYREQQRLALLDERLQELDNQDRGLAGEEGQRRESLDNHEQKLAGLEREQRAAGGEQIEELERERARVERERDERLRRRAQIEQACRQLGTALAAGASGFAAQIAHAQTVLDNGKHDASALDDAIAERMGARRDDERRFAEIRVELDALKRAPSSMPAPMQALRARLCEDTGIAEAALPFVGELVQVREDQMAWRGAIERVLHGFAQSLLVDERHYAQVSEWVNRTHIGTRLVYFRVRRNDELHSRRVDPDALPGKLQLREHAFTEWLRNELTRRFDYACVENATALRNADRAITREGQVKHPGDRYEKDDRHAVNDRKRWLLGHDNRDKLKVFEREAQALAQRIASCDADVAALRKQREQDQERQLAAHTLVERDWDEIDVGPKLQRLSDIDEQLVQLREGNSGLRALGQAIDTARTLRDQAKRTYDDVRLERAQLARERVRLEQQHAACAGRAGTATLTPTQLQGLRERLAALTPLSLDNLEAHFRVVERGLAEQLAESQGRDSRLSAQLLECFRRYCQQWPEDSGDFTVSLSSADDFLARLDRLESDGLPRHEHRFFDLLQTQSKNNLLALQRHTAEAHKGIKQRMDEVNASLEQVPFNRDTVLTIEVSDRRLAEVQEFQQQLRAVLSHQQTEDRALAEAQFSTLRALVARLGAQEPEARRWREQVLDVRLHVEFIGVELDAQSRAQVEIYRSGAGKSGGQRQKLATTCLAAALRYQLGGEDGELPRYCAVVLDEAFDKADNEFTALAMNIFENFGFQMVVATPLKSVMTLEPFIGGACFVEISGRHNSGVLLIEYDEQAQRLKLPERSRGDEPAVAEAADAAPSIEAAGKPEEVQGAATAGGMTADAVSTDPTSPAVDETSPAAQKTQPSKRRPAVATANEQNTNAKPAFSTRAAAQAQAKQSKKSPSRAPAVTGKPASDKRAAGAQQASVASSGIATKSNAGKTTRSVKTPGKPVAATGASNATSKKAAATSTAKPRATAASIGQPGRGAGKTTSAHAAVKPSLAKKRGAKAGAAQSRGKR

SEQ ID NO: 37414 - protein, 489 aa, Xanthomonas translucens pv. translucens; identical to SEQ ID NO: 32239

SEQ ID NO: 37415 - protein, 234 aa, Xanthomonas translucens pv. translucens
MNWHDHELDPEQERSNDAVDSAAPDAGTDLFPGDSGRLPVEARRALCQLLSGPSVDAQRHSKLWPALLRSEAAIRSALADLFLELVLDREAGIAFTRQADTGELEAPVLLRSSPLTFIDSVLLLYLRQQLAEADARGLRAVVEEAQLGEALAVYEKNLSTDRAGFLRRVGNAVQKMKDNHILTRLRGEDERYEVSPALKLLFSAEDVAALAQVYRQLREGPGSGEDEAEAAQDA

SEQ ID NO: 37416 - protein, 1194 aa, Xanthomonas translucens pv. translucens
MKSSASTPGLFAGDLPDPRLQQFRMRRLQVHNWGTFSGLTEIPIAARGFLFVGRSGSGKSTLLDAMSALLTPPSIVDFNAAAREAERSGRDRNLVSYVRGAWADQQDSESGEIATQYLRKGATWTALVLEYRNGEDRVVSLVRLFWIAGNGTAAADVRKHYMVAERAFDIAADLDGFDLDLRKLKQRLHDVHHFDSFAGYAERFRHQLGIGNEMALRLLHKTQSAKNLGDLNAFLRGFMLEEPKTFDAAERLVGDFAELDGAHQAVVTARRQVETLLPARGYHAELMAVRRQRSELDELKLGIDSYREQRRLALLDARLQELDTQDRGLAGEEGQRRAALENHQRRLDDLEAQRRAQGGERIDALERERGQLEAECDRRAGKRTQAEQACRQLEQVLAGSAQGFAGQAAQARAALEDGTRAAAELDEAISQRIAGKAEDAKRFAEVRAEIDALKRNPSNIPAPMQALRARLSADTGVPEAALPFVGELLQVRSEDADWRGAIERVLHGFAQSLLVDERHYADVADWVNRTHLGIRLVYYRVRDNEHALPGRAPAAGSLLHKLELREHAFAGWLRRELGKRFDYDCVDNAKALRHAERAITREGQVKHPGERYEKDDRHAVNDRRRWLLGFDNRDKLALFEEEGLALAQRIAACDADVAALRARRERDGARRLAQHTLANLAWDEIDVAAPLQRLDDIATALRQLREGDGNLRALGEAIDHARADIKQAERTYESVREERIGLGVERVRLEKQRLNCADANARVVTPLQRQGLDERLAGLGVLSLDNLEAHFRQIGNAIVEQTSASDKEHNRLEQLLLGCFRRYCQQWPEDSGDFTVSLSSAEDFLARLQRLERDGLPRHEARFFELLQSQSKNNLLALQRHTAEARKSIAQRLDEVNASLEQVPFNRGTLLTIELGDRRLPEVIEFHQRLRDVLGHHQTEQRELAEQQFAVLRELVRRLGSQDGEDKRWRELVLDVRLHVEFVGVELDAATRQQVEIYRSGAGKSGGQRQKLATTCLAAALRYQLGGEDGELPRYCAVVLDEAFDKADNEFTALAMNIFENFGFQMVVATPLKSVMTLEPFIGGACFVEISGRHDSGVLLIEYDEQARRLKLPERTRGTATPADAAPAPEAEQPGTAPSRLRADTAAVVRGDAGEPAVSDGAAAMAPVPHRALPKSKAKSKPESKPGSKPKSKA

SEQ ID NO: 37417 - protein, 392 aa, Xanthomonas translucens pv. translucens
MARANAMLLPDAALAALRGQWRRHRGAWLLGDAAPQPISLRMPTQAQASAGFDAFGAWLRAWRTTPLPGHVEWRDVKWSQLGLQCLPHAWQPNADEAALALGEHARWQRARQRSAALVARWPQALGFAARLRRQFDLLADAPEAGFVRLLAVVEWLHAHPHSGLFLRQLPIAGIDSKWIEPRRGVIADWLAGLRGIVEPRGFDSVSGLRRAPDRVRLRLLDPDLRARLGGLEDVQVPIAQIAALQLPVRQVLIVENRETGLACEDLPGTLLLMARGYAVDYVRAIDWLQALPLYYWGDIDTHGLAILHRLRRHAPRTVALLMDEATLRDTPSELWGHERRQHRAQRLDTLTAAEQALYTDLRTGRFGPAPRLEQERIAWDYAWPRIRAALAG

SEQ ID NO: 37418 - protein, 450 aa, Pseudomonas aeruginosa; identical to SEQ ID NO: 32505

SEQ ID NO: 37419 - protein, 220 aa, Pseudomonas aeruginosa; identical to SEQ ID NO: 33036

SEQ ID NO: 37420 - protein, 979 aa, Pseudomonas aeruginosa; identical to SEQ ID NO: 34267

SEQ ID NO: 37421 - protein, 393 aa, Pseudomonas aeruginosa; identical to SEQ ID NO: 32927

SEQ ID NO: 37422 - protein, 452 aa, Pseudomonas aeruginosa
MVVEDALQGLSELLSSYASQELFEIDADNVQLQAGRELREWIKRRLIVEREGRVYATDALEVAIQFVESLDSRMMTSTASRLSVVQREIENLETNLNPSPAGRIASLRRRIHDLELELKQVEAGHIVVLDEAQAIEGIREVYSLATSLRADFRRVEDSWRDADRALRQSIISEQYHRGDIVDLLLDGQDSLLSTPEGRVFDSFQQQLRQSIELDDMRARVRTILRHPAASKALQRSQQKEMRWLVLRLVQESQSVLQARARSERDVKGFMKTGLALEHHRVGQLLHDIFNAALGLDWQRQSQRRKAVPLPPIGIPISGIPSVERLRFKDVSTGADAELNLDVVSAGLDEIDADFWDAFDGLDRNALIRETLSVLAQQGRPLSLGELAALLPPTHDLETFSLWLGMAREAGLHVYEDEAESVELVDSDQQRWRFHLPLVGMDSVALKDIDWEL

SEQ ID NO: 37423 - protein, 245 aa, Pseudomonas aeruginosa; identical to SEQ ID NO: 33339

SEQ ID NO: 37424 - protein, 982 aa, Pseudomonas aeruginosa
MVRLGALLWFEGTSSSAADMKKLWIFSTSPDHTLEHWLSVQHEGGMAALNKMGSSEAGIWTYQSKKQYLARLRDFFEVGENAFNLLNRASGLKQLNSIDEIFRELVLDDRAAFDRAAEVADSFDDLTEIHRELDVARRQQRTLEPIAELWSRYQSLESQASEKAALERLVPVWYAEQGHRLWLAETERLRIESRQAEAEVASAHELLEAQRQRTDELRQLYLLKGGTNIDQLRARVNDWSKIASKRAIDSKQYQSLARNLGLSDDLDSLVLQENQATAESRLVALRSDLEQAKLTSFQLGVAESEQSSLLARLKTERQEVERRPGSNLRPDFQSLRSDLAAELGLDDSALPFVAELVQVKSEEHRWRGAVERAIGGHRLRILVPPQSIEHALRWINNRHNRLHVRLLEVKHPESPAVFMPDGFTRKLTYKDHPYREALKALLAENDRHCVDSPEVLRSTPHAMTAEGLMSGKARFYDKQDQLRLEDDWLTGFDNRDRLAQLASQIQEVTERQAQAAQELKNALAAVSLLEGQIRAFEQISHVDFADIDLPGAQKQLDELNQGIQELLQPDTDLAAAKQAADQAAELVGTLDKQHQQAIAKKALVDTRFEHAATSTRKAFSRSEVGMSDQERELAIRYFPEVAPKYLAEIGELELQFTRSLQGEISGLKDRLSKLQTELAKKMSDALKEDTGALVDAGRELDDVHKYLDRLRVLTEEALPEKLKRFRDYLNRSSDDGVTQLLSYIEQQVALIEERLDDLNSTMCRVDFQAGRYLRLIANKVSHDSIRALQRAQRALNSARFIDDEGESHYKALRELVDILREACERNRTQAARTLLDPRFRLEFAVSVIDRNTGNTIETRTGSQGGSGGEKEIIASHVLTASLSYALCPDGSSRPLFGSIILDEAFSRSSHAVAARIIGALREFGLHAIFITPNKEMRLLRHHTRSAIVVHRRGMDSSLVSLSWEALDEHYQQRMKVQSEATT

SEQ ID NO: 37425 - protein, 386 aa, Pseudomonas aeruginosa
MKPPLEISRKLARQWYQAETRSKRLLGLSEWPLCMRIGVPSAREFSQNPGAVQRHAESWKKVAIGLVDWEPVSYRAGAEPILLPSQWCLRTPSEWIAATMDAAVCREYADLEHIVESVDVAFRALLVTQRSLWLKKKPEEVIAAADLALRLQPGCAMGRPLRLLAEHGVDTKFFERNAGLLTRLLDERFQGEPSEMGLNTFLGALEENEHWVLVAPLCDGLLPFKKLRLTTAQLKESRLPGSRLIVVENEKCLHQLPALDDAVAVLGCGLDLQWMAASWLREKQLAYWGDIDSWGFLMLSSVRVLCPDISALLMSRDVYELYAPGSAVEEPVTAQVYPPSGLCSEEKELYSHLLGQKKGRLEQEYLPSAAVEAAIDLWIDRTSNDV

SEQ ID NO: 37426 - protein, 486 aa, Photorhabdus luminescens subsp. laumondii
  MOD_RES (420)..(420): Any amino acid
MNFQGLQAKYRRLFQESAAWKLLRADNAPVILAFLGELFSEDSEVPFSRARVSLDAELVRCRELGLWETETGAGTYLNKWIREGWLREMDDTLTKTDASEIALRFSQGLDERNSGTTASHLRIVQEAVRDFAIAISPNADERVAFLEDRKSEIQREIDALRAGVVTELTKAEQRERIREIYQLASVLTGDFRRVEDEIRQLDQEIRIQIIEGDSTRGDILLAVLEKEALLAKTDAGSAFESFFDLLCDQNRTMELRDQLRSILSRPVAEHLSTQQRQFLSQLMRELSRESDRVFQIRRRTEESLRAYIESGTAQENRAVDRLLGQLERLAIELKNLGYDLQTATTLSLPVGAASISSPESMLLKSPDEKLDTSDAEEQLNSREPSMQMLDCLDVVQIRLIAERALETLKEFGPMTIASIXNYQPINSGLEELVAYLRVAKSVGAALLEEKESVEISDKRGARLRASIPTFLLSADLFPDSLDELVL

SEQ ID NO: 37427 - protein, 297 aa, Photorhabdus luminescens subsp. laumondii; identical to SEQ ID NO: 31230

SEQ ID NO: 37428 - protein, 1131 aa, Photorhabdus luminescens subsp. laumondii
MTDQTLSANSLFHVGQIRLAELSVYNWGSFNGLHTALIDPMGTLVTGDNGAGKSTFIDGLMALLLPAGKATFNVAAAQGDRSDRTLLSYMRGSFGSAHDGAGTRVRSKREFGVVTGLRALYQGDDGSKITLAALFWITKSTNVLADVTRVYVVAKRDLTLKEMLNAFGNGNARAFKQWLRDDPTITCCDDNFSDYQELYRKLLYMDNKNAPALLSRALGLKKIDDLTGLIRELVLEPSTVKDDAKKVVEEFADLVAIHSQLVDARAQKVHLSRLPELNSIIEKTTKEFAELMAEKNSLPVYFGEIFAQLWSEKITDIEAELEALLLKISQVEGQKVDANKLVERRHEEYLQFGGDKIESLRKEVDHTQTQLNRVVRNSSQYQTHANELALPSVLEEAVFLKNQSTASTRLASIQQEEGEYQDRFATISAKFSELQANIHDISQEIREIEARPDSNIDVKYQQLRDELVNSLELSKEQCVFIGELIDVEDREKSWQGAIERALGGLRTTLAVPHHCYSMVTRWLNARHTGLHVRVQVVNNSTTQGQSVVFKSDGYLRKLVWRTHPYREWLKHHLQRFDLQCVSSTEELDQTPFSMTQQGLMHMDKGRFEKKDQYRIDDRRRWCLGFSNKSRLAILNNDKKELTLQLAETEKKVSQARQDLNSVSDRKILWEKIQGYRWDDINAPYWHEKLSDLQVDLKMLEQSGGDLDKARERWESAKEQLVQIQSVLNQLNSDSGGVKNTLKNAKEEWSKAQAKASKGLPDSARQLLAIRVGVLNTNDLGRMSELVLKVEEDLERLLDISRNSKDKAERLAISIMVSFRSNDKWQVFTVDWQSNIGGLPDYLNHLRQLEEEGLPNLVEQFIERLNKHATQSLARIKTKLESEREDILERIDIINRVLKRTEFRSGTHLKLGSKREKFPHVNEFEQHLRKVLSQVTSDDHEARFRQLAKVVEILGKASAPGSSNTLESLRLLDPRYQMSFYAEELDSNTGEIRDVLESSSGKSGGEKESFAATIVAASLAYVLTPDGYDRPVYCTVFLDEAFSNTAETVSRRVLRVFRELHIHVNLITPYKNLNLARESARSLLIAERDQENHDSHLCEVTWEEIDRRMGEEKEKKLPDEAADLGIEFEKLT

SEQ ID NO: 37429 - protein, 398 aa, Photorhabdus luminescens subsp. laumondii; identical to SEQ ID NO: 31232

SEQ ID NO: 37430 - protein, 456 aa, Methylobacterium radiotolerans; identical to SEQ ID NO: 30615

SEQ ID NO: 37431 - protein, 208 aa, Methylobacterium radiotolerans; identical to SEQ ID NO: 30616

SEQ ID NO: 37432 - protein, 1145 aa, Methylobacterium radiotolerans
MYVLTDIAISNWYLIRREQIRLRGAAALVGPTGAGKSTIFDAVGTVLAGNNASRLALNASASGRSARTVRDYCLGWISDPAEGGRPTRESCETVLVLVFENPDSGRVVSVGLALAARAVEPKETVLSRFIAVGHRFEVADYARTAPGGTYTAPWSEIAADLRARASSFTEYRTSGERFTADVLATLREGAPAPEPRHFLRSFANAVAFKPIFDTSAFVRAFVLDPEPLDVERVRHSIANWRRLLETIAELESRLGRLRRLRDRYEAWGEAVLAAATHELRAASAELRRRSLDLIAVRSRLREGADTLRIARERVTASRGYVREIDGEIAEKKALAAASAAEGRLAASTLGLSMLERDRKELIGRIGDLVGLVGQMAKLQPVAPLLRQSCPQAARLAEACARAGLRRESSPEEILRPEGPLAELADGLARLPDFDEALERAAEDAALKARAQESEAERTAPRTGGGPAARLSSDTVAFRGELERRGIDALPICELAEIVDPTWGPALEGLLGRAREALVVAPDRLSEALGVLQSGRDRFSRCILVKTTDTAKQRSRRYDDGPLTVIETSDPHAEAFLGVRLGGYDLARDDAELARLSRAVAPSGRTTAGMAYTVTRNVDLLMTRGHRGPTADSRRAHEIAVAEARRLRGEAAVLREAARTAAAIRARVARGLDDVEALRAELDGLEGRRRTLQTEREGIEKRDTAGLTAEIAALTAERVGYLRELSEELEPKLDRLLADEAALRARMGPVREAVRAALSARRAALRQLSGGDAARVRLARAEPFDLGAVAEARRSLAGLDAKAAGARVSAERGLARDSAEAARSHGRIAERELAEACAAWRVENPLASGDAPAIDGFAWVRREYEAVEGHELRRYRAQAERAEAEMRRLMTEDLLTRLADRFERVHARLAALNERLSARSFTGQTYAFEAAVDRRYAAVHALATETARSPEAAQALLAGEAEGPMAAALEEITALIAGEEDAARLADYRNYFVYEIGMRDRAGNRTTMSARALRGSGGEAQAPFYVAIAASLASAYYPGDRPGDENPGLGLCLLDEAFSKLDVRNSQALVDLYRAWGLQLLIAAPEDKRTTLTEVMDTIVTVYKSPDLTSVRIEAEHPLEAARRALHAINPDQIGIEGFRRSDAAE

SEQ ID NO: 37433 - protein, 491 aa, Microbacterium testaceum
MTTTRTEAAYLRSVTAFKNPTLDLLHGRFAPFVVAVLSVVFTPDRPAVAVADAHVEVAEAIDELRAAGYDTDDDRRIPAGSARDICRGWVRVGWLGLQIEDDVEVYRLSAHAVGALEIAGRAGGGRARVSRSRVRTLLDAVERLARDAESDPARRREALLEERAALDAEIAALDEGIIEPLDDDHLLEEAENVIHLARELPADFSRVAESIAAMQRDVVAELRRDVRPTGEVLREYLERGRQVMQATPEGRAFQGALRLIGDPENIDDLTDQLHAVLAQPFSRLMTPEQRGELDAIARRVEAGVQEVLTAQRRASHVITAQVRTHDPIRDRQVDDLLRGVMAGLHRWSQTRSPGRVEPVRTLPLADVGHLRQSISDVRPPGAPEPLASESPDVEFVDADTRAWGGPHYAELEEYVARLGDGFDLADAFAGADAETRRPVDLVGLLEIVHRRGLVETDEVSVVEAIRPDGTTRRFAFGAVRAGNLSEQGADD

SEQ ID NO: 37434 - protein, 235 aa, Microbacterium testaceum
MTDVQTPSIDAESPAFIAPVAMENDPDALFAGDRGTLDADVRRVLVRILQRRFLLAESSPAEWKLLLEHQQMIESRLNDLFVRLVVDHARGVAYKEQVRSDEVDVPILLKDEAYSRAETLVLVYLRTVFQRETTAGTASARVDVEEVEQTVLTYFSETDGTRASQQRAVRTAIARLDREGIIEEESEGRYRIGPLIEIVLSAETLRELQTWLDEQTRDAPAEVLASETPEKELLP

SEQ ID NO: 37435 - protein, 1116 aa, Microbacterium testaceum
MTMLETLFGLIPAASRGQQWVAEDLQLINWGGYDGTHRVRFAPTATLLCGGSGSGKSTLMDAYVALMMPHTTPFNGASNGAVVGRPRGQEQRNILSYGRGKLDESRTDEGTKVRVLRGDGVDTWTAIAMTWADHDGARFTAVRAWYIPAAARTLDDAVKVRATVHGAFDLRQLERAAQSHLSDAAVRATGLDTLATDREFSARLHAVLGIGAAGAGTKAMSLLARIQAGQQITTVDDLYKRMVLEEPETLAVAEAVVSHFDGLESTRTRMLEARQQVRALQPIRGMKTRIDEAAERLRLIEALGRFSDPESRASLWRAQRRVDLLGAVEDELRERTHATDALVRERQALADAAEAEREGLGDVLRAAGGDRLDVAQRELRGLERRLAGMQRDRERFEAALAVLSVEVTTEKQFTALVDEARRTLGDADAKSAVREAFVAASSAHTDARQKLAALEAEHRRTQTRDDNIPPRLHEAREALAEAAGLTAAELPFVAELVDVRTEFEPWRGAFTLALGGFATTLLVDAAHLASFRSAIDGVRLSERLRFEGVSTGMPERTGLDPATLPGRLEYRRSPFTGWLQDRLEQQFAFVCVDSASELSGHRMALTIAGQTSQGARGAHGGSSRHSILGFSSRVRLTELGEQIVAVRRDLATAKATVDEAAAALDAFDERRSALERIADLSWDQVDVASVERDLERWNETIVEITAGNPRIAELQEQISGAKARVARLREEIGGAKTEQQALAARWAEVTDDVDSAHERLERAEDAEMELSADEAAYLDGLFVAPSNDASPSQLLARFDAALESASKRLLEEQRAAQETWGDQRESLRRTLTAFTDRWPSPNLLADPDESLGDFERILADLEASGLHELEAEWRDSLLRLSGNDLTNLDSALTRALREIRERIAPINDIMQDLPFYDDEHRLQIVPRENQSEVRRRFRRELRDVRAAIDAASSDEEREAVYGRMARLINRIRPTAPDFADLVDVRNHVRVSAERFRADTGEHVALYDHIGEKSGGESQELIAFIVGAALRYQLGDAGAERPRYAPVFLDEALIKADAHFTKRAIGAWRGLGFQLVIGAPNDKYSAIEPHVDVEYDILKDTRGRSWAKAKVGVADSV

SEQ ID NO: 37436 - protein, 491 aa, Microbacterium testaceum
MTTTRTEAAYLRSVTAFKNPTLDLLHGRFAPFVVAVLSVVFTPDRPAVAVADAHVEVAEAIDELRAAGYDTDDDRRIPAGSARDICRGWVRVGWLGLQIEDDVEVYRLSAHAVGALEIAGRAGGGRARVSRSRVRTLLDAVERLARDAESDPARRREALLEERAALDAEIAALDEGIIEPLDDDHLLEEAENVIHLARELPADFSRVAESIAAMQRDVVAELRRDVRPTGEVLREYLERGRQVMQATPEGRAFQGALRLIGDPENIDDLTDQLHAVLAQPFSRLMTPEQRGELDAIARRVEAGVQEVLTAQRRASHVITAQVRTHDPIRDRQVDDLLRGVMAGLHRWSQTRSPGRVEPVRTLPLADVGHLRQSISDVRPLGAPEPLASESPDVEFVDADTRAWGGPHYAELEEYVGRLGDGFDLAEAFSGADAETRRPVDLVGLLEIVHRRGLVETDEVSVVEAIRPDGTTRRFAFGAVRAGNLSEQGADD

SEQ ID NO: 37437 - protein, 235 aa, Microbacterium testaceum; identical to SEQ ID NO: 37434

SEQ ID NO: 37438 - protein, 1116 aa, Microbacterium testaceum; identical to SEQ ID NO: 37435

SEQ ID NO: 37439 - protein, 487 aa, Microbacterium oxydans
MTGTRVEAAFSRAVTAFSTPTLDLLHGRFAPFVVASLSLLFTADRVSIPIADAQAELAEILDELRDAGDDDDDRRVPSGTGRDVARNWVRLGWLVQQIDEDVEVYRLSAHAVEALEIAGRTGGGRTRVSNSRVRTLLEAVEHLADSAEADPVRRLARLREERAALDAEIDRIEESGRADPLDDEELFEEAENVLHLARELPADFTRVAESLKLMQRDVVAHLRRDERPTGEVLREYLQRAQDVMNSTPEGRAFAGALKLIGDPERIDALTDQLHGLLRQPFARMLDSTQRAELDAIGRRVEHGVEEVLAAQRRASHVITGQVKTHDPLRDRQIDDLLRDVIAALHVWDGTGASDAPVRSLPLADLGHLRQTVSSIRPPAVPAPLADAGDVEFADVDSRAWGGPRYAELEQYVAGLGPEFDLAAAFAESDDDTRRPVDLVGLLEIAHRNGMTESETVSVVEALRPDGSTRRFAFGAVTARNTKEDAHA

SEQ ID NO: 37440 - protein, 220 aa, Microbacterium oxydans; identical to SEQ ID NO: 34597

SEQ ID NO: 37441 - protein, 1119 aa, Microbacterium oxydans
MTMVDTLFGLIPAGSRGQQWIADELQLINWGGYDGGPHRVRFSPNATLLCGGSGSGKSTLMDAYIALMMPHTTPFNGASNGGVTGRPRGEEQRNILSYGRGKIDESRTEDGTKLRVLRGDGEDTWSAIATTWLDHDGSRFTAVRAWYIPADARVLEDTTRVRATVNGAFDLAQLEKAATQRLSDASVRAAGLETLATDREFSARLQAVLGIGAAGSGAKAISLLARIQAGQQITTVDDLYKKLVLEEPETMATADAVVAHFDELESTRTRMLTAKQQVSALEPIRGIKERIAASAERVRIIDEVGVFTDPSSLAALWNAQRRLDLLREVEVELGDRSRALSLAVREKRALVDAADAEREGLLDVLRQSGGDRLETAQRELRVAERRLDDVRRERAKFDAIVRDLGAEVENADQFEALVADSRGSSPRSGIRDARVAFADAETARRTTELEISRLRQERERTGLVRGSIPSHLDESRAMLAEAAGLDPSELPFVGELIEVRTEFEPWREAFNLALGGFARTLLVDAEKLSSFRAAINSTRTPERLNYEGVPTGLLEVRNADPQTLPGRLDYLPTPFTGWLQQRLQDRFGYVCVDSSSQLDAHQKALTINGQVSQGSRGAHGGQGRANVLGFTNDRRLREIDDQLRLLTVRHDGYASTAQDAEAALDRIEARSTAFAKIEDLTWEQIDVDAVEAERERWLAVEAEVTTASPEIAQLKRQAEDMRSRASTLRDEEARLSNELAQTQEHWGQVTDDVDACQRVIDSAAATDLSLGETHASFLDGRFLHAESGASVTASERLTHLDTALRTAAQRLHEDRREAAEAHEQQRESMRRLMTGFLERWDNLTILPDPDESVGEFESILEALQTNGLHELETEWRDSLLKLSGNDLTSLDSTLSRSLREIKDRIDPINRIMEELPFYDDDHRLQITPRENQSEARKRFRRELREVRGLIDAAETDAEREAVYRKMSRLIGRMRRTAPDFAELIDVRNHVRVSAERVTATTREHVALYDHIGEKSGGESQELVAFIVGAALRYQLGDAGAARPRYAPVFMDEALIKADAHFTKRAIGAWRGLGFQLVIGAPNDKYSAIEPHVDVEYDILKDTRGRSWAKAKVGLPDAAI

SEQ ID NO: 37442 - protein, 340 aa, Microbacterium testaceum
LDAEIAALEEGVVEPLDDDHLLEEAENVIHLARELPADFSRVAESIAAMQRDVVAELRRDVRPTGEVLREYLERGRQVMQATPEGRAFQGALRLIGDPENIDDLTDQLHAVLAQPFSRLMTPDQRGELDAIARRVEAGVQEVLTAQRRASHVITAQVRTHDPIRDRQVDDLLRGVMAGLHRWSQTRSPGRVEPVRTLPLADVGHLRQSLSDVRPAGAPEPLASDTSDVEFVDADTRAWGGPHYAELEAYVAGLGSGFDLAEAFAGADAETRRPVDLVGLLEIVHRGGLVETDEVSIVEAVRPDGTTRRFAFGAVRAGSSAPADADLSGTDDHVRESTPDD

SEQ ID NO: 37443 - protein, 240 aa, Microbacterium testaceum
MTDVDLPEPETGDPVFIAPVAMENDPDALFAGDRGTLDAEVRRVLVRILQRRFLLAESSPAEWKLLLEHQQMIESRLNDLFVRLVVDHARGVAYKEQVRSDEVDVPILLKDEAYSRAETLVLVYLRTVFQRETTAGTASARVDVEEVEQTVLTYFAETDGTRASQQRAVRTAIARLDREGIIEEESEGRYRIGPLIEVVLSAEVLRELQRWLDEQTRDAETSTPREPEVVASGASEGDSL

SEQ ID NO: 37444 - protein, 1117 aa, Microbacterium testaceum
MTMLETLFGLIPAASRGQQWVAEDLQLINWGGYDGPHRVRFAPTATLLCGGSGSGKSTLMDAYVALMMPHTTPFNGASNGAVVGRPRGQEQRNILSYGRGKLDESRTDEGTKVRVLRGDGVDTWTAIAMTWADHDGARFTAVRAWYIPATARTLDDAVKVRATVHGAFDLRQLERAAQSHLSDSAVRATGLDTLATDREFSARLHAVLGIGAAGAGTKAMSLLARIQAGQQITTVDDLYKRMVLEEPETLAVADAVVSHFDGLESTRTRMLEARQQVRALQPIRAMKTRIDEASERLRLLDTLGRFGDPESRASLWRAQRRVDLLGAVEDELRERTHATDALVRERQALADAAEAEREGLGDVLRAAGGDRLDAAQRELRGLERRLAGMQRDRERFEAALAVLSVEVTSSKQFAAVVDEARRTLGDVDAKTAVRDAFVAASSRHTAARQQLASLEAEHRRTQTRDDNIPQRLHEAREALAEAAGLTAAELPFVAELVDVRTEFEPWRGAFTLALGGFATTVLVDAAHLASFRSAIDGVRLSERLRFEGVSTGLPERTGLDPATLPGRLEYRRSPFTGWLQDRLEQQFAFVCVDSARDLTGHRLALTLTGQTSQGSRGAHGGSTRQSILGFSSRVRLSELGEQIVTVRRDLAAAQAAVDEAAAALDAFDARRSAYEKIADLSWDQVDTASVQREIDRWNETIVEITAGNPRIAELQEQIAGTRARAARLREEIGAAKTEQRALAARWAEVTDDVDAAQLLIERAEDTELVLSADDAAYLDGLFVAPSTEDSSPSQRLARFDAALESASRLLLEEQRAAQETFADQRESLRRTLTAFTDRWPSPNLLADPDESLGDFERILADLEASGLHELEAEWRDSLLRLSGNDLTSLDSALTRALREIRERIAPINDIMQDLPFYDDEHRLQIVPRENQSEVRRRFRRELRDVRAAIDAASSDEEREAVYGRMARLIGRIRSAAPDFADLVDVRNHVRVSAERFRADTGEHVALYDHIGEKSGGESQELIAFIVGAALRYQLGDAGSERPRYAPVFLDEALIKADAHFTKRAIGAWRGLGFQLVIGAPNDKYSAIEPHVDVEYDILKDTRGRSWAKAKVGLPAGA

SEQ ID NO: 37445 - protein, 166 aa, Methylobacterium radiotolerans
HVMDRPDPSGVERVAAMLRAVGGSEIAPEVPGDVSLLRPPIGHAHLQAPRARKSAIDMEPLPDIEDDPVVDAFAAAKAEFRRRTTVTPESMSAFVEARLGKAVRLRGSQIVIAGVDDFIVFQRLREIDVLFDAKLGARYALTRLPERVVNGWLDCPDFLLERRPRA

SEQ ID NO: 37446 - protein, 208 aa, Methylobacterium radiotolerans; identical to SEQ ID NO: 30616

SEQ ID NO: 37447 - protein, 885 aa, Methylobacterium radiotolerans
MYVLTDIAISNWYLIRREQIRLRGAAALVGPTGAGKSTIFDAVGTVLAGNNASRLALNASASGRSARTVRDYCLGWISDPAEGGRPTRESCETVLVLVFENPDSGRVVSVGLALAARAVEPKETVLSRFIAVGHRFEVADYARTAPGGTYTAPWSEIAADLRARASSFTEYRTSGERFTADVLATLREGAPAPEPRHFLRSFANAVAFKPIFDTSAFVRAFVLDPEPLDVERVRHSIANWRRLLETIAELESRLGRLRRLRDRYEAWGEAVLAAATHELRAASAELRRRSLDLIAVRSRLREGADTLRIARERVTASRGYVREIDGEIAEKKALAAASAAEGRLAASTLGLSMLERDRKELIGRIGDLVGLVGQMAKLQPVAPLLRQSCPQAARLAEACARAGLRRESSPEEILRPEGPLAELADGLARLPDFDEALERAAEDAALKARAQESEAERTAPRTGGGPAARLSSDTVAFRGELERRGIDALPICELAEIVDPTWGPALEGLLGRAREALVVAPDRLSEALGVLQSGRDRFSRCILVKTTDTAKQRSRRYDDGPLTVIETSDPHAEAFLGVRLGGYDLARDDAELARLSRAVAPSGRTTAGMAYTVTRNVDLLMTRGHRGPTADSRRAHEIAVAEARRLRGEAAVLREAARTAAAIRARVARGLDDVEALRAELDGLEGRRRTLQTEREGIEKRDTAGLTAEIAALTAERVGYLRELSEELEPKLDRLLADEAALRARMGPVREAVRAALSARRAALRQLSGGDAARVRLARAEPFDLGAVAEARRSLAGLDAKAAGARVSAERGLARDSAEAARSHGRIAERELAEACAAWRVENPLASGDAPAIDGFAWVRREYEAVEGHELRRYRAQAERAEAEM

SEQ ID NO: 37448 - protein, 491 aa, Microbacterium testaceum; identical to SEQ ID NO: 37433

SEQ ID NO: 37449 - protein, 235 aa, Microbacterium testaceum; identical to SEQ ID NO: 37434

SEQ ID NO: 37450 - protein, 1116 aa, Microbacterium testaceum
MTMLETLFGLIPAASRGQQWVAEDLQLINWGGYDGTHRVRFAPTATLLCGGSGSGKSTLMDAYVALMMPHTTPFNGASNGAVVGRPRGQEQRNILSYGRGKLDESRTDEGTKVRVLRGDGVDTWTAIAMTWADHDGARFTAVRAWYIPAAARTLDDAVKVRATVHGAFDLRQLERAAQSHLSDAAVRATGLDTLATDREFSARLHAVLGIGAAGAGTKAMSLLARIQAGQQITTVDDLYKRMVLEEPETLAVAEAVVSHFDGLESTRTRMLEARQQVRALQPIRGMKTRIDEAAERLRLIEALGRFSDPESRASLWRAQRRVDLLGAVEDELRERTHATDALVRERQALADAAEAEREGLGDVLRAAGGDRLDVAQRELRGLERRLAGMQRDRERFEAALAVLSVEVTTEKQFTALVDEARRALGDADAKSAVREAFVAASSAHTDARQKLAALEAEHRRTQTRDDNIPPRLHEAREALAEAAGLTAAELPFVAELVDVRTEFEPWRGAFTLALGGFATTLLVDAAHLASFRSAIDGVRLSERLRFEGVSTGMPERTGLDPATLPGRLEYRRSPFTGWLQDRLEQQFAFVCVDSASELSGHRMALTIAGQTSQGARGAHGGSSRHSILGFSSRVRLTELGEQIVAVRRDLATAKATVDEAAAALDAFDERRSALERIADLSWDQVDVASVERDLELWNETIVEITAGNPRIAELQEQISGAKARVARLREEIGGAKTEQQALAARWAEVTDDVDSAHERLERAEDAEMELSADEAAYLDGLFVAPSNDASPSQLLARFDAALESASKRLLEEQRAAQETWGDQRESLRRTLTAFTDRWPSPNLLADPDESLGDFERILADLEASGLHELEAEWRDSLLRLSGNDLTNLDSALTRALREIRERIAPINDIMQDLPFYDDEHRLQIVPRENQSEVRRRFRRELRDVRAAIDAASSDEEREAVYGRMARLINRIRPTAPDFADLVDVRNHVRVSAERFRADTGEHVALYDHIGEKSGGESQELIAFIVGAALRYQLGDAGAERPRYAPVFLDEALIKADAHFTKRAIGAWRGLGFQLVIGAPNDKYSAIEPHVDVEYDILKDTRGRSWAKAKVGVADSV

SEQ ID NO: 37451 - protein, 489 aa, Xanthomonas axonopodis pv. manihotis
MKHQARISGYRQLREQPVWKLLAADHAPELIGLLQTVLMDGERRLPSAVLHERLQRQLDALRADELSRELPRTAQAYLAHWLAQGWLERRLPEGATEEEYELSRAATQAIRFIAGLRESSSSATESRLSLVIQQLVQLAGQTEADPELRLAALRDERARIDAEIERVASGRVAALDGKRALERARDLIHLSDELAEDFHRVRDDFEQLNRQFRERIIDDEGARGDVLEQLFNGVDVIADSEAGRTFEAFWSLLNDTQQSSQLDQALDALLARGFARKLDRRERAFLRGLTGTLLERGGEVHTVMQHFARSLRGFVQSRGYLEQRRLNQLLKQAQGEALQLRDSLHATTATGYTQALSSSRLRSLSQWRLHDPRLTQVDGRVQAADAAEISLDSVGDLVAQSEIDVRSLRRDLHELLGQRPRLTIGDALQQRPAVQGLGSVIGYLSLGTRHGMVIEGQMETVQWEGSDGAVRRARIPLVWFTREKRNELV

SEQ ID NO: 37452 - protein, 233 aa, Xanthomonas axonopodis pv. manihotis
MNWSEDTGLDADESTGAASIDERMPMTHTSSAEPRGELFLGDTGTLPFDARRALCQLLAGPSIDAQRHGTLWPALLRNEVAIRQVLCELFLELVLDREGGVAFTRQADTAELESPTLLRSAPLTFIESVLLLFLRQQLAEADTRGERAVVDEAQLVEALSVYEKNVSTDRAGFARRVMTAIGKMRDNQLLSRLRGSEERYEVSPVLKLLFSAEDVQALVVAYRELREGEVALD

SEQ ID NO: 37453 - protein, 1340 aa, Xanthomonas axonopodis pv. manihotis
MNSQSNLSPASPGASLFAETLAEQRAQQFRMRRLQVHNWGTFNGLTEVPIAEKGFLFVGRSGSGKSTLLDAMSALLTPPSIVDFNAAAREAERSGRDRSLVSYVRGAWADQQDSASGEIATQYLRKGATWTALVLEYANAHGEAVSLIRLFWIAGSGNAAADVRRHYIVAPRRFDVATELDGFDLDLRKLKARLGEEVAHFDGFAGYAERFRHALGIGNEMALRLLHKTQSAKNLGDLNAFLRGFMLDEPRTFEAADQLVEDFAELDGAHHAVVTARRQVETLTPAREHHAALMALRHSVGELRELQLGVDSYREQQRLALLDERLQELDNQDRGLAGEEGQRRESLDNHEQKLVGLEREQRAAGGEQIEELERERARVERERDERLRRRAQIEQACRQLGTALAAGASGFAAQVAHAQTVLDNGKHDASALDEAIAERMGARRDDERRFAEIRAELEALKKAPSSMPAPMQALRARLCEDTGIAEAALPFVGELVQVREDQSAWRGAIERVLHGFAQSLLVDERHYAQVSEWVNRTHIGTRLVYFRVRRNDELHSRRVDPGALPGKLQLREHAFTEWLRNELTRRFDYACVDNAAALRNADRAITREGQVKHPGDRYEKDDRHAVNDRKRWLLGHDNRDKLKVFEREAQALAQRIASCDADVAALRKQREQDQERQLAAHTLVERDWDEIDVGPKLQRLSDIDEQLVQLREGNSGLRALGQAIDTARTLRDQAKRTYENVRLERAQLARERVRLEQQHAACAGRAGSATLTPTQLQGLRERLAALTPLSLDNLEAHFRVVERGLAEQLADSQGRDSRLSAQLLECFRKYCQQWPEDSGDFTVSLASADDFLARLDRLESDGLPRHEHRFFDLLQTQSKNNLLALQRHTAEAHKGIKQRMDEVNASLEQVPFNRDTILTIEVGDRRLAEVQEFQQQLRAVLSHQQTEDRALAEAQFSTLRALVARLGAQEPEARRWREQVLDVRLHVEFIGVELDAQTRAQVEIYRSGAGKSGGQRQKLATTCLAAALRYQLGGEDGELPRYCAVVLDEAFDKADNEFTALAMNIFENFGFQMVVATPLKSVMTLEPFIGGACFVEISGRHNSGVLLIEYDEQAQRLKLPEHARGDEPAVADAVDAAPPIEAAGEPAGVQGATSADGMAIDGAAVPTASPAADETSSAAPETQTGQRTPAVATANKQNKTAKTASSTRAAAQSQAMQTKKSTSRTPALASKAASDKRASGASAVPSAAASRSSVGKTTRSSKTPGKPIAATNASSATSRKVATASAAVKTAAAKPRATAASTGQPVRGAGKTSSKRAATTASPAKTRGAKPGTAQSRGKR

SEQ ID NO: 37454 - protein, 484 aa, Pseudomonas aeruginosa; identical to SEQ ID NO: 32845

SEQ ID NO: 37455 - protein, 251 aa, Pseudomonas aeruginosa; identical to SEQ ID NO: 32940

SEQ ID NO: 37456 - protein, 1128 aa, Pseudomonas aeruginosa; identical to SEQ ID NO: 32941

SEQ ID NO: 37457 - protein, 397 aa, Pseudomonas aeruginosa; identical to SEQ ID NO: 32942

SEQ ID NO: 37458 - protein, 486 aa, Pseudarthrobacter sulfonivorans
MPRSARSSADAISARLRDLELLTKGPAWALTRSAPWVIAVLQASFTRTRPQLPLEEFHADVDSFLEQLRRQEPGPGGAAIGTSSGRNYADEWTRKHFLTRRNQSGQIVYEVTEPAARVLAFLDSLSSERSTLNGSRLGTLLGDVEKLANETNPDQSARLESLEDEIGERQQLIQDISSGDFDGLLDDDEAVEAAGNILDLAASLPADYKKMRDRIEELVGELRNQIIEESLSKGATMAQVLDADKRLRQSPEGRTFRSFTAFLEDPQQQLRFRSAIGEVLSRQFADDLSPEDRETLKNLVAELRHQHSQIQRIYGKLSESLNTYVQSDDFRQSVRLRKVLREAEQAIRSLPYERERPGLVRGPVLFNAGFESLAMVKLYDPDEFAVPPKLADPIAFSDSDRVRSPRTGKARPDAIRAAVAGASTLAEAWGQLPPEEQHINSIRALLSHALQDGAAFDREAWDGLDYEQIDGTTRTAYLPVVTLKKD

SEQ ID NO: 37459 - protein, 321 aa, Pseudarthrobacter sulfonivorans
MTEEITTAAPPVEEAAPAVEPEIQGISTGSITRGAGVTPRDTFVDGAALFPGDTGVLSMKVRQALVKLLKGPYVDGGRDEKLWTTLLDNQIILRSRLSELFLTLQLDHERKIAVLRPVDPEAIGGSSRSSILRQQRALSRVETIVLLRLRMLLDRHVTAQTDATITREEIADLVAHYQPAGQQDALRDSDVVTRAITKLLARQLLLTTGLDDVYTISNALPLALPFENIGDIPAQIEALVAATADPTGTEALIELDTDSGADDDADAAPAPPPGDSAASSESPGSDRPDATPWAASASSSVGAQVPGTSGAANGPIEGAEA

SEQ ID NO: 37460 - protein, 1159 aa, Pseudarthrobacter sulfonivorans
MSIATMLPMGDLTNPGQMRLALVQVVNWGTFHGAHTMHVDRNGTLLTGNSGVGKSTLFDAMLRVFDARPRSNEAAAQRAGGAVEDKRTTFTYMRGKVGDKAVGEGSASAFQRPGATWSAVALTFDNAAGTRITVSALFDLPKNGTESSVGRFYVIDSKPLDLPAIEGIADKRFTKAALETIFPDAQIFDVHKAFAERFRRLLGISSDQALPLLRVIQAGKGLGGSVNTFFRDQVLDAPATLAAADDVVEEFSNLMSIRQRLEDVRQQRDQLAPVPGLNKEYAQSLLDANRLRELSGEEFEAYKQQLAVTVHQKTLARFKELAQAKAKELGAERSVRDGLAKDLRQLETDYNNQGGNAISAIEQSLDNAKVGLRLREQVEEAARKALSDAGLQLEWTADGWEQAHEQAAARSAELKDDSQALQELRFEAFDGHATKKRELAAAQQELLSLKTRKSLLPPSSIENRAAIAAATGVPEDRMPFGGELMDLAEGEEHWRPAAERALRNLATTLLVPGEHFAAVTRYLNDNKVRGALRAVDVSKPLAGGALAVEDARDGDLLTKLDILASGAVADAGEWIRERIALDFAYPCVEDPNELAALDKGLSLGGVVKRNRHTVEKDDRFTSRQDYVLGFDNAAKLELVAAQVEDLQQELAKAAELAQSREESHQGMSRQLDALRLIAEDHRPWEQVSAAVAAEELTRIEQRLKDALAAQADLEPLRANIEAARQKHQASTEAAAVLQSEYKALDRQMSAADSLLEAARARLEQAPPSDATVTALEPYFTDFGDVSEMHELDNLANRVRTALLGELHAAETRGQATSERLTRIFEGFVREWGSAISADHGTSIGAAGEFEGRYHAIVSDGLPAQESEFRQFFNQRTHESFSTLLHLLDEERRSITSRILPLNGILSEVNFHEGSFLELDIKQTLPATAKQFKDAIQNALKARHTRPARAGSGAGSGPEAGGGDDAELTARYKTLETLVKRLGSPTPEDRRWRAEVLDVRGHLFIQCKEHREVTGPASGRKGGGKRTDVYMHADTGSMSGGERQRFTAFIMAAALSYQLGIAEQGFTTYGTVMMDEAFVLASEEFAGAGIKALHEFGFQLLLAAPENVIDLSRHLGSVTEILRDKRTNRSGVLTAPVIRPRPGAEGQWRSEANPVDIVLR

SEQ ID NO: 37461 - protein, 495 aa, Streptomyces turgidiscabies; identical to SEQ ID NO: 32172

SEQ ID NO: 37462 - protein, 196 aa, Streptomyces turgidiscabies; identical to SEQ ID NO: 32173

SEQ ID NO: 37463 - protein, 564 aa, Streptomyces turgidiscabies; identical to SEQ ID NO: 32171

SEQ ID NO: 37464 - protein, 478 aa, Janthinobacterium sp. CG23_2
MDYQQLITQRRTHPAWRLLAADNAAMIASFLHASFIAPNQRTIGRQHLASQLDDHLYHLHESAGEILFPKAATAYLDDWASDERGWLRKYYPPGDDEAHYDLASATEQALEWLKNLGQRTFIGTESRLMTVFDLLHQIVDGSELDPRARIAELKRRKADIDAEIADIGAGRFALMDPTQVRERFLQMAATARDLLSDFRAVDTNFRTLDRQVREHIATWDGSKGELLQAIFGQRDLIADTDEGRSFRAFWDLLMSPSRQDELTSLLDAVLKLGPVRELQPDGRLQRIHYDWLEAGEVTQRTVARLSEQLRRYLDDQAWLENRRIMQLIRDIEQKALALRGQIDERAFMEIDDAAPTVALTMDRTLYNPPFKPKITQQIVSDDGVDIVSDALFEQIYVDQLRLMSNIRRALQTRQQVSLGTLAREYPIEQGLAELATYLKLATQDMHAAIDDNQSETVDWTDDNGRRRQATLPLIIYAA

SEQ ID NO: 37465 - protein, 202 aa, Janthinobacterium sp. CG23_2
MNPEPTTLNDQNRLGQLLVALFQGVLYRDADSALWQPLMDLQARVRDYSATIGLELILDEAEGYAYLRQRPAVVGEPELPRLIQRRQLSYPVSLILALLRKKLAEFDATGGDTRLVIDRDQIAEQVRLFLPQTGNEARLLDRMDAHLNKVVELGFLHRLRGQDNQFEVRRILKAFVDAQWLADFEQRLSGYAAHAASGEEEA

SEQ ID NO: 37466 - protein, 1129 aa, Janthinobacterium sp. CG23_2
MTQAPVADIPAADDGDPALERAGFRLQHFEVFNWGTFHERVWRLHPGGDNMLLTGDIGSGKSTLVDAITTLLVPAQKIAYNKAAGADARERSLRTYVMGNYKSERGDSGLAARAVALRDHNSYSVILGVFHNEGFEQTVTLAQVFWFKNPHGQPERFYVVADGALSVAEHFAGFGTDIAQLRKRLRALAGVTLHDSFPPYGADFRRRFGIASEQAMDLFHQTVSMKSVGNLTDFVRDHMLEAFPVEARIAALIAHFDDLNRAHEAVLKAKLQIDQLTPLVDDCDRHETLQEQVVQLRGCREALRPWFAHLKGELLEKRIGILQSELDKLAGRLARLQEEKHSQMLRRDDMTQAIAANGGNRIEQIRAEIARLQTTREERSRRSNQYDALAAAVGLPGAAEASMFDANRRAIDDGKAGCTARRDDAQNQLMVAGVSLHELRDQHGAITTELDSLRQRRSNITSQMLAVRAALCDALRIAPEELPFIGELIQVREEERAWEGAAERMLHSFGLSLLVPETHYGQVAAWVDATNLGNRLVYFRVRANVSADHHGLHPDALARKLAIKPDSPFYGWIDAELARRYDHACCDTLDQFRREKRAITRNGQIKAGGERHEKDDRHRIDDRSRYVLGWSNQGKIAALAKQERDLSTRIQAHAAKIQSVRADIARQEALLDNWGKLTMFSDFSDLDWKPLLSAIDALEREQEALAASSDILRTLQQQLAELTVAQADTEAQAHSATIEHAKTAEKLEVAGAALDDCATLLDATPEQSRAMYFPQLDALRAEVLGEHTLTVESCENREKELRQELQNRIDAEEKKISRLRDAIIRAMESYTKAWPLDAREVDVSIDAAAEFRKMLAVLRADDLPRFAGRFKELLNENTIREIAGFQSQLKRERETIRERIDTINSSLHQIDYNPNRYIALEAETNVDADLRDFQQDLRSCTEGALTGSADEEYSEAKFLQVKRIIERFRGREGSAEMDKRWTRKVTDVRNWFVFSASERWREDGREHEHYTDAGGKSGGQKEKLAYTVLAASLAYQFGLEWGVVRSRSFRFVVIDEAFGRGSDESARYGLELFKRMNLQLLIVTPLQKIHIIEPYVSGLGFVHSEEGRQSLLRYLTIEQYQAERSARAA

SEQ ID NO: 37467 - protein, 404 aa, Janthinobacterium sp. CG23_2
MNAAATWSSAATIRAQVQRLWDDGRLLAARVRGESLFPLELRLRQPTVAQTGERFDEVRAWIKELDAGSKTARGYGYQIVWREINHRQLGRNRIPDSVVFESDTDALRLIGRQAEARRFDQITAATVGAFPQLADWLARRALVVLEQSEAWARILAILEWFAAHPRPGLYLRQLDIEGVDSKFIETRKALLTELLDLVLPAGAIDPKATGARQFEARYGLLSKPALLRFRVLDPAHAIGGLSDLAVPLAQFAALQTNARRVFITENEINGLAFPALPDAMVIFGGGYGVERLADVPWLVTREVVYWGDIDTHGFAILDRLRAAIPHARSILMDSATLMAHRALWGTEDRDKRFGGQPSRLERDELALFEALRDDVFGERIRMEQERLSYAWVEHALATLTASPG

SEQ ID NO: 37468 - protein, 489 aa, Xanthomonas citri pv. citri; identical to SEQ ID NO: 30402

SEQ ID NO: 37469 - protein, 233 aa, Xanthomonas citri pv. citri; identical to SEQ ID NO: 32320

SEQ ID NO: 37470 - protein, 1340 aa, Xanthomonas citri pv. citri; identical to SEQ ID NO: 30404

SEQ ID NO: 37471 - protein, 489 aa, Xanthomonas citri pv. citri; identical to SEQ ID NO: 30402

SEQ ID NO: 37472 - protein, 233 aa, Xanthomonas citri pv. citri; identical to SEQ ID NO: 32320

SEQ ID NO: 37473 - protein, 1340 aa, Xanthomonas citri pv. citri; identical to SEQ ID NO: 30404

SEQ ID NO: 37474 - protein, 489 aa, Xanthomonas citri pv. citri; identical to SEQ ID NO: 30402

SEQ ID NO: 37475 - protein, 233 aa, Xanthomonas citri pv. citri; identical to SEQ ID NO: 32320

SEQ ID NO: 37476 - protein, 1340 aa, Xanthomonas citri pv. citri; identical to SEQ ID NO: 30404

SEQ ID NO: 37477 - protein, 489 aa, Xanthomonas citri pv. citri; identical to SEQ ID NO: 30402

SEQ ID NO: 37478 - protein, 233 aa, Xanthomonas citri pv. citri; identical to SEQ ID NO: 32320

SEQ ID NO: 37479 - protein, 1340 aa, Xanthomonas citri pv. citri; identical to SEQ ID NO: 30404

SEQ ID NO: 37480 - protein, 489 aa, Xanthomonas citri pv. citri; identical to SEQ ID NO: 30402

SEQ ID NO: 37481 - protein, 233 aa, Xanthomonas citri pv. citri; identical to SEQ ID NO: 32320

SEQ ID NO: 37482 - protein, 1340 aa, Xanthomonas citri pv. citri; identical to SEQ ID NO: 30404

SEQ ID NO: 37483 - protein, 489 aa, Xanthomonas citri pv. citri; identical to SEQ ID NO: 30402

SEQ ID NO: 37484 - protein, 233 aa, Xanthomonas citri pv. citri; identical to SEQ ID NO: 32320

SEQ ID NO: 37485 - protein, 1340 aa, Xanthomonas citri pv. citri; identical to SEQ ID NO: 30404

SEQ ID NO: 37486 - protein, 489 aa, Xanthomonas citri pv. citri; identical to SEQ ID NO: 30402

SEQ ID NO: 37487 - protein, 233 aa, Xanthomonas citri pv. citri; identical to SEQ ID NO: 32320

SEQ ID NO: 37488 - protein, 1340 aa, Xanthomonas citri pv. citri; identical to SEQ ID NO: 30404

SEQ ID NO: 37489 - protein, 489 aa, Xanthomonas citri pv. citri; identical to SEQ ID NO: 30402

SEQ ID NO: 37490 - protein, 233 aa, Xanthomonas citri pv. citri; identical to SEQ ID NO: 32320

SEQ ID NO: 37491 - protein, 1340 aa, Xanthomonas citri pv. citri; identical to SEQ ID NO: 30404

SEQ ID NO: 37492 - protein, 489 aa, Xanthomonas citri pv. citri; identical to SEQ ID NO: 34213

SEQ ID NO: 37493 - protein, 233 aa, Xanthomonas citri pv. citri; identical to SEQ ID NO: 32320

SEQ ID NO: 37494 - protein, 1340 aa, Xanthomonas citri pv. citri; identical to SEQ ID NO: 30404

SEQ ID NO: 37495 - protein, 489 aa, Xanthomonas citri pv. citri; identical to SEQ ID NO: 30402

SEQ ID NO: 37496 - protein, 233 aa, Xanthomonas citri pv. citri; identical to SEQ ID NO: 32320

SEQ ID NO: 37497 - protein, 1340 aa, Xanthomonas citri pv. citri; identical to SEQ ID NO: 30404

SEQ ID NO: 37498 - protein, 489 aa, Xanthomonas citri pv. citri; identical to SEQ ID NO: 30402

SEQ ID NO: 37499 - protein, 233 aa, Xanthomonas citri pv. citri; identical to SEQ ID NO: 32320

SEQ ID NO: 37500 - protein, 1340 aa, Xanthomonas citri pv. citri; identical to SEQ ID NO: 30404

SEQ ID NO: 37501 - protein, 489 aa, Xanthomonas citri pv. citri; identical to SEQ ID NO: 30402

SEQ ID NO: 37502 - protein, 233 aa, Xanthomonas citri pv. citri; identical to SEQ ID NO: 32320

SEQ ID NO: 37503 - protein, 1340 aa, Xanthomonas citri pv. citri; identical to SEQ ID NO: 30404

SEQ ID NO: 37504 - protein, 489 aa, Xanthomonas citri pv. citri; identical to SEQ ID NO: 30402

SEQ ID NO: 37505 - protein, 233 aa, Xanthomonas citri pv. citri; identical to SEQ ID NO: 32320

SEQ ID NO: 37506 - protein, 1340 aa, Xanthomonas citri pv. citri; identical to SEQ ID NO: 30404

SEQ ID NO: 37507 - protein, 489 aa, Xanthomonas citri pv. citri; identical to SEQ ID NO: 30402

SEQ ID NO: 37508 - protein, 233 aa, Xanthomonas citri pv. citri; identical to SEQ ID NO: 32320

SEQ ID NO: 37509 - protein, 1340 aa, Xanthomonas citri pv. citri; identical to SEQ ID NO: 30404

SEQ ID NO: 37510 - protein, 489 aa, Xanthomonas citri pv. citri; identical to SEQ ID NO: 30402

SEQ ID NO: 37511 - protein, 233 aa, Xanthomonas citri pv. citri; identical to SEQ ID NO: 32320

SEQ ID NO: 37512 - protein, 1340 aa, Xanthomonas citri pv. citri; identical to SEQ ID NO: 30404

SEQ ID NO: 37513 - protein, 489 aa, Xanthomonas citri pv. citri; identical to SEQ ID NO: 30402

SEQ ID NO: 37514 - protein, 233 aa, Xanthomonas citri pv. citri; identical to SEQ ID NO: 32320

SEQ ID NO: 37515 - protein, 1340 aa, Xanthomonas citri pv. citri; identical to SEQ ID NO: 30404

SEQ ID NO: 37516 - protein, 489 aa, Xanthomonas citri pv. citri; identical to SEQ ID NO: 30402

SEQ ID NO: 37517 - protein, 233 aa, Xanthomonas citri pv. citri; identical to SEQ ID NO: 32320

SEQ ID NO: 37518 - protein, 1340 aa, Xanthomonas citri pv. citri; identical to SEQ ID NO: 30404

SEQ ID NO: 37519 - protein, 489 aa, Xanthomonas citri pv. citri; identical to SEQ ID NO: 30402

SEQ ID NO: 37520 - protein, 233 aa, Xanthomonas citri pv. citri; identical to SEQ ID NO: 32320

SEQ ID NO: 37521 - protein, 1340 aa, Xanthomonas citri pv. citri; identical to SEQ ID NO: 30404

SEQ ID NO: 37522 - protein, 489 aa, Xanthomonas citri pv. bilvae
MKHQARIAGYRQLREQPVWKLLAADHAPELIGLLQTVLMDGERRLPSAVLHERLQRQLDALRADELSRELPRTAQAYLAHWLAQGWLERRLPEGAVEEEYELSRAATQAIRFIVGLRESSSSATESRLSLVIQQLVQLAGQTEADPELRLAALRDERVRIDAEIERVASGRVAALDGKRALERARDLIHLSDELAEDFHRVRDDFEQLNRQFRERIIDDEGARGDVLEQLFDGVDVIADSEAGRTFEAFWSLLNDTQQSSQLDQALDALLARGFARKLDRRERAFLRGLTGTLLERGGEVHTVMQHFARSLRGFVQSRGYLEQRRLNQLLKQAQGEALQLRDSLHTTTATGYVQPLSSSRLRSLSQWRLHDPRLTQVDGRVQAADAAEISLDSVGDLVAQSEIDVRSLRNDLHELLGQRPRLTIGDALQQRPAVQGLGSVIGYLSLGTRHGMVIEGQMETVQWEGSDGAVRRARIPLVWFTREKRNELV

SEQ ID NO: 37523 - protein, 233 aa, Xanthomonas citri pv. bilvae; identical to SEQ ID NO: 31977

SEQ ID NO: 37524 - protein, 1340 aa, Xanthomonas citri pv. bilvae
MNSQSNLSPAQPGASLFAETLAEQRAQQFRMRRLQVHNWGTFNGLTEVPIAQKGFLFVGRSGSGKSTLLDAMSALLTPPSIVDFNAAAREAERSGRDRSLVSYVRGAWADQQDSASGEIATQYLRKGATWTALVLEYANAHGQTVSLIRLFWIAGSGNAAADVRRHYMVAPRRFDVATELDGFDLDLRKLKARLGDEVAHFDGFAGYAERFRHALGIGNEMALRLLHKTQSAKNLGDLNAFLRGFMLDEPRTFEAADRLVEDFAELDGAHHAVVTARRQVETLTPAREHHAALMALRHSVGELRELQLGVDSYGEQQRLALLEERLQELDNQDRGLAGEEGQRRESLDNHEQKLVGLEREQRAAGGEQVEELERERARVERERDERLRRRAQIEQACRQLGTALAAGASGFAAQIAHAQTVLDNGKHDASALDEAIAERMGARRDDERRFAEIRAELEALKRAPSSMPAPMQALRARLCEDTGIAEAALPFVGELVQVREDQTAWRGAIERVLHGFAQSLLVDERHYPQVSEWVNRTHIGTRLVYFRVRRNDELHSRRVDPGALPGKLQLREHAFTEWLRNELTRRFDYACVDNAAALRNADRAITREGQVKHPGDRYEKDDRHAVNDRKRWLLGHDNRDKLKVFEREAQTLAQRIASCDADVAALRKQREQDQERQLAAHTLVERDWDEIDVGPKLQRLSDIDEQLVQLREGNSGLRALGQAIDTARTLREQAKRTYEDVRLERAQLARERVRLEQQQAACAGRAGSATLTPTQLQGLRERLAALTPLSLDNLEAHFRVVERGLAEQLADSQGRDSRLSAQLLECFRKYCQQWPEDSGDFTVSLASADDFLARLDRLESDGLPRHEHRFFDLLQTQSKNNLLALQRHTAEAHKGIKQRMDEVNASLEQVPFNRDTVLTIEVGDRRLAEVQEFQQQLRAVLSHQQTEDRALAEAQFSTLRALVARLGAQEPEARRWREQVLDVRLHVEFIGVELDAQTRAQVEIYRSGAGKSGGQRQKLATTCLAAALRYQLGGEDGELPRYCAVVLDEAFDKADNEFTALAMNIFENFGFQMVVATPLKSVMTLEPFIGGACFVEISGRHNSGVLLIEYDEQAQRLKLPERSRGDEPAVADATDAAPSIEATAESAGVQGAASADGMATNGVPMHTASPATEETPPAAQETQTGQRKPAVATTSKQNKTAKTASSSRAAAQPQAKRPKKSPSRTPALAGKPASDKRSAGVPAVSSGVASRSTVGKTTRSSKTPGKPIAATSASNATSRKVAAASAALKTAAAKPRATAASTGQPARGAGKTTSTRAVAKPSPATTRGTRAGTPQARRKR

SEQ ID NO: 37525 - protein, 489 aa, Xanthomonas citri pv. citri
MKHQARIAGYRQLREQPVWKLLAADHAPELIGLLQTVLMDGERRLPSAVLHARLQRQLDALRADELSRELPRTAQAYLAHWLAQGWLERRLPEGAAEEEYELSRAATQAIRFIVGLRESSSSATESRLSLVIQQLVQLAGQTEADPELRLAALRDERARIDAEIERVASGRVAALDGKRALERARDLIHLSDELAEDFHRVRDDFEQLNRQFRERIIDDEGARGDVLEQLFDGVDVIADSEAGRTFEAFWSLLNDTQQSSQLDQALDALLARGFARKLDRRERAFLRGLTGTLLERGGEVHTVMQHFARSLRGFVQSRGYLEQRRLNQLLKQAQGEALQLRDSLHATTATGYTQPLSSRRLRSLSQWRLHDPRLTQVDGRVQAADAAEISLDSVGDLVAQSEIDVRSLRNDLHELLGQRPRLTIGDALQQRPAVQGLGSVIGYLSLGTRHGMVIEGQMETVQWEGSDGAVRRARIPLVWFTREKRNELV

SEQ ID NO: 37526 - protein, 233 aa, Xanthomonas citri pv. citri; identical to SEQ ID NO: 32320

SEQ ID NO: 37527 - protein, 1340 aa, Xanthomonas citri pv. citri; identical to SEQ ID NO: 30404

SEQ ID NO: 37528 - protein, 489 aa, Stenotrophomonas maltophilia; identical to SEQ ID NO: 30775

SEQ ID NO: 37529 - protein, 233 aa, Stenotrophomonas maltophilia; identical to SEQ ID NO: 30657

SEQ ID NO: 37530 - protein, 1126 aa, Stenotrophomonas maltophilia; identical to SEQ ID NO: 30777

SEQ ID NO: 37531 - protein, 489 aa, Stenotrophomonas maltophilia
MKHRERIARYRHLREQPQWKLLAADHAPEIIGLLQGLLMDGERTLPSSVLNERLQRALDQLNGDELSRELPRTAQAYIAHWLAQGWLERRLPEGADQEQYELSTAALQAIRFADGLEQARVAATESRLALVIEQLSQLAAQTESDPDARLSALRDERDRIDAEIARVGAGRVTALDGKRALERARQIIGLADELTEDFRRVRDDFEQLNREFRERIIDDEGERGDVLSQLFEGVDVIGESDAGRSFQAFWRLLNDAEQSAQLDAALEAVLARGFARRLDRNERNFLRGFTSTMLERGGQVHDVLQHFARSLRGFVQSRGYLEQRRLNQLLKQAQSEALALRDEFPAQRGIGRDLQLTTSRLRSWSQWKLHDPRSAQVDGNVEYNDAAAISLESVGDLVASSEIDFRTLRRDLHDLLDAQPRLSIAQALSQREAPQGLGSVIGYLSLGTRFGNVVAGEQELAQWRGGDGQIRRARIPLVWFTQERRHELA

SEQ ID NO: 37532 - protein, 233 aa, Stenotrophomonas maltophilia; identical to SEQ ID NO: 32820

SEQ ID NO: 37533 - protein, 1126 aa, Stenotrophomonas maltophilia; identical to SEQ ID NO: 32821

SEQ ID NO: 37534 - protein, 484 aa, Thiocapsa sp. KS1
MDFATLETLRTHHPAWRLLRSDHAPLVASFLNRVFVQPNVRVMAAADLAEALEDELYALRERLGEGSFPKSALDYLNDWAGPEKGWLRKFYARDSDEPQFDLTPATEKAIAWLGTLSERSFVGTESRLLTLFELLKQMSAGSEADPEKRIVELTRRRDEIDAEIARVLGGDVPLLDDTALKDRFQQFMQLARELLTDFREVEHNFRLLDRRVRERIALWEGAKGALLEEIMGERDAIADSDQGRSFRAFWDFLMSSRRQEELTELLDRVLALPPVAELKPDARTRRVHYDWLEAGEHTQRTVAQLSQQLRRFLDDQAWLENRRIMDILHGIEAKALALREHQPTGEVMRIAESAAAVELPMERPLYTPPLKPVIADLELQAGDADLDADALYAQVVVDRAQLARHIRHALQDRSQVTLRELTELQPLTQGLAELVAYLQLGSDAFRTTLDENAPEVIAWETRASDGMAVRKAARLPRVIFVREG

SEQ ID NO: 37535 - protein, 218 aa, Thiocapsa sp. KS1
MRMDDDQGQARDTPALAAGAELSALVIGLLKGVTYREGDERLWGALLDLQARVRDYVSVLGLELVLDEAEGYAFLKSRAETAEDEAAPKMPRLVARRPLSFPVSLLLALLRKKLAEFDAGGAETRLVLSRDEIVELVRVFLPQSSNEARLIDQIETHINKVVELGFLRRLKSASGFARGPDSYEVRRILKAFVDAQWLADFDARLAVYRAQVGPDDGS

SEQ ID NO: 37536 - protein, 1149 aa, Thiocapsa sp. KS1
MITGPMQPLESLDLDFVADDRLSGFRLSRLEVFNWGTFDGRVWTLSLDGKNGLLTGDIGSGKSTLVDAVTTLLVPAQRIAYNKAAGADSKERTLRSYVLGHYKSERNEVTGAAKPVSLRDHNTYSVILGVFHNAGYDQTVTLAQVFWMKEAQGQPARFFVCAERDLSIATDFSRFGTDIAQLRKKLRGLGAEIEDAFPKYGAWFRRRLSIDSEQALELFHQTVSMKSVGNLTDFVRGHMLEPFAVEPRIKALIAHFDDLNRAHEAVLKAKRQVEMLTPLVADCERHAGLTREVEDLRGCRDGLRVHFAGLKLALLGKRLAHLQEDRERVDALVKRLDGRREEQGNQVYELKRAVAENGGDRLERLAAEIKKLEALRDARQTKARRYAELTAGLDESPAADETAFLAQRRRLAEMREGLQARDIDLQNEVTEHSVTLRQGQLEHDALQAEIESLKRRRSNIDDQQIRIRAALCEALGLAEESMPFAGELLQVRDEERDWEGAAERLMRGFGLSLLVPDMAYKTVAEWVDSSHLRGRLVYFHVRARVRTQLHTGGRGDLPELHRDSLVRKIAVKPDSPFYDWLERELAHRFDVACCITQEQFRRETRAITPAGQIKDPSGRHEKDDRHRIDDRSRYVLGWTNAAKIETLEAKRRRLEAHLAEIGALTGKLLSERRALGARLDALTGLKEFIDFNELDWASVATEVAALIDERQRLESASDLLKQLNQRLGEAVQELAVIEGELEEARSKRAKIEQKQEDAETLRVQTQVLFEPSGDAARPAPSAELTERLEAMRTEALGEHQLTVESCDNREQDIRAWLQTRIDNEDRKIKGLRDRIITAMVAYKDAFELETRELDANVEAAFEYRQQLDQLGRDDLPRFEARFKELLNVNTINEIANFNAQLARERETIRERIGRINESLTQIDYNPGRYIALESQISPDAEIRDFQSELRACTEGALTGSEDAQYSEAKFLQVKTIIERFRGREGQTDLDRRWTAKVTDVRNWFLFAASERWREDGTEHEHYSDSGGKSGGQKEKLAYTILAASLAYQFGLEWGAVRSRSFRFVVIDEAFGRGSDESAQYGLRLFQQLNLQLLIVTPLQKIHIIEPFVSAVGFVHNEGGRESKLRNLTIEEYREESRARKAEPSASVAA

SEQ ID NO: 37537 - protein, 411 aa, Thiocapsa sp. KS1
MSWTTAADLKAQLNRLWERGELLRPLVADDVAGANGFPLRLRLKGPGSSDLADRFDAVRAWLAELTAVPRLRIAWRAVNHRVLGPQRLPEAIWVDRLDDALALIGKRGDAARFSDCTTLTRSRQPALLDWLAKRPLQAISLAEDWERLLAVVDWLSRHPRPGIYIRQVDIPGIHSKFIEAHRGVLSELLDLVLPAEAVAADRVGVGRFAARYGFLDKPNRVRFRLLDDAVPLLPGPARADVTLDAESFARLAIPIRRIFITENETNFLAFPDATASLVVFGSGYGWDALARAEWLGTCTLHYWGDIDTHGFAILDQLRGRFGRAVSFLMDRATLMAHESLWGEEPDQVMHDLPRLSEPERALFDDLRDNRIRKGVRLEQERVGFRWVKTALADVVVDNTCRTTAFGNTWDT

SEQ ID NO: 37538 - protein, 489 aa, Stenotrophomonas maltophilia
MKHRERITRYRHLREQPQWKLLAADHAPEIIGLLQGLLMDGDRTLPASVLNERLQRALDQLNGDELSRELPRTAQAYVAHWLAQGWLERRLPEGADQEQYELSTQALQAIRFADSMEQARVAATESRLALVIEQLSQLAAQTEADPDARLSALRDERDRIDAEIARVSAGRVTALDGKRALERTRQIIGLADELTEDFRRVRDDFEQLNREFRERIIDDEGERGDVLSKLFEGVDVIGESDAGRSFQAFWRLLNDAEQSAQLDAALETLLARGFARRLDRNERNFLRGFTSTMLERGGQVHDVLQNFARSLRGFVQSRGYLEQRRLNQLLKQAQSEALALRDDFPAQRAIGRDLQLTTSRLRSWSQWKLHDPRSAQVDGNVEYNDAASISLESVGDLVASSEIDFRTLRRDLHDLLDRQPKLSIAQALSQREAPQGLGSVIGYLSLGTRFGSVIAGEQELAEWRGGDGQIRRARIPLVWFTQERRHELA

SEQ ID NO: 37539 - protein, 233 aa, Stenotrophomonas maltophilia
MSWHEDPIDAPHADLAEDAYQAEPVATMAQPRRGNDVYYMGDTGRLPLDARRALCQLLIGPSIDQLRHAKLWPALIRSEAGIRSALSDLFLELVLDRDSGVAFTRQADTEDVDAPVLLRTSPLTFIDSVLLLYLRQQLGEADARGNRAVVADAEMAEALAIYEKNLSTDRAGFNRRVASAVQKMKDNHILTRLGGQEDRHEVSPALKLLFSAEDVSQLSAVYRQLRETPAAEA

SEQ ID NO: 37540 - protein, 1126 aa, Stenotrophomonas maltophilia; identical to SEQ ID NO: 33234

SEQ ID NO: 37541 - protein, 478 aa, Mycobacterium sp. GA-2829
MRVDDNRGLSAAELLELNRDLHGSRAIRLLATHNLALYATLMERHLADGVVAETELVVRLERDLHDLDPDGQSGLALIKSWASQGWLHRIVDERSDQNICYLTQDARRALDFLRGMRRQDTIATGGSINGIASRLKQVAIRVGNDPARIRKSIEAEIAALQAELDDLEAGTRPEPDVTDAYDEARAIAMQMERLITDIGQYGSMIEQATAALDEPIDSNAEYRDRQRQMYADYQAAWDSQGRDSHRAFLRMINDPDQRAEFEADVAAVAEALPLLDPALRKVMAGFFELVGHQIDEVERIQQRCAQRVKRFTAFGTLEQSRGVARQLGEAIGAARNLLKSSLTDSRLEIELPLARHAFSSVGALSFKIGDLSAPKPARHAAGELDLSSFAALTTQVDAPAMSEMLNSALPVSLSDAVAMLDNAYLGHVIVLWSWALKQPFEGQPASTSVRFRSLDGRDREIAVPDLVFTEPISVGAAT

SEQ ID NO: 37542 - protein, 229 aa, Mycobacterium sp. GA-2829
MTTEPDADFAAFSELPQVDQNARPPHQRRPRFDGDVSELPDRACWALQNLLTRRYISAEADSDLYSWVLEYRKQLSVRLSELDLILRIVDGTDVAFVEQARYESARGVKLLRREPLGTYDSILALHLAQMMRAAGGQKVLITREEMHGLFSGVLNDTDRDAVTFTARIDGAIARLAGLEILRKSRDDEDSYTISPVINAVMTASVITELQQQFEQLLGGGAPAEEVYVD

SEQ ID NO: 37543 - protein, 1118 aa, Mycobacterium sp. GA-2829
MTEQFHLSRLQIINWGVFDGYHSIPFSSGGALIAGASGSGKSSLLDAISLGFLPFNRRNFNASGDNTAAGSSAGRRTVDKYVRGAWGQRSDGGTSRVMYLRGEGTAWSAVAVTYTGDSGRTVTGLVLKWLTGESRSDSSSRFVIGDGDLDIEDVCNRWAAGRFDTGVFKDHGWRFTTKVESQYLAQLYATIGIRASDAAQQLLGKAKSLKSVGGLEQFVREFMLDEPESLARLPEALKQIDPLVEARELLAVAQRKRKILGDIEKIQQRYASESSDLGIIDLVDLPMVRAYTDHVRLAQCPAQIAQLDTTIDQLDNEYEDVTRSLNLAKAEADSLNAQISGNSASIGPLQSQVTAAETEAEQVSRRRSAYEDAVSAQGLDVPDTAEEFWNLREELLTEATDLLAKVERNREASTDAEYAQKAARIARDDAAKELKRVEHVGSALPEFALLMREQICAALGLDAAELPYVAELMDLRPDQTRWRVAVEKVLRGPGLRLLVPDQHWNQVLRFVNETNMRGRLALHHVRTKLYGADPVDAESNTLAGKLFPVDPTHPCAAEAVDIVTTAGDHVCVDTPEVFARFRRAVTDTGLYKDSDRLAIKDDRRPLKQSEYLYQGDVSAKINALTMDLAAAEEAYQKARRAADEIAAQRQRWRDRAAACKAICEQFPQWSHIDVETADGHADRLREQYELLLADNPDIEALNARADECWSQIQVLMTRRGAIQTRRDDLDSRRTQLLELQERLQPAFVSEPLTELLHRYAGQVPVSLELLSPEPHRDALFAAIKKEREQLRESRRRSYDELARILNTFDTAFPDAIPNDSNNFDERVHDYVALCRHIDERELPEAYERMMRLVTEQAPDAILTLHRVAEQEARRIAEQIERVNTGLGAVEFNRGTRLTLRATPRSLTAVAELTEIVRAISRRIAEVGLGDKQAILDQYADILRLRNRLASTAPEDKAWTRDALDVRNRFTFDCAEWSGDELIRTHSNAGDNSGGEQEKLMAFCLAGALSFNLASLESSDNRPVFAQLMLDEAFSKSDPQFAQQALSAFQKFGFQLVIVATVQNATTIQPYIDSVVMVSKTEATGRNARPVATVVTRTISEFGELRREMRANAKVPAGV

SEQ ID NO: 37544 - protein, 480 aa, Mycobacterium sp. IS-1496
MQVDDNRGLSAAELLELNRDLHGSRAIRLLATHNLGLYATLMERHLSDGVVAETQLVVRLERDLHDLDPDGQSGLALIKSWASQGWLHRIVDERSDQNICYLTQDARRALDFLRGMRRQDTIATGGSINGIASRLKQVAIRVDNDPARIRKSIEAEMAALQAQLDDLEAGQRPDPDVTDAYDEARAIALQMERLITDIGQYGSMIEQATAALDEPIDSNAEYRDRQRQMYADYQAAWDSQGRDSHRAFLRMINDPDQRAEFEADVAAVAEALPALDPALQKVMAGFFELVGHQIDEVERIQQRCAQRVKRFTAFGTLEQSRGVARQLNEAIGAARALLKTSLADSRLGIDVPLARHAISSVGALTFKIGDLSAPKPAKPAAGEVDLASFAALTTQVDAPAMSDMLNAALPVSLSRAVGMLDNAYLGHVIVLWSWALKQPNDGRAASTTVRFRSLDGLDREIAVPDLMFTEPITTLAGVSQ

SEQ ID NO: 37545 - protein, 229 aa, Mycobacterium sp. IS-1496
MTSPSTDPDIDFSSLPQVDQNARPPHQLRPRFDGDVSELPDRACWALQNLLTRRYISAESDSDLFSWVLEYRKQLSVRLSELDLILRVVDGTDVAFVEQARYESARGVKLLRREPLGTYDSILALHLAQMMRAAGGQSVLISREEMHGLFSGVLNDTDRDAVTFTARIDGAIARLAGLEILRRSRDDEDSYTISPVITAVMTASVITELQQQFEQLLGGGTPAEEVEID

SEQ ID NO: 37546 - protein, 1120 aa, Mycobacterium sp. IS-1496
MTEQFHLSRLQVINWGVFDGYHSIPFSPGGALIAGASGSGKSSLLDAISLGFLPFNRRNFNASGDNTAAGSNAGRRTVDKYVRGAWGQRSDGGTSRVMYLRGDGTAWSAVAVTYAGDSGRTVTGLVLKWLTGESRSDSSSRFVIGDGDLDIEDVCNRWAAGRFDTGVFKDHGWRFTTKVESQYLAQLYATIGIRASDAAQQLLGKAKSLKSVGGLEQFVREFMLDEPDSLARLPEALKQIDPLVEARELLAVAQRKRKILGDIEKIQHRYASESSDLGIIDLVDLPMVRAYTDHVRLAQCPAQIAQLDTTIDQLDNEYEDVTRSLNLAKAEADSLNAQISGNSASIGPLQSQVAAAETEAEQVSRRRSAYEDMVTAQGQEVPDTAEEFWNLREELLTEATELLAKVERNREASTDAEYAQKAARIARDDAAKELKRVEHVGSALPEFALLMRDQICAAIGVEASELPYVAELMDLRPDQTRWRIAVEKVLRGAGLRLLVPDQHWTRVLRFVNETNMRGRLALHHVRAKLYGAEPVDPEPNTLAGKLFAVDASHPCAAEAVDVVTGAGDHICVDTPDVFARFRRAVTDTGLYKDSDRLAIKDDRRPLKQSEYLYQGDVSAKINALTVDLAAAEQAYQKARRVADEIAAQRQQWRDRAAACKAVCEQFPQWSHIDVETADGHADRLREQYELLLADHPDIEALNARADECWSQIQVLMTRRGAIQTRRDDLDSRRTQLLELSERLQPAFVSEPLTELLHRYAGQVPVTLELLSPEPHRDALFAAIKKEREQLRESRRRSYDELARILNTFDTAFPDAIPNDSTNFDERVHDYVALCRHIDERELPEAYERMMRLVTEQAPDAILTLHRVAEQEARRIAEQIERVNTGLGAVEFNRGTRLTLRATPRQLTAVSELTEIVRAISRRIAEVGLGDKQAILDQYADILRLRNRLASTAPEDKAWTRDALDVRNRFTFDCAEWDVTTEELIRTHSNAGDNSGGEQEKLMAFCLAGALSFNLASPESSDNRPVFAQLMLDEAFSKSDPQFAQQALSAFRKFGFQLVIVATVQNATTIQPYIDSVVMVSKTEATGRNARPVATVATRTISEFGELRREMRAAAKVPAGV

SEQ ID NO: 37547 - protein, 502 aa, Mycobacterium sp. IS-3022
MAEINARYAETRAAFQRHTLRLLNQQRAPLVTAILQELFPAERQRIRADEFYAEVNALLDQLVHENVDLPAERGRALCQRWMNDRWLLHRDTPDGEQVYELTAEGGEALAYVQRVGGRRIVSESRIRSIMDKAQHAALRASGDRDQRVAILNAEIDRLVAERDRLAAGAPIDVASDEQMFELFMSLMDDLENLPSDFKRVEQTVTEMRRQLLQEFRADERPKGEVLKSYLDRSDNLLQEGLGGRAFLGALEVLMNDELLATFRRDVDTILSHSFADGLIGPKDREPVEGTAALLEDGVQSVLSAQRQVSATLRAHLVRHDSLRARELTQVLKDLDRLLADKKAGAKPRTRVPIAFLPPTIDVERLRTRLYDPADNAAPPPLEDVSHLAAAGLTTADVQGQGGPDYDRIRSVLIASLKQDRHTTGAQVFNGFPDSARRPVDLLGLFHMSALTTAIERSSSLVGTDDYHTVRPDGNARTFKAPRLTYTDDDRAALIADMDGARP

SEQ ID NO: 37548 - protein, 239 aa, Mycobacterium sp. IS-3022
MSDSQEWGDERADEHAADDIGQERGFDTMLFDGDQGTLPLPARKALVAVVKNSYVSAEQEPNTWAVLLAHRVDIESRLNDMFLVLIVDKNAGIAYKQQAPGDRFTTLLPRDTSYSLDETILLRNLREIYSNERGLSGESVFVYRDDMIARILADAPQTQTDLVRARRSAENAFENVRTSRILLKTNDPERWQISPVIEPLLPVEKLRDLQEWLRTSAADEPAEPNIETVNDNTTALETS

SEQ ID NO: 37549 - protein, 1144 aa, Mycobacterium sp. IS-3022
MTVAELQTAGAATSRDDSPQWKAELLQLFNWGGFHGYNLITLDGDATLISGGSGTGKSTLMDAYIALMMPHTVPFNGASNAAKGRARGEDQRSVLSYMRGKTDTVEDRETGEAIDHLLRGKKTSVASGIAMTFRHDDGQRFTAARLMYAKASAVRDADVIKRWVTIPDLLDLQSVYEFSAEQFPPGPMKARYRGMRTYDSYDAFSHALFISLSIGSRGEGENALKLLSRIQSGHHESTVDDLYKRLVLERPTTYDEAEKVVAHFDDLSQLYDELRRDQDQIDTLSDIPEQYDRYQTAQQARGVIASLRHNQPGDTPFKLWATGIKCDAFAAELQRLNAEQSATVELLAAAESEVRQQETRQEQLAEQIRANGGDALTQLEHELAQLKGQLDKAKHHRMNFLERTAALERAPNSADDFVAMAQTASEALSTMETAKEELDRKKRQAIVDGERLLEKMRELEGDLNSLLERKGSRIRESLSSRRDQLAGAAGLDRSQLPFIAELIDIHPDDERWRTAAEAVMGGFARMVVLDKRIIDDFTRRIDSFPPRERIQYRGVPLNLPTTSPADPRTLAGKLIFKDGPFKGWLQKRTAELFDHECVETPEELISDGRRRVSLSGQERRGAQGAHGVPSRTNYVIGFSNEELIATLRDEIADLTNQIGDHARSERDAGRQLAELAELELAYQEVLRTDWTDIDVAAVERKIQSNEEQQQQILAATNILAALRRQKDAIDKDLNTARSRKFGHESRRDELAKKIETFSAEHTVVAEDLARQLALGAISLTDDQKELLTVLLADEYTGDAVEFLGKAIDRVHNRLTERGDHEADRERQARQAIEKAFHTFQSRWRQYDWGTDIESYPNYRDHYDALVTTGLAEHRDQFAKKVTRWSGADLVELRRAFRNAKDGIETRLDAVNRILNEIPFGAKRDRLHIRLRHRTIQLVKRFTAEMEEFASAATSMETEDLTSEEIEQRYRAIQNFIKYLLPPERLPKGEFSTRDELLDVRRHVAIIAERVDKDSKEPLSSYNSLGGKSGGETQELMAFIVGAALRYQLGDESRTRPRFAPVLLDEGFIKADAQFAGRAVEAWRKLGFQLIVGSVIDKVSAIEPYVSHILQITKSPEGYSHVTMFDATTPAIVTQDSTEVEGFMA

SEQ ID NO: 37550 - protein, 404 aa, Mycobacterium sp. IS-3022
MKSPDLIKADIARHLHRTFPTAVAEAAETGWPHRFPLGSISKTNLESSFGPVAEQVQQWYRWVRECRDAGLALQLQTSRRRVWGTAQTIPTHLTVESIDAGAHIAGDGWPARLARQRGRRDTIARRFPALAVEELARTLRNTDDYNDVDFRLLCDTAAWFQTNSAVGLTPRQVPIPGVHAKWLNTSQHLVERLAGIDSLGLAPAHPPRVHLTYLDPGYRASGGRRHDVAAVGDAMRPAYPPNVIVISENKDTAVGFPLTDDGIAIEGEGKAGPRAISQLDWVRDCRRLYYWGDIDADGFEILNNYRVAGLHIASILMDCETYCRYKHFGTYHDRKGRTIPVPERRHLPMLTDGERRMYNIITSRDLTDPPRLEQERIPLADAAAAVLASLSPIQPVSAPQCSPS

SEQ ID NO: 37551 - protein, 480 aa, Mycobacterium sp. IS-1742
MQVDDNRGLSAAELLEFNRDLHGSRAIRLLATHNLGLYATLMERHLSDGVVPETELVVRLERDLHDLDPDGQSGLALIKSWASQGWLHRIVDERSDQNICYLTQDARRALDFLRGMRRQDTIATGGSINGIASRLKQVAIRVGNDPARIRKSIEAEIAALQAELDELDTGRRPEPDVTDAYDEARAIALQMERLITDIGQYGSMIEQATAALDEPIDSNAEYRDRQRQMYADYQAAWDSQGRDSHRAFLRMINDPDQRAEFEADVAAVAEALPALDPALRKVMAGFFELVGHQIDEVERIQQRCAQRVKRFTAFGTLEQSRGVARQLNEAIGAARALLKTSLADSRLGIDVPLARHAISSVGALTFKIGDLSAPKPAKPAGGEVDLASFAALTTQVDAPAMSDMLNEALPVSLPDAVAMLDNAYLGHVIVLWSWALKQPFDGPPASTTVRFRSLDGRDREIAVPALMFTEPITTLAGVSQ

SEQ ID NO: 37552 - protein, 229 aa, Mycobacterium sp. IS-1742
MTTEPDIDFSQLPQVDQNARPPHQHRPRFDGDVSELPDRACWALQNLLTRRYISAESDSDLYSWVLEYRKQLSVRLSELDLILRIVDGTDVAFVEQARYESARGAKLLRREPLGTYDSILALHLAQMMRAAGGQSVLISREEIHGLFSGVLNDTDRDAVTFTARIDGAIARLAGLEILRRSRDDEDSYTISAVITAVMTASVITELQQQFEQLLGGGPAPEDQEEVAVD

SEQ ID NO: 37553 - protein, 1120 aa, Mycobacterium sp. IS-1742
MTEQFHLSRLQVINWGVFDGYHSIPFSPGGALIAGASGSGKSSLLDAISLGFLPFNRRNFNASGDNTAAGSSAGRRTVDKYVRGAWGQRSDGGTSRVMYLRGDGTAWSAVAVTYAGDSGRTVTGLVLKWLTGESRSDSSSRFVIGDGDLDIEDVCNRWAAGRFDTGVFKSHGWRFSTKVESQYLAQLYATIGIRASDAAQQLLGKAKSLKSVGGLEQFVREFMLDEPDSLARLPEALKQIDPLVEARELLAVAQRKRKILGDIEKIQHRYASESSDLGIIDLVDLPMVRAYTDHVRLAQCPAQIAQLDTTIDQLDNEYEDVTRSLNLAKAEADSLNAQISGNSASIGPLQSQVTAAETEAEQVSRRRSAYEDMVTAQGLDVPDTAEEFWNLREELLTEATELLAKVERNREASTDAEYAQKAARIARDDAAKELKRVEHVGSALPEFALLMRDQICAAIGVEAAELPYVAELMDLRPDQTRWRIAVEKVLRGAGLRLLVPDQHWTKVLQFVNATNMRGRLALHHVRAKLYGAEPVDPEPNTLAGKLFAVDPSHPCAAEAVDVVTGAGDHICVDTPDVFARFRRAVTDTGLYKDSDRLAIKDDRRPLKQSEYLYQGDVSAKINALTVDLAAAEESYQKARRAADEIAAQRQQWRDRAAACKAICEQFPQWSHIDVETADGHADRLREQYELLLADHPDIEALNARADECWSQIQVLMTRRGAIQTRRDDLDSRRTQLLELSERLQPAFVSEPLTELLHRYAGQVPVTLELLNPEPHRDALFAAIKKEREQLRESRRRSYDELARILNTFDTAFPDAIPNDSTNFDERVHDYVALCRHIDERELPEAYERMMRLVTEQAPDAILTLHRVAEQEARRIAEQIERVNTGLGAVEFNRGTRLTLRATPRQLTAVSELTEIVRAISRRIAEVGLGDKQAILDQYADILRLRNRLASPAPEDKAWTRDALDVRNRFTFDCAEWDISTEELIRTHSNAGDNSGGEQEKLMAFCLAGALSFNLANPESTDNRPVFAQLMLDEAFSKSDPQFAQQALQAFRKFGFQLVIVATVQNATTIQPYIDSVVMVSKTEATGRNARPVATVATRTISEFGELRREMRAGAKVPAGV

SEQ ID NO: 37554 - protein, 500 aa, Halomonas sp. 54_146
MDTSPQQRTRHYIAARKQHPAWLLLASPRAPLVLGWLTSLFEFSEDGIAEADALEALSKMLSAFAAQDEYAIDPDNTRLQAGRELRQWIQRGLVIERGQRLYATDALSSAIQFIDSLDNRIMTSTASRLSVVQREIENLEVGLNPNPESRKASIRRKINQLESELADAEAGHVPVLSEADAIERIREVFNLATGLRADFRRVEDSWREADRLLRQSIMSEHYNRGDIVDRLLDGQEALLDTPEGRVFDSFLQQLRQTAALDMMRQQLRTILVHPAAEKALSRLQRQDLKLLRMRLILESQAVLQARARSEKDVKGFIKTGLAAEHHRVGQLLNDILNTAQDLDWQRQKVRRSDVSSLPPLGFTLGNLSVVERLRFKALENELDEELDLAQQESDLSGIEAEFWDSLDGLDREALVQETLALLAQEGRALTLAELAERLPPSHDLETLALWLGMAREAGIEVAGQEIQELVLTDEEHCDWVFRVPMVTLSEQALSGIEWEF

SEQ ID NO: 37555 - protein, 256 aa, Halomonas sp. 54_146
MAGVFDRIVGQQDVDETSEEECPDQLDGQADPAHTGSAIDAAGEAGGPETESESPARTDLKLREVAQELLRMGLLEESQRPHLYRAALVAMERLNVTLEPLDLCARADEIRGLVFLAVRHGDTDEPQDDWSHPLVRKQRLNLEQTLLVAILRQYFIAHEQEAGTGAGDAMVAVDELIPQMLVYLGESGSEARERTRLLQLLDQLKGHGLVSAPDSHERVAIRPMIAHLANPENLTALLYELKARVAAESSDQGETN

SEQ ID NO: 37556 - protein, 1115 aa, Halomonas sp. 54_146
MVTTALTQPSLFEQGQEESGWQLVPTYILQTLELFNWGGFGGMHKADIDAHGSAIIGPTGSGKTTLVDALMTLLTANPKYNLASTGGHESDRDLVSYVRGVSGPGDGGGDQSHIARPGKTVTGLVATLSNGESLVRIGALLWFDGTSMSPSDMKKLWLFSTAPEHTLQRWLTLQQEGGMRALRQQDKTDTGIWTYPSKKGFLARLRDFFEVRDNAFNLLNRAAGLKQLNSIDEIFRELVLDDNAQFQRAREVADSFDDLTAIHEELEIARRQQRSLEPIKSGWEKYLHNQTQLDDQETLSRVLPVWFGEQAHQLWRAEAERLQQQTQQADAELAAVEEQYAHQYQSCERLNEAYLRLGGSDIQTLEALVKEKQANLERCQRHAAEYQRLARSLAFDDALNREAVATNQMLAAEKLQQVQQALEAAKQAAFEQGSQRFQIEREGRELQDELAEVKARPGSNIPGRFQQFRAVLADALSLSEDDLPFVAELVQVKEGEQAWRGAIERAIGSHRLRILVPPEASRQALDWINSRHNALHVRIFEVKPAQGQARFFEDGFTRKLDYKEHPYREAVKELLAGLDRHCVGSPERLRETPHAMTAEGLMSGKARFFDKQDQKRLSDDWQTGFDNRDRLAALSAQISEAEARLQSAKAAEQQAKATQSVLEQQVVLLAKLAELDYGEINTPHAEREWQLQRDKLAALTSPGSDAATAKRQLEQARDELATLEQQKTQCIKQCAQLNNRLETAQKEQSRAFRKSEAGLKEQERALAEAHFSPVYQKQLTDVDELERQAAAQLQQQLTTLRATQSRLEKELVKAMSDAQREDRGALSEVGRELDDVPDYLARLNVLTEEALPDKQQRFQEYLTDSSDQGVSQLLATIDGEVERIEERLEDLNNTLRRVDFQRGRYLQLVANKVVHESLRTFTRANTALASSRFVEDGGESQYKALQHIIALLRHACERQRMLGARALLDPRFRLEFKVAMIDRADGRVIETRSGSQGGSGGEKEIIASYVLTASLSYALCPDGSPRPLFGTIVLDEAFSRSSNAVAGRIIAALDEFHLHALFITPNKEMRLLRKHTRSAVVVHRRGNASSLTPISWQALDALREKRREARNEVPE

SEQ ID NO: 37557 - protein, 381 aa, Halomonas sp. 54_146
MKSPSEIAGRLAKQWQQTDRRVERLLSPESWPLVVAIGKPTGRQFADQTGLVQAHVQRWRQVTVGEVAFQDINFRAAAEPVSLPVQWVLHTPSEWAAATADAEVQQEFALLETLVGSVNQRYWEVLVRERALWRNRAVSEIIGAATLADSLQPGIAEGRPIRLLKGLGVDTKFIERNAVLLTRLLDERYDGMASQQGLSGFLDAPDDKDHWLLVVPLAQGLLPFQRLRITARELANTCLPGSRVVVVENEQCEHLLPPMPSTVAILGAGLDVHWLAGGALQAKAIAYWGDMDTWGLLMLAKARQSLPSITPLMMSEAHFKAFCCDCAVSEPVHAELPTSGLNEREVAFFNFLKAQSKGRLEQEYLPKVEVQRELLGWLNRC

SEQ ID NO: 37558 - protein, 496 aa, Halomonas sp. 54_146
MYEEANNLFDRLPEHIFRPLGANEHARRNWSLIGHLYNDFFAPEADPPEGEGWTQKRVMASIERFLLRWDDEHEIDPEERLTQLNSRAHDVLSNFLNSGWLSIDRIGFTPFVIMRPTVQSLFELLKTFAEQGPEFIGGRVQSVWNNLLQVQADPKTNAAVFQVAAKECSALLQMLNTTRMRVREASDLLRSQESTSLFLQKFFGDYISSLYIGDYSDLFSRNHPLASRWDIVDIASRITEDPESRQQLRRWYRKNLRCGSDEEADSYIEKDTARVLALREVDRLLTRLKDAVTRANDQALGYLEYKVRSQGNFDVKTDQVIDAVVRAAESRRDDVTFAIPMGWSQGGLLSEHALKMPAKKPIKRTGAIIQKRQLSPEEKARRLVRQIMKGNRDVSEARIVEYINRHVNPGGVLESSSMKVDSINDLCVLATFSRLGLIAERMERNTRAGIVRPKLYRELEQHIEIELTGERFENEYLDAPAVRIRRREDGGTKNAS

SEQ ID NO: 37559 - protein, 213 aa, Halomonas sp. 54_146
MPVSWNRIAEQNEAYTVRDFQKAAQRLIVDQVLYQANPKQRSDYDLVAAHEKEFAEALDLFGCMLDLNVQERYAAAVPTVTEVSKIPLMHTLLALVLRKLYDHHMNLGTLNAGIAGVSLSELEAAFQESTGRDLPMKPQAELQGLMDAMKRWGIGRLVKTENLAEEATWFAEIFPGIQSLINERTLAMLKSHAELLYEPDGIEKREQHEEKDS

SEQ ID NO: 37560 - protein, 1136 aa, Halomonas sp. 54_146
MKHLKRISLVQFYLHEAVDIEIEGTTAFLGPNGSGKSSTLDAIQIAMLGGNQQYARFNTQSVSSKQRRSLASYCLGMLRNPEKDSEVIGRARDEARTYIVLVFGDGTEKGWISAGICIEADADTYDHEVKGLFVLPGQALKADDCIVYDGNDRRPISFADFRENMREQARKNGRTPIFTDKSSEYVQEMLYALNGERMPDARRFMSSFVKSMTLKNVDSIDQFVRDYVVESNPVDIATFRKQVEQFVALRDLILKTKARISRLTGILSEFNRARQAERRIAALEAIKTIFNVEWLGKQVDDLDAQIDTLESQKKTAMEFAAKAKSGRDLKQKEITNLEVRLEGDQNEQIRKRLEEQINFQREVISAYQHPAMSRANQLINALKESLDDQNFSGIRSVMTTAINKLEHARKHDVSDNALIKEIGRLDAQLSQIRAISKTSLATIQKQHVELTEELEAIRRRISAVTQTGRLLNDGAALLLEILNRADMNAQPLSALLRISDPSWAPALEAYLGGDRDALVITDGNTRDAVKLLREAMRQGHRMHGAAIIQPYHLRNVETHVKGDDVALGIFDSDDDTARRFIWQKFGNMRLVDTELDLEIHSRAITRDGMLSQGGVTKSIRIAPISDLRIGKELRDTSQLSRHAAELKGDLVKLEKQRDCVERLEKALAPSASDDDSNVSWKLSEAEQAIVQAQQQLSGLDVSHLEEYRSQLDAAGEKYNELDKQYTTHDHLAVGFKHQIETRSEEREKLRQQLPATIEAQKTAVASPLVDSEWLDSTKDEIERAETDYERRLSDVERKLEHNRPRLRKAAENASLELARYVQDERLDVQVTYMDWHDRHNWAFEEKTKLTNTELHHYEQEAELARQASEETLRSDIAMSLHDRFKEMELERRERNRILESCPSFTGGERYKFTTSVVPHYEALVRYINQIAQNDNNLSLFSENPDELNETLRNLVEAAAESGNAGGVLDYRQFYTFDLDILVDGKRVDRMSNRQGAGSNGEHIAPMYIAAGAALAKAYRLHSNKGKQSGIGLICLDEAFEGMDTINAMATARFLQNIGLQLIMAGPELERTKLAPVTQTIYDLDREGLDLQMERTKFKEAANKLLVSDMPEENPEVMKAAYQQLGLEQPVEHPLAD

SEQ ID NO: 37561 - protein, 484 aa, Moorella sp. 60_41
MKLFEVLPERLFQVFSGRNRQIYAEALLLLYEQYRINRFGIQYEVMRDLMQELIESQEQEGVIYEVEEDEERVPAGTLLEAGGEDLARIKAGALLRRLDGLQWIQVEVRDNFRRYIVLPRYASRLLAVFRELCENRTVEYQRFAFVTYQLLSGEEARLRPGFAILEAHRMTQEFLEELRALVNNMKYHMEQVVAKNSIQEVLDHHFEEYKAHIIDRSYHRLKTSDHVSRYRQRILTTVQEWLLDGEWMARAVEDALRSEVFSTREEAAAQLRRALMDIEEIYRGLDEMFYQIDLRHNQYLRASYERARYLSQHSSSVDRYLAHILEWTAAGMREGNLQVESCLTGLFNLMRLNLINEQSLYTPRRRRAPHKPEPVVVVAVPEELKRQLREKSLEQVRQAITREKVGAYVLGRMGTRREMGIAELAPQNMEEFLYLLYVYLYGYDGLAGYRLVSDGENRVLDIGGYRFYDRRVIRVDRVWKRRAV

SEQ ID NO: 37562 - protein, 203 aa, Moorella sp. 60_41
MFNPGENLSEQERERLRDVINRLLAVNFLNKEQERERYLTARRHRQALEDFFRFLGWEMVFDDRHECIFVMAPEAGCRRNLTREESIWLLVLRLIYQEKRQGLSLSEYPVTTLHEIRAKYEAFRLPLFNKTRLQELVRLGTQYKLLEPLDDDLSSDDCAFRLFHTLLYAVQADTVEKLHQKIANYEQGREVAPDEMAAPPAAD

SEQ ID NO: 37563 - protein, 1128 aa, Moorella sp. 60_41
MKWLRRLRLINWHYFHDETLEFGRQTLIAGRNSAGKSTIIDALQVLLVANQRQIRFNSAAHDEARRSLISYLRGKTGGEDRKYLREGDFTSYIVAEFYDEEKKEPFVVGAVLDVYGDDTVDDEYFILAGVRLADLDFWSPAERWKNREEFHRYCQKLPGRHIFERSKAGYQKALLNRLGQLGDRFFPVFVKALSFKPIQNVRDFVYQYILDEKELQLDLLRQNFEIHERYRAELEALEERRQKLEEICRQYETFARLRDTVAVQEYVIRGLRHAREAELQQQLEEGIGFLANEAERLGRELELARAGQQEAREKAQIAYQKWQGHELKQREQELQEGLARLDKELKEHEAMLAVLRQTVEREKALLAALEATEEDEYWQWQPGEREYLARARDLFAGLLPAGDPGWLPGEDTLAAVREAGLFLAGVYSRCALAAGRLEDRLTLLERQRVELEGQIRDLENKKRPYPQSVVNLKRLLEERLKGRSPVWIFCEEMDIKDEGWRDAIEGYLHTQRFDLLVEPAFFAEALALYEREKKNLQVEGAGLVDTEKEQRYLGTAREGSLAEEMVTANPVIQAHVDHLLGRVMKARDEQDLRRFSTAITRTCMSYHNLVARQLEKHRYAVPYIGARAIARQLEIKRQELAETKEQIAKLRRRREELAEWLERLSDKKSLYAGMAEKLDLPARIRRLEEERASLAAELERLDLGEVERLKEEYFYWDCREKELLNKITEISGLKKSRENELNQKQTELYLQEGKVREALAFWQAWREQYPAELLPRAEERWREIEGQDLPTANKLVNWENSQKGNITRREQEYQRLRDLRHEYNLRYTYSADPGAADNEAYQSLLAGIATVDIPRYREKLAEALRQSEEEFKSHFIYRLREAIEAARRDFNELNYALKNFPFHEDRYHFEIKPSERYRRFYDVIMDPGIMEQGSLFELPDDDRAAVLHELFEKLIRGEAGDLEEFTDYRNYLDFDIVVTSGDHRYSFSQVLREKSGGETQTPFYVAILASFNHLYNTGKTIRLVVFDEAFNKMDEERIQTSLRLIKRMNLQLIAAVPDEKMQHMAPEVDTTLLVHRSGFRCFVDMVSRQEILAMEEAAAGSEGGVNVEREGRESEGILPLQDSLFAAR

SEQ ID NO: 37564 - protein, 437 aa, Moorella sp. 60_41
MKGANLKEYYRYKILSLLLGKYEASRSFQTGTPGKQRPQFAMERSPLADDYFDEMDHRKREAIHAALDELASAGVVEVTWPRFQEGRRVEKVYLNFAAIPRAYDLAGMEPLAQRLERMRHILAPLADHPWEWVRRWWAEVDGALAARRAAGLDLNDGEGYENLVRVLDALPGLEDSMPERIFSQRVLGDSKAFEQGVKKRLLSLLKSHGPEEYETDAEYLDSVGLTDNPQMVLAAGPFTFKAGNAVWDAGGLPGGLGLSVHTVRAMEITSVAAPRVLLVENLASYHQVVQKFCLAEAGRRECGGEGHPAAGRPAVLAVYTGGFPHRGVKLFLRRLKEYRENPATGSKPPVYHWGDMDYGGIRIYEYIRRNFIPDLRPYLMDVDTYNRYLHTGIPFGDEYAARLRQLMDDDVYYTWRPLIQEMLVHRRWVEQEGIDDF

SEQ ID NO: 37565 - protein, 64 aa, Thermacetogenium phaeum
ALSRYQIIERLESDVTQPETGIIIYPSILFVVTNEKISEIYELAGADANDEEENTEEILPEAEE

SEQ ID NO: 37566 - protein, 1135 aa, Thermacetogenium phaeum
MKLLQKLLLINWHYIERELIEFSGINFLTGKNASGKSTIIDALQLLFLGDTSGNFFNKAANDYSQRTLKGYLRGEVADDGGTGFIYLRDGVFSSYIVAEFFDTIKKKSFCFGVVFDVYGEDNPTHKFFLLEAPLPEHQFILNNTPMDYHTLRNHLNSTGKIKYQFFDSNRSYRESFLGKMGGLNNKFFTLFKKAVPFSPIMDIEKFICEFVCDVSNRIDISDMQANIRHYKQLELEAGFVKERIERLTVISAKYQDYLIEKGRLLQQSYLMDRAQLQESVDRIDALREAIRQNNEKMVSLAAQLEKKEQEIKKLDEKRDRLLKEKFESDLYKKTESLKKQLDDLTAQLKQLDGVRQGLADLITRTGNTWKKALKDYAKHIAPEKAHAYASLQREAADLSGIKPDGLICPETQRELDAERLQEIRSQMKAFRNEVDALYFDTRSRLEAARKRATELASEIANLKKGIKPYDAKLLELRREIKNKLQQQYGQEVPVEIFCELIEVRDKRWQDALEGYLHTQKFYLLVPPEYFVAALKVYDRLKFERQFYDIGLVDIGKLQELNPKVKKGSLAEEVVTDNPYARVFADYLLGRVIKCERVEDLRQYRTAITPTGMLYHNFTARQINPDRWKVPYIGKQAVKKQIEIKEQELAGLNQEIRKGEFRFEVLEGLKEIDPLGDDTIAHITGSLQQLRTYQDLVGERRQVQEALERIDLSYLEKLDREIEEVEKRRTAVEEQREQLKRENNKLEYENNAIREEKIPAEESRRADCKQRIDEKYDAGWIRETGEPRFLKEMEKRGSPRKIIEAFHSQLERTKNQAERKWQELVRARSDYNRDYKMSYDINLPENTPFDEELTELRDTHLAEYEAKIKDAREKAQKQFQEDFISKLKQNIDTVRGQIEELNDALKNVAFGRESYRFEIKPNPNYKRFYDMITDSMLLEGYNLFSQAFQAKHRDAIDELFKQIVDVGEGDLSADQRAELERNIEKFTDYRTYLQFDLISKDESGRESRLSKTITKKSGGETQTPFYISVLASFVRVYRLQQRYRNKNNTLRLIVFDEAFNKMDHQRIQESIKLLRSFGLQAVICAPTEKIGDIAPLVDRTLCVTRLNNITVVRAFDPRKLEDEDELPERYHQPAAR

SEQ ID NO: 37567 - protein, 409 aa, Thermacetogenium phaeum
MNYQNVIINLLLDKYEQSRHFRGNARVNRRVALKFDKKNFPLYDIERVDVKEAIHHAALELQQRGLITVEWMKFEVGNIISRVFLNLEMVAEAYALVNRKGKKDILVEARRKLERLREQVTTPWIKDFCREMLQEIEEKKEMPRYLPREEEKFDLLVRALQGIEQKGEDELLERIFSRRYLGGSKEFERKIRSRLITIVKNYLLPGRDMDDEEVLEHIGLLKTSEELSFFGPLVIDLHGQVIDFSPFCYGTSMNAEMIRNFEVSRLPVNRVVTIENKAAYLEYIKNTPAERELVVYLAGFYSPLKRLFLEKIHNHLRKHTPQAAYYHWGDLDLGGFQIFVYLKNLIPELQPLHMDVATLRENARFADTFDDKYRKRLEQLLKQEEYAVFFEVINFMLQAGIKLEQEALV

SEQ ID NO: 37568 - protein, 483 aa, Aeromicrobium erythreum
MSALSKALAYRRLVDEHAALRLLRADLAPVIAGILAERLGAPGMRMPTEELHAAVEADLEELRLHEELKQNARAYCDDWRNAGFLVRRTDRDSRGETYELSAAAHLALRMFSQLETPRTTITESRLVGLAAAIRQLARDTDPDGTRRLEVLLTERDRIDAEITAVRGGEVTTLDDRRAAERLADILLQAEHLPGDFAGVRARFESLNQDLRASILDADERHGSVLDDVFRGVDLIEASDEGRTFTAFAALIRDPERSAALDTDLAALLERDFARAIDPGARRALRTLVRDLKHGSRDVHQVLTEFARGLRRYVYSQEFQRDRRLRDALRESLSVAVAASRRIKPYARMPRDIELSALPFSTVGEISAHDPSDYDTGATLDDATTTTVDLEALRAVARESEIDFVELVRNVNAVLDEVPSASVGTVLRHRPASQGVASVVGLLSLATVHGRLDPRSAESLTWTGTDGVPRSAIIATHTFTEKIR

SEQ ID NO: 37569 - protein, 205 aa, Aeromicrobium erythreum
MSLADPAGAPRLWKDDTGRLVEDSRRAVLEILKGPYLSGRRRPQLWAALMADERAIRSLLHDLFLELVIDPVDEFAFTRKVRTDEIEVPSTLRSESLAFIDTAMLLVLRQLLLATSGERRVIVGQDEVYERLSIYSDGDESTFRRNLNAAWGRMMNKLRVIHPAGEERAEISPVVKFLLDEDEVRALTEEYRRIGEGAASGEDVS

SEQ ID NO: 37570 - protein, 1106 aa, Aeromicrobium erythreum
MTLPLDLPVPATGQWRLAEVQLANWGTFDGKIYRLPIARRGHLVTGPSGSGKSSLLDAIAAVLTPDKWLRLNQAAQGSGARADQRSLVSYVRGAWSRTVDDDEDRVVSQFLRTGATWSGILLRLESGTTQPVTLARLFFLRAGGSSNADINDVCVLERSAIDLRDVEPFVRKGVEVRKLQAAWPDAVVTSNRSHARFYARLRSVVGIADETALQLLHKTQSAKNLDSLDDLFRDYMLEEPSTFALADNAVAQFGELRSAHDRVVQLRLQRDHLLRLRDAASAHDEARVAAEKAKDLASHVVGYQHARTLLLATNEAEALRERLVVLREDVATARLRDTSSDEALRRAERLALELGGAEAEHVQRAIDTAEQAARDTEERWQTLARQLAAAGIQSPPRTAGEFAELRRAIEEMIDDTEPETASYEQLQRLFETRAERDRLTDDIASLRRTGSTVPPRLLAVRTALSAHLGLPDTALPFAAELIEVAPRHVAWTGAIERVLRPLSLAMLVRSEHLRPVRRWVEEHQLDGLRLVFEEVRPDAAPPRPARSDVSLLHRVVIADGPFAGWLGGQLSERFDYACVDSPDHLDRHDKAVTIGGQVKTSRTRYEKDDRMRIGDRRGWVLGDREAKIEALVERLIGAEAELAAAQEVAADVERRRAASIERRGVLKTVREQRWAAVDVEGAQSRVAELQHQLEDLTSADSELSTAVQTVAARRSERQASAEVLRAAELAVAQAESEQRRLGEEIDRLNASSREEGALDPEVVTELDGRFRARRRHLDRVGIAAVGQQVVQDLRDDSDAETRRANTAAEAIVREATSFNEQWPAAAVAADLTPSVDDRGGYLDVLDQIVANGLPQHEASFLRLLRERSRDMVADLVNDILAAPREIAERIGPVNDSLRRSPFDTDRSLGLKVKTRHTDTVTRFIADLRAVASLGWTEDDLEAAEERFAVLSRIMEQLASSLPADRAWRRQCLDTRQHVTFRAEEIDPDGHVHATYDSGAAMSGGQQQKLVVFCLAAALRYQLADADDVVPRYGTIVLDEAFDKADTRYTRMALDVFVEFGFQLILATPQKLLQTIEPYVGAVTSIENPTRKLSQVSSVVWDDEVPS

SEQ ID NO: 37571 - protein, 365 aa, Aeromicrobium erythreum
MRRRGTDWAVAPPDEPALTILLKPPTEREAMVDQAGAEAWARAWTDPAFVGGLTVEWEERSWRRVGRQRVPVRLVARRPDDVAALAGGRVASEWRLFAARVAEIRGRWGPSEELDATCRRHAREITGWDEDRFLQVLDVAQWLAIHPSDGLRPRQVPVRGVDSKWLGRHRGVLTALTTATTGRPGLGLVDGDPLLRVRCLDSSLCIGGLADLAAPVRQLASLALRPDVVFVFENLETVLAMPQWPGAVVLHGSGYAVDVLEKLPWLARCPIVYWGDLDSHGFAILNRLRSHLDGVTSVLMDEKTLLDHRDLWVIEPRPARGVLDELTSDERAVLARIRAEGDVRLEQERIPWDLALRELRSVSRG

SEQ ID NO: 37572 - protein, 495 aa, Streptomyces regalis
MRSGGCVDFDQVTELMRHPAWVLLRADNAALVLSFCGTVFVDENARGVPETVLESRLDDRLYVLNEEKPGSFPRPADAYLAEWTKNGWLRKYYPPGEDEAHFDATAALEKAVAWVRELPARSFIGTESRLNTIVALLRQMAFGTETDPQTRIDELRRERDAIDAQIARLRAGEVDMLSPLALLDRYQQVESTAVELLRDFREVEANLRELDVRLRHQVATAEGGKGEQLAAFLLDRDEIARSDQGQSFQAFFDYLLSPRRQQELRELLQQVNQLPQLEGRANQSLLKVPFAWLEAAENTQDTVRQLTEQLRRFLVDRSRAEDRRVLALVRSTQRHVTALEGQADLPGMTLDIPQAHLTLPMERRLYMPVERIELDTIAVEESDDAEVDISELFSGVHVDTEALAGHVLEAVAASPSGQANLAAIVDDHPLTLGLAELLAYFQVEHPGLDMIVDPDRTDLLVYPRVHVPGHTQARVPHVTFVRDEGGNAAGKAEQE

SEQ ID NO: 37573 - protein, 196 aa, Streptomyces regalis
MSDALTVPVVHLLKGGVLYQSDAPAVWEQIVSQQAAIGDYLSVIGLDVVIDRAEGYAYVRQQDLDSRDDGAPVPRLVTRHRLSFPVSLMLVLLRGRLADSDADSADPRLVLTRDDLVEMVRGFLPPRSNEAQLVDQIDAHIKKLVDLKALRQTKQTGAYEVRRHIKALVDAQALNDFNDLLATYRDAASTTAKDDT

SEQ ID NO: 37574 - protein, 1137 aa, Streptomyces regalis
MPRQATPAESAGTFGVGPGYRLARLEVLNWGTFHRTTCTFTIDGHCALLTGGVGSGKSTLVDALTTLLLPAHKIAYNKAAGADAKERDLRSYVLGHHKNERVEASDTTRPVGLRDHTSYSVILGVFANYALGAHLTLAQVFYWTSPTSTGQPERFYLTAEAPLSIDTDFTGFGTDITDLRRQLKQRGATIHGSTYTQYGKALLRGLGIPSLQALDLFHQTVSMKAVGSLDEFVRERMLEPFDAKTAVDKIVAHFDALTASHNEVVRARRMIEDLTPIVVACDRYDTVQGEITALDKRRSAVPAFFAQHRHRLLTTRHTALMSGAAELEELQSTRGRQLEQLRGTADGLRRRIDGVGGEKLISLTGRIEELGRERERRRKRATEYGTWLAQAGMDPVPDAASFRERTDQISTARSRAEEQEQQARGKLDDLAIARHGNTIATDALRLEISSLQQQRSSIPAQLLVLRHELATAAGVSDEVLPFAGELIQVRDDEAEWAGAAERVLHGFALSLLVPHAHYDTVSAWVNGRHLGLRLVYYHVPAHTPITTLPDDPALLSGKLQLKSDSWACDWLAARLRSRADYLCAEDLDAFTRATRPAVTRQGLVKGGGGRHEKNDAYRIDDRRNWVLGWSNQAKLDALLAEATRLTRESADITTATRELEKQQRARAGTSAALTLLASVDTYAELDWPSTVADIEQFEQQKKALEAEAGLDKLTAQLQWTEDEIVQSSKTFTTGQEELGGLRRDVQNIADLLGRTTTFLAQCDLDGMAEHEEALRKFLPAADSDEHRLLEMLDDAERHAEARLLRSSGSRHDALRHASSQAAGLMTAFRGRYPVHTAELDNTIESADGYRALHSRLTDEDLPRFEEQFLQYLRTNVIRDIASFQARLGAQEQQIRERIDVINTSLAGIDYNPGRYIRLNAAPTPNKEVREFQHDLRACTSEALSNDADDTYTEEKFLQVKVLLDRFKGRPEHTRLDKEWTARVTDVRRWFVFSASELNREDDAEYEVHSDSGGKSGGQKEKLAYTILAASLAYQFRIDPTAPKPKTFHFVTIDEAFGRGDDPSAHFALDLFQRLGLQLLVVTPLQKLHVIEPHVTRVGYVDRPDKTRSRLNNLTIEEFRARKQVAAQQANQPSKEQS

SEQ ID NO: 37575 - protein, 394 aa, Streptomyces regalis
MTPAEWTRPEHVVETLRRKWTSGRYLTAAAGGHPFEAIGVPLKGPTAADALQHYEQALAWAQCWAPDRNPHLRIQTKSIGGRNGTPSNTVPARVWVDTRDRLWTLLRVTTQVDRFHTLHEQTARQDPGIARWMADHPMKVLAHAADWHRLVRTTCWIRDHDTEAVYLREIDIPGVDTKFIETNKGILAELLDCVLPESRVNTSAPKSDLVARYGFRAKPMYIRFRYLGTSPLPFSELTVRAEELNAHPPNARTVFILENETTYLSLPPVPDAVAVLGSGYAATLLRHLAWLKDVDLYYWGDIDTHGFAILNQVRGLFPHTKSLLMDRATLLGHEPHWGEEKTQAPDVLSHLTPEEAQLAQDLRNGTYRPHLRLEQERISIAAIRVALTQSQREP

SEQ ID NO: 37576 - protein, 470 aa, Mycobacterium neoaurum; identical to SEQ ID NO: 32141

SEQ ID NO: 37577 - protein, 223 aa, Mycobacterium neoaurum; identical to SEQ ID NO: 32142

SEQ ID NO: 37578 - protein, 1123 aa, Mycobacterium neoaurum; identical to SEQ ID NO: 32143

SEQ ID NO: 37579 - protein, 486 aa, Arthrobacter sp. EpRS66
MQPSHRANSLWLQAQQFKGSAAYRLLTAQPWAVAFIRAEFTADRSRVALELFHASLDSFLKQARKSDEQIPQSYSAQDFAEAWVKQGILARPLIDGRFVYEPSAQTLRALRFLADFSTDDSHLNSSRLNTLLSSLESLVHETDPDPEARIRALESQIAQRQAQIEQLRSGDDPAVLSRTTALSATRSLLDLASSLPADFRRMRDGVQDMLHSLREGILDASTAKGVAVGQVLEADRQLRSTAEGETFSGFTEFLNSPDAQQRFRSALAEVLERDFVDDLETTERQILTNLLRELRRQAAEVHASYGKLSESLHAFVQSEDYKQAELLRQAVREAELAISKSTALKPRSGLAPMDLYTPQLMTLSGLGIYDPSEHVAPPPLAQAPEFSEADIVRNPATPQADMALLRASITRHLDGSPGSAVRMDEVFAALDDEHRHLNTIRALVEIGRTNGESLNEADLVNIEFQQLDGSMRTAILPALSFTKEPL

SEQ ID NO: 37580 - protein, 228 aa, Arthrobacter sp. EpRS66
MTTSEAYAAPIAEPLFEGDTGKYSLPLRQLLVRLLRGPYLDGSIDAAAWQLLLDQQQTIADYFSEIFLSLTLDMDRKIAMLAPVQIEQVHTAPIAPRRPLKRDETLLALRLRLLLERQSGSGADAVASRSTMHEILAEHRQSSDRDDKRFAESCDAAIARLQSLRLLTGTELENEFRISPALAMALPLGNIQDIPRYIAAIDANEPAFNLTADENDELAEQTPELVQE

SEQ ID NO: 37581 - protein, 1108 aa, Arthrobacter sp. EpRS66
MSIEMTLPLGGAINPGQHRLSRVQIVNWGTFHGLHDLAVDRAGTLVTGHPGVGKSTLFDAMGHVFFATPRLNESANDAATREDRRTTFSYMRGRQFKTAEGTVYQRPGATWSAIILSYDDGMGNTVTAGAVFDLPDAGLEGQVSKHYLLCEGKVDIAELEHHGPRRFTVSSLSKALAPTEAFDTHKAFIERLRRRLGVESDKAFALLRTLQNGKGLAKGVNQFFRHEVLEEPATLKAAAAAVEDFAHLRGIYRQLDTARAQRDALADVPQQDQDYRQLEQQITETRQLLDSDVQELESQVRQLVLRNDLASHHSELSTLQAEEQELRSRKEQLDDQLQSLEAAHDSAGSASLMLLEREADVARKALSEKENTIRALQQQASDAGLNFEFSATGLDELRANAARTLQQLASITHDAQTVEYEAMASLVNLRKRAETLAEQIRSYQRRASNIDDRSIAARRAIASACSLSEEQLPFAGELMDVAADASTWRLAAEKALHSLARTLLVPGDLLGQVTHAIDQLDGLGRVRWTDISQQPKDAEAGPADLVTKLDFAPGEAGAWLKAKITADYPLACVENDAAMHVHPKAITPAGTMKTGNGTFERDTRGLPASEYLLGFTNESKISELQSKAARLEEKITEAQTSADERSAAKNKVVAKSQLLKAIIADERSFSQLDSSPALEALRRGEQKLGDALSLSGDSSRVRQQIESAKAEAEKLVGDLALVRSRIQDLQLQIQRAEQVLATAQEPRQDWEQAIPLSLRQHQLLGPVLDQVVSGNCPASEQISEAFAEVKLQLGSQMNSLSSKRQEIGSQLSETFRRFARDFGTSHAQTHGTSAEAAEHYTQLHDQIVADGLPHHEAQFREYFANRSYERFSDLLQLLDEERRMISERIKPLNQILAEVTFEHGSILRLEVENAIPVEAGNFRKELKDALQEAYTTKDETTLATSYQALESLVTALSDPALNAWRSTVLDVRQHVVISCNEHKTNGEIETGLEPGTLSGGEGQRFTSFIMGAALAYQLGFASAGFTSFGTVMIDEAFIQANSEYAAAGIRALQEFGFHLVLAAPEDKIDLSRHLGSITDIIKHPGSNISGFVTTGRSPAMATTITLRS

SEQ ID NO: 37582 - protein, 485 aa, Arthrobacter sp. EpRS71
MSRSAMSSADAISARLRDLEQLTKGPAWALTRSAPWVIAVLQASFTRTRPQLPLEEFHADVDAFLEQLRRQDPALGGQQNGKLFGDEWTRKQFLTRRNQSGQIVYEVTEPAARVLAFLDSLSSERSTLNGSRLGTLLGDVEKLANETNPDQSARLEALEEEIHERQQLVEDISSGEFDGLLDDEEAVEAAGNILDLAASLPADYKKMRDRIEELVGELRNQIIEESLSKGATMAQVLEADKRLRQSPEGRTFRSFTAFLEDPQQQLRFRSAIGEVLSRQFADDLSHEDRETLKNLVAELRTQHSHIQRIYGKLSESLNTYIQSDDVRQSVSLRKVLAEAEQAIRSMPYERDRPGLVRGPVLFNAGFESLAMVKLFDPDEFATPPRLADPIAFSDSDRVRSARTGKAKPAVIRTAMAGASTLGDAWENLPAEERHINTVRTLLSMALQTGAAFDRAAWEHIDFEQIDGSIRTAYLPVVTLNEDSDD

SEQ ID NO: 37583 - protein, 315 aa, Arthrobacter sp. EpRS71
MTEEITTTDVTDADDVTDTDGLAEADGVADTDGVADDGVQVEAPEPEPGPAEAEPAADVSHADPFRVTPRDTFVDGAALFPGDTGVIPMKVRHALVKLLKGPYIDGGRDEKLWTTLLDNQLILRSRLSELFLSLQLDHDRKIAVLRPVDPEVIGASSRSSILRQQRALSRVETIVLLRLRLLLDRHVTAQTDPTITREEISDLVANYTPAGQQDALRDSDVVTRTITKLLARQLILPTPLDDTYTISNALPLALPFDNIGDIPAQIEALIAVAADESGTEPLLDLDSDSSREDGDDDADAAPAADGDPTTEEAAK

SEQ ID NO: 37584 - protein, 1158 aa, Arthrobacter sp. EpRS71
MTIASMLPLGELTNPGQMRLALVQVVNWGTFHGAHTMHVDRKGTLLTGNSGVGKSTLFDAMLRVFDARPRSNEAAAQRSGGAVEDKRTTFTYMRGKVGDKAVGDSSASAFQRPGATWSAVALTFDNAAGTKVTVSALFDLPKNGTESSVGRFYVIDSKPLDLEAIEGIAQKRFTKGALESIFPEGQVFDVHKAFAERFRRLLGINSDQALPLLRVIQAGKGLGGSVNTFFRDQVLDAPATLAAADDVVEEFSNLMSIRQRLEDVRQQRDQLAPVPELNKEYAQALLDANRLRELAGEEFEAYKQQLAVTVHAKTLARFKELAQSKAQELAAERTVRDGLSKELRDLELDYNNRGGNAISAIEQSLENAKVGLKLRQQVEDSARKALADAGLNLEWSAEGWDQAHEQAAARSAELKDDSEALKELRFEAFDGHATKKRELAAAQQELLSLRSRKSLLPPSSIENRAAIAASTGIPEERMPFGGELIDLAEGQDQWRPAAERALRNLATTLLVPGEHFAAVTRYLNDNTVRGALRAVDVSKPLAGGALAVEDVSDGDLLTKLSILTSGANADAGEWIRERIALDFAYPCVEDPDELASMDKGLSLGGVVKRNRHTVEKDDRFTSRQDYVLGFDNASKLELVAARVGELENELVKAAELAQSREDSHQGMARQLEALRRVAEDERPWEQVSAAVAADELARIEQRLTDALAAQADLEPLRASIETVREKHQSSTGTAAVLQSEYKALDHKMTTADGLLDAARLKLEQAPPSATTITALEPYFDGVADVSELYELDNLANSVRNKLLDELHAAESRGQATAERLTRMFEAFVRDWGSAISADHGTSIGAAGDFESRYHAIVSDGLPAQEAEFRLFFNQRTHESFSTLLHLLDEERRSITSRILPLNGILSQVNFHEGSFLELDIKQTLPATAKQFKDAIQNALKAKHTRPSRGAAAGSPAEIDDDAELTSRYKSLETLVKRLGSQTPEDRRWRAEVLDVRGHLFIQCKEHREVASKSNKTGTGKAAKRKTEVFMHADTGSMSGGERQRFTAFIMAAALSYQLGIAEQGFTTYGTVMMDEAFVLASEEFAGAGIKALHEFGFQLLLAAPENVIDLSRHLGSVTEILRDKRTNRSGVLTAPVIAGPGEPGAWRSEANPVDIVLR

SEQ ID NO: 37585 - protein, 482 aa, Arthrobacter sp. EPSL27
MSRSALSSADAISARLRDLELLTKGPAWALTRSAPWVIAVLQASFTRTRPQLPLEQFHADVDAFLEQLRRQDPGLGGSANGKSFGDEWTRKNFLTRRNQSGQIVYEVTEPAARVLAFLDSLSSERSTLNGSRLGTLLGDVEKLANETNPDQSARLESLEEEIGERRQLIEDISSGDFDGLLDDEEAVEAAGNILDLAASLPADYKKMRDRIEELVGELRNQIIEESLSKGATMAQVLDADKRLRQSPEGRTFRSFTAFLEDPQQQLRFRSAIGEVLSRQFADDLSHEERETLKNLVAELRAQHSQIQRIYGKLSESLNTYVQSDDFRQSVRLRKVLREAEQAIRSLPYERERPGLVRGPVLFNAGFESLAMVKLFDPDEFAAPPKLADPIAFSDSDRVRSPRTGKARPEAIRAALAGATTLPEAWEQLPAEERHINSIRALLSHALHGGAGFDRAAWDTVEFEQIDGSTRTAYLPVVTLKKD

SEQ ID NO: 37586 - protein, 294 aa, Arthrobacter sp. EPSL27
MTELSHDTAESTVEDADQAADGAAQPAGPQQVGHIHSDPFTVTPRDTFVDGAALFPGDTGVLPMKVRQALVKLLKGPYIDGGRDEKLWTTLLDNQLILRSRLSELFLTLQLDHDRKVAVLRPVDPEAIGGNTRSSILRQQRALSRVETIVLLRLRLLLDRHVTAQTDPTITREEIADLVAHYQPAGHQDALRDSDVVNRAITKLLARQLLLATGLDEVYTISNALPLALPFDNIGDIPAQIEALVAASTDQSGTEPLLELDGDATTPADDDTDDDAGAASPSASNATTEAEDTK

SEQ ID NO: 37587 - protein, 1170 aa, Arthrobacter sp. EPSL27
MSIASMLPMGDLANPGQMRLALVQVVNWGTFHGAHTMHVDRNGTLLTGNSGVGKSTLFDAMLRVFDARPRSNEAAAQRAGGAVEDKRTTFTYMRGKVGDKAVGEGSASAFQRPGATWSAVALTFDNAAGTRVTVSALFDLPKNGTESSVGRYYLIDNKPLDLAALEGIAEKRFTKAALDAIFPDAQVFDVHKAFAERFRRLLGINSDQALPLLRVIQAGKGLGGSVNNFFRDQVLDAPATLAAADDVVEEFSNLMSIRQRLEDVRQQRDQLAPVPGLNKDYAQSLLDANRLRELAGEEFEAYRQQLAVTVHEKTLARFKDLAQAKARELGAERGIRDGLAKELRQLEADYNNQGGNAISAIEQSLENARVGLKLRQQVEESARKALSDAGLELEWTAAGWELAHEHAAARSAELQDDSEALKELRFEAFDGHATRKRELAAAQQELVSLKTRKSLLPPSSIENRSAIAAATGIPEERMPFGGELIDLAEGQEQWRPAAERALRSLATTLLVPGEHFAAVTRYLNDHSVRGALRAVDVSKPLAGGALAVEDVADGDLLTKLDILSTGPSADAGEWIRERIALDFAYPCVEDPDQLAGLDKGLSLGGVVKRNRHTVEKDDRFTSRQDYVLGFDNAAKLELVAAQVEDLQQELAKAAELAQSREESHQGMTRQLEALRRVAEDHRPWEQVSAAVAADELARIEQRLKDALAAQADLEPLRAGIEAARSKHQSSTEAAAVLQSEYKALDSQLSAADSLLDAARARLAQSPPSDATATALEQYFADFGGVGDVTEMHELDNLANQVRARLLAELHTAESRGQATSERLTRIFEGFVREWGTSISADHGTSIGAAGEFEARYHAIVSDGLPAQEAEFRQFFNQRTHESFSTLLHLLDEERRSITSRILPLNGILSEVNFHEGSFLELDIKQTLPATAKQFKDAIQNALKVRHTRPGKTASPPAPGAEADDDAELTNRYKSLETLVKRLGSQTPEDRRWRAEVLDVRGHLFIQCKEHREVQSAKAGQAGQAGKNGAGKAGAVKTEVFMHADTGSMSGGERQRFTAFIMAAALSYQLGIAEQGFTTYGTVMMDEAFVLASEEFAGAGIKALHEFGFQLLLAAPENVIDLSRHLGSVTEILRDKRTNRSGVLTAPVISPGSAPEGTWRSEANPVDIVLR

SEQ ID NO: 37588 - protein, 484 aa, Burkholderia sp. Bp5365; identical to SEQ ID NO: 34414

SEQ ID NO: 37589 - protein, 214 aa, Burkholderia sp. Bp5365; identical to SEQ ID NO: 31770

SEQ ID NO: 37590 - protein, 1125 aa, Burkholderia sp. Bp5365; identical to SEQ ID NO: 34416

SEQ ID NO: 37591 - protein, 415 aa, Burkholderia sp. Bp5365; identical to SEQ ID NO: 34417

SEQ ID NO: 37592 - protein, 492 aa, Streptomyces bungoensis
MDYDRLVALRKQSAAWRLLTANNAALMLSFLNKVFVEQGARSVAGVELVERLDDELFALNERLGHGTFPQSAKAYLDDWAAPGNGWLRKYYPPDSDEPHYDATAAVEKAISWIRSLEERSFVGTESRLNTIFDLLRQMTFGTETDPEARLAELARRRHEIDLEIERVEAGEVDVLDSAALRDRYQQVTDTAHGLLADFREVEANFRDLDRDLRSKIAAWDGAKGELLDEVLGSRESIAESDQGRTFQAFYDFLLAPSRQDELKTLLAEVEAMEAIDEPDPRMRRMPRDWLEAAERTQATVRQLSDQLRRFLDDQVRSEDRRVLELVRAIETHALALRDVPGVDLVAEIDAATPAIALPMERPLYTPLVKTPIDSTSIEAGDEEFAADALFEAVYVDPARLTAAVHDALGARTQVSLAETLREHPLEQGLAELVAYFALPDDGFATVFDDHRQEEITWIGEDDVQQVATVPVVTFARINPGIAWATDQKKEGR

SEQ ID NO: 37593 - protein, 207 aa, Streptomyces bungoensis
MTTPSTSAPQPYTLSLPVNQLLKGPVFRDQHERAWDALVHLSARVKDYVEVMGLRVVIDEMEGYAFLQSMPDDEDAVRDPRMAPPRLIPRRSLSYPVSLLIVLLRKRLAEFDAGADGTRLMITRDEIVEMIRTFLPAGSNEARLVDQIDGHINKMVELQFLRRARGQEQLFEVQRIIKAFVDGQWLADFETNLAQYAASHIVQEKTQ

SEQ ID NO: 37594 - protein, 1137 aa, Streptomyces bungoensis
MPVQSGPADPPIPATFAAAGFRLERMEVYNWGTFDKHVWSFGLAGANALLTGDIGSGKSTLVDAITTLFMPARKIAYNRAAGAESGERSLRSYVLGHYKSERNEETGATKPVALRKPGSYSVILGVFHNAALELTVTVGQVFWLPDANATSPERLFLVADRALSVAGDFADFGTEVRALKKRLEASDVRVHKSFPPYSKDLRRRMGIESEQALELFHQTVSMKSVGSLDDFVRSHMLEPFDAAAMTDNIVSHFDALTTTYNSVQRARAQIEALTPLLADFDTYESLAARIEEADAEQAALRYFMAARTAVLHEAERAELERSLMRLEGEKKAAHEELERLRGQERRWELEREGLGGGRLGELERQIEEAERLRIARERLARHHAHLLEQAGLAPASDQAQFTDRLEEISRAQHDVAADKKETRAALEKLAVQADRLHQQAQDINEDLVSLRSRRSNIPRKQLQVRTLLCQELGIEESTLPFVGELIQVRDEEQTWAGAAERLLRGFALSLVVPQGQYARVSEWINDHHLGTKLVYFRVPNHTPARRTQPAPSTALFTKLEIRGDSPFAEWLAGELERRASHTCVATMDDFRQAELAMTAKGLIKGTRGRHEKNDTTRIDDRSTYVLGWTNQAKIDALLDQASKVHAAQCETADTKRSLEAAHEDAISRDKVLDRLAAMGEFSEIDWPSVVRHIAELTEEKQRLQADSKDLNELTRQLDKIAAEIKQQEAAYASATESWGRIDGERDAAERACDEARVILAEPAATDAQAHFPALEQRLNEARLTCATAKECARAETRLREEGTARKNRWSKEQTRLAQAIASQMRTFRTDYPAETNELDDSVASAAGYRALHRQLVADDLPRFEEQFRTYLKTNVIREIAGFHAQLNNWADEIGERITTINESLADIDYNPGRYIMLQPEKTPNTEIRDFTAELRACTDDVLSGDDSDLYSEEKFHQVQRLIERFKGREGHTDADRAWTRRVTDVRYWFVFSASERRREDDSEYEVYSDSGGKSGGQKEKLAYTILAASLAYQFKLDTTANRSRTFRFVVIDEAFGRGSEESARFALDLFKRLGLQLLIVTPLQKIHVIEPYVSAVGFVDNPTGHHSRLRTLTIAQYRRERLAHALAAGQPATGQDH

SEQ ID NO: 37595 - protein, 394 aa, Streptomyces bungoensis
MAATSTPTWTTPRDVAARLRKRWERGEFLSQLADGTDFDPLAIPLRGPKAGDITQHYDDVLAWATSWAPDKHRHLRIEYRKLGGRLAGVNNAPARAWIDHRDDLFQLLGVTNTVTRYTSLLAAARESLPPLAAWMAEHPMKVVQRDADWPRLQATVRWITDYRGPAVYLRQLDVPGVDTKFIEHHRAILTTLLEHCLPENRINSEVVRTDFAARFRFLRKPVYLRFRLLDGASVAGFRELTVRADEFTASPPGITTVYVVENETTYLAFPDQPHSMVIHGGGYAVTQLAALTWLHGTRLVYWGDLDTHGFAILDRLRRAFPHTRSILMNRDVLLEHRGQWVKEDTPTHQHLGTLSPDEADAYDILVSGEFGSKVRLEQERVRFHLLEEALNELR

SEQ ID NO: 37596 - protein, 486 aa, Serratia fonticola
MSFYEFQARFRRIYQENIAWKLLRTDNAPLILAFVADLFSEENEVPYGRARILLDSILEQCRLQGIWITESPATSYLNQWIQAGWLRELDGQLTKTDACETALRFSLSLDQHNATTTASHLRIVQDAVRDFVISISPNPDRRLAVLELKRREIQREIDAVKAGVIVELSPSQQRERLREIYQLASVLTGDFRRVEDEIRTMDKDIRIQMIEQGASRGEVLLAVLEKEQLLTETDAGSAFEGFFQLLCDQNRTTEFREQLQVILNLPVAESLTAQQKQFLGQLMRELSRESERVFLIRRKTEESLRAYIESGALSEQRAVDRLLGRLERLAIRFKEDQNSLKISTSVRLPTGHIRFYSPDALLLKSPDEQLDTSGVEVQTNGNIPSDDMLDYLDTVSMLEVAQCLLDILQRGGPMTLAALAQHQPLEMGLEELVAWLRVAKAVKATELDEKETIMVTDKQGVQLNAVIPGYLLSAAMFPANLGELAL

SEQ ID NO: 37597 - protein, 270 aa, Serratia fonticola
MSEDKVSSGDLLDRMRRLSQLSKEQRDRAPEPEPVAKQPQERLDLELDLPAPEVAAAEPEVTQADTEALAPEIRRTLVSLLRVGVVLATQKPKLFEALCRHQAVISNHLANMYLRLLLDEPSGVAFVLQQDLEEDEETETISLINRRTLSLYDTLLLLVLRKHYQERERAGEQRVIIDIERIESHLTPFLPLTNNSKADRKKLNSALDKMAERYILSAIRGESERYEITPVIRYVVNAAFLEAMLEEYERLALNAETSLANKEEADDGEE

SEQ ID NO: 37598 - protein, 1128 aa, Serratia fonticola
MAKSEQLTLAGADCGQIRLAELSVYNWGSFHQLHTAVIDPLGTLVTGDNGSGKSTLIDGLMALLLPAGKASFNIAAAQGDRTDRSLVSYMRGSFGSEHDGAKTRVKSKREGPVLTALRALYRADDGSCIVLAALFWTTKHSHALADISRIYLVARRDVALKELLDRFGEGNVRGLNQWLKEDPAITPCGDNFSDYQETYRRCLHMENKNAPALLARALGLKKIDDLTELIRELVLEASGVKDDARRVVDEFADLVAIHERLLDARNQRDHLIRFPDLDRSLLSSEAEIKRLTAQLDALPVYMGECGFRLWDSRIKGLQNQLDALALEIRQLDRDEQETQEQVEKTHTDYINAGGDRIEIIKQELAQAQRQLESVGVKASEYQQEVKALGLETSLREGVFLHNQAISREKLQTISDEKRAAQDGFGALSAELANLQGQLRQLEQELEGIRARPDSNIDLRFQRLRDEMVAALALPREQCLFIGELVDVDPDQQHWQGAIERALGGIRTTLAVPEASFHLVTRWLNQRHTGLHVRVQVVREAVASAQPAFHHDGYLHKLTWREHPYRSWLQHHLARFDLHCVDTVATLDATAFSMTQQGLIHRDQGRFEKKDQHKVDDRRAWQLGFSNQTRIALLEQDIKSSGSELSKTQKALESARIDLDEVNQREALWQKLPRYRWEEIDAPLWQGKVGRIEQQLNQWVASGSDLQQCKARWEEAKQRLATLRGEKDRKNASQGGLDNEKANAQREQDKAGKAAEPGMEDEVRLLLQQRVGTLDDAELSQLAFLAESHRKRLVTAQDKASDRKNNALREAVGSMSSFRTKWEIIAGSWGAGVDSLPEYLQHLEQLEREGLPALVEQFKARLNKHATQSMVRIRQRIDAERDDILERIATINKVLARTEFRAGSYLKLGTKTELYPHVQDFNRQLDKVFAQATSDDHLARYQQLRLVVGILEKASNPVSSGTQESLRLLDARYQMSFFAEERDMANHEVRDVLLSSGGKSGGEKESFAGTIVAASLAYVLTPEGQDRPVYCTVFLDEAFSNTAEAVSRRVLQVFRELHIHVNIITPYKNLNLARESARSLLIAERDAKNHESRLCEVTWAEIDRRLDTARQRRAQNLGIELTEVGQHGE

SEQ ID NO: 37599 - protein, 396 aa, Serratia fonticola
MANEWGRLPEQAYALISKREWLHRGNLKARLLGERPFPIRVSLKPPTNRAILADLAHFQRYVGAWRQFPHQQWLEWEERNYRTLGSQRVPLALVLEDITSLLAYLGKEAQARSDSWVRNMAPLLAIESKLYPVLVNYLELLASLSSIDIQRLQQLIPQLKPGMGNGQYLRALPLQGVDTKFVEQYVRLISDLLDCLHDGAIAAQGGLANWLDVKGNHKGWLTVRPLCAAAQAGLGGLGLLQLTVDELRQQPLPAKHILVVENVQSGLGLPFMADTIAVSGGGKNVSWLDAPWLADKQVAYWGDIDSWGLHVLSDARSKLPQLTALMMDHATVMRYSAMMVEEVSSMTAMPTHLTVEELAMFEALIAGSYPGTRLEQEKLAPDYIQQRLNEWLSSLQ

SEQ ID NO: 37600 - protein, 481 aa, Mycobacterium pseudoshottsii L15; identical to SEQ ID NO: 32580

SEQ ID NO: 37601 - protein, 231 aa, Mycobacterium pseudoshottsii L15; identical to SEQ ID NO: 30759

SEQ ID NO: 37602 - protein, 1130 aa, Mycobacterium pseudoshottsii L15
MRQQRKKNPKVTEQFHLSRLQVINWGVFDGYHSIPFSVGGALIAGASGSGKSSLLDAISLGFLPFNRRNFNASGDNTAAGSSAGRRTVDKYVRGAWGQRSDGGTSRVMYLRGDGTAWSAVAVTYASDSGRTVTGLVLKWLTGESRNDSSSRFVLGDGDLDIEEVCNRWASGRFDAGVFKEDWRFSTKVESQYLAQLYAAIGIRASDAAQQLLGKAKSLKSVGGLEQFVREFMLDEPDSLARLPEALKQIDPLVEARELLAVAQKKRKILGDIEQIQQRYASESSDLGIIDLVDAPMVRAYTDHARLAQCPAQIATLDGTVDQLENEYEDVTRSLNLAKAEADSLNAQISGSSANIAPLQSQVTAAETQAEQVERRRTTYEDMLAAQGIEIPDTADEFWNLREELLAQATELLAKVERNREASTDAEYAQKAARIARDDVAKELKRVEHVGSALPEFALAMRDHICAAIKVDAAELPYIAELLDLRPGQTRWRLAVEKVLRGVGLRLLVPDQHWEKVLRFVNETDMRGRLQLHHVRAKFLGAEPAEPEPNTLAGKLFPVDPKHLCAAEAVDVITGAGDHVCVDTPDVFSRFRRAVTDTGLYKDSDRLAVKDDRRPVKLSEYLYQGDVTAKINALTVELAAAEEAYQKARRTADDIAAQRQQWRDRTAACKAICEQYPQWSQIDTETADGHAERLREQYELLMADNPDIAALNARADECWSQIQKLMTRRGAIQTRRDSLDERRTRLLELQERLSPAFVSEPLTELLQRYAAQLPVALELLDPEPHRDALFAAIKKEREQLRESRRRSYDELARILNTFDTSFPDAIPNDSDDFDERVHDYVALCRHIDERELPEAYERMMRLVTEQAPDAILTLHRVAEQEARRISGQIDRVNTGLAAVEFNRGTRLTLRATPRHLVAVDELTQIVRSISRRIAEVGLGDKQAILDQYAEILRLRNRLASTAPEDKAWTRDALDVRNRFTFDCAEWDVDTEELIRTHSNAGDNSGGEQEKLMAFCLAGALSFNLASPESDNNKPVFAQLMLDEAFSKSDPQFAQQALHAFRKFGFQLVIVATVQNATTIEPYIDSVVMVSKTEPTGGNARPVASVATRTISEFTSLRQEMRKTAERVPAGV

SEQ ID NO: 37603 - protein, 468 aa, Desulfosporosinus sp. BRH_c37
MGLFDVVPSSFFSVLVSGNREVYVDALMLLHQLFKFELNIRVDDYISSLISLLEDKAFVPEDDDEMPESSLTPSGKARLILNRFVKTGWVDKEFLDGSFVEIITPRNYAISVMKLLSELGDKSLHEYNSLVFATYSGLKQAKNEHESQMYEAVLSAKASTERLEYELRRLYHGIRGFLRSIQEQNNVNLLLENHFEEYKRMSDLIYHPIKTMDSIHRYMAPIQNILSDILADEKLMGIMRERAMTIKKYDDGAEAEEEIISAIDYVLDAYQSVGSIINEIDRKHSTYTKSSIEKIQYLMTADQTIKGKLVELLKTYADAKSEDRNALGDMFEKNIRINRQEFVDGKSLYHKSVRSRRVNTTPLPIDQDNTFSDLAMAGMLEQMKNGYPVARIRAYVDRLFAHGAESVRSEDIRLNSDADFILLILAIVRANDRGMTYRVRMGEGRIERNGYRIPNMIISKKEGKRHVE

SEQ ID NO: 37604 - protein, 213 aa, Desulfosporosinus sp. BRH_c37
MWNEQFEALSSYERGEFRRLANYLLSHTYMVRYEYQPSQQMTLPNAEYQMAARLFPVLRDYFTVTGWQLEKDDNYGIISLFNIYDHNRLRIDRFTTLFLYTCRLIYEEQREQASSFHMVKTDTQTVVEKMRMLGLLDKGKTTQKERIEAQRTLGHYNIIQKMESVAWSNDGNEVLILPSILSIISNQGINDMLMELEEMRVDGSDESGQEDSE

SEQ ID NO: 37605 - protein, 1132 aa, Desulfosporosinus sp. BRH_c37
MKKMTKLLLIHWHYFVREMVEFDQLNFLTGKNASGKSTIIDALQLILLGDTSGGFFNKAANGRGNRTLTGYLKGELGDDEDSGFKYLRSGRFTSYIAVEFFDEEKKRSFTVGCCFDTFSENDMQKLFFLYDGAIPDNEFVETGSPMVITALRAYLKEYFAGHHSTTDVGRDFRTNLYGKLGGLRERFGQLLKKAVSFNPNVEIQQFISEFVCDTQQTVDVSRMQENIRSYKSLESEADVLKGRIALLDQILTIHQSFTVHRQNETLYSYLIESSQADIKAIELEAAKDKAKTYDAQLSELTETINAETARLSKLQEERDMMQAKLLNNEQAQALLLIETQIADKEQQISALRGEYDKAVAILSKCVSSWRMSSSAMLQKIGSIEKALLDPLLVSRINDLYSEGQAFLNRIESLPRIDSAVILETGQKGLDEYAALADLLKVHSIELASRMGEEQGTLAERRTMLQQEKESLESGIYRFPQDVTDLKEAVSSRLRLNTGKDVKVLIVAEAAEIKKDRWRNVIEGYLNTQKYYIIVPREHFQTALRVFDAIKRQRQLYGTGIIDIEKMKHIKPTADPGSLAEEIETDEPDVRLFLDYTIGRVKKCDRVGDLRRFRTSVTDEGMMYQNFVVRAMDPKRWSKPAIGQGAIQRRLEDVKKEMDVLVQQIAACATIKTGLRLSSTLVALSQAEIEHAISSAKGVSSVKDLENDVKSLRESLATIDKSAVKALKDRINTLGQMIKELGNRLDTHKDDRSTQNERLRVCRDETIPKLTGELETLEAELTRKYSEEWLENTGRLRYQRELSSRGNAEDINRAFPRELSRSTNARVTMWEDLLNLRRTYNEKYIMGYDIKAEDNEVYDNAWLELSENKLPEYLTRIEDTRKKAFEQFQEDFLSRLQNNINDAKRQIDGLNSALSGSSFGEDTYRFRIVPKPEYKRYHDMIIDPMLIEGGYNLLSEQFNAKYKEEITELFAIITNEGAPAKVREHDDYEKRVQAFTDYRTYLSFDLEVVNRDGETQRLSKTLGKKSGGETQTPFYIAVLASFAQLYRIGRDKNSSTSRLIIFDEAFSKMDGERIVRSIELLRQFNFQVVLSAPPDKIGDIATLVDRNLCVLRDGKHACVRSLDPKRLEEIEYE

SEQ ID NO: 37606 - protein, 104 aa, Desulfosporosinus sp. BRH_c37
MSDKIQRQLLSALLDKYERSSFFREGTQPTRRIMLKLYDNGQSDFPQYDIEQSEKRVLVNRVVSSMAEKRLVFYQWMKGEENHIIAQIWLNIENLPMAYESVGR

SEQ ID NO: 37607 - protein, 490 aa, Gracilibacter sp. BRH_c7a
MAQQKTELLDHMSFEFLELLRKKNPAWRLLASPQAPFVAAFLYKEFIAQNRRQIAEQELISRLESYIDFLSQGRSDTLFPRTGREYLDAWANDEHGWLRKFYPQGQDEPHFDITSLAQKAIEWLLSLRQQAFIGTESRLITVFELLHQIVERSETDPELRLAELERRKAEIEQEIIRVQNGQVELFDETQIKERFWQAMTTAREILADFRAVEQNFRELDRGMRERIATWDRGKGELLESIFEEHDGIAQSEQGKSFAAFWKFLMSSSYQDDFQDTLDKVLQLRPVQEMGISRNINHIHYDWVNASAHVQETVAALSQQLRRYVDENFLEEERRINQIVREIEGKAVSVRNNQPKAWEMEIDGVKPEILLPLDRPLFSPPQRPEIKDDTVDAGDEDISAEALFSQVYVDKEKLTDRIGYMLQTQDRITLAQIIEYYPLELGLSELITYLVIAGENPQAAFHPEDLEKVFWEDETGKKRVASIAKVIFQRS

SEQ ID NO: 37608 - protein, 199 aa, Gracilibacter sp. BRH_c7a
MNNLDDLAFSRALVALFKNVVFKEEEQEHWEIITKKKNDIEDYVSKIGLTLIVDEMDGYCYLKQRSYGEGEEAIPRLVPRHALSYPVSLLLVLLRKQLLEFDSTTGDQRLIVTKQQIAERMSIFLKDTTNEAKLVADIDKHIERVEKMGFLRRLRGSEDRFEVQRILRSFVNGEWLNNFNERLEMYQHYANGGKLKEGE

SEQ ID NO: 37609 - protein, 1135 aa, Gracilibacter sp. BRH_c7a
MSLFNLEQDDPGMLFGKTPGFRLHKLEVYNWGTFDGKVWTFSPSGETALLTGDVGSGKSTLVDALTTLLVSPRKVAYNKAADSSAKERSINSYVRGYFGQKRSEAGAGQPDSLRDINHYSVLLATFQDQGLSQCITLAQFFWFQDPQKLPARFYIVADREMRISQDFSKFDKDVRLLKKRLKNSSGVQVFEDYTRYAEFFRRKLGIEQEQALDLFQQTISMKKVEALTDFVRANMLENPNTADDVEKLIKHFHDLNSAHEAVLKAKKQIQLLNPIVEQGNRCRELENKEKILGKARLALNPWFAEQKIELLTVKITRFEQNLILATAAREQAETVKGQIEKNIKETERAIYANGGDAIEALKIDIINSKQTLERIRKDFLNYDNQAKKLELPLPDSLNIFIDNRRKLPELKNAEEQLQGLLQEDFVTAATEGDSAEKEANKIAAELESLRSRKSSIPRNYIEKRKQLCQSLDIAEDELPFVGELLEVRADEESWEGAIERLMHNFGLSLLVPENHYQSVMQWVNQTSLGMRLVYYRVQHEALQPVSGQPNPLAVSEKLNIKPNTPFGVWIVRELRQRFAHICCERMEQFHREMQAITKAGQIKTGGRRHEKDDRYKINDRRRYILGFSNQKKIAALEENKRGLLEEARFYQEEMTDIRKKQQISQERINAVAVLEGIDDFAGIDINSKEKEITEKEERRRKLEQESDVLQGLQHQLNELEDKKKAQENVLNKARKDETTLETKLEGLIQDKEESAKIAGEASSTMKEQEYPFLDKCKGTALKNIRLTLDNVKTLERDYQDWIERERNILTEEINKLRSKIIRSMSDYNNQYSEETKEVDSSIESLPEYERMLAQLENDGLPKFEKRFKQLLHENAINQIALFQAKLKQEQETIKTRIEQINGCLSTIDYNEGRYIRLEYEETYDTDIKDFRMQLKACTEGALTGSDDEQYAEAKFLQVKAIIERFRGRPNQTESDARWTKKVIDVRNWFLFAASERWRETDEEYEHYRDSGGKSGGQKEKLAYTILAASLVYHFGLEGQDTRPQSFRFVVIDEAFLKSSDESARFGLELFKKLDLQLVIVTPLLKIPTIAKFISHVGFVHHDDVKHQSMLRNISIEEYELERKAREVARYVHQVV

SEQ ID NO: 37610 - protein, 389 aa, Gracilibacter sp. BRH_c7a
MSTKWSDPQWIREELRKKWDSGRILRTMLDKDDLFPFRMPLKRPKSSEVNENFAEISHWIKRLKEHSKQQIGYGYELIEKEMVHRQSGRNLLPTHAVIPTVQDSLRLLKKEREAEKFLEIVRMIQTEWPVLVEWIGKYPHKVLAAGDDWIGILAVLKWFFLHPRCGLYLRQLDIGGIDTKFIEQRKGVLAELLNIILPKDAIDLNAPSFELRYGLRVKPLPVRLRLLDQECYIQNLSDLTIPVEQLAALKPEVSRVFITENEINGLCFPDAKNSLVIFGLGYGVDVLKSVTWLREKEIYYWGDIDTHGFAILDQVRSFLPRTRSMLMDESTLLDHRDLWSVEEKPFPGQLIHLTADEHQLFCSLQNNTWGKGVRLEQERISFQRVKDAI

SEQ ID NO: 37611 - protein, 452 aa, Pseudomonas aeruginosa; identical to SEQ ID NO: 37422

SEQ ID NO: 37612 - protein, 245 aa, Pseudomonas aeruginosa; identical to SEQ ID NO: 33339

SEQ ID NO: 37613 - protein, 1101 aa, Pseudomonas aeruginosa; identical to SEQ ID NO: 33340

SEQ ID NO: 37614 - protein, 386 aa, Pseudomonas aeruginosa; identical to SEQ ID NO: 37425

SEQ ID NO: 37615 - protein, 450 aa, Pseudomonas aeruginosa; identical to SEQ ID NO: 31994

SEQ ID NO: 37616 - protein, 249 aa, Pseudomonas aeruginosa
MAGVFDRIAGASGADETELTVEPMALDDGMDDEQPLMSAAVQVDERRTPQRVREAVQEMLKYGLLEESHKPNLYRSALSNIEAVDRILEPLDLAMGVDEVRGLVFVIVRQGEVAEQDDWSHPLVRRQRLNLEQSLLIAILRQQFIAYEQESGTGASQASVVVDELIPQLQVYLGELGSEAKERNRIIMLLDQLKGHGLVSALDAHDRVIIRPIITHLANPENLQALVAWLREQVEGAATPAADGEEDMA

SEQ ID NO: 37617 - protein, 1101 aa, Pseudomonas aeruginosa; identical to SEQ ID NO: 33001

SEQ ID NO: 37618 - protein, 393 aa, Pseudomonas aeruginosa
MKSPTDIGRSLARQWQRSSVRLDRLLNSASWPQSFNIGKPSARLFSDNIRTVLRHVENWRSVKVGKVDWEPVSYRAGLAPISLPMRWHLRSPSEWIAATDDPSVSQEYAQLEYLVEQVDSSFHALLVAQRSLWLTKPSEEVIATAQLATQLSPGCAQGRPLRLLAEHGVDTKFFERNAILLTKLLDERFEGAASEQGLTTFLDAFEETSHWVLVVPLQPELLPFKRIRLTTSELAETSLPGSRLLVVENEQCVHLLPETLPDTLAVLGAGLDLQWLASAHLAGKQIAYWGDMDTWGLLMLARARHHQPAVEALLMDRELFDQHSLGSAVVEPAKAQELAPEGLMTDEAVFYRYLLAQERGRLEQEYLPRRQVEQAISKWFGESVAPAHPERTA

SEQ ID NO: 37619 - protein, 450 aa, Pseudomonas aeruginosa; identical to SEQ ID NO: 32505

SEQ ID NO: 37620 - protein, 249 aa, Pseudomonas aeruginosa; identical to SEQ ID NO: 32506

SEQ ID NO: 37621 - protein, 1101 aa, Pseudomonas aeruginosa; identical to SEQ ID NO: 32507

SEQ ID NO: 37622 - protein, 450 aa, Pseudomonas aeruginosa
MEDALQALSEMLAAYASQELYEIDPDATHLQAGRELREWIKRRLVVEREDRIYATDALESAIQFVDSLDSRIMTSTASRLSVVQREIENLETGLNPSPTGRIASLRRRIQDLEHELAQVEAGHVVVLDEAQAIEGIREVYNLATSLRADFRRVEDSWREADRALRHSIISEQSHRGEIVDRLLDGQDALLNTPEGRVFESFQQQLRQSAELETMRERLRTILRHPAVPKALNRPQQRELRWLALRLVRESQAVLQARARSERDVRGFMKTGLAAEHHRVGQLLNDFFNLALSVDWQRQSERRKSACLPPVGVAITGIPAIERLRFKTLDDDDTGELDLSLKPAGLEQIDDDFWDAFDGLDREELIHNTLAVLVEQGRPVSLGELASLLPPAHDLETFALWLAMAREAGIEVLTEERQLVELVDEDEQRWRFNLPYIGLDHEALKDIDWEL

SEQ ID NO: 37623 - protein, 249 aa, Pseudomonas aeruginosa; identical to SEQ ID NO: 32988

SEQ ID NO: 37624 - protein, 1101 aa, Pseudomonas aeruginosa
MKQALLWRDSETFILTSIELYNWGGFQGYHRAEIDPSGTAVIGPTGSGKTTLVDALMTLLCANPRYNLASTGGHESDRDLVSYVRGVTGPGDGGVEQSHIARQGKTVTAIAATLERDGAQVRLGAVLWFEGTSSSASDLKKLWLLSESPEQTLEHWLSQHHAGGMRALRQMEKDGTGLWPYPSKKAFLARLRDYFEVGENAFTLLNRAAGLKQLNSIDEIFRELVLDDRSAFERAAEVASSFDDLTDIHRELETARKQQRSLQPVADGWERYRALQEQLQDKQALEGILPVWFAEQGYRLWLAETNRLEKEHKQAELDQAQCRSQLEIQKGVVDQHRQRYLRVGGAGIDQLRGRIADWVRECDRRRLKAEQYQRLAKGLGLADELSAAALEENQQQIAARLEILAQQITGARQKAFDAGLVQQELNGCLQSLQQERAEVERRPGSNLPGNFHAFRSDLAQALGVDESALPFVAELVQVKPEELAWRGAIERAIGSHRLRILVPQGSSQAALRWVNQRHNRLHVRLLEVKEPSSRPVFFDDGFTRKLTFKEHPYREAVKALLVDNDRHCVESPEQLRHTPYAMTAQGLMSGKERFFDKQDQKRLDEDWLTGFDNRDRLAFLTEQIREVNEQLVPAKLALDAAQGDVGQLESQASLLQRVEELQFEEIDRPGAELQLASLCAQMDTLTRPDSDLAMIKAELDEAEALQESLDQQLQQRIKQCVQLKTQFDQAASATRRAYHGAEKGLSDTQRELAQMHFPTLTADDLDDIVELERKHTRELQGQLKTLSEKLGDQKTELAKRMSDALKVDTGALAEVGRELVDVPRYLERLRVLTEEALPEKLKRFLEYLNRSSDDGVTQLLSYIDHEVSMIEERLDDLNSTMQRVDFQPGRYLRLVAKKVIHESLRTLQQAQRQLNSARFIDDEGESHYKALQALVGLLKDACEHSRNQGAKALLDPRFRLEFAVSVIDRAGNNLIETRTGSQGGSGGEKEIIASYVLTASLSYALCPDGSSRPLFGTIVLDEAFSRSSHAVAGRIIAALREFGLHAVFITPNKEMRLLRHHTRSAVVVHRRGVESSLVSLSWEALDEHHQQRIKAMHEVAH

SEQ ID NO: 37625 - protein, 385 aa, Pseudomonas aeruginosa; identical to SEQ ID NO: 32990

SEQ ID NO: 37626 - protein, 450 aa, Pseudomonas aeruginosa; identical to SEQ ID NO: 32527

SEQ ID NO: 37627 - protein, 249 aa, Pseudomonas aeruginosa; identical to SEQ ID NO: 30516

SEQ ID NO: 37628 - protein, 1101 aa, Pseudomonas aeruginosa; identical to SEQ ID NO: 32529

SEQ ID NO: 37629 - protein, 381 aa, Pseudomonas aeruginosa; identical to SEQ ID NO: 30518

SEQ ID NO: 37630 - protein, 450 aa, Pseudomonas aeruginosa; identical to SEQ ID NO: 32527

SEQ ID NO: 37631 - protein, 249 aa, Pseudomonas aeruginosa; identical to SEQ ID NO: 30516

SEQ ID NO: 37632 - protein, 1101 aa, Pseudomonas aeruginosa; identical to SEQ ID NO: 32529

SEQ ID NO: 37633 - protein, 381 aa, Pseudomonas aeruginosa; identical to SEQ ID NO: 30518

SEQ ID NO: 37634 - protein, 543 aa, Bifidobacterium longum subsp. longum
MADVMRELERLRPVYETGVLRLLLRQNAMLYVSLLRSTFDPLTGELPRETVEERFAQSLNALADAGEYAPREDQTFAEAAHQILADLTREGEGDYAWLANSHDAASHRFLYRLTARAHRAIEALSRLEDESRALSGAQANSIIMEIEHARMQLTADPGERIKLLNREIKERKHEIKRIQQGKQHATLSEAQVEDVIAVIHNTLRGVPIDLRELVLDERDNGDALRRRMQAGDISVDENLTRYHDEYRRSFSESDSGRRFEDAFQVIITDEGRQQIDEALRAIAKTPYLAGESGVLLGQIRDELARIYDGIEAVRRQMRVSDEAISRLVRQQTDTRYRTMLTRLNRLYARLNADAKTHMGDASRPYDTATSDALFAPLPMRPAKSMTRATAPGLSDLAAEAPQPTPVADLRDMVNSGGPRLLRMVSLIRRNPVTVDRSDDRPGATLVDIAASFNRLPESERRESEIVGFLGGLGAVSGNAIADEPSTDGVGVGVDSDIATEPAPAQRGDTATWHCVSIDGEPRNWITRPVLADMDELSIIVEEG

SEQ ID NO: 37635 - protein, 224 aa, Bifidobacterium longum subsp. longum; identical to SEQ ID NO: 30393

SEQ ID NO: 37636 - protein, 1182 aa, Bifidobacterium longum subsp. longum; identical to SEQ ID NO: 33527

SEQ ID NO: 37637 - protein, 394 aa, Bifidobacterium longum subsp. longum; identical to SEQ ID NO: 31243

SEQ ID NO: 37638 - protein, 465 aa, Marinomonas fungiae
MLFTHLPDEIFQALSGSNKALIEAVLFDLSDVFYDHAEDPIKDKSTIIEAIEDSLHKLDTLAWHDDLKDGFDSPKTIHEYALRIYHRLVNTGWLIEEQELYRVSVLMSPQVSMLLRSLVEISRHGKRNYGATVLSILSNLESVAKHPQERGVTLSQTAEAARDFSAHLNQILLGIRSLQRELFNKREPKEIVAGFFDLFVEGILIADYKTIKTSNNPFRFRRQILELTQSFLAEANLMGNIAQCYADQQLISVDKALAAVEKDCRDIIQTFTTIDQRLDRIDEYRYRLEKRAADTARYMDSSRPGLANKVAGIIADVAKFEKLPILKNMVSVKAVGVESCAQPAKRREPPPPRVITQVEVSQAAIAFRDRQRRFHEARQVSVAKLQSYLDRQLLEKPAMHILDFTIESVEDFVCFDHLRYIGSLGVNAKRIEKSFDVIFTDQYINVHEFVECREFNVVRRSKSHA

SEQ ID NO: 37639 - protein, 231 aa, Marinomonas fungiae
MLRELKRVVEESGKDPQEFQQTANYLLANQFVSAFKHGQRRHYLLVEMYQQYFSNLFDALGMKLYVNENERLAGVLPVEREAFVRLKTDETLFLLVMRQIYEEKVENFEIDNGFVSTNSVAILERYVQLVKREIPTETRFKDILTLFSKQGVIIRGKAYDEDAKNLMISITPVVRLIVTEAYLRQLESFNGSDPDEDEVIDEQTEQGLDGQENGSQAAVDPDPETQEEAVQ

SEQ ID NO: 37640 - protein, 1149 aa, Marinomonas fungiae
MKKLNRIVLVNWYLLGAEEINIRGNTAIIGPTGSGKSSLLDAIQTVLTGASKRHLNYNASANDGKASGRSIRSYILGMIDSGQASEKVTGVQTRQDAICYLALVFEDSNTGKESTVGLCLSASLATPEEDILGRFVLSNYGVRREDFIEVLGEKQYQAKPWQEVREAMKKVCLDPFIKSGSASATQYMNRYLEELSPSAEHLITLDSFLKNFKNALKFVPIASPTRFVQDFVLAEQPLQVGAYQKSLLEYRQLEAKTQEVAKRIDDLKAIQVECDKKHQQEQTVVNYQWIATEARFDQLGSKQDEIQDQYENFKEREEEIDEEIVAQANLLKQLQTQLVRLEQQYEHSDVGLKLQQLEQNKKLLTLEGQEDRKLVIQAHQVLQLLGALQAFEDVLSQDIRNLITEAQGLAGSIDSSGNILGSAKAVSRLLSSINNLLDEGKGALFQQRTQLNRNILNLKDECRQLEADVKSLKGGTTPLSPNVKRLIELLDHANIKATPLSHLAEVTDHKWQDAIEGYLGSQREALIVEPDDAEEAIRIFRAHRRQLMGCRVIDTTQTRLWLNRGDNNSVLRFIRCNNDHAQAYLNRRLGGIKPVETERELLREDSAMTADGMLKLSGTISTIRFLPHMMVGINTEGMRQSREAQLQQLSGELMDYMKTDQRLEQADSMLGRIMASNQFDPQSLQDAGIANTRVAQDLADVEAQIAALQQRDDTDLQERIESLKERISGIELERKKLDRERQQIAEQYGSLNTQKTQLSEALSALDEERTRITSNPLFNAEYASERYDLLENSMVNGGAIYKEAISRSEKAMEKVKMFDQKVRKEVADHYAKYHNSSLDDDIQLDYLESKFEEFEHYVTHQINVLNDTELAKYAKRAELARREAEETFRSDYVSKLKDSLDQVALIIKELNHSLKRRPFNHEVYQFRYYPNGDMKDILDLVAKFSSMDQANVGGLFDPEQTGDPEHAKAIALIQELITDDEKQKDLADYRKFYNFEVDILDLEGQKKTTLSQRIQTGSGGEHQIPFYLAIAAALSTTYRLHETMEGDIVGGFSLAMFDEAFNKIDMAKTSTCMGFMRDIGLQVIAAAPDDKRAVMAANMDTIISVWREGGAVSIDVAYPQQRGQALLSGDHELDNDGPQQNLTETAEAE

SEQ ID NO: 37641 - protein, 71 aa, Comamonas thiooxydans
MTLAELAAAMPPAGHDLETLALWLSMAREAGIALQDAQEQIDTQDGEQSWRFTVPRVALDAAQLASIDWEL

SEQ ID NO: 37642 - protein, 247 aa, Comamonas thiooxydans
MNQEPDIFDLLASQPTAQQQDLPQKEELPAHEYIELEADIQLRTPQNQRKALQFLLANGWLEETSKPTLFRLIAAQSAQLDRMLEPLDLRVQVDDVRGLAFLAVVADYENDDVDESEQDDWTHPLMRRQRLNLEQSLLLAILRREFLQREQESGTGVAVRITVESLLPQLETYLGATGSDMQERRRLNQLLDTLRNHGMVSEADAQDCITIRPMIVHLLNPENLQALLLKLREVADGAASDSPNNAP

SEQ ID NO: 37643 - protein, 1094 aa, Comamonas thiooxydans
MSTEASYILQELHLYNWGPFAGRHQANIDAANSAIIGPTGSGKTTLVDALMTLLCANPRYNLASTGGHESDRDLVSYVRGASGQGNESGDHIARSGQCITGIAARLERGTAPFAQSVLLGALFWFDGSSQSAGDMQKRWFFAQGQGQTLNLWLEELHNGGARALTRLTKDSDDLQMYTSKTSYLAKLHSFFEVGANAFTLLNRAAGLKQLNSIDEIFRELVLDDHAAFDDAQKVVDGFAELASIHADLELANMQFVSLLPLRDMAAREQQQSLHLQHLQTLQQQLPHWFATQGAQWWLQHVNQLQTQVEQRNQELHSALAYVDTARQHEQDLHGIYLQAGGADIATLEENIQLAHKELGRQQHNLAQYLKLARNLGLDPAAGAQSLVPHQAMATAALRQLEAQQQQLQADAEAAITAERNAHQIWKDLEEEHEAVRQRPGSNLPMEFQRFRAELAAKLDLPEDDLPFVAELVEVQKNQQHWRGAIERAIGSHRLRILVPPKAMREALHWVNHRHNRLHVRLLEIRATTASASFLSDGFACKLNLKPQTPATQLHALRQLLADLDRHCVADVETLQNTPHAMTAQGLMSGRADQFDKQDHKRLDQDWMTGFDNRDRLAQLLQQKEQTAQDWKALEAKKTQKLQAQNHARSQRQLWHSLQALRPEDLDTTTTQQQLQQKQHQLQALLSPQSDTAQAKQQWMDAQLQTKNAEAHLRELQSAQTQDETLLRTAHQKHSAFEDRLRNAAPVDEDFPQLLRKQLGKGLPVLDGDNLDAHERDAGNALQGKINEAQKKLAGQHNEIIRQMGKTKAEDRGALENHAPELEALPHFLQRLQVLEEEALPQKRQRFQEYLNETSQQGVDTLLNGIAAHVADIEDRITKLNETLKRVDFQPGRYLQLEPRSVVHQSLQSLTKAQAQLRTERLRDDGGSSHYRALRAIVEMLQEHASNRRSKAAQALLDPRYRLQFAVLVLDRANDQLLERRTGSQGGSGGEKEIIASYVLTASLSYALCPTGSSRPVFGSIVLDEAFSKSSQAVAARIIQALREFGLHALFVTPNKEVRLLRSYTRSAVVVHRRGAQATLASLRWEEIDAFRKAV

SEQ ID NO: 37644 - protein, 394 aa, Comamonas thiooxydans
MKSPQDLAARLAQQWQSADWRERQLLGGASAWPVVLSIGQPTAQVFMGDSALLRSHLQQWRGIEQQGPGTVQWQARRYRGSNDVIEVPTHWQLARPSEWLATIQQLKAPGHAQIRADYTRLSAIIKAVQHSGLQRLLVRRLTQWQSIPSSDVIAAAQMALQLEPGCAQGKPLRALSVQGNDSKFYERHAGLLTTLLDERFDKEVSRQGLTAFLGALAEDDHWLLVVPLAPGLLPFARQRVPASELQATPLPANRILLVENERSLHQLPQPLEDTIAILGAGLNLNWLDAPWLRERSVAYWGDLDTWGLAMLVTARQHLPHLHALLMDQTTFDTHSHLAVTEPVHAEKFPALPPGEAALDAHLRRLERGRLEQEFLPASLVKQAVRAWADQAATI

SEQ ID NO: 37645 - protein, 490 aa, Tepidiphilus thermophilus
MDHATLSLLRERHPAWRLLASPYAPLVASFLHRVFVAPNVRVMPEVDLVEALEDDLYALREQLGPDAYPKSALDYLNDWAAPDKGWLRKFYKPGTDEAQFDLTPAAEKAIAWLQTLTERPFVGTESRLLTLFALLEQISAGTEADPAKRVKELRKKRDALDAEIARVLAGEVPLLDDTAVKDRFLQFQHLARELLADFREVEHNFRQLDRKVREKIALWEGAKGELLDEIMGERDAIGNSDQGRSFRAFWDFLMSSRRQEELSERLDRVLALPAVAQLAPDPRTRRVHYDWMEAGEHTQRTVAMLSQQLRRFLDDRAFLEHRRILDLLHGIESKALALRKAMPAGTVMHIDAMGADVELPFERPLYTPSEKQRLADLALVAGKDDIDTARLFDQIVVDKARLRSAVQRALRCQPQITLRELLEAEPLRQGLAELVAYLELAHAADAGDAPNGWRVVVDDAHPETIRWQGSDAAGETVMRTAHLPRVIFTR

SEQ ID NO: 37646 - protein, 226 aa, Tepidiphilus thermophilus
MMSDALNDDSTMDVPSSAPPAVPELSRLMVHLLKGVLYRDDDERLWESLLRLQARVREQAAVLLLELVLDEAEGFAFLKSRPDPDEADGAPRLPRLIARRPLSYPVSLMLALLRKRLAEFDAGGGDTRLVLSRDEIAELMRVFLPDGTNEARLIDQVDATLAKVVDLGFLRRLKPAAGSVQDRGHYEVRRILKAFVDAQWLAEFDARMEGYRTALSSGAAKEAGDA

SEQ ID NO: 37647 - protein, 1145 aa, Tepidiphilus thermophilus
MLEVSTLDLDFVGDDSRVGFRLQRLEVLNWGTFDKRVWRLELDGRNGLLTGDIGSGKSTLVDAITTLLVPAQRVAYNKAAGADARERSLRSYVLGHYKSERNEVTGTARPVALRDASSYSVILGMFRNEGYDQAVTLAQVFWLKDPQGQPARLFVAAERELTLADDFSGFGSDITALRKKLRGAGCELFDSFPPYGAWFRRRFGIEHEQALELFHQTVSMKSVGNLTDFVRSHMLEPFDVGSRIEALIRHFDDLDRAHQAVLKAKRQVDLLTPLAEDGKRHQRLSAEIQGWREARDQLRPYFARQKGELLERRLGLLAQDAARLDAQIERLDIQRETERIELGRLERALRDNGGDRLEELAAEMRRLEQEKIQRQQKSDRFQTLLARIDEAAPADEAGFLAQQQNIAQRAEGLRERIADLDNREREEDFAFRKGREEHAVLSDEIDSLQRRKSNISAAQIRIRDALCATLGITEDELPFAGELIQVREDERDWEGAAERLLHGFGLSLLVPEAHYKAVVDWVDRQHLGARLVYFHVRPRKAAPGVALHPQSLVKKLAIKPDSPHSEWLGQELRQRFDVACCDTGEQFRREARAITRAGQIKDPSGRHEKDDRSAISDRSRYVLGWSNADKLRALHDRRQRLEEKLAMLGQRIGEIQAARNELRGRLDALSKLEEFTRFADIDWMSLVRRIGDLTEERARLEAASDALQELARQLEAVQGRLTEVERQRDAARDKRSAVATRKEAAQTLCDQARTIWADAPLTETQIARLDAWRAQALGEHQLTVESCDNREQELRDWLQARIDMEDKRLARLTERIVNAMRGFKEEFKAETAEMDVALAALPEYERLLASLQSDDLPRFEARFKELLNVNTINEIANFNAQLARERETIKERVDFINQSLAAIDYNPGRFIKLIAQPSPDAEVRDFQQDLRAATSGALTGSADEQYSEAKFLQVKAIIDRFRGREGLTDADRRWTAKVTDVRNWFLFSASERWRADGAEYEHYTDSGGKSGGQKEKLAYTVLAASLAYQFGLEWGAVRSRSFRFVVIDEAFGRGSDESAQYGLRLFQQLNLQLLIVTPLQKIHIIEPFVASVGFVHNEGGRDSRLRCLTIEEYRAQKAGGTAAGTASGAADGMAAAGAAEGDAAP

SEQ ID NO: 37648 - protein, 410 aa, Tepidiphilus thermophilus
MSWTTPADLRAQVQRLWERGELLRATVTDAMAWPLRLSLKTPSASDLSDRFDAVRDWVRAIAEIPQVRIEWRERNHRVQGMQRLPAAVWLDTVQNALALIGKARQAQRFEALWQQTAAAQPMLLAWLSRRPIQALELADRWERLLAVVAWLQAHPRPGVYLRQVDAPRVDSKFIETHRGVLAELLDLALPPEAIDAAATGTARFARRFGFLDKPVRIRFRLLDPALPSLPGCQDVPQQLPDLTLDAASFSALHLPVARVFITENETNFLAFPPVTGAIVIFGAGYGWDALARTDWLHRCQLFYWGDLDTHGFAILDQLRAHFPSAASFLMDRQTLLAHRMHWGEEADPARHDLPRLTPDEAAVYDDLRFDRHQPRLRLEQERVGFGWLCDRLARIPLTALPPEPRLPRQK

SEQ ID NO: 37649 - protein, 453 aa, Clostridium sp. C105KSO15
MILMNEIPDRFWGLFRSINRSTYIEALLKINEEYEYSNYFLSREVCIQVLEEYFTAKRLVIWQDELEDEADVLEPTAVRVLNWLLRAGWLRKVDDYASMTVNIVIPDYAAVMIEAFFKLTSDEEDETQIYIQNVYAILFSLKNDPRAGVSLLNTAYINTKRLNKTLQDMLHNMDKFFASLLEKKAYGDLLKEHLEGYVDEIVKKKYHMLKTSDNFYLYKNDIKRWIGSMREDTEWLEQMSHRSGQKVTAADIVEKLDQIERGFDDIEHRIANMDKEHSRYIRATVTRLNYLLNQEDNMKGLVIRLLNHLSETEDPDEAIKDVGGLMNLSQLSILSEKSLYKKRRARTCFKENLMPEEESAELTMEEVLNLNRLKSRYSRKEIESYIEAHLENGRMEVKEDTVNSPEEFEKLILAYDYSTRRKSMYQVEEQETELIDNGRYRYPKLVFVRRKES

SEQ ID NO: 37650 - protein, 216 aa, Clostridium sp. C105KSO15
MTYEESAGLISQIPYFDVLGQGEKEEVRAGLRLLLQQTFVLEHKYDKRTNRFAYNPEFKICNKHLEFIRAYLAVSGVSVLENSQLGIIYIQGESTVGDKLPKLATLYLLILKLIYDEQMAAVSTSVNIYTTLSEIHEKLGNYRLFKKQPSPTEIRRAITLLKKYQILEPLDILEDLDGDSRMIIYPCINVVLFGDDVRALLEALGEGDEDDDEPEI

SEQ ID NO: 37651 - protein, 1126 aa, Clostridium sp. C105KSO15
MTNQKFEALSRILLNNWHYISRKTLSFNQEINFFTGHSGSGKSTVIDAMQILLYANTDGRGFFNKAAADDSDRSLIEYLRGMVNISENNEFAYLRNQNFSSTIVLELKRTDTGECQCVGIVFDVDTTTNEISRKFFWHKGPLWENGYRTGSRTMTIQEVTAYLQTLYPKEDYFATSHNERFRRQLYDVYLGGLDSEKFPLLFKRAIPFRMNIKLEDFVKEYICMEQDIHIEDMQESVMQYGRMRKKIEDTVVEIGYLNGMREKFSAVREKEGEIRKNTYFFRKMEILDYHARIQALTDKSRLAREDLDRQEGQRTALEGQMEDLTRQGNELLGRISSTGYEDLKNQLDSAKELSNHLNKSFTKWSQTGERLKEWIEEEATSNQTIWDIEEFEKNTIDEEKLNRLKKSIAEMRNETEEAQKEAEGILRDIRKKERQTSEELIQLKAGNKAYPKYLERARSLIQQRLLEETGKAVEVHVLADLLDIRDETWRNAVEGYLGNNKLSLVVAPAYAEAAMAAYGELDRAEYFNVAVLDTEKVGQNSYEVVKGGLAEEITVREAYLQPYIDLLLGKVVKCTNLEELRHSRIGVTPDCMLYHTFRLQHMNPDNYTKFAYIGKDSVRRRIRLLEKNLVSMEEEKKPQEQVIKECKRILSMEDLGEDTGVYLEWQQDMEAFKEKEKEIRRLEQKFEKLKAQDVEAWVKEREAILQLCDRKRAEQSAVAELIFGINSEIERFRRESLQLQEELVAKEREFEPDEELEAKVHEILESRENCRYDRLKNEFFGECRRSEEARDQAFQALVGSRGEYARKYPNRNFSLTAKDNGEYDRLLETMECGNLEEYKKMAAEQAKSAVLHFKDDFMFKIRSAIRDALLRKDELNKIISKLDFGKDKYQFVIGRNKGPDGRYFDMFMDNSLEVNPAYLTDTLDNQMNLFTMEHENQYGEIINDLINIFIPPENATTEEMEEAKRNMDKYADYRTYLSFDMQQIIQNEDEVIKIRLSKMIKKNSGGEGQNPLYVALLASFAQAYRISLSPKIQRNPTLRLVVLDEAFSKMDAEKVASCIELIRGLGFQAIISATNDKIQNYVENVDKTFVFANPNKKSISIQEFERESFPELMRELDEEENYADVD

SEQ ID NO: 37652 - protein, 396 aa, Clostridium sp. C105KSO15
MLTLIDIIISEIERSTVAWREGAKGNRNIEIQQEDLDAMGKQNFLKQAAELESQGLVRCKWIIDRSDISHVNYSYGDVRGLYKKAGKIPKSDRIREMKEAVEEQIKKIHKPWILAYYDGVLKSLEAGKEPKELNHENRELNFNCFFGIDRLEGSVYKRVFSKQFLGGSKVFEKKLQKSVATIAKKYYDIIDENMTESEILAQIYLDHYADELSLKGDLLIKIDDNEIDLSLLPYGTVLNSITLKKVIIVPKQKIKKIITVENKANYMTFPYEQGTLVLFSHGYFSPSERKVLGELASILPEDKVEFYHTGDLDYGGIRIFEFIRKQIFPKLRPLHMDMETWRKHSKFGYQIEESKRDKLKVMLDENKIQEPDLQKLAAVICETGIGIEQESFLFTE

SEQ ID NO: 37653 - protein, 460 aa, Clostridium sp. C105KSO14
MILMNEIPDRFWSLFRSVNRSTYIEALLKINEEYEYSNYFLSREVCIQLLSEYFSRKKYVIWQDETEDDWDELEPPATRVLNWLLRTGWLRKVDDYASMTVNIVIPDYAAVMIEAFSRLSNDDEDETQVYIQNVYAILFSLKNDPRSSVSLLNTALVNTKKLNKSLQDMLHNMDKFFGSLLEQKNYGTLLKEHLEGYVTEIVNKKYHILKTSDNFYLYKTDIKSWIAAMREDSSWINKMCAKSAASTRGQKKTPLTEYDIVEKLDQLERGFDDIEHRISNMDKEHTRYVKATVTRLNYLLNQEDNMKGLVIKLLNHMSEYGCPEEELTAVSAGMNLSQMTILSEKSLYKRRKTKADFTEQLKDEEESEELSMEEVLNLNKVRNRYSQKEIEAFIEGSMADGKMVVDEQTIHSDQDFEKLILAYDYSTRRKSPYKVEEEDSEMVHSGGYTYPRLVFVRRTR

SEQ ID NO: 37654 - protein, 249 aa, Clostridium sp. C105KSO14
MENMELENSVADIAPAAGYTGNSIPYYDNLMHSEQSEVTEIIRLLWRQTFILEHKYDKRTGRFQYNRDYRVCSKHLEFIKNYFAISGVELRENSQMGVMYIQGENVVGDKLPRLATLYLLVLKLIYDEQMESVSTSVNVYTSLREIHEKLGNYRLFKKQPALTDIRRAVTLLKKYQVIEPLDLLEDLKSESRMIIYPCINVVLMGDDVRQLLSSFDEDTDDSGVQLKAELEEEDADDMTAEEGEPWNRK

SEQ ID NO: 37655 - protein, 1129 aa, Clostridium sp. C105KSO14
MEQKIANDRFLALSRICLNNWHYITKRTLSFNDEINFFTGHSGSGKSTVIDAMQIVLYANTDGRGFFNKAAADDSDRSLIEYLRGMVNIGDNNEFSYLRNQNFSSTIVLELKRSDTGQCQCVGIVFDVETATNEISRRFFWHKGPMWDNGYRGGKRTMSIVEIEDYLQANYNREEYFLTSHNERFRRILYDSYLGGLDSEKFPLLFKRAIPFRMNIKLEDFVKEYICMEQDIHIEDMQESVMQYGRMRKKIEDTCAEIQSLKQIEDRFQSYADKEQQLKKSSYFVQKLEILQLQSEVRTLAHKAKLAGEDLEKQIQARSSVDEQIGELTRQSDELLRRIASTGYEELKNQLKSLNELLEQLGKSEARWQQATDALKRWEEEDITSNQTLWDIEEFENRTIDLETLERLKKSMASMRSDTEKQHQEASSALRELKKQEKQTRDELEKLRSGSKAYPKYLENARSYIQRRLLEETGKSVDVHVLADLLDVKRDEWRSAVEGYLGNNKLNLVVAPKYARTALEIYGELDKKEYFNVAVLDTEKASQNQPQVQKGALSEEVTVRESYLRPYMDLLLGRVIKCDTIDELRECRIGITSGCMLYHTFRLQHINPDNYTKFAYIGKDSVRRRIRLLEQELAALDEKKNPLEETVREAHRILALPWLLAEPPEYMDWLKDINSYKAKEREKKKLIQKLELLKEQNVDRLERDRQAVITLCDGKKRERDSLNVLIRDKEREIEGYRNKSIDSQSVLTSKERELTQNPDYDNELTAYLSSRDTVRYDREKETYTVRCSKLSEAREAAFQELLTVRTSYIRTYPNRNFPVNARDNAVYDHLLSALKCDNLEEYKQKATEQAKSAVEHFRDDFMYKIRSAIREALIRKDELNRIISRLDFGKDKYQFIIGRNKGPDGRFYDMFMDDSLDINPADLNYSYENQMDLFTIEHEKQYGDLMNELISIFIPPENAAPDQMDEARRNMDKYSDYRTYLSFDMQQLIQNQDEVIKIRLSKMIKKNSGGEGQNPLYVALLASFAQAYRINLPSKVERNPTIRLVVLDEAFSKMDGEKVASCIELIRGLGFQAIISATNDKIQNYVENVDKTFVFANPNKKSISIQEFERERFVELMQDEEDRNEFADT

SEQ ID NO: 37656 - protein, 113 aa, Clostridium sp. C105KSO14
MNAPLECIIRKCEIHLERVLSSIRTSCGTTYLHTGDLDYGGVKIFQYIKKRIFPNLQPYLMDTQTHEQYKAYGEPIETIKLEKLQRTTEPLLQPLIDKICAEKQVIEQESFLF

SEQ ID NO: 37657 - protein, 490 aa, Xanthomonas oryzae pv. oryzae; identical to SEQ ID NO: 30427

SEQ ID NO: 37658 - protein, 232 aa, Xanthomonas oryzae pv. oryzae; identical to SEQ ID NO: 30428

SEQ ID NO: 37659 - protein, 1143 aa, Xanthomonas oryzae pv. oryzae; identical to SEQ ID NO: 30429

SEQ ID NO: 37660 - protein, 393 aa, Xanthomonas oryzae pv. oryzae
MAPAAPMMLPAAALLALRGQWQRARGQWLIGEGAPQAIGLRAPTQAQAIARFDAFGAWLQEWSRTGLPGRVEYRAVSWTQLGPQRLPQTWVLDDAGQAAGALGEGERWARARQRSAALQARWPQAVALAARLRRQFDLLADWPEVEFARLVAVVEWLHQHRDSGLFLRQLPIAGIDSKWIEPHRGVIADWLAGLRGIAEPRSFASLSGLRNAPDRVRLRLLDPALRHHIGGLEDITAPIAQIAALRLPVRRVLIVENRETGLACESLPGTLVLMARGYAVEYVSNIGWLRELPLYYWGDIDTHGLAILHRLRTHAPHTTAVLMNEATLQATPRALWGHERRPHRAQRLAALSIQEQRLYADLRGGRFGPSPRLEQERIAWDYAWPRIQAALAD

SEQ ID NO: 37661 - protein, 450 aa, Pseudomonas aeruginosa; identical to SEQ ID NO: 32505

SEQ ID NO: 37662 - protein, 220 aa, Pseudomonas aeruginosa; identical to SEQ ID NO: 33036

SEQ ID NO: 37663 - protein, 979 aa, Pseudomonas aeruginosa
MGAVLWFERTSSSASDLKKLWLLSESPEQTLEHWLSQHHAGGMRALRQMEKDGTGIWPYPSKKAFLARLRDYFEVGENAFTLLNRAAGLKQLNSIDEIFRELVLDDRSAFERAAEVAGSFDDLTDIHRELETARKQQRSLQPVADGWERYQVLQEQLHDKQALEGILPVWFAEQGYRLWLAETNRLEKEYKKAELDQEQCKSQLEAQKGVVDQHRQRYLRVGGAGIDQLRERIADWVRECDKRSLKAEQYQLLAKGLGLADELSAAALKENQQHIAARLEILDQQITDARQKAFDAGLVQQELNGRLQTLQQEGAEVEKRPGSNLPGQFHAFRSDLAQALGVNESALPFVAELVQVKPEELDWRGAIERAIGSHRLRILVPQDSSQAALRWVNQRHNRLHVRLLEVQEPTSRPVFFDDGFTRKLTFKEHPYREAIKALLADNDRHCVESPEQLRHTPHAMTAQGLMSGKERFFDKQDQKRLDEDWLTGFDNRDRLAFLAEQIREVNERLEPAKLALDAAQGDVRQLETQASLLNRVKELQFEDIDLPGAQSQLESLRTQLATLTRPDSNLAMIKVELDAAEALQESLDQQLRQLIEQYVQLKTQFDQAASATRKAYNSAEKGLNDTQRELAQAHFPTLTADDLGDIVELERKHTRELQGQLKALGEKLGDQKSELAKRMSDALKVDTGALAEVGRELVDVPRYLERLRVLTEEALPEKLKRFLEYLNRSSDDGVTQLLSYIDHEVSMIEERLDDLNSTMQRVDFQPGRYLRLVAGKVIHESLRTLQRAQRQLNSARFIDDEGESHYKALQDLVGLLKDACEHSRNQGAKALLDPRFRLEFAVSVIDRESRNVIETRTGSQGGSGGEKEIIASYVLTASLSYALCPDGSSRPLFGTIVLDEAFSRSSHAVAGRIIAALREFGLHAVFITPNKEMRLLRHHTRSAVVVHRRGLESSLVSLSWEALDEHHQQRIKAMHEVAH

SEQ ID NO: 37664 - protein, 393 aa, Pseudomonas aeruginosa; identical to SEQ ID NO: 32927

SEQ ID NO: 37665 - protein, 480 aa, Arthrobacter sp. ATCC 21022
MDYYAINALREKHAGWALLRAQNAPLALHFFMSAFTDPNQRNVGRQQLIDVLDDVLFGVRETYGEEKFPRNASEYLDDWAASERAWLRKYYVQGEDEPHYDLTPAAEDVVRWVESLKGREFVATQSRLTSIFAVLKTLVQQSETDPDVRWAELQQQRNQIDAEMHRIREGDLKVMTAPEALDHFQQLTTLAKDLLSDFREVEQNFRKLDRQVREQIATWDGSQGELLDSIFANQQDIGSSLQGRTFQGFWDYLMSPQLRRELNDLLHRATRIEALARMDNLHTITNLHQDWLPAVEQTQATVRQLSQQMRRLLDDKVFLENKRIMQLIRSIEANALDQRDQPPSNFAMEIEASSVDVALPFERPLYEPGSRVMVMDDVVTADDQDLDASALFSQFHVDRERLKSNIESVLEEENQATLADITAAHPLSQGLAEIVAYYQLAAESDWASINPETTQRLHWTLEDGSVRAAVIDQIIFVRPA

SEQ ID NO: 37666 - protein, 196 aa, Arthrobacter sp. ATCC 21022
MNTASETSSPEELPGIVTKLFKGVVYAETDEKVWQSLLALTSHVRDYVAVLGLNLILDESEGYAFLRSREDPEGTLPRLIPRRQLTFDVSLLLVLLRKRLLEFDTNSSELRLIMTEEELKDMVAVFLPESSNEARILDRLSTNIKKVVELGFLRKLRGETGTYEVARILKAYVDAQWLEEFDARLADYRESLTGSK

SEQ ID NO: 37667 - protein, 418 aa, Arthrobacter sp. ATCC 21022
MPGKSAASRWTSLADLRALSATAWDRGQLLREAIDPSGVYPRRRVLKRPSATELRDDYAAARDWAARLFAAEGPFSLETADVGRTTIGSNRLPAVAVFASVEDEIEFAGKQRETKQFLSLAAELGGLDPALQAWAAKRPKHLLVLGQDALLAARVALWLRDHPSPSVYVRQLRLPGVHTKFIEAHRRTIDEMVEALRPVLAETLPLDGDSDAADPGLDDSVLGTPIARTPAARFAERHGFLHQPEQVRFRLLDPSIPLLGDARDITVTASAFESLRLPVTHVIITENLVNFLALQERHGTLAIFGKGYGFSSLRDAAWLQSCQVLYWGDLDTHGFRILDQLRSVHPHVASVLMDEATLLAHRDAWSMEASPSRAALTRLTPDEALVYEALQAGTYGDRVRLEQELIAWEWALTRLESD

SEQ ID NO: 37668 - protein, 485 aa, Arthrobacter sp. ATCC 21022
MSRSAMSSADAISARLRDLEQLTKGPAWTLTRSAPWVIAVLQASFTRTRPQLPLEEFHADVDAFLEQLRRQDPALGGQLNGKAFGDEWTRKQFLTRRNQSGQIVYEVTEAAARVLAFLDSLSSERSTLNGSRLGTLLGDVEKLANETNPDQSARLEALEEEIQERQQLVEDISSGEFDGLLDDEEAVEAAGNILDLAASLPADYKKMRDRIEELVGELRNQIIEESLSKGATMAQVLEADKRLRQSPEGRTFRSFTAFLEDPQQQLRFRSAIGEVLSRQFADDLTHEDRETLKNLVAELRTQHSEIQRIYGKLSESLNTYIQSDDVRQSVTLRKVLAEAEQAIRSMPYERDRPGLVPGPVLYNAGFESLAMVKLFDPDEFATPPRLADPIAFTDSDRVKSARTGKARPDVVRAAMAGSATLGEAWENLPAEERHINTVRSLLSMALQTGAAFDRAAWEHIDFEQIDGSIRTAYLPVVTLNEDSDD

SEQ ID NO: 37669 - protein, 293 aa, Arthrobacter sp. ATCC 21022
MTEEITTTELAATDNPTMDGGREEVETHTADPFRVSPRDTFVDGAALFPGDTGVLPMKVRHALVKLLKGPYIDGGRDEKLWTTLLDNQLILRSRLSELFLTLQLDHDRKIAVLRPVDPEIIGASSRSSILRQQRALSRVETIVLLRLRLLLDRHVTAQTDPTVTREEISDLVANYTPAGQQDALRDSDVVNRTITKLLARQLLLATPLDDTYTISNALPLALPFENIGDIPAHIEALVAVAADESGTEPLLDLDPDSHQTSPSDDDMDDDTDDDGPAAVSSAADSTDAEGTTK

SEQ ID NO: 37670 - protein, 1147 aa, Arthrobacter sp. ATCC 21022
MTIASMLPLGEQTNPGQMRLALVQVVNWGTFHGAHTMHVDRNGTLLTGNSGVGKSTLFDAMLRVFDARPRSNEAAAQRSGGAVEDKRTTFTYMRGKVGDKAVGDSSASAFQRPGATWSAVALTFDNAAGTKVTISALFDLPKNGTESSVGRFYVIDSKPLDLEAIEGIAQKRFTKGALESIFPEGQVFDVHKAFAERFRRLLGINSDQALPLLRVIQAGKGLGGSVNTFFRDQVLDAPATLAAADDVVEEFSNLMSIRQRLEDVRQQRDQLAPVPGLNKEYAQALLDANRLRELTGEEFEAYKQQLAVSVHAKTLARFRELAQQKAQELAAERTIRDALAKELRELESDYNNRGGNAISAIEQSLENARVGLKLRQQVEESARKALSDAGLNLEWSAEGWDQAHEQAAARSASLQDDSESLKELRFEAFDAHATKKRELAAAQQELLSLRSRKSLLPPSSIENRAAIAAATGVPEERMPFAGELIDLAEGQEQWRPAAERALRNLATTLLVPGEYFAAVTRYLNDNTIRGALRAVDVSKPLAGGALAVEDVSDGDLLTKLSILTSGANAEAGEWVRERIAVDFAYPCVEDPDELASLDKGLSLGGVVKRNRHTVEKDDRFTSRQDYVLGFDNASKLELVAARVGELENELAKAAELAQSREDSHQGMARQLEALRRVAEDERPWEQVSAAVAGEELARIEQRLADALAAQADLEPLRANIEAVREKHQSSTGAAAVLQSEYKALDHQMTTADGLLDAARLKLEQAPPSSSTVTALEPYFAGAADVTQLYELDNLANSVRNKLLDELHVAESRGQATAERLTRIFEAFVREWGSAISADHGTSIGAAGDFEARYHAIVSDGLPAQEAEFRLFFNQRTHESFSTLLHLLDEERRSITSRILPLNGILSQVNFHEGSYLELDIKQTLPATAKQFKDAIQNALKAKHARPSRGAAPSEVDEDAELTARYKSLETLVKRLGSQTPEDRRWRSEVLDVRGHLFIQCKEHREVAGASGRKKTEVFMHADTGSMSGGERQRFTAFIMAAALSYQLGIAEQGFTTYGTVMMDEAFVLASEEFAGAGIKALHEFGFQLLLAAPENVIDLSRHLGSVTEILRDKRTNRSGVLTAPVISGRGEPGAWRSEANPVDIVLR

SEQ ID NO: 37671 - protein, 486 aa, Burkholderia sp. BDU5
MPLDYPTLDALRTRHPAWRLLRSDHAPLAVSFLHRVFVAPNVRVVAAPVLAEALEDELYGLRELLGEGAFPKPALEYLNDWAGPEKGWLRKFYRPGSDEPQFDLTPAAEKAIAWLGTLTERSFVGTESRLLTLFELLRQMGEGSEADPEKRLAELHARRGQIDEEIARVEAGDVRLLDDAALKDRFQQFMQMARELLTDFREVEQNFRLLDRHVRERIALWEGSKGALIEEIMGERDAIADSDQGSSFRAFWDFLMSSRRQEELSERLERVLELPAIMEMRPDARMRRVHYDWLEAGEHTQRTVAQLSQQLRRFLDDQAWLENRRIMDILRGIETKALALREAPPPGAVTEIETASADIELPMERPLYVPALRPLITNVALETGETDLDPSALYTQIVVDRARLAGHIRRCLQDRPQVTLAELAASQPLAHGLAELVAYMQLGAEAGSFRATVDETISDTIEWQANDANGTVIVKRATMPRVIFTR

SEQ ID NO: 37672 - protein, 217 aa, Burkholderia sp. BDU5
MTEEQQASSLGRGDLPAVAIALLKGVVYRDGNERLWAALLELQTHVRDYVAVLGLELVVDEAEGYAFVKSRAEHDAEAGVDQTKLPRLVVRRPLSFPVSLLLALLRKKLAEWDAGGGDTRLVLAREDIVELARVFLPASTNEARLVDQIDTHVNKIVELGFLRRMKATSGPPTFEVRRILKAFVDAQWLLDFDARLAGYRAHLQDSTVSDQRESRDE

SEQ ID NO: 37673 - protein, 1123 aa, Burkholderia sp. BDU5
MNEPRALSFDFAADDILTGFRLERLEVFNWGTFDERVWVLRADGRNGLLTGDIGSGKSTLVDAVTTLLVPAQRIAYNKAAGADSKERTLRSYVLGYYKSERNEVTGTAKPVSLRDHNNYSVILGVFRNAGYDATVTLAQVFWMKDAQAQPARFFVCAERNLSIAADFSRFGTDIAQLRKKLRGLGAEIEDTFPKYSAWFRRRFGIESEQALELFHQTVSMKSVGNLTDFVRSHMLEPFEIAPRVDALITHFDDLNRAHEAVLKAKRQVELLTPLVDDCDRHSEQGHALDGWRACREALKPYFAGLKLGLIERRLQLLDEDHARATSRKARHEEARDQTRQRVDDLRRAVAEQGGDRIAQLNVEMREQERESARRRERAQRYAAIVTLLGETEATDEAAFVSQRQRLAEQRGSLVDDEAQKQNAITEWSVAFREGKARRDLLEDEIASLKARRNNIPKEQVAMRSSLCSALGLEEDVLPFAGELIQVRKDARDWEGAAERVLRNFGLSLLVPDEHYANVAAWVDHTHLRGRLVYFRVRAERAARVVEAMELHRDSLAHKLAIKPDSLFYSWLEREIGRRFDYACCDTQEQFRRETRAITHAGQAKAPGERHEKDDRHALDDRSRYVLGWSNTAKIAALEAQRRALEVRLGEIGQRLGEAQSEHAKVREQLEALARAGEFVEFREIDWPSCAAAIARLADEKARLESASDALAELTAQLDSAQLALKGSEAAISETDSELGGILAKREAAQALLSETHALVEQVNAELAGRIEALRAEILGEHQLSVESCDNRERDVREALTTRIDNETKSLGRLAERIVKAMAAFKDAYKLETADFDASLDASSEYRDMLARLQADDLPRFEARFKELLNVNTINEIANFHAQLARERETIKARIERINESLRQIDYNAGRYIVLESQPSPDAEIREFQGDLRACTEGELTGSDDSQYSEAKFLQVKRIIDRFRGREGLTEQDRRWRAKVTDVRNWFLFAASERWREDDSEYEHYSDSGGKSGGQKEKLAYTILAASLAYQFGLEWGAVRSRSFRFVVIDEAFGRGSDESAQYGLTLFQKLNLQLLIVTPLQKIHIIEPFVSSVGFVQNEGGRASRLRNLSIEEYRARKAEFEQ

SEQ ID NO: 37674 - protein, 394 aa, Burkholderia sp. BDU5
MNWTTAAELRVRLQRLWERGEWLRSLVDGTEGLFPLRLPIKGPSSSELAERFDAVRAWITEIAATPRVRIEWREINHRILGLQRVPQAAWVDGLDDALAVAGKRRDAAQFERLLEITRSRQPKLTTWLAQRPLQALEFAGDWERLLAVVDWLQAHPQPGVYLRQAEIADVDTKFIEARRGVLAQWLDLVLPSEAIDSSRTGAAQFAARYGFREKPPRIRFRVLDERLAVLPGMGRPDIALDADSFARLALPCRHVFITENEINFLAFPDVPQSIVLFGAGYGWEALESARWLTDCALHYWGDIDTHGFAILDQLRRRFRHVGSFLMDRATLMAHEAFWGDEGDQVIRDLPRLTAQERELFDDLRDNRIRHGLRLEQERVGFGWVRAALEERACA

SEQ ID NO: 37675 - protein, 486 aa, Burkholderia ubonensis
MFLDYPTLDALRTRHPAWRLLRSDHAPLAVSFLHRAFVAPNVREVAAPFLAEALEDELYALREQLGDGAFPKPALDYLNDWASPEKGWLRKFYRQGSDEPQFDLTPAAGKAIAWLGTLMERSFVGTESRLLTLFELLRQMAEGSETDPERRLAELHARRSQIDEEIARVEAGDVRLLDDAAIKDRFQQFMQMARDLLTDFREVEQNFRLLDRHVRERIALWEGSKGALIEEIMGERDAIADSDQGSSFRAFWDFLMSSRRQEELSERLEHVLALPAITEMKPDARTRRVHYDWLEAGEHTQRTVAQLSQQLRRFLDDQAWLENRRIMDILRGIETKALVLREAPPPGSVMEIETASADIELPIERPLYAPALRPLIANVAIETGDADLDASALYTQIVVDRARLASHIRRCLQDRRQVTLAELAASQPLLHGLAELVAYLQLSAEAGSFRATVDETVSDTIEWQANDANGAAIVKRATMPRVIFTR

SEQ ID NO: 37676 - protein, 216 aa, Burkholderia ubonensis
MEEQQTPSLGRGDLSTVAIALLKGVIYRDGNERLWAALLELQTHVRDYVAVLGLELVVDEAEGYAFVKSRTEPDAEVDGDQVKLPRLVARRPLSFPVSLLLALLRKKLAEWDAGGGDTRLVLSREDIVELVRVFLPASTNEARLVDQIDTHVNKIVDLGFLRRMKTASGPPTFEVRRILKAFVDAQWLLDFDARLASYQAHLRDATNSDQTESRDE

SEQ ID NO: 37677 - protein, 1123 aa, Burkholderia ubonensis
MNEPRTLGLDFAADDTRTGFRLERLEVFNWGTFDDRAWVLRVDGRNGLLTGDIGSGKSTLVDAITTLLVPAQRIAYNKAAGADSKERTLRSYVLGYYKSERNEVTGTAKPVSLRDHNSYSVILGVFRNAGYDATVTLAQVFWMKDAQAQPARFFVSTERELSIATDFSRFGTDIAQLRKKLRGLGAEIEDTFPKYSAWFRRRFGIENEQALELFHQTVSMKSVGNLTDFVRSHMLEPFDVAPRVDALIAHFDDLNRAHEAVLKTKRQVELLTPLVDDCDRHSEQGHVLEGWRACREALRPYFAGLKLGLVERRLQLLEEDHARATSRKARHEEARDQARQRVDDLRRAVAEQGGDRIAQLDVEIREHERESVRRRERAQRYAAIVTLFGETEAADEAAFASQRQRVAEQRSSLVDDEAQQQNAITEWSVAFREGKARRDVLEDEIASLKARRNNIPKEQVAMRASLCSALGLEEDALPFAGELIQVREDARDWEGAAERVLRNFGLSLLVPDEHYASVAAWVDRTHLRGRLVYFRVRSERSARAAEAIELHRHSLAHKLAIKPDSQFYGWLEREIGRRFDYACCDTQEQFRRETRAITRAGQAKAPGERHEKDDRHALDDRSRYVLGWSNTAKISALAAQRQALEARLGEIGQRLGEAQHEHTKVREQLEALARAGEFAEFREIDWSSCAAAIARLADEKARLESASDALAELTAQLDSAQASLKESEAAMSETDSELGGILAKREAAQALREETHALVAEVDAELAERIEALRAEILGEHQLSVESCDNRERDVREALTTRIDNETKSLGRLAERIVKAMAAFKEAYKLETADFDASLDANPEYRDMLARLQADDLPRFETRFKELLNVNTINEIANFHAQLARERATIKERIERINESLRQIDYNAGRYIILESQPSPDAEIREFQSDLRACTEGELTGSDDSQYSEAKFLQVKRIIDRFRGREGLTEQDRRWRAKVTDVRNWFLFAASERWREDDSEYEHYSDSGGKSGGQKEKLAYTILAASLAYQFGLEWGAVRSRSFRFVVIDEAFGRGSDESAQYGLTLFQKLNLQLLIVTPLQKIHIIEPFVSSVGFVQNDGGRASKLRTLSIEEYRAHKAEFEQ

SEQ ID NO: 37678 - protein, 394 aa, Burkholderia ubonensis
MSWTTAVELRARLQHLWARGEWLRSFADGTEGLFPLRLAIKGPSSSELAERFDAVRAWIAEIAATPHIRIEWREINHRILGVQRLPRAAWVDSLDDALAVAGKHRDAAQFARLLEITRARQPKLAAWLAQRPLQALEFAGDWERLLAVVDWLQAHPHPGVYLRQAEIAGVDTKFIEARRGVLSQWLDLVLPSEAIDSSRTGVAQFAARYGFREKQPRIRFRVLDERLAVLPGMGRPDIALDADSFARLALPCRHVFVTENETNFLAFPDVPQAIVLFGAGYGWEALEPARWLADCALHYWGDIDTHGFAILDQLRCRFPHVNSFLMDRATLMAHEAFWGDEGDQVVRDLPRLTAQERELFDDLRDNRIRRGLRLEQERVGFGWVRAALEERSFV

SEQ ID NO: 37679 - protein, 486 aa, Burkholderia ubonensis
MFLDYPTLDALRTRHPAWRLLRSDHAPLAVSFLHRAFVAPNVREVAAPFLAEALEDELYALREQLGDGAFPKPALEYLNDWASPEKGWLRKFYRQGSDEPHFDLTPAAGKAIAWLGTLMERSFVGTESRLLTLFELLRQMAEGSETDPERRLAELHARRSQLDEEIARVEAGDVRLLDDAAIKDRFQQFMQMARDLLTDFREVEQNFRLLDRHVRERIALWEGSKGALIEEIMGERDAIADSDQGSSFRAFWDFLMSSRRQEELSERLEHVLALPAITEMKPDARTRRVHYDWLEAGEHTQRTVAQLSQQLRRFLDDQAWLENRRIMDILRGIETKALVLREAPPPGSVMEIETASADIELPIERPLYAPALRPLIANVAIETGDADLDASALYTQIVVDRARLASHIRRCLQDRRQVTLAELAASQPLLHGLAELVAYLQLSAEAGSFRATVDETVSDTIEWQANDANGAAIVKRATMPRVIFTR

SEQ ID NO: 37680 - protein, 216 aa, Burkholderia ubonensis
MEEQQTPSLGRGDLSTVAIALLKGVVYRDVNERLWAALLELQTHVRDYVAVLGLELVVDEAEGYAFVKSRTEPDAEVDGDQVKLPRLVARRPLSFPVSLLLALLRKKLAEWDAGGGDTRLVLSREDIVELVRVFLPASTNEARLVDQIDTHVNKIVDLGFLRRMKTASGPPTFEVRRILKAFVDAQWLLDFDARLASYQAHLRDATNSDQTESRDE

SEQ ID NO: 37681 - protein, 1123 aa, Burkholderia ubonensis
MNEPRTLGLDFAADDTRTGFRLERLEVFNWGTFDERVWVLRVDGRNGLLTGDIGSGKSTLVDAITTLLVPAQRIAYNKAAGADSKERTLRSYVLGYYKSERNEVTGTAKPVSLRDHNSYSVILGVFRNAGYDATVTLAQVFWMKDAQAQPARFFVSAERDLSIATDFSRFGTDIAQLRKKLRGLGAEIEDTFPKYSAWFRRRFGIENEQALELFHQTVSMKSVGNLTDFVRSHMLEPFDVAPRVDALIAHFDDLNRAHEAVLKTKRQVELLTPLVDDCDRHSEQGHVLEGWRACREALRPYFAGLKLGLVERRLQLLEEDHARATSRKARHEEARDQARQRVDDLRRAVAEQGGDRIAQLDVEIREHERESVRRRERAQRYAAIVTLFGETEAADEAAFASQRQRLAEQRSSLVDDEAQQQNAITEWSVAFREGKARRDVLEDEIASLKARRNNIPKEQVAMRASLCSALGLEEDALPFAGELIQVREDARDWEGAAERVLRNFGLSLLVPDEHYANVAAWVDRTHLRGRLVYFRVRSERTARAAEAIELHRHSLAHKLAIKPDSQFYGWLEREIGRRFDYACCDTQEQFRRETRAITRAGQAKAPGERHEKDDRHALDDRSRYVLGWSNTAKISALAAQRQALEARLGEIGQRLGEAQHEHTKVREQLEALARAGEFAEFREIDWSSCAAAIARLADEKARLESASDALAELTAQLDSAQASLKESEAAMSETDSELGGILAKREAAQALREETHALVAEVDAELAERIEALRAEILGEHQLSVESCDNRERDVREALTTRIDNETKSLGRLAERIVKAMAAFKEAYKLETADFDASLDANPEYRDMLARLQADDLPRFETRFKELLNVNTINEIANFHAQLARERATIKERIERINESLRQIDYNAGRYIILESQPSPDAEIRDFQSDLRACTEGELTGSDDSQYSEAKFLQVKRIIDRFRGREGLTEQDRRWRAKVTDVRNWFLFAASERWREDDSEYEHYSDSGGKSGGQKEKLAYTILAASLAYQFGLEWGAVRSRSFRFVVIDEAFGRGSDESAQYGLTLFQKLNLQLLIVTPLQKIHIIEPFVSSVGFVQNDGGRASKLRTLSIDEYRAHKAEFEQ

SEQ ID NO: 37682 - protein, 394 aa, Burkholderia ubonensis
MSWTTAVELRARLQHLWARGEWLRSLVDGTEGLFPLRLALKGPSSSELAERFDTVRAWITEIAATPRIRIEWREINHRILGVQRLPRAAWVDSLDDALTVAGKHRDAARFERLLEITRSRQPKLIAWLAQRPMQALELAGDWERLLAVVDWLQAHPHPGVYLRQAEIAGVDTKFIEARRGVLSQWLDLVLPSEAIDSSRTGVAQFAARYGFREKQPRIRFRVLDERLAVLPGMGRPDIALDADSFARLALPCRHVFVTENETNFLAFPDVPHAIVLFGAGYGWEALEPARWLADCALHYWGDIDTHGFAILDQLRCRFPHVNSFLMDRATLMAHEAFWGDEGDQVMRDLPRLTAQERELFDDLRDNRIRRGLRLEQERVGFGWVRAALEERSFV

SEQ ID NO: 37683 - protein, 497 aa, Burkholderia cepacia
MAVHDLTDQIRQEKVAERYPPLFKRLPDRLFAPLASANRFQYWTLLCVLHAKRFGPEAPLPPSTGFLMREITADIAEELQYQDWTPEGDDVTPATPLAIRAIMVFNRLRDAGWIRVDRVGVREMVTMAPAVAQFMNRLVEFAHTGPEFVSGKIRSIEANLKLLLDESIDGASLQEAARQSRALLEHVRIAGTNVRDLMLEIGRVDATGEFVRRFFDDYVERMFIGDYKELRTREHPLARRQEILRMVAHIQQTQDLRARLIQWYLEKQAGRDPTRAEAMFERDIQKVEDLRRIDEYLDRLDDEIRRANKLALAYLDYRLRAARPLDELINQAIDTVVKQGTKAAALAPFAPGDCIGGERLALPRVETKRPPPGGLRKQTMSPEQEARARLALMARDRRTMSLPKLAAFVRQQLGEADAVPSTVLQVNNVESIRALQVLCTIATANATSSKVLRANARAMSSGFTTVRMEGEEVQSQGISHLPFTIARTTKPANGGSQ

SEQ ID NO: 37684 - protein, 220 aa, Burkholderia cepacia
MSFWTDAATATKNVVTEDDFEAAANRLITEQVLYAADRASKVAYGLIRDFEREFKRALEPLGYIVRVNSQLRYACAIPKHAKASPVTVDQTLLALVLRKIFDEETRSGHHDENGEVACDLVTLEVKYKQMTGGRELATGGKLATLIQWMRRWGLARVSDEDGNQFGHDTDQPYVVIIRPGIAEVLGEAALARIALFTSPDAEVDGVDPAVASTTEEGGAV

SEQ ID NO: 37685 - protein, 1147 aa, Burkholderia cepacia
MKKLIRIRVVQFFLYEMRDVEVGTNCGIFGANGSGKSSLLDAVQIVMLGANESRGSAGVAFNAQADESNHNSRNIRSYCLGQYGDSPDARVRDSANTYITLVWEDTTTQEIVSTGVSIYVSADREKSDVQGRYILPADIALTDHLELVDGEYRPRPWASFRQMLSQRAHGEEVLFHDSERFVNAMLFRLRGTRGAPRLDAYRQAFRFGLRMKFDKSVDDIVRQQVLETRPTNIKRFKEVLHTFQEMAALVRNVQAKLDEAELIETDFADAHRRSTHSVSLAALAQAAELEVANEAVTAAEEAEGRASAALEAANARRDEVNCQVEAAEQHARDSASARDKHASHADAALLRESLAKIQNRLTEQRTGLHRSIKAIGRAIDAQIPGKLVANSDEATALALKDVHALLDGDNISRRDAVEATVRKALRAAKLLSNEVFEEMQSVGRVQTATEAELAAVQDNQERIAKGKPPLEGPAAALKRALANAGVDATPVCDLVRVDDPDWQPAIESYLGTSNMQALLVDETDERKAFRVSRQAAIYDAKVVMPSKFSSRSSPRRGAVAELISGNSAAAVNYLRSKFGDTQRAETEDECFAHRFALTKDGMLLADGEMVRKKPGNPALFKIGPTSAATRTSIAEQARQLQEKIDDLKERYAKLKQLLNNLGPFVGGEQEKIHEVLEIFDRVIKEAADEEDLTQRLQALDTDEYRQLVQVAEAAEATLADVRKQLLAAAKAVGAAETACQQKREDTKTKQTRAVIQNGIAEAARAVDGYDADYASDQWERLLTRQGLSFNEIVADCKHRGNRAETDSRQKWSSAMQKLSAFLVRHNEFMPAGTQDDWRSARAWLDARVIVLTETGLRENKARMEDALSAAKSTFRNDVAVALHEHLEWLSDTVNRMNEALRLAPMFTNNERYQFRSHVRPAFAVLLKFIKDLAQYGPTEDLLGGTGELPKEFEELMREKTVTGAAAMKSPLDDYREFFDFDIEVLREETSTGTTKHIGWLSKRVGSGSGGEHRAPLYVIAGAALSSAYRLERGDDTGIRLLVIDEAFIKMDPRNIVATMRYFEELGLQVFMASTGDALGSLTAFLDRYYDIMRDAESNVVVLEGHDVSPETREMFRADLPEFNRELIEAEIRRQYLPQADSTEDAAA

SEQ ID NO: 37686 - protein, 395 aa, Burkholderia cepacia
MSRQDQTEMDPLARKALERLLKSADKHTAGAAVRRPALTDSALSEYHELRGLKAKEDFEAVMAYAQAEGAIMALRPRGDPQGLIERVELIDVDKLASILGKVPHAVRVQSARRALASHLGEHPILNDVLSSWERLKKVRGTGPDAAANWVMACDVITYCQAQVALGATETPVRDASARLFKNSKCIESLVPCLDALLAGNIDDDARPDAEVLQELGLYREPQPARLAGDIVVRRERGAFPLDCPYCALPPSTVLGLGSIPSKVLTIENQTTFHVWARQHCDSDVLCLYTAGMPSPAWRAMYLRLISELPVSTPVLHWGDVDEGGFRIAAVLSRCAAEAGHTLLPWKMSPLEVPESLRRAAPTRTVDRMVKYARETGWDSIAYELAKAKLVAEQEG

SEQ ID NO: 37687 - protein, 486 aa, Burkholderia sp. BDU6
MPLDYPTLDALRTRHPAWRLLRSDHAPLAVSFLHRVFVAPNVRVVAAPVLAEALEDELYGLRELLGEGAFPKPALEYLNDWAGPEKGWLRKFYRPGSDEPQFDLTPAAEKAIAWLGTLTERSFVGTESRLLTLFELLRQMGEGSEADPEKRLAELHARRGQIDEEIARVEAGDVRLLDDAALKDRFQQFMQMARELLTDFREVEQNFRLLDRHVRERIALWEGSKGALIEEIMGERDAIADSDQGSSFRAFWDFLMSSRRQEELSERLERVLELPAIMEMRPDARMRRVHYDWLEAGEHTQRTVAQLSQQLRRFLDDRAWLENRRIMDILRGIETKALALREAPPPGAVTEIETASADIELPMERPLYVPALRPLITNVALETGETDLDPSALYTQIVVDRARLAGHIRRCLQDRPQVTLAELAASQPLAHGLAELVAYMQLGAEAGSFRATVDETISDTIEWQANDANGTVIVKRATMPRVIFTR

SEQ ID NO: 37688 - protein, 217 aa, Burkholderia sp. BDU6; identical to SEQ ID NO: 37672

SEQ ID NO: 37689 - protein, 1123 aa, Burkholderia sp. BDU6
MNEPRALSFDFAADDILTGFRLERLEVFNWGTFDERVWVLRADGRNGLLTGDIGSGKSTLVDAVTTLLVPAQRIAYNKAAGADSKERTLRSYVLGYYKSERNEVTGTAKPVSLRDHNNYSVILGVFRNAGYDATVTLAQVFWMKDAQAQPARFFVCAERNLSIAADFSRFGTDIAQLRKKLRGLGAEIEDTFPKYSAWFRRRFGIESEQALELFHQTVSMKSVGNLTDFVRSHMLEPFEIAPRVDALITHFDDLNRAHEAVLKAKRQVELLTPLVDDCDRHSEQGHALDGWRACREALKPYFAGLKLGLIERRLQLLDEDHARATSRKARHEEARDQTRQRVDDLRRAVAEQGGDRIAQLNVEMREQERESARRRERAQRYAAIVTLLGETEATDEAAFVSQRQRLAEQRGSLVDDEAQKQNAITEWSVAFREGKARRDLLEDEIASLKARRNNIPKEQVAMRSSLCSALGLEEDALPFAGELIQVRKDARDWEGAAERVLRNFGLSLLVPDEHYANVAAWVDHTHLRGRLVYFRVRAERAARVVEAMELHRDSLAHKLAIKPDSLFYSWLEREIGRRFDYACCDTQEQFRRETRAITHAGQAKAPGERHEKDDRHALDDRSRYVLGWSNTAKIAALEAQRRALEVRLGEIGQRLGEAQSEHAKVREQLEALARAGEFVEFREIDWPSCAAAIARLADEKARLESASDALAELTAQLDSAQLALKGSEAAISETDSELGGILAKREAAQALLSETHALVEQVNAELAGRIEALRAEILGEHQLSVESCDNRERDVREALTTRIDNETKSLGRLAERIVKAMAAFKDAYKLETADFDASLDASSEYRDMLARLQADDLPRFEARFKELLNVNTINEIANFHAQLARERETIKARIERINESLRQIDYNAGRYIVLESQPSPDAEIREFQGDLRACTEGELTGSDDSQYSEAKFLQVKRIIDRFRGREGLTEQDRRWRAKVTDVRNWFLFAASERWREDDSEYEHYSDSGGKSGGQKEKLAYTILAASLAYQFGLEWGAVRSRSFRFVVIDEAFGRGSDESAQYGLTLFQKLNLQLLIVTPLQKIHIIEPFVSSVGFVQNEGGRASRLRNLSIEEYRARKAEFEQ

SEQ ID NO: 37690 - protein, 394 aa, Burkholderia sp. BDU6; identical to SEQ ID NO: 37674

SEQ ID NO: 37691 - protein, 486 aa, Burkholderia sp. ABCPW 14
MPLDYPTLDALRTRHPAWRLLRSDHAPLAVSFLHRVFVAPNVRVVAAPVLAEALEDELYGLRELLGEGAFPKPALEYLNDWAGPEKGWLRKFYRPGSDEPQFDLTPAAEKAIAWLGTLTERSFVGTESRLLTLFELLRQMGEGSEADPEKRLAELHARRGQIDEEIARVEAGDVRLLDDAALKDRFQQFMQMARELLTDFREVEQNFRLLDRHVRERIALWEGSKGALIEEIMGERDAIADSDQGSSFRAFWDFLMSSRRQEELSERLERVLELPAIMEMRPDARMRRVHYDWLEAGEHTQRTVAQLSQQLRRFLDDQAWLENRRIMDILRGIETKALALREAPPPGAVTEIETASADIELPMERPLYVPAPRPLITNVALETGEADLDPSALYTQIVADRARLAGHIRRCLQDRPQVTLAELTASQPLTHGLAELVAYMQLGAEAGSFRATVDETISDTIEWQANDANGTVIVKRATMPRVIFTR

SEQ ID NO: 37692 - protein, 217 aa, Burkholderia sp. ABCPW 14
MTEEQQASSLGRGDLPAVAIALLKGVVYRDGNERLWTALLELQTHVRDYVAVLGLELIVDEAEGYAFVKSRAEHDAEAGVDQTKLPRLVVRRPLSFPVSLLLALLRKKLAEWDAGGGDTRLVLAREDIVELARVFLPASTNEARLVDQIDTHVNKIVELGFLRRMKATSGPPTFEVRRILKAFVDAQWLLDFDARLAGYRAHLQDSTVSDQRESRDE

SEQ ID NO: 37693 - protein, 1123 aa, Burkholderia sp. ABCPW 14
MNEPRALGFDFAADDTLTGFRLERLEVFNWGTFDERVWVLRADGRNGLLTGDIGSGKSTLVDAVTTLLVPAQRIAYNKAAGADSKERTLRSYVLGYYKSERNEVTGTAKPVSLRDHNNYSVILGVFRNAGYDATVTLAQVFWMKDTQAQPARFFVCAERNLSIAADFSRFGTDIAQLRKKLRGLGAEIEDTFPKYSAWFRRRFGIESEQALELFHQTVSMKSVGNLTDFVRSHMLEPFEIAPRVDALITHFDDLNRAHEAVLKAKRQVELLTPLVDDCDRHSEQGHALDGWRACREALKPYFAGLKLGLIERRLQLLDEDHARATSRKARHEEARDQARQRVDDLRRAVAEQGGDRIAQLNVEMREQERESARRRERAQRYAAIVTLLGETEATDEAAFVSQRQRLAEQRGSLVDDEAQKQNAITEWSVAFREGKARRDLLEDEIASLKARRNNIPKEQVAMRSSLCSALGLEEDALPFAGELIQVRKDARDWEGAAERVLRNFGLSLLVPDEHYANVAAWVDHTHLRGRLVYFRVRAERAARVVEAMELHRDSLAHKLAIKPDSLFYSWLEREIGRRFDYACCDTQEQFRRETRAITHAGQAKAPGERHEKDDRHALDDRSRYVLGWSNTAKIAALEAQRRALEVRLGEIGQRLGEAQSEHAKVREQLEALARAGEFVEFREIDWPSCAAAIARLADEKARLESASDALAELTAQLDSAQLALKGSEAAISETDSELGGILAKREAAQALLSETHALVEQVNAELAERIEALRAEILGEHQLSVESCDNRERDVREALTTRIDNETKSLGRLAERIVKAMAAFKDAYKLETADFDASLDASSEYRDMLARLQADDLPRFEARFKELLNVNTINEIANFHAQLARERETIKARIERINESLRQIDYNAGRYIVLESQPSPDAEIREFQGDLRACTEGELTGSDDSQYSEAKFLQVKRIIDRFRGREGLTEQDRRWRAKVTDVRNWFLFAASERWREDDSEYEHYSDSGGKSGGQKEKLAYTILAASLAYQFGLEWGAVRSRSFRFVVIDEAFGRGSDESAQYGLTLFQKLNLQLLIVTPLQKIHIIEPFVSSVGFVQNEGGRASKLRNLSIEEYRARKAEFEQ

SEQ ID NO: 37694 - protein, 394 aa, Burkholderia sp. ABCPW 14
MNWTTAAELRVRLQRLWERGEWLRSLVDGTEGLFPLRLPIKGPSSSELAERFDAVRAWITEIAATPRVRIEWREINHRILGLQRVPQAAWVDSLDDALAVAGKRRDAAQFERLLEITRSRQPKLTTWLAQRPLQALEFAGDWERLLAVVDWLQAHPQPGVYLRQAEIADVDTKFIEARRGVLAQWLDLVLPSEAIDSSRTGAAQFAARYGFREKPHRIRFRVLDERLAVLPGMGRPDIALDADSFARLALPCRQVFITENEINFLAFPDVPQSIVLFGAGYGWEALESARWLTDCALHYWGDIDTHGFAILDQLRRRFRHAGSFLMDRATLMAHEAFWGDEGDQVIRDLPRLTAQERELFDDLRDNRIRHGLRLEQERVGFGWVRAALEERACA

SEQ ID NO: 37695 - protein, 497 aa, Burkholderia cepacia
MAVHDLTDQIRQETAAERYPPLFKRLPDRLFAPLASANRFQYWTLLCVLHAKRFGPEAPLPPSTGFLMREITADIAEELQYQDWTPEGDDVTPATPLAIRAIMVFNRLRDAGWIRVDRVGVREMVTMAPTVAQFMNRLVEFAHTGPEFVSGKIRSIEANLKLLLDESTDGASLQEAARQSRALLEHVRIAGTNVRDLMLEIGRVDATGEFVRRFFDDYVERMFIGDYKELRTREHPLARRQEILRMVAHIQQTQDLRARLIQWYLEKQAGRDPTRAEAMFERDIQKVEDLRRIDEYLDRLDDEIRRANKLALAYLDYRLRAARPLDELINQAIDTVVKQGTKAAALAPFAPGDCIGGERLASPRVETKRPPPSGLRKQTMSPEQEARARLALMARDRRTMSLPKLAAFVRQQLGEADAVPSTALQVNNVESIRALQVLCTIATANATSSKVLRANARAMSSGFTTVRMEGEEVQSQGISHLPFTIARTTKPAKGGSQ

SEQ ID NO: 37696 - protein, 220 aa, Burkholderia cepacia
MSFWTDAATATKNVVTEDDFEAAANRLITEQVLYAADRASKVAYGLIRDFEREFKRALEPLGYIVRVNSQLRYACAIPKHARASPVTVDQTLLALVLRKIFDEETRSGHHDENGEVACDLVTLEVKYKQMTGGRELATGGKLAALIQWMRRWGLARVSDEDGNQFGHDTDQPYVVIIRPGIAEVLGEAALARIALFTSPDADVDGVDPAVASTTEEGGAV

SEQ ID NO: 37697 - protein, 1147 aa, Burkholderia cepacia
MKKLIRIRVVQFFLYEMRDVEVGTNCGIFGANGSGKSSLLDAVQIVMLGANESRGSAGVAFNAQADESNHNSRNIRSYCLGQYGDSPDARVRDSAHTYITLVWEDTTTQEIVSTGVSIYVSADREKSDVQGRYILPADIALTDHLELVDGEYRPRPWASFRQMLSQRAHGEEVLFHDSERFVNAMLFRLRGTRGAPRLDAYRQAFRFGLRMKFDKSVDDIVRQQVLETRPTNIKRFKEVLHTFQEMAALVRNVQAKLDEAELIETDFADAHRRSTHSVSLAALAQAAELEVANEAVTAAEEAEGRASAALEAANARRDEVNRQVEAAEQHARDSASARDKHASHADAALLRESLAKIQNRLTEQRTGLHRSIKAIGRAIDAQIPGKLIANSDEATALALKDVHALLDGDNISRRDAVEATVRKALRAAKLLSNEVFEEMQSVGRAQTAIEAELAAAQENQERIAKGKPPLEGPAAALKRALANAGVDATPVCDLVRVDDPDWQPAIESYLGTSNMQALLVDETDERKAFRVSRQAAIYDAKVVMPSKFSSRSSPRRGAVAELISGNSAAAVNYLRSKFGDTQRAETEDECFAHRFALTKDGMLLADGEMVRKRPVNPALFKIGPTSAATRTSIAEQARQLQEKIDGLKERYAKLKHLLNNLGPFVGGEQEKIHEVLEIFDRMIKEAADEEDLTQRLQALDTDEYRHLVQVAQAAEATLGNVRKQLLAAAEAVGAAETACQQKREDTKTKQSRAVTQQGIAEAARAVDGYDADYASDQWERLLTRQGLSFNEIVADCKHRSNRAETDSRQKWSSAMQKLSAFLVRHNEFMPAGTQDDWRSARTWLDARVIVLTETGLRENKARMEDALSAAKSTFRNDVAVALHEHLEWLSDTVNRMNEALRLAPMFTNNERYQFRSHVRPAFAVLLKFIKDVAQYGPTEDLLGGAGELPKEFEELMREKTVTGAAAMKSPLDDYREFFDFDIEVLREETSTGTTKHIGWLSKRVGSGSGGEHRAPLYVIAGAALSSAYRLERGDDTGIRLLVIDEAFIKMDPRNIVATMRYFEELGLQVFMASTGDALGSLTAFLDRYYDIMRDAESNVVVLEGHDISPETREMFRADLPEFNPELIEAEIRRQYLPQADSTEDAAA

SEQ ID NO: 37698 - protein, 395 aa, Burkholderia cepacia
MSRQDQTEMDPLARKALERLLKSADKHAAGAAVRRPALTGSALSEYHELRGLKAKEDFEAVMAYAQAEGAIMALRPRGDPQGLIERVELIDVDKLASILGKVPHAVRVQSARQALASHLGEHPILNDVLSGWERLKKVRGTGPDAAANWAMACDVITYCQAQVALGATETPVRDASARLFKNSKCIESLVPCLDALLAGNIDDDARPDAEVLQELGLYREPQPARLAGNIVVRRERGAFPLDCPYCALPPSTVLGLGSIPSKLLTIENQTTFHVWARQHCDSDVLCLYTAGMPSPAWRAMYLRLLSKLPVSIPVLHWGDVDEGGFRIAAVLSRCAAEAGHTLLPWKMSPLEVPESLRRAAPIRTVDRMVKYAQETGWESIAYELAEAKLVAEQEG

SEQ ID NO: 37699 - protein, 486 aa, Burkholderia ubonensis
MFLDYPTLDALRTRHPAWRLLRSDHAPLAVSFLHRAFVAPNVREVAAPFLAEALEDELYALREQLGDGAFPKPALDYLNDWASPEKGWLRKFYRQGSDEPHFDLTPAAGKAIAWLGTLMERSFVGTESRLLTLFELLRQMAEGSETDPERRLAELHARRSQIDEEIARVEAGDVRLLDDAAIKDRFQQFMQMARDLLTDFREVEQNFRLLDRHVRERIALWEGSKGALIEEIMGERDAIADSDQGSSFRAFWDFLMSSRRQEELSERLEHVLALPAITEMKPDARTRRVHYDWLEAGEHTQRTVAQLSQQLRRFLDDQAWLENRRIMDILRGIETKALVLREAPPPGSVMEIETASADIELPIERPLYAPALRPLIANVAIETGDADLDASALYTQIVVDRARLASHIRRCLQDRRQVTLAELAASQPLLHGLAELVAYLQLSAEAGTFRATVDETVSDTIEWQANDANGAAIVKRATMPRVIFTR

SEQ ID NO: 37700 - protein, 216 aa, Burkholderia ubonensis
MEEQQTPSLDRGDLSTVAIALLKGVVYRDGNERLWAALLELQTHVRDYVAVLGLELVVDEAEGYAFVKSRTEPDAEVDGDQAKLPRLVARRPLSFPVSLLLALLRKKLAEWDAGGGDTRLVLSREDIVELVRVFLPASTNEARLVDQIDTHVNKIVDLGFLRRMKTASGPPTFEVRRILKAFVDAQWLLDFDARLASYQAHLRDSTNSDQTESRDE

SEQ ID NO: 37701 - protein, 1123 aa, Burkholderia ubonensis
MNEPRTLGLDFAADDTLTGFRLERLEVFNWGTFDDRAWVLRVDGRNGLLTGDIGSGKSTLVDAITTLLVPAQRIAYNKAAGADSKERTLRSYVLGYYKSERNEVTGTAKPVSLRDHNSYSVILGVFRNAGYDATVTLAQVFWMKDAQAQPARFFVSAERDLSIATDFSRFGTDIAQLRKKLRGLGAEIEDTFPKYSAWFRRRFGIENEQALELFHQTVSMKSVGNLTDFVRSHMLEPFDVAPRVDALIAHFDDLNRAHEAVLKTKRQVELLTPLVDDCDRHSAQGRVLEGWRACREALRPYFAGLKLGLVERRLQLLEEDHARATSRKARHEEARDQARQRVDDLRRAVAEQGGDRIAQLDVEIREHERESVRRRERAQRYAAIVTLFGETEAADEAAFASQRQRLAEQRSSLVDDEAQQQNAITEWSVAFREGKARRDLLEDEIASLKARRNNIPKEQVAMRASLCSALGLEEDALPFAGELIQVREDARDWEGAAERVLRNFGLSLLVPDEHYANVAAWVDRTHLRGRLVYFRVRSERTARAAEAIELHRHSLAHKLAIKPDSQFYGWLEREIVRRFDYACCDTQEQFRRETRAITRAGQAKAPGERHEKDDRHALDDRSRYVLGWSNTAKISALAAQRQALEARLGEIGQRLGEAQHEHTKVREQLEALARAGEFAEFREIDWSSCAAAIARLADEKARLESASDALAELTAQLDSAQASLKESEAAMSETDSELGGILAKREAAQALREETHALVAEVDAELAERIEALRAEILGEHQLSVESCDNRERDVREALTTRIDNETKSLGRLAERIVKAMAAFKEAYKLETADFDASLAANSEYRDMLARLQADDLPRFETRFKELLNVNTINEIANFHAQLARERATIKERIERINESLRQIDYNAGRYIVLESQPSPDAEIREFQSDLRACTEGELTGSDDSQYSEAKFLQVKRIIDRFRGREGLTEQDRRWRAKVTDVRNWFLFAASERWREDDSEYEHYSDSGGKSGGQKEKLAYTILAASLAYQFGLEWGAVRSRSFRFVVIDEAFGRGSDESAQYGLTLFQKLNLQLLIVTPLQKIHIIEPFVSSVGFVQNDGGRASKLRTLSIEEYRAHKAEFEQ

SEQ ID NO: 37702 - protein, 394 aa, Burkholderia ubonensis
MSWTTAVELRARLQRLWERGEWLRSLVDGAEGLFPLRLAIKGPSSSELAERFDTVRAWITEIAATPRIRIEWREINHRILGQQRLPRAAWVDSLDDALTVAGKQRDAARFERLLEITRSRQPKLIAWLAQRPMQALELAGDWERLLAVVDWLQAHPQPGIYLRQAEIAGVDTKFIEARRGVLSQWLDLVLPSEAIDSSRTGAAQFAARYGFRDKPPRIRFRVLDERLAVLPGMGRPDITLDADSFARLALPCRHVFVTENETNFLAFPDVPQAIVLFGAGYGWEALEPAQWLTDCALHYWGDIDTHGFAILDQLRCRFPHAGSFLMDRATLIAHEAFWGDEGDQVMRDLPRLTAQERELFDDLRDNRIRRGLRLEQERVGFGWVRAALEERSFV

SEQ ID NO: 37703 - protein, 499 aa, Burkholderia anthina
MDLDWKQRTHQYVQSRRQHPAWQLLAARSAPLVLSCLQTLFEKSHDGIEVDVAEQMLAAVLEQHANSDEFGVDPEGDCAALARKELRGWIRRSLLIERAGRLYATDALEEALRFVAALDGRLMTSTASRLSIVQREIENLESNLNPDRRSRSRYLQRKIQELERELEDVKTGNVRAMTESEAIEGIREIYNLATSLRADFRRVEDSYREADQALRQSIISERGHRGAVVDKLLNSHDELLETAEGKVFRGFQQQLGRSAELDAMKHRLRQIIQHPATRSALNPSQQHELRWLIIRLIDESAAVIRARARSERDVKGFLRTGLAVEHHRVGELIHDVLQQALALDWASASTRNMDGPLPPVAISVAGLPLVERIRFKAIQDDARLVLELQARSMDPRSIDDEFWEAFDGLDRQALCESTVALLEQHGTRMGIAELARHLPPTHDLETIALWLSMAREAGVSMDGERESVDVMGRDGMPLRFDVPVVALGFDDVRGLDMEL

SEQ ID NO: 37704 - protein, 253 aa, Burkholderia anthina
MVSIFDTLTASKDDGREVDKVAQLSGAHDEASEFDAGPSAEAASFTSRDVKDACQELLKFGLLEVARKPNLYRITATSRADIDRILEPLDLVLKIDDIRGLAFVSVAQSYCRESEDDEWSHPLVRRQRLTLEQSLLVALLRQRYLAHEQERGIGVPDAPALVEDVAAQLQLYLGGLGSDTRELQRARNLLDKLKPHGVVSEVDQQDQFMIRPIIVHLANPENLLGLLQALKQASPGIQRTDDCAPVGDDGEIA

SEQ ID NO: 37705 - protein, 1109 aa, Burkholderia anthina
MISANSDHRAIDALLSTPAFILTRLDLFNWGPFGGRHQAAIDIEGTAIIGQTGSGKTTLIDALMTLIAAQPRYNLASTGGHESDRDLVSYVRGVSGAGREGDTDHISRPGKTVSAIAATFGNGSDTLTIAGIFSLEGSGSSATELDRIWMIERGAEFGLDELLELHNAGGKRALRQHERASSGSLKVYDSKKAYILELRRIFEVGENAFTLLNRAAGLKQLNSIDDLFRDLVLDDRSAFPRALEVASEFDNLAEIREELETARKQRDSLVPIEKGWAQRAERLEQRDLQVRLVSLLPIAVATREHQLWVDRERELGQEKAGCERRIEDHTRRTKELESAAQRLRDIYLRDGGSGIEELEGKLEAERKHLETVRRHANDYVLFAKKLQFSQALTLETFRQNEASAQALLASTAVAIEEAERLAYAKGAALAGTEQTLTEQQAALANARSHPGSNIPSLYQQFRRDLAGQLNLHDEDLPFVAELVEVQKSQSAWRGAIERAMGGHRLRIMVPASHMKLALAWVNGRDNRLHVRLVDVMAPDRAVEFLTDGFTRKLNFKDHPYREAVRGLLAQIDRHCVASPEVLKHTPHGMTAQGLMSGKSGFFEKQDKTPLSQGWLTGFDNKDLLAELERQCDETARELAELTAKFEAARAQVTEVQVRRTMLDRVLSIDFADIDVRQAERNVADSTRRLSALTDPSSDTARAKQAWEEVRAELEKISQARDESLIQQTKLQEQYDTAVNGRERAFATIGEGLNAIEMALVEQHFDFVGVQTVDTLMRQQAQIDVRLRARLEELAARINDHERQLVRGMGAARAVDTGALAEVGTEVEDVPQYLERLRVLRDEALPEKLDRFLGYLNQSSDEGVTQLLRSIDNEVETIVERIEDLNATMRRVDFQPGRYLQLEPRRVVHESLRTLEQAQRTLRAATLQDDQGESQFNALAEVVRLMRDASERRTTVGAKALLDPRYRLQFAVSVIERSSGAVCETRKGSQGGSGGEKEIIASYILTASLSYALCPDGKDRPLFGTIVLDEAFSKSSQAVAGRIISALREFGLHPLFVTPNKEMRLLRAHTRSAILIHRKGLQATMTSLSWEELDSIARARQMIGRDEITE

SEQ ID NO: 37706 - protein, 381 aa, Burkholderia anthina
MKSPNDMAARLARSWQSADEREARLLYPDSWPLRLPIGRPSPKAFTEQTESVKRHCDAWRSVEIGIVHWETVAYRAGGSPVRLPHLWELRSPSDWVRATQDAAIAAEYERLGEVVRHMDAQFHALVVRQRRLMMERPVHEIIKAGEVALALSPGCAQGRPLRALGVCNTDSKFFERHRALLCHMLNVRFGGQVSELGLEAFLGAPEDDERWLLVVPLAAGILPFRQQRIRAGELVQLPKCVGHIIIVENERSVHQLAELPDAVAILGAGLSLDWTHDPWLASKRVAYWGDMDTWGLKMLGKVRQAIPSLSALLMNRDCFERYAANLAVRELVPVDGRRPDGLTEDEGAFFEYLLTQERGRLEQEFLPKDIVRAAMHAWYEA

SEQ ID NO: 37707 - protein, 499 aa, Burkholderia anthina; identical to SEQ ID NO: 37703

SEQ ID NO: 37708 - protein, 253 aa, Burkholderia anthina; identical to SEQ ID NO: 37704

SEQ ID NO: 37709 - protein, 1109 aa, Burkholderia anthina; identical to SEQ ID NO: 37705

SEQ ID NO: 37710 - protein, 381 aa, Burkholderia anthina; identical to SEQ ID NO: 37706

SEQ ID NO: 37711 - protein, 486 aa, Burkholderia ubonensis; identical to SEQ ID NO: 37679

SEQ ID NO: 37712 - protein, 216 aa, Burkholderia ubonensis
MEEQQTSSLGRGDLSTVAIALLKGVVYRDVNERLWAALLELQTHVRDYVAVLGLELVVDEAEGYAFVKSRTEPDAEVDGDQVKLPRLVARRPLSFPVSLLLALLRKKLAEWDAGGGDTRLVLSREDIVELVRVFLPASTNEARLVDQIDTHVNKIVDLGFLRRMKTASGPPTFEVRRILKAFVDAQWLLDFDARLASYQAHLRDATNSDQTERRDE

SEQ ID NO: 37713 - protein, 1123 aa, Burkholderia ubonensis; identical to SEQ ID NO: 37681

SEQ ID NO: 37714 - protein, 394 aa, Burkholderia ubonensis
MSWTTAVELRARLQHLWARGEWLRSFVDGTEGLFPLRLAIKGPSSSELAERFDAVRAWIAEIAATPHIRIEWREINHRILGMQRLPRAAWVDSLDDALTVAGKHRDAARFERLLEITRSRQPKLIAWLAQRPMQALELAGDWERLLAVVDWLQAHPHPGVYLRQAEIAGVDTKFIEARRGVLSQWLDLVLPSEAIDSSRTGVAQFAARYGFREKQPRIRFRVLDERLAVLPSMGRPDIALDADSFARLALPCRHVFVTENETNFLAFPDVPQAIVLFGAGYGWEALEPARWLADCALHYWGDIDTHGFAILDQLRCRFPHVNSFLMDRATLMAHEAFWGDEGDQVMRDLPRLTAQERELFDDLRDNRIRRGLRLEQERVGFGWVRAALEERSFV

SEQ ID NO: 37715 - protein, 486 aa, Burkholderia ubonensis
MFLDYPTLDALRTRHPAWRLLRSDHAPLAVSFLHRAFVAPNVREVAAPFLAEALEDELYALREQLGDGVFPKPALEYLNDWASPEKGWLRKFYRQGSDEPHFDLTPAAGKAIAWLGTLMERSFVGTESRLLTLFELLRQMAEGSETDPERRLAELHARRSQIDEEIARVEAGDVRLLDDAAIKDRFQQFMQMARDLLTDFREVEQNFRLLDRHVRERIALWEGSKGALIEEIMGERDAIADSDQGSSFRAFWDFLMSSRRQEELSERLEHVLALPAITEMKPDARTRRVHYDWLEAGEHTQRTVAQLSQQLRRFLDDQAWLENRRIMDILRGIETKALVLREAPPPGSVMEIETASADIELPIERPLYAPALRPLIANVAIETGDADLDASALYTQIVVDRARLASHIRRCLQDRQQVTLAELAASQPLLHGLAELVAYLQLSAEAGTFRATVDETVSDTIEWQANDANGAAIVKRATMPRVIFTR

SEQ ID NO: 37716 - protein, 216 aa, Burkholderia ubonensis
MEEQQTSSLGRGDLSTVAVALLKGVVYRDGNERLWAALLELQTHVRDYVAVLGLELVVDEAEGYAFVKSRTEPDAEVDGDQVKLPRLVARRPLSFPVSLLLALLRKKLAEWDAGGGDTRLVLSREDIVELVRVFLPASTNEARLVDQIDTHVNKIVDLGFLRRMKTASGPPTFEVRRILKAFVDAQWLLDFDARLASYQAHLRDSTNSDQTESRDE

SEQ ID NO: 37717 - protein, 1123 aa, Burkholderia ubonensis
MNEPRTLGLDFAADDTLTGFRLERLEVFNWGTFDERVWVLRVDGRNGLLTGDIGSGKSTLVDAITTLLVPAQRIAYNKAAGADSKERTLRSYVLGYYKSERNEVTGTAKPVSLRDHNSYSVILGVFRNAGYDATVTLAQVFWMKDAQAQPARFFVSAERDLSIATDFSRFGTDIAQLRKKLRGLGAEIEDTFPKYSAWFRRRFGIENEQALELFHQTVSMKSVGNLTDFVRSHMLEPFDVAPRVDALIAHFDDLNRAHEAVLKTKRQVELLTPLVDDCDRHSEQGHVLEGWRACREALRPYFAGLKLGLVERRLQLLEEDHARATSRKARHEEARDQARQRVDDLRRAVAEQGGDRIAQLDVEIREHERESVRRRERAQRYAAIVTLFGETEAADEAAFASQRQRLAEQRSSLVDDEAQQQNAITEWSVAFREGKARRDLLEDEIASLKARRNNIPKEQVAMRASLCSALGLEEDALPFAGELIQVREDARDWEGAAERVLRNFGLSLLVPDEHYANVAAWVDRTHLRGRLVYFRVRSERTARAAEAIELHRHSLAHKLAIKPDSQFYGWLEREIGRRFDYACCDTQEQFRRETRAITRAGQAKAPGERHEKDDRHALDDRSRYVLGWSNTAKISALAAQRQALEARLGEIGQRLGEAQHEHTKVREQLEALARAGEFAEFREIDWSSCAAAIARLADEKARLESASDALAELTAQLDSAQASLKESEAAMSETDSELGGILAKREAAQALREETHALVAEVDAELAERIEALRAEILGEHQLSVESCDNRERDVREALTTRIDNETKSLGRLAERIVKAMAAFKEAYKLETADFDASLAANSEYRDMLARLQADDLPRFETRFKELLNVNTINEIANFHAQLARERATIKERIERINESLRQIDYNAGRYIVLESQPSPDAEIREFQSDLRACTEGELTGSDDSQYSEAKFLQVKRIIDRFRGREGLTEQDRRWRAKVTDVRNWFLFAASERWREDDSEYEHYSDSGGKSGGQKEKLAYTILAASLAYQFGLEWGAVRSRSFRFVVIDEAFGRGSDESAQYGLTLFQKLNLQLLIVTPLQKIHIIEPFVSSVGFVQNDGGRASKLRTLSIEEYRAHKAEFEQ

SEQ ID NO: 37718 - protein, 394 aa, Burkholderia ubonensis
MSWTTAVELRARLQRLWERGEWLRSLVDGAEGLFPLRLAIKGPSSSELAERFDTVRAWITEIAATPRIRIEWREINHRILGQQRLPRAAWVDSLDDALTVAGKHRDAARFERLLEITRSRQPKLIAWLAQRPMQALELAGDWERLLAVVDWLQAHPQPGIYLRQAEIAGVDTKFIEARRGVLSQWLDLVLPSEAIDSSRTGAAQFAARYGFRDKPPRIRFRVLDERLAVLPGMGRPDIALDADSFARLALPCRHVFVTENETNFLTFPDVPQAIVLFGAGYGWEALEPARWLADCALHYWGDIDTHGFAILDQLRCRFPHAGSFLMDRATLMAHEAFWGDEADQVMRDLPRLTAQERELFDDLRDNRIRRGLRLEQERIGFGWVRAALEERALV

SEQ ID NO: 37719 - protein, 486 aa, Burkholderia ubonensis
MFLDYPTLDALRTRHPAWRLLRSDHAPLAVSFLHRAFVAPNVREVAAPFLAEALEDELYALREQLGDGAFPKPALEYLNDWASPEKGWLRKFYRQGSDEPHFDLTPAAGKAIAWLGTLMERSFVGTESRLLTLFELLRQMAEGSETDPERRLAELHARRSQLDEEIARVEAGDVRLLDDAAIKDRFQQFMQMARDLLTDFREVEQNFRLLDRHVRERIALWEGSKGALIEEIMGERDAIADSDQGSSFRAFWDFLMSSRRQEELSERIEHVLALPAITEMKPDARTRRVHYDWLEAGEHTQRTVAQLSQQLRRFLDDQAWLENRRIMDILRGIETKALVLREAPPPGSVMEIETASADIELPIERPLYAPALRPLIANVAIETGDADLDASALYTQIVVDRARLASHIRRCLQDRRQVTLAELAASQPLLHGLAELVAYLQLSAEAGSFRATVDETVSDTIEWQANDANGAAIVKRATMPRVIFTR

SEQ ID NO: 37720 - protein, 216 aa, Burkholderia ubonensis
MEEQQTSSLGRGDLSTVAIALLKGVVYRDVNERLWAALLELQTHVRDYVAVLGLELVVDEAEGYAFVKSRTEPDAEVDGDQVKLPRLVARRPLSFPVSLLLALLRKKLAEWDAGGGDTRLVLSREDIVELVRVFLPASTNEARLVDQIDTHVNKIVDLGFLRRMKTASGPPTFEVRRILKAFVDAQWLLDFDARLASYQAHLRDATNSDQTESRDE

SEQ ID NO: 37721 - protein, 1123 aa, Burkholderia ubonensis
MNEPRTLGLDFAADDTRTGFRLERIEVFNWGTFDERVWVLRVDGRNGLLTGDIGSGKSTLVDAITTLLVPAQRIAYNKAAGADSKERTLRSYVLGYYKSERNEVTGTAKPVSLRDHNSYSVILGVFRNAGYDATVTLAQVFWMKDAQAQPARFFVSAERDLSIATDFSRFGTDIAQLRKKLRGLGAEIEDAFPKYSAWFRRRFGIENEQALELFHQTVSMKSVGNLTDFVRSHMLEPFDVAPRVDALIAHFDDLNRAHEAVLKTKRQVELLTPLVDDCDRHSEQGHVLEGWRACREALRPYFAGLKLGLVERRLQLLEEDHARATSRKARHEEARDQARQRVDDLRRAVAEQGGDRIAQLDVEIREHERESVRRRERAQRYAAIVTLFGETEAADEAAFASQRQRLAEQRSSLVDDEAQQQNAITEWSVAFREGKARRDVLEDEIASLKARRNNIPKEQVAMRASLCSALGLEEDALPFAGELIQVREDARDWEGAAERVLRNFGLSLLVPDEHYASVAAWVDRTHLRGRLVYFRVRSERSARAAEAIELHRHSLAHKLAIKPDSLFYGWLEREIGRRFDYACCDTQEQFRRETRAITRAGQAKAPGERHEKDDRHALDDRSRYVLGWSNTAKISALAAQRQALEARLGEIGQRLGEAQHEHTKVREQLEALARAGEFAEFREIDWSSCAAAIARLADEKARLESASDALAELTAQLDSAQASLKESEAAMSETDSELGGILAKREAAQALREETHALVAEVDAELAERIEALRAEILGEHQLSVESCDNRERDVREALTTRIDNETKSLGRLAERIVKAMAAFKEAYKLETADFDASLDANPEYRDMLARLQADDLPRFETRFKELLNVNTINEIANFHAQLARERATIKERIERINESLRQIDYNAGRYIILESQPSPDAEIRDFQSDLRACTEGELTGSDDSQYSEAKFLQVKRIIDRFRGREGLTEQDRRWRAKVTDVRNWFLFAASERWREDDSEYEHYSDSGGKSGGQKEKLAYTILAASLAYQFGLEWGAVRSRSFRFVVIDEAFGRGSDESAQYGLTLFQKLNLQLLIVTPLQKIHIIEPFVSSVGFVQNDGGRASKLRTLSIEEYRAHKAEFEQ

SEQ ID NO: 37722 - protein, 394 aa, Burkholderia ubonensis
MSWTTAVELRARLQHLWARGEWLRSFVDGTEGLFPLRLAIKGPSSSELAERFDAVRAWIAEIAATPHIRIEWREINHRILGVQRLPRAAWVDSLDDALAVAGKHRDAAQFARLLEITRARQPKLAAWLAQRPLQALEFAGDWERLLAVVDWLQAHPHPGVYLRQAEIAGVDTKFIEARRGVLSQWLDLVLPSEAIDSSRTGVAQFAARYGFREKQPRIRFRVLDERLAVLPSMGRPDIALDADSFARLALPCRHVFVTENETNFLAFPDVPQAIVLFGAGYGWEALKPARWLADCALHYWGDIDTHGFAILDQLRCRFPHVNSFLMDRATLMAHEAFWGDEGDQVMRDLPRLTAQERELFDDLRDNRIRRGLRLEQERVGFGWVRAALEERSFV

SEQ ID NO: 37723 - protein, 486 aa, Burkholderia ubonensis; identical to SEQ ID NO: 37719

SEQ ID NO: 37724 - protein, 216 aa, Burkholderia ubonensis; identical to SEQ ID NO: 37720

SEQ ID NO: 37725 - protein, 1123 aa, Burkholderia ubonensis; identical to SEQ ID NO: 37721

SEQ ID NO: 37726 - protein, 394 aa, Burkholderia ubonensis; identical to SEQ ID NO: 37722

SEQ ID NO: 37727 - protein, 486 aa, Burkholderia ubonensis; identical to SEQ ID NO: 37715

SEQ ID NO: 37728 - protein, 216 aa, Burkholderia ubonensis; identical to SEQ ID NO: 37716

SEQ ID NO: 37729 - protein, 1123 aa, Burkholderia ubonensis; identical to SEQ ID NO: 37717

SEQ ID NO: 37730 - protein, 394 aa, Burkholderia ubonensis; identical to SEQ ID NO: 37718

SEQ ID NO: 37731 - protein, 486 aa, Burkholderia ubonensis; identical to SEQ ID NO: 37699

SEQ ID NO: 37732 - protein, 216 aa, Burkholderia ubonensis; identical to SEQ ID NO: 37700

SEQ ID NO: 37733 - protein, 1123 aa, Burkholderia ubonensis
MNEPRTLGLDFAADDTLTGFRLERLEVFNWGTFDDRAWVLRVDGRNGLLTGDIGSGKSTLVDAITTLLVPAQRIAYNKAAGADSKERTLRSYVLGYYKSERNEVTGTAKPVSLRDHNSYSVILGVFRNAGYDATVTLAQVFWMKDAQAQPARFFVSAERDLSIATDFSRFGTDIAQLRKKLRGLGAEIEDTFPKYSAWFRRRFGIENEQALELFHQTVSMKSVGNLTDFVRSHMLEPFDVAPRVDALIAHFDDLNRAHEAVLKTKRQVELLTPLVDDCDRHSEQGHVLEGWRACREALRPYFAGLKLGLVERRLQLLEEDHARATSRKARHEEARDQARQRVDDLRRAVAEQGGDRIAQLDVEIREHERESVRRRERAQRYAAIVTLFGETEAADEAAFASQRQRLAEQRSSLVDDEAQQQNAITEWSVAFREGKARRDLLEDEIASLKARRNNIPKEQVAMRASLCSALGLEEDALPFAGELIQVREDARDWEGAAERVLRNFGLSLLVPDEHYANVAAWVDRTHLRGRLVYFRVRSERTARAAEAIELHRHSLAHKLAIKPDSQFYGWLEREIGRRFDYACCDTQEQFRRETRAITRAGQAKAPGERHEKDDRHALDDRSRYVLGWSNTAKISALAAQRQALEARLGEIGQRLGEAQHEHTKVREQLEALARAGEFAEFREIDWSSCAAAIARLADEKARLESASDALAELTAQLDSAQASLKESEAAMSETDSELGGILAKREAAQALREETHALVAEVDAELAERIEALRAEILGEHQLSVESCDNRERDVREALTTRIDNETKSLGRLAERIVKAMAAFKEAYKLETADFDASLAANSEYRDMLARLQADDLPRFETRFKELLNVNTINEIANFHAQLARERATIKERIERINESLRQIDYNAGRYIVLESQPSPDAEIREFQSDLRACTEGELTGSDDSQYSEAKFLQVKRIIDRFRGREGLTEQDRRWRAKVTDVRNWFLFAASERWREDDSEYEHYSDSGGKSGGQKEKLAYTILAASLAYQFGLEWGAVRSRSFRFVVIDEAFGRGSDESAQYGLTLFQKLNLQLLIVTPLQKIHIIEPFVSSVGFVQNDGGRASKLRTLSIEEYRAHKAEFEQ

SEQ ID NO: 37734 - protein, 394 aa, Burkholderia ubonensis
MSWTTAVELRARLQRLWERGEWLRSLVDGAEGLFPLRLAIKGPSSSELAERFDTVRAWITEIAATPRIRIEWREINHRILGQQRLPRAAWVDSLDDALTVAGKQRDVARFERLLEITRSRQPKLIAWLAQRPMQALELAGDWERLLAVVDWLQAHPQPGIYLRQAEIAGVDTKFIEARRGVLSQWLDLVLPSEAIDSSRTGAAQFAARYGFRDKPPRIRFRVLDERLAVLPGMGRPDITLDADSFARLALPCRHVFVTENETNFLAFPDVPQAIVLFGAGYGWEALEPAQWLADCALHYWGDIDTHGFAILDQLRCRFPHAGSFLMDRATLMAHEAFWGDEGDQVMRDLPRLTAQERELFDDLRDNRIRRGLRLEQERVGFGWVRAALEERSFV

SEQ ID NO: 37735 - protein, 486 aa, Burkholderia ubonensis; identical to SEQ ID NO: 37699

SEQ ID NO: 37736 - protein, 216 aa, Burkholderia ubonensis; identical to SEQ ID NO: 37700

SEQ ID NO: 37737 - protein, 1123 aa, Burkholderia ubonensis
MNEPRTLGLDFAADDTLTGFRLERLEVFNWGTFDDRAWVLRVDGRNGLLTGDIGSGKSTLVDAITTLLVPAQRIAYNKAAGADSKERTLRSYVLGYYKSERNEVTGTAKPVSLRDHNSYSVILGVFRNAGYDATVTLAQVFWMKDAQAQPARFFVSAERDLSIATDFSRFGTDIAQLRKKLRGLGAEIEDTFPKYSAWFRRRFGIENEQALELFHQTVSMKSVGNLTDFVRSHMLEPFDVAPRVDALIAHFDDLNRAHEAVLKTKRQVELLTPLVDDCDRHSEQAHVLEGWRACREALRPYFAGLKLGLVERRLQLLEEDHARATSRRARHEEARDQARQRVDDLRRAVAEQGGDRIAQLDVEIREHERESVRRRERAQRYAAIVTLFGETEAADEAAFASQRQRLAEQRSSLVDDEAQQQNAITEWSVAFREGKARRDLLEDEIASLKARRNNIPKEQVAMRASLCSALGLEEDALPFAGELIQVREDARDWEGAAERVLRNFGLSLLVPDEHYANVAAWVDRTHLRGRLVYFRVRSERTARVAEAIELHRHSLAHKLAIKPDSQFYGWLEREIGRRFDYACCDTQEQFRRETRAITRAGQAKAPGERHEKDDRHALDDRSRYVLGWSNTAKISALAAQRQALEARLGEIGQRLGEVQHEHTKVREQLEALARAGEFAEFREIDWSSCAAAIARLADEKARLESASDALAELTAQLDSAQASLKESEAAMSETDSELGGILAKREAAQALREETHALVAEVDAELAERIEALRAEILGEHQLSVESCDNRERDVREALTTRIDNETKSLGRLAERIVKAMAAFKEAYKLETADFDASLAANSEYRDMLARLQADDLPRFETRFKELLNVNTINEIANFHAQLARERATIKERIERINESLRQIDYNAGRYIVLESQPSPDAEIREFQSDLRACTEGELTGSDDSQYSEAKFLQVKRIIDRFRGREGLTEQDRRWRAKVTDVRNWFLFAASERWREDDSEYEHYSDSGGKSGGQKEKLAYTILAASLAYQFGLEWGAVRSRSFRFVVIDEAFGRGSDESAQYGLTLFQKLNLQLLIVTPLQKIHIIEPFVSSVGFVQNDGGRASKLRTLSIEEYRAHKAEFEQ

SEQ ID NO: 37738 - protein, 399 aa, Burkholderia ubonensis
MSWTTAVELRARLQHLWARGEWLRSFVDGTEGLFPLRLAIKGPSSSELAERFDAVRAWIAEIAATPHIRIEWREINHRILGVQRLPRAAWVDSLDDALAVAGRHRDAAQFARLLEITRARQPKLAAWLAQRPLQALEFAGDWERLLAVVDWLQAHPHPGVYLRQAEIAGVDTKFIEARRGVLSQWLDLVLPSEAIDSSRTGVAQFAARYGFREKQPRIRFRVLDERLAVLPGMGRPDIALDADSFARLALPCRHVFVTENETNFLAFPDVPQAIVLFGAGYGWEALEPARWLADCALHYWGDIDTHGFAILDQLRCRFPHVNSFLMDRATLMAHEAFWGDEGDQVMRDLPRLTAQERELFDDLRDNRIRHGLRLEQERVGFGWVRAALEPVMNLYELSR

SEQ ID NO: 37739 - protein, 486 aa, Burkholderia ubonensis; identical to SEQ ID NO: 37699

SEQ ID NO: 37740 - protein, 216 aa, Burkholderia ubonensis; identical to SEQ ID NO: 37700

SEQ ID NO: 37741 - protein, 1123 aa, Burkholderia ubonensis; identical to SEQ ID NO: 37733

SEQ ID NO: 37742 - protein, 394 aa, Burkholderia ubonensis; identical to SEQ ID NO: 37734

SEQ ID NO: 37743 - protein, 486 aa, Burkholderia ubonensis; identical to SEQ ID NO: 37699

SEQ ID NO: 37744 - protein, 216 aa, Burkholderia ubonensis
MEEQQTPSLGRGDLSTVAVALLKGVIYRDGNERLWAALLELQTHVRDYVAVLGLELVVDEAEGYAFVKSRTEPDAEVDGDQAKLPRLVARRPLSFPVSLLLALLRKKLAEWDAGGGDTRLVLSREDIVELVRVFLPASTNEARLVDQIDTHVNKIVDLGFLRRMKTASGPPTFEVRRILKAFVDAQWLLDFDARLASYQAHLRDSTNSDQTESRDE

SEQ ID NO: 37745 - protein, 1123 aa, Burkholderia ubonensis
MNEPRTLGLDFAADDTLTGFRLERLEVFNWGTFDERVWVLRVDGRNGLLTGDIGSGKSTLVDAITTLLVPAQRIAYNKAAGADSKERTLRSYVLGYYKSERNEVTGAAKPVSLRDHNSYSVILGVFRNAGYDATVTLAQVFWMKDAQAQPARFFVSAERDLSIATDFSRFGTDIAQLRKKLRGLGAEIEDTFPKYSAWFRRRFGIENEQALELFHQTVSMKSVGNLTDFVRSHMLEPFDVAPRVDALIAHFDDLNRAHEAVLKTKRQVELLTPLVDDCDRHSEQAHVLEGWRACREALRPYFAGLKLGLVERRLQLLEEDHARATSRRARHEEARDQARQRVDDLRRAVAEQGGDRIAQLDVEIREHERESVRRRERAQRYAAIVTLFGETEAADEAAFASQRQRLAEQRSSLVDDEAQQQNAITEWSVAFREGKARRDLLEDEIASLKARRNNIPKEQVAMRASLCSALGLEEDALPFAGELIQVREDARDWEGAAERVLRNFGLSLLVPDEHYANVAAWVDRTHLRGRLVYFRVRSERTARAAEAIELHRHSLAHKLAIKPDSQFYGWLEREIGRRFDYACCDTQEQFRRETRAITRAGQAKAPGERHEKDDRHALDDRSRYVLGWSNTAKISALAAQRQALEARLGEIGQRLGEAQHEHTKVREQLEALARAGEFAEFREIDWSSCAAAIARLADEKARLESASDALAELTAQLDSAQASLKEREAAMSETDSELGGILAKREAAQALREETHALVAEVDAELAERIEALRAEILGEHQLSVESCDNRERDVREALTTRIDNETKSLGRLAERIVKAMAAFKEAYKLETADFDASLAANSEYRDMLARLQADDLPRFETRFKELLNVNTINEIANFHAQLARERATIKERIERINESLRQIDYNAGRYIVLESQPSPDAEIREFQSDLRACTEGELTGSDDSQYSEAKFLQVKRIIDRFRGREGLTEQDRRWRAKVTDVRNWFLFAASERWREDDSEYEHYSDSGGKSGGQKEKLAYTILAASLAYQFGLEWGAVRSRSFRFVVIDEAFGRGSDESAQYGLTLFQKLNLQLLIVTPLQKIHIIEPFVSSVGFVQNDGGRASKLRTLSIEEYRAHKAEFEQ

SEQ ID NO: 37746 - protein, 394 aa, Burkholderia ubonensis; identical to SEQ ID NO: 37702

SEQ ID NO: 37747 - protein, 486 aa, Burkholderia ubonensis
MFLDYPTLDALRTRHPAWRLLRSDHAPLAVSFLHRAFVAPNVREVAAPFLSEALEDELYALREQLGDGAFPKPALDYLNDWASPEKGWLRKFYRQGSDEPHFDLTPAAGKAIAWLGTLMERSFVGTESRLLTLFELLRQMAEGSETDPERRLAELHARRSQIDEEIARVEAGDVRLLDDAAIKDRFQQFMQMARDLLTDFREVEQNFRLLDRHVRERIALWEGSKGALIEEIMGERDAIADSDQGSSFRAFWDFLMSSRRQEELSERLEHVLALPAITEMKPDARTRRVHYDWLEAGEHTQRTVAQLSQQLRRFLDDQAWLENRRIMDILRGIETKALVLREAPPPGSVMEIETASADIELPIERPLYAPALRPLIANVAIETGDADLDASALYTQIVVDRARLASHIRRCLQDRRQVTLAELAASQPLLHGLAELVAYLQLSAEAGTFRATVDETVSDTIEWQANDANGAAIVKRATMPRVIFTR

SEQ ID NO: 37748 - protein, 216 aa, Burkholderia ubonensis; identical to SEQ ID NO: 37700

SEQ ID NO: 37749 - protein, 1123 aa, Burkholderia ubonensis
MNEPRTLGLDFAADDTLTGFRLERLEVFNWGTFDDRAWVLRVDGRNGLLTGDIGSGKSTLVDAITTLLVPAQRIAYNKAAGADSKERTLRSYVLGYYKSERNEVTGTAKPVSLRDHNSYSVILGVFRNAGYDATVTLAQVFWMKDAQAQPARFFVSAERDLSIATDFSRFGTDIAQLRKKLRGLGAEIEDTFPKYSAWFRRRFGIENEQALELFHQTVSMKSVGNLTDFVRSHMLEPFDVAPRVDALIAHFDDLNRAHEAVLKTKRQVELLTPLVDDCDRHSEQGHVLEGWRACREALRPYFAGLKLGLVERRLQLLEEDHARATSRKARHEEARDQARQRVDDLRRAVAEQGGDRIAQLDVEIREHERESVRRRERAQRYAAIVTLFGETEAADEAAFASQRQRLAEQRSSLVDDEAQQQNAITEWSVAFREGKARRDLLEDEIASLKARRNNIPKEQVAMRASLCSALGLEEDALPFAGELIQVREDARDWEGAAERVLRNFGLSLLVPDEHYANVAAWVDRTHLRGRLVYFRVRSERTARVAEAIELHRHSLAHKLAIKPDSQFYGWLEREIGRRFDYACCDTQEQFRRETRAITRAGQAKAPGERHEKDDRHALDDRSRYVLGWSNTAKISALAAQRQALEARLGEIGQRLGEAQHEHTKVREQLEALARAGEFAEFREIDWSSCAAAIARLADEKARLESASDALAELTAQLDSAQASLKESEAAMSETDSELGGILAKREAAQALREETHALVAEVDAELAERIEALRAEILGEHQLSVESCDNRERDVREALTTRIDNETKSLGRLAERIVKAMAAFKEAYKLETADFDASLAANSEYRDMLARLQADDLPRFETRFKELLNVNTINEIANFHAQLARERATIKERIERINESLRQIDYNAGRYIVLESQPSPDAEIREFQSDLRACTEGELTGSDDSQYSEAKFLQVKRIIDRFRGREGLTEQDRRWRAKVTDVRNWFLFAASERWREDDSEYEHYSDSGGKSGGQKEKLAYTILAASLAYQFGLEWGAVRSRSFRFVVIDEAFGRGSDESAQYGLTLFQKLNLQLLIVTPLQKIHIIEPFVSSVGFVQNDGGRASKLRTLSIEEYRAHKAEFEQ

SEQ ID NO: 37750 - protein, 394 aa, Burkholderia ubonensis; identical to SEQ ID NO: 37702

SEQ ID NO: 37751 - protein, 486 aa, Burkholderia ubonensis; identical to SEQ ID NO: 37679

SEQ ID NO: 37752 - protein, 216 aa, Burkholderia ubonensis; identical to SEQ ID NO: 37712

SEQ ID NO: 37753 - protein, 1123 aa, Burkholderia ubonensis; identical to SEQ ID NO: 37681

SEQ ID NO: 37754 - protein, 394 aa, Burkholderia ubonensis; identical to SEQ ID NO: 37714

SEQ ID NO: 37755 - protein, 486 aa, Burkholderia ubonensis; identical to SEQ ID NO: 37719

SEQ ID NO: 37756 - protein, 216 aa, Burkholderia ubonensis; identical to SEQ ID NO: 37720

SEQ ID NO: 37757 - protein, 1123 aa, Burkholderia ubonensis; identical to SEQ ID NO: 37721

SEQ ID NO: 37758 - protein, 394 aa, Burkholderia ubonensis; identical to SEQ ID NO: 37722

SEQ ID NO: 37759 - protein, 486 aa, Burkholderia ubonensis; identical to SEQ ID NO: 37699

SEQ ID NO: 37760 - protein, 216 aa, Burkholderia ubonensis; identical to SEQ ID NO: 37700

SEQ ID NO: 37761 - protein, 1123 aa, Burkholderia ubonensis
MNEPRTLGLDFAADDTLTGFRLERLEVFNWGTFDDRAWVLRVDGRNGLLTGDIGSGKSTLVDAITTLLVPAQRIAYNKAAGADSKERTLRSYVLGYYKSERNEVTGTAKPVSLRDHNSYSVILGVFRNAGYDATVTLAQVFWMKDAQAQPARFFVSAERDLSIATDFSRFGTDIAQLRKKLRGLGAEIEDTFPKYSAWFRRRFGIENEQALELFHQTVSMKSVGNLTDFVRSHMLEPFDVAPRVDALIAHFDDLNRAHEAVLKTKRQVELLTPLVDDCDRHSEQGHVLEGWRACREALRPYFAGLKLGLVERRLQLLEEDHARATSRKARHEEARDQARQRVDDLRRAVAEQGGDRIAQLDVEIREHERESVRRRERAQRYAAIVTLFGETEAADEAAFASQRQRLAEQRSSLVDDEAQQQNAITEWSVAFREGKARRDLLEDEIASLKARRNNIPKEQVAMRASLCSALGLEEDALPFAGELIQVREDARDWEGAAERVLRNFGLSLLVPDEHYANVAAWVDRTHLRGRLVYFRVRSERTARAAEAIELHRHSLAHKLAIKPDSQFYGWLEREIGRRFDYACCDTQEQFRRETRAITRAGQAKAPGERHEKDDRHALDDRSRYVLGWSNTAKISALAAQRQALEARLGEIGQRLGEAQHEHTKVREQLEALARAGEFAEFREIDWSSCAAAIARLADEKARLESASDALAELTAQLDSAQASLKESEAAMSETDSELGGILAKREAAQALREETHALVAEVDAELAERIEALRAEILGEHQLSVESCDNRERDVREALTTRIDNETKSLGRLAERIVKAMAAFKEAYKLETADFDASLDANSEYRDMLARLQADDLPRFETRFKELLNVNTINEIANFHAQLARERATIKERIERINESLRQIDYNAGRYIILESQPSPDAEIREFQSDLRACTEGELTGSDDSQYSEAKFLQVKRIIDRFRGREGLTEQDRRWRAKVTDVRNWFLFAASERWREDDSEYEHYSDSGGKSGGQKEKLAYTILAASLAYQFGLEWGAVRSRSFRFVVIDEAFGRGSDESAQYGLTLFQKLNLQLLIVTPLQKIHIIEPFVSSVGFVQNDGGRASKLRTLSIEEYRAHKAEFEQ

SEQ ID NO: 37762 - protein, 394 aa, Burkholderia ubonensis
MSWTTAVELRARLQRLWERGEWLRSLVDGAEGLFPLRLAIKGPSSSELAERFDTVRAWITEIAATPRIRIEWREINHRILGQQRLPRAAWVDSLDDALTVAGKQRDAARFERLLEITRSRQPKLIAWLAQRPMQALELAGDWDRLLAVVDWLQAHPQPGIYLRQAEIAGVDTKFIEARRGVLSQWLDLVLPSEAIDSSRTGAAQFAARYGFRDKPPRIRFRVLDERLAVLPGMGRPDITLDADSFARLALPCRHVFVTENETNFLAFPDVPQAIVLFGAGYGWEALEPAQWLTDCALHYWGDIDTHGFAILDQLRCRFPHAGSFLMDRATLIAHEAFWGDEGDQVMRDLPRLTAQERELFDDLRDNRIRRGLRLEQERVGFGWVRAALEERSFV

SEQ ID NO: 37763 - protein, 486 aa, Burkholderia ubonensis; identical to SEQ ID NO: 37699

SEQ ID NO: 37764 - protein, 216 aa, Burkholderia ubonensis; identical to SEQ ID NO: 37700

SEQ ID NO: 37765 - protein, 1123 aa, Burkholderia ubonensis; identical to SEQ ID NO: 37761

SEQ ID NO: 37766 - protein, 394 aa, Burkholderia ubonensis; identical to SEQ ID NO: 37762

SEQ ID NO: 37767 - protein, 486 aa, Burkholderia ubonensis; identical to SEQ ID NO: 37679

SEQ ID NO: 37768 - protein, 216 aa, Burkholderia ubonensis; identical to SEQ ID NO: 37712

SEQ ID NO: 37769 - protein, 1123 aa, Burkholderia ubonensis; identical to SEQ ID NO: 37681

SEQ ID NO: 37770 - protein, 394 aa, Burkholderia ubonensis; identical to SEQ ID NO: 37714

SEQ ID NO: 37771 - protein, 486 aa, Burkholderia ubonensis; identical to SEQ ID NO: 37679

SEQ ID NO: 37772 - protein, 216 aa, Burkholderia ubonensis; identical to SEQ ID NO: 37712

SEQ ID NO: 37773 - protein, 1123 aa, Burkholderia ubonensis; identical to SEQ ID NO: 37681

SEQ ID NO: 37774 - protein, 394 aa, Burkholderia ubonensis; identical to SEQ ID NO: 37714

SEQ ID NO: 37775 - protein, 486 aa, Burkholderia ubonensis; identical to SEQ ID NO: 37699

SEQ ID NO: 37776 - protein, 216 aa, Burkholderia ubonensis; identical to SEQ ID NO: 37700

SEQ ID NO: 37777 - protein, 1123 aa, Burkholderia ubonensis; identical to SEQ ID NO: 37761

SEQ ID NO: 37778 - protein, 394 aa, Burkholderia ubonensis; identical to SEQ ID NO: 37762

SEQ ID NO: 37779 - protein, 486 aa, Burkholderia ubonensis
MFLDYPTLDALRTRHPAWRLLRSDHAPLAVGFLHRVFVAPNVREVAAPFLAEALEDELYALREQLGDDAFPKPALDYLNDWASPEKGWLRKFYRRGSDEPQFDLTPAAGKAIAWLGTLMERSFVGTESRLLTLFELLRQMAEGSETDPERRLAELHARRSQIDEEIARVEAGDLRLLDDAAIKDRFQQFMQMARDLLTDFREVEQNFRLLDRHVRERIALWEGSKGALIEEIMGERDAIADSDQGSSFRAFWDFLMSSRRQEELSERLEHVLALPAITEMKPDARTRRVHYDWLEAGEHTQRTVAQLSQQLRRFLDDQAWLENRRIMDILRGIETKALVLREAPPPGSVMEIETASADIELPIERPLYAPALRPLIANVAIETGDADLDASALYTQIVVDRARLASHIRRCLQDRRQVTLAELAASQPLLHGLAELVAYLQLSAEAGSFRATVDETVSDTIEWQANDANGATIVKRATMPRVIFTR

SEQ ID NO: 37780 - protein, 216 aa, Burkholderia ubonensis
MEEQQTSSLGRGDLSTVAVALLKGVVYRDGNERLWAALLELQTHVRDYVAVLGLELVVDEAEGYAFVKSRTEPDAGVDGDQAKLPRLVARRPLSFPVSLLLALLRKKLAEWDAGGGDTRLVLSREDIVELVRVFLPASTNEARLVDQIDTHVNKIVDLGFLRRMKTASGPPTFEVRRILKAFVDAQWLLDFDARLASYQAHLRDSTNSDQTESRDE

SEQ ID NO: 37781 - protein, 1123 aa, Burkholderia ubonensis
MNEPRTLGLDFAADDTRTGFRLERLEVFNWGTFDERVWVLRVDGRNGLLTGDIGSGKSTLVDAITTLLVPAQRIAYNKAAGADSKERTLRSYVLGYYKSERNEVTGAAKPVSLRDHNHYSVILGVFRNAGYDATVTLAQVFWMKDAQAQPARFFVSAERDLSIATDFSRFGTDIAQLRKKLRGLGAEIEDTFPKYSAWFRRRFGIENEQALELFHQTVSMKSVGNLTDFVRSHMLEPFDVAPRVDALIAHFDDLNRAHEAVLKTKRQVELLTPLVDDCDRHSEQGHVLEGWRACREALRPYFAGLKLGLVERRLQLLEEDHARATSRKARHEEARDQARQRVDDLRRAVAEQGGDRIAQLDVEIREHERESVRRRERAQRYAAIVTLFGETEAADEAAFASQRQRLAEQRSSLVDDEAQQQNAITEWSVAFREGKARRDLLEDEIASLKARRNNIPKEQVAMRASLCSALGLEEDALPFAGELIQVREDARDWEGAAERVLRNFGLSLLVPDEHYASVAAWVDRTHLRGRLVYFRVRSERSARAAEAIELHRHSLAHKLAIKPDSLFYGWLEREIGRRFDYACCDTQEQFRRETRAITRAGQAKAPGERHEKDDRHALDDRSRYVLGWSNTAKISALAAQRQALEARLGEIGQRLGEAQHEHAKVREQLEALARAGEFAEFREIDWSSCAAAIARLADEKARLESASDALAELTAQLDSAQASLKESEAAMSETDSELGGILAKREAAQALREETHALIAEVDAELAERIEALRAEILGEHQLSVESCDNRERDVREALTTRIDNETKSLGRLAERIVKAMAAFKEAYKLETADFDASLDANSEYRDMLARLQADDLPRFETRFKELLNVNTINEIANFHAQLARERATIKERIERINESLRQIDYNAGRYIILESQPSPDAEIREFQSDLRACTEGELTGSDDSQYSEAKFLQVKRIIDRFRGREGLTEQDRRWRAKVTDVRNWFLFAASERWREDDSEYEHYSDSGGKSGGQKEKLAYTILAASLAYQFGLEWGAVRSRSFRFVVIDEAFGRGSDESAQYGLTLFQKLNLQLLIVTPLQKIHIIEPFVSSVGFVQNDGGRASKLRTLSIEEYRAHKAEFEQ

SEQ ID NO: 37782 - protein, 394 aa, Burkholderia ubonensis
MSWTSAVELRARLQHLWARGEWLRSFVDGTEGLFPLRLAIKGPSSSELAERFDAVRAWIAEIAATPHIRIEWREINHRILGVQRLPRAAWVDSLDDALAVAGKHRDAAQFARLLEITRARQPKLAAWLAQRPLQALEFAGDWERLLAVVDWLQAHPHPGVYLRQAEIAGVDTKFIEARRGVLSQWLDLVLPSEAIDSSRTGVAQFAARYGFREKQPRIRFRVLDERLAVLPGMGRPDIALDADSFARLALPCRHVFVTENETNFLAFPDVPQAIVLFGAGYGWEALEPARWLADCALHYWGDIDTHGFAILDQLRCRFPHVNSFLMDRATLMAHEAFWGDEGDQVMRDLPRLTAQERELFDDLRDNRIRHGLRLEQERVGFGWVRAALEERSCV

SEQ ID NO: 37783 - protein, 260 aa, Burkholderia stagnalis
MIAESDEGRSFLAFWRLLTDPSQLESLQAALEALETRPFVRLLSFEERRRLFRVTEMLLVEGTMVQDVMTTLGRSLRTFVQSREFQEQRRIQILIRQAITKSLELKDTLTNGRTLDFTLTLSTSSLRSVAQLTLTDPQERPGETTVDDAPAPEIDLDAMREMIDNADIDMPLLKANIRSALTERDHVSVRELTLMFEVTQGLASVVGYMSLGQRFGIVFENQEREFHPTELISWKGQDGIVRQARIAQVLFTRDCLNDLD

SEQ ID NO: 37784 - protein, 126 aa, Burkholderia stagnalis
MELVLAEAEGRRATVSRGNMVDHMKAYEASDNVDRARFNRQVDGAIEKAKKYNFLRLIRNSGDRFEVSPALKLVFSHDQVQALLLTYERIRTPLEGHSPGGDDIQLNPPEPDALDGLDDERESDED

SEQ ID NO: 37785 - protein, 1064 aa, Burkholderia stagnalis
MAPPNSEFNAAARGHDKVARDRSMVTYIRGAWATQESDEGVIAAQYLRPDTTLSAVAEVYANALGQTLTLVGMWWIKGKSTLAKDVRHCFFLIERALSLKELSFFMQTDYNLRSFQKHLPEVKPFETHSSFRERFKARLGIDHDLALRLLHRTQSSKNLGDINAFMRDNMLDEPKTFGIAKALCEDFNTLAAAHRDVVEARKQRDLLVHAESYHERYQKHHADVVRVEALLAQLDHHRKYLQYSLCKQRTNELTIELERLHQSIVALSRKANSEQTELERLITLRGGMNDGNVAGLTAQLETTGTRLNQVQRERNRVAGWLNTLGWQEPRDAAHFGEYLGNATLLRECGIGTDIEATEDALRNDLSAAQTQLQELLQEIKSMELRKSNLPRQLVDVRDQIASALRLDSSTFPFGGELLDVPKEFERWQGALERLLAPLTRSFLVPEEHYRGVVDWLEANHTGQHVLYLRMRTHQRRVETGPKSPGRMLDTETDDYGDWLRDEISQHYGDFVCAETSDEFRESSRAISLQGQIKRGGTRHEKNDRIRLDNRKEWMIGFSNEQKKRDLLAEFDAQRTRADESKKALDELVAARRREEQRLIAARDLSQVMWEDIDTASVAFELQRLQTQLEEAQQSHPEIRKLDDQISAQRDIASVAQKARTTEENRRDGTAQEMAKLIRERDATPQEFHVPPPDGEELQPLFGNIGELTLLNLESRWERARSNLRDDRNEADKGKSGARKDLEEVLRTFQREHRVAAADMGATLDDWSEYERVLFRLEQDDLPRFEERFFRLLNEQSDRHIAKLRQRLITEKDEIRSRMSIVNDALSQSEFNPKTYLRLENRPRTLPDVVSFLAELKACLERNVRPSATREEREEQFSALNTIVQRLHSDKPEDERWKALVLDVRQHVEFLAKEFDAQGNVRDIFQSGAGKSGGQRQKLAATCLAAALRYQLAGTDRPLPQFCTVLMDEAFDKADSEFTAMTLNIFHTFGFQMLLATPMKAVRTLEPFIGGAHVFSNKARDSSGAVSIEYDMANHRLKGLGVPRPEDGDRAANDDSDEGGAHAAE

SEQ ID NO: 37786 - protein, 177 aa, Burkholderia stagnalis
MRLLGPELREQLLGMDDLQMPVDQWNSVWRRPPSRLLVVENLDTGLAMPDLDDTAVVMALGNSVTILQRLEWVRAAEILYWGDIDTWGLHILSRLRGIFPHVNSILMTQAVLESHQHLWTEEGTQEMRPAEHLTPEESHLLRDLQQQRWRRPIRLEQERLHWPSVVEVLTRLWGGFA

SEQ ID NO: 37787 - protein, 499 aa, Burkholderia anthina; identical to SEQ ID NO: 37703

SEQ ID NO: 37788 - protein, 253 aa, Burkholderia anthina; identical to SEQ ID NO: 37704

SEQ ID NO: 37789 - protein, 1109 aa, Burkholderia anthina; identical to SEQ ID NO: 37705

SEQ ID NO: 37790 - protein, 381 aa, Burkholderia anthina; identical to SEQ ID NO: 37706

SEQ ID NO: 37791 - protein, 499 aa, Burkholderia anthina; identical to SEQ ID NO: 37703

SEQ ID NO: 37792 - protein, 253 aa, Burkholderia anthina; identical to SEQ ID NO: 37704

SEQ ID NO: 37793 - protein, 1109 aa, Burkholderia anthina; identical to SEQ ID NO: 37705

SEQ ID NO: 37794 - protein, 381 aa, Burkholderia anthina; identical to SEQ ID NO: 37706

SEQ ID NO: 37795 - protein, 488 aa, Burkholderia stagnalis
MPLDYPTLDSLRTRHPAWRLLRSDHAPLIVSFLHRVFVAPNMRVVAAPLLAEALDDELYALREQLGDGAFPKPALEYLNDWAGPEKGWLRKFYRQDSDEPQFDLTPAAEKAIAWLGTLTERSFVGTESRLLTLFELLRQMGEGSEANPEKRLAELHARRSQIDAEIARVEAGDVRLLDDAALKDRFQQFMQMARDLLADFREVEQNFRLLDRHVRERIALWEGSKGALIEEIMGERDAIADSDQGSSFRAFWDFLMSSRRQEELSERLERVLALPAITEMRPDARMRRVHYDWLEAGEHTQRTIAQLSQQLRRFLDDQAWLENRRIMDILHGIETKALALREAPPPSAVMEIETASADTELPMERPLYVPALRPVIANVAIETGEADLDASPLYTQIVVDRARLAGHIRRCLQDRPQVTLVELAASQPLTHGLAELVAYLQLSAEAGSFRATVDETITDTIAWQTNDADGTTSAKRATMPRVIFTRQR

SEQ ID NO: 37796 - protein, 217 aa, Burkholderia stagnalis
MTQEQQASSLGRGNLSTVAIALLKGVIYRDENERLWAALLELQTHVRDYVSVLGLELVVDEAEGYAFAKSRAEHDTELDADQAKLPRLVARRPLSFPVSLLLALLRKKLAEWDAGGGDTRLVLSRQEIVELVRVFLPASTNEARLVDQIDTHVNKIVELGFLRRMKTTSGPPTFEVRRILKAFVDAQWLLDFDARLASYRMHLQDPTVSNRQENRDE

SEQ ID NO: 37797 - protein, 1123 aa, Burkholderia stagnalis
MNEPRTLGLDFAADDTLTGFRLERLEVFNWGTFDERVWVLRVDGRNGLLTGDIGSGKSTLVDAITTLLVPAQRIAYNKAAGADSKERTLRSYVLGYYKSERNEVTGTARPVSLRGHNSYSVILGVFRNAGYDATVTLAQVFWMKDAQAQPARFFVNAERDLSIAADFSRFGTDIAQLRKKLRGLGAEIEDTFPKYSAWFRRRFGIENEQALELFHQTVSMKSVGNLTDFVRSHMLEPFDIAPRVDALITHFDDLNRAHEAVLKAKRQVELLTPLVDDCNRHSEQGHVLEGWRACREALKPYFAGLKLSLIERRVQLLDEDHARTTSRKARHEEARDQARQRVDDLRRAVAEQGGDRIAQLEVEIREHERESARRRERTQRYVAIVTLLGETEATDEAAFVSQRQRLAARRSSLVDDEAQQQNEITEWSMAFREGKARRDLLEDEIASLKARRNNIPKDQVAMRLNLCSALDLEEDALPFAGELIQVRETARDWEGAAERVLRNFGLSLLVPDEHYANVAAWVDRTHLRGRLVYFRVRSERAARAAETIELHRHSFAHKLAIKSDSLFYGWLEREIGRRFDYACCDTQEQFRRETRAITRAGQAKAPGERHEKDDRHALDDRSRYVLGWSNTAKIAALEAQRRALEVRLGEIGQRLGEAQNEHAKVRQQLEALARAGEFVDFREIDWSNCAAAIARLADEKARLESASDALAELTAQLDSAHATLKEREAAISETDSELGGILAKREAAQALRDETHALVAEVHAELAERIEALRAEILGEHQLSVESCDNRERDVREALTTRIDNETKSLGRLAERVVKAMAAFKDAYKLETADFDASLDASSEYRDMLARLQADDLPRFEARFKELLNVNTINEIANFHAQLARERETIKERIERINESLRQIDYNPGRYIVLESQPSPDAEIREFQSDLRVCTEGELTGSDDSQYSEAKFLQVKRIIDRFRGREGLTEQDRRWRAKVTDVRSWFLFAASERWREDDSEYEHYSDSGGKSGGQKEKLAYTILAASLAYQFGLEWGAARSRSFRFVVIDEAFGRGSDESAQYGLTLFQKLNLQLLIVTPLQKIHIIEPFVSSVGFVQNDGGRASKLRNLSIEEYHARKAEFGQ

SEQ ID NO: 37798 - protein, 394 aa, Burkholderia stagnalis
MNWTTTAELCVRLQRQWERGEWLRSLVDDTDGLFPLRLSIKGPSSSELAERFDAVRAWIAEIAATPRVRIEWREINHRILGLQRLPQAVWIDSLDDALAVAGKRRDAARFERLLEITRSRQPKLTTWLAQRPLQALEFADDWERMLAVVDWLQAHPQPGVYLRQAEIASVDTKFIEARRGVLAQWLDLVLPSEAIDSSRTGAVQFAARYGFREKPPRIRFRVLDERLAVLPGLGRPDIALDADSFARLTLPCRHVFITENEINFLAFPDVPQSIVLFGAGYGWDALEPARWLTDCALHYWGDIDTHGFAILDQLRCRFRHVGSFLMDRATLMAHEAFWGDEGDQVIRDLPRLTAQERELFDDLRDNRIRHGLRLEQERIGFGWVRAALEERTFV

SEQ ID NO: 37799 - protein, 486 aa, Burkholderia ubonensis
MFLDYPTLDALRTRHPAWRLLRSDHAPLAVSFLHRAFVAPNVREVAAPFLAEALEDELYALREQLGDGAFPKPALEYLNDWASPEKGWLRKFYRQGSDEPHFDLTPAAGKAIAWLGTLMERSFVGTESRLLTLFELLRQMAEGSETDPERRLAELHARRSQIDEEIARVEAGDVRLLDDAAIKDRFQQFMQMARDLLTDFREVEQNFRLLDRHVRERIARWEGSKGALIEEIMGERDAIADSDQGSSFRAFWDFLMSSRRQEELSERLEHVLALPAITEMKPDARTRRVHYDWLEAGEHTQRTVAQLSQQLRRFLDDQAWLENRRIMDILRGIETKALVLREAPPPGSVMEIETASADIELPIERPLYAPALRPLIANVAIETGDADLDASALYTQIVVDRARLASNIRRCLQDRRQVTLAELAASQPLLHGLAELVAYLQLSAEAGTFRATVDETVSDTIEWQANDANGAAIVKRATMPRVIFTR

SEQ ID NO: 37800 - protein, 216 aa, Burkholderia ubonensis
MEEQQTPSLGRGDLSTVAIALLKGVIYRDGNERLWAALLELQTHVRDYVSVLGLELVVDEAEGYAFVKSRTEPDAEVDGDQAKLPRLVARRPLSFPVSLLLALLRKKLAEWDAGGGDTRLVLSREDIVELVRVFLPASTNEARLVDQIDTHVNKIVDLGFLRRMKTASGPPTFEVRRILKAFVDAQWLLDFDARLASYQAHLRDSTNSDQTESRDE

SEQ ID NO: 37801 - protein, 1123 aa, Burkholderia ubonensis
MNEPRTLGLDFAADDTLTGFRLERLEVFNWGTFDERVWVLRVDGRNGLLTGDIGSGKSTLVDAITTLLVPAQRIAYNKAAGADSKERTLRSYVLGYYKSERNEVTGAAKPVSLRDHNSYSVILGVFRNAGYDATVTLAQVFWMKDAQAQPARFFVSAERDLSIATDFSRFGTDIAQLRKKLRGLGAEIEDTFPKYSAWFRRRFGIENEQALELFHQTVSMKSVGNLTDFVRSHMLEPFDVAPRVDALIAHFDDLNRAHEAVLKTKRQVELLTPLVDDCDRHSEQGHVLEGWRACREALRPYFAGLKLGLVERRLQLLEEDHARATSRKARHEEARDQARQRVDDLRRAVAEQGGDRIAQLDVEIREHERESVRRRERAQRYAAIVTLFGETEAADEAAFASQRQRLAEQRSSLVDDEAQQQNAITEWSVAFREGKARRDVLEDEIASLKARRNNIPKEQVAMRASLCSALGLEEDALPFAGELIQVREDARDWEGAAERVLRNFGLSLLVPDEHYANVAAWVDRTHLRGRLVYFRVRSERTARVAEAIELHRHSLAHKLAIKPDSQFYGWLEREIGRRFDYACCDTQEQFRRETRAITRAGQAKAPGERHEKDDRHALDDRSRYVLGWSNTAKISALAAQRQALEARLGEIGQKLGEAQHEHAKVREQLEALARAGEFAEFREIDWSSCAAAIARLADEKARLESASDALAELTAQLDSAQASLKESEAAMSETDSELGGILAKREAAQALREETHALIAEVDAELAERIEALRAEILGEHQLSVESCDNRERDVREALTTRIDNETKSLGRLAERIVKAMAAFKEAYKLETADFDASLDANSEYRDMLARLQADDLPRFETRFKELLNVNTINEIANFHAQLARERATIKERIERINESLRQIDYNAGRYIILESQPSPDAEIREFQSDLRACTEGELTGSDDSQYSEAKFLQVKRIIDRFRGREGLTEQDRRWRAKVTDVRNWFLFAASERWREDDSEYEHYSDSGGKSGGQKEKLAYTILAASLAYQFGLEWGAVRSRSFRFVVIDEAFGRGSDESAQYGLTLFQKLNLQLLIVTPLQKIHIIEPFVSSVGFVQNDGGRASKLRTLSIEEYRAHKAEFEQ

SEQ ID NO: 37802 - protein, 394 aa, Burkholderia ubonensis
MSWTTAVELRIRLQRLWERGEWLRSLVDGTEGLFPLRLALKGPSSSELAERFDTVRAWITEIAATPRIRIEWREINHRILGVQRLPRAAWVDSLDDALTVAGKHRDAARFERLLEITRSRQPKLIAWLAQRPMQALELAGDWERLLAVVDWLQAHPQPGIYLRQAEIAGVDTKFIEARRGVLSQWLDLVLPSEAIDSSRTGVAQFAARYGFREKQPRIRFRVLDERLAVLPGMGRPDIALDADSFARLALPCRHVFVTENETNFLAFPDVPQAIVLFGAGYGWEALEPARWLADCALDYWGDIDTHGFAILDQLRCRFPHANSFLMDRATLMAHEAFWGDEGDQVMRDLPRLTAQERELFDDLRDNRIRHGLRLEQERVGFGWVRAALEERALV

SEQ ID NO: 37803 - protein, 486 aa, Burkholderia ubonensis
MFLDYPTLDALRTRHPAWRLLRSDHAPLAVSFLHRAFVAPNVREVAAPFLAEALEDELYALREQLGDGAFPKPALDYLNDWASPEKGWLRKFYRQGSDEPHFDLTPAAGKAIAWLGTLMERSFVGTESRLLTLFELLRQMAEGSETDPERRLAELHARRSQIDEEIARVEAGDVRLLDDAAIKDRFQQFMQMASDLLTDFREVEQNFRLLDRHVRERIALWEGSKGALIEEIMGERDAIADSDQGSSFRAFWDFLMSSRRQEELSERLEHVLALPAITEMKPDARTRRVHYDWLEAGEHTQRTVAQLSQQLRRFLDDQAWLENRRIMDILRGIETKALVLREAPPPGSVMEIETASADIELPIERPLYAPALRPLIANVAIETGDADLDASALYTQIVVDRARLASHIRRCLQDRLQVTLAELAASQPLLHGLAELVAYLQLSAEAGTFRATVDETVSDTIEWQANDANGAAIVKRATMPRVIFTR

SEQ ID NO: 37804 - protein, 216 aa, Burkholderia ubonensis
MEEQQTPSLDRGDLSTVAIALLKGVVYRDGNERLWAALLELQTHVRDYVAVLGLELVVDEAEGYAFVKSRTEPDAEVDGDQAKLPRLVARRPLSFPVSLLLALLRKKLAEWDAGGGDTRLVLSREDIVELVRVFLPPSTNEARLVDQIDTHVNKIVDLGFLRRMKTASGPPTFEVRRILKAFVDAQWLLDFDARLASYQAHLRDSTNSDQTESRDE

SEQ ID NO: 37805 - protein, 1123 aa, Burkholderia ubonensis
MNEPRTLGLDFAADDTLTGFRLERLEVFNWGTFDDRAWVLRVDGRNGLLTGDIGSGKSTLVDAITTLLVPAQRIAYNKAAGADSKERTLRSYVLGYYKSERNEVTGAAKPVSLRDHNSYSVILGVFRNAGYDATVTLAQVFWMKDAQAQPARFFVSAERDLSIATDFSRFGTDIAQLRKKLRGLGAEIEDTFPKYSAWFRRRFGIENEQALELFHQTVSMKSVGNLTDFVRSHMLEPFDVAPRVDALIAHFDDLNRAHEAVLKTKRQVELLTPLVDDCDRHSAQGRVLEGWRACREALRPYFAGLKLGLVERRLQLLEEDHARATSRKARHEEARDQARQRVDDLRRAVAEQGGDRIAQLDVEIREHERESVRRRERAQRYAAIVTLFGETEAADEAAFASQRQRLAEQRSSLVDDEAQQQNAITEWSVAFREGKARRDLLEDEIASLKARRNNIPKEQVAMRASLCSALGLEEDALPFAGELIQVREDARDWEGAAERVLRNFGLSLLVPDEHYANVVAWVDRTHLRGRLVYFRVRSERSARAAEAIELHRHSLAHKLAIKPDSLFYGWLEREIGRRFDYACCDTQEQFRRETRAITRAGQAKAPGERHEKDDRHALDDRSRYVLGWSNTAKISALEAQRQALEARLGEIGQRLGEAQHEHTKVREQLEALARAGEFAEFREIDWSSCAAAIARLADEKARLESASDALAELTAQLDSAQASLKESEAAMSETDSELGGILAKREAAQALREETHALVAEVDAELAERIEALRAEILGEHQLSVESCDNRERDVREALTTRIDNETKSLGRLAERIVKAMAAFKEAYKLETADFDASLAANSEYRDMLARLQADDLPRFETRFKELLNVNTINEIANFHAQLARERATIKERIERINESLRQIDYNAGRYIVLESQPSPDAEIREFQSDLRACTEGELTGSDDSQYSEAKFLQVKRIIDRFRGREGLTEQDRRWRAKVTDVRNWFLFAASERWREDDSEYEHYSDSGGKSGGQKEKLAYTILAASLAYQFGLEWGAVRSRSFRFVVIDEAFGRGSDESAQYGLTLFQKLNLQLLIVTPLQKIHIIEPFVSSVGFVQNDGGRASKLRTLSIEEYRAHKAEFEQ

SEQ ID NO: 37806 - protein, 394 aa, Burkholderia ubonensis
MSWTTAVELRARLQRLWERGEWLRSLVDGAEGLFPLRLAIKGPSSSELAERFDTVRAWITEIAATPHIRIEWREINHRILGVQRLPRAAWVDSLDDALTVAGKQRDAARFERLLEITRSRQPKLIAWLAQRPMQALELAGDWERLLAVVDWLQAHPQPGIYLRQAEIAGVDTKFIEARRGVLSQWLDLVLPSEAIDSSRTGAAQFAARYGFRDKPPRIRFRVLDERLAVLPGMGRPDITLDADSFARLALPCRHVFVTENETNFLAFPDVPQAIVLFGAGYGWEALEPARWLADCALHYWGDIDTHGFAILDQLRCRFPHAGSFLMDRATLIAHEAFWGDEGDQVMRDLPRLTAQERELFDDLRDNRIRRGLRLEQERVGFGWVRAALEERSFV

SEQ ID NO: 37807 - protein, 486 aa, Burkholderia ubonensis
MFLDYPTLDALRTRHPAWRLLRSDHAPLAVSFLHRAFVAPNVREVAAPFLAEALEDELYALREQLGDGAFPKPALEYLNDWASPEKGWLRKFYRQGSDEPHFDLTPAAGKAIAWLGTLMERSFVGTESRLLTLFELLRQMAEGSETDPERRLAELHARRSQIDEEIARVEAGDVRLLDDAAIKDRFQQFMQMARDLLTDFREVEQNFRLLDRHVRERIALWEGSKGALIEEIMGERDAIADSDQGSSFRAFWDFLMSSRRQEELSERLEHVLALPAITEMKPDARTRRVHYDWLEAGEHTQRTVAQLSQQLRRFLDDQAWLENRRIMDILRGIETKALVLREAPPPGSVMEIETASADIELPIERPLYAPALRPLIANVAIETGDADLDASALYTQIVVDRARLASHIRRCLQDRRQVTLAELAASQPLLHGLAELVAYLQLSAEAGTFRATVDETVSDTIEWQANDANGAAIVKRATMTRVIFTR

SEQ ID NO: 37808 - protein, 216 aa, Burkholderia ubonensis
MEEQQTSSLDRGDLSTVAIALLKGVVYRDGNERLWAALLELQTHVRDYVAVLGLELVVDEAEGYAFVKSRTEPDAEVDGDQAKLPRLVARRPLSFPVSLLLALLRKKLAEWDAGGGDTRLVLSREDIVELVRVFLPASTNEARLVDQIDTHVNKIVDLGFLRRMKTASGPPTFEVRRILKAFVDAQWLLDFDARLASYQAHLRDSTNSDQTESRDE

SEQ ID NO: 37809 - protein, 1123 aa, Burkholderia ubonensis
MNEPRTLGLDFAADDTLTGFRLERLEVFNWGTFDDRAWVLRVDGRNGLLTGDIGSGKSTLVDAITTLLVPAQRIAYNKAAGADSKERTLRSYVLGYYKSERNEVTGAAKPVSLRDHNSYSVILGVFRNAGYDATVTLAQVFWMKDAQAQPARFFVSAERDLSIATDFSRFGTDIAQLRKKLRGLGAEIEDTFPKYSAWFRRRFGIENEQALELFHQTVSMKSVGNLTDFVRSHMLEPFDVAPRVDALIAHFDDLNRAHEAVLKTKRQVELLTPLVDDCDRHSEQGHVLEGWRACREALRPYFAGLKLGLVERRLQLLEEDHARATSRKARHEEARDQARQRVDDLRRAVAEQGGDRIAQLDVEIREHERESVRRRERAQRYAAIVTLFGETEAADEAAFASQRQRLAEQRSSLVDDEAQQQNAITEWSVAFREGKARRDLLEDEIASLKARRNNIPKEQVAMRASLCSALGLEEDALPFAGELIQVREDARDWEGAAERVLRNFGLSLLVPDEHYANVAAWVDRTHLRGRLVYFRVRSERSARVAEAIELHRHSLAHKLAIKPDSQFYGWLEREIGRRFDYACCDTQEQFRRETRAITRAGQAKAPGERHEKDDRHALDDRSRYVLGWSNTAKISALAAQRQALEARLGEIGQRLGEAQHEHTKVREQLEALARAGEFAEFREIDWSSCAAAIARLADEKARLESASDALAELTAQLDSAQASLKESEAAMSETDSELGGILAKREAAQALREETHALVAEVDAELAERIEALRAEILGEHQLSVESCDNRERDVREALTTRIDNETKSLGRLAERIVKAMAAFKEAYKLETADFDASLAANSEYRDMLARLQADDLPRFETRFKELLNVNTINEIANFHAQLARERATIKERIERINESLRQIDYNAGRYIVLESQPSPDAEIREFQSDLRACTEGELTGSDDSQYSEAKFLQVKRIIDRFRGREGLTEQDRRWRAKVTDVRNWFLFAASERWREDDSEYEHYSDSGGKSGGQKEKLAYTILAASLAYQFGLEWGAVRSRSFRFVVIDEAFGRGSDESAQYGLTLFQKLNLQLLIVTPLQKIHIIEPFVSSVGFVQNDGGRASKLRTLSIEEYRAHKAEFEQ

SEQ ID NO: 37810 - protein, 394 aa, Burkholderia ubonensis
MSWTTAVELRARLQRLWERGEWLRSLVDGAEGLFPLRLAIKGPSSSELAERFDTVRAWITEIAATPRIRIEWREINHRILGQQRLPRAAWVDSLDDALTVAGKQRDAARFERLLEITRSRQPKLIAWLAQRPMQALELAGDWERLLAVVDWLQAHPQPGIYLRQAEIAGVDTKFIEARRGVLSQWLDLVLPSEAIDSSRTGAAQFAARYGFRDKPPRIRFRVLDERLAVLPGMGRPDITLDADSFARLALPCRHVFVTENETNFLAFPDVPQAIVLFGAGYGWEALEPARWLADCALHYWGDIDTHGFAILDQLRCRFPHAGSFLMDRATLIAHEAFWGDEGDQVMRDLPRLTAQERELFDDLRDNRIRRGLRLEQERVGFGWVRAALEERSFV

SEQ ID NO: 37811 - protein, 486 aa, Burkholderia ubonensis
MFLDYPTLDALRTRHPAWRLLRSDHAPLAVSFLHRAFVAPNVREVAAPFLAEALEDELYALREQLGDGAFPKPALDYLNDWASPEKGWLRKFYRQGSDEPHFDLTPAAGKAIAWLGTLMERSFVGTESRLLTLFELLRQMAEGSETDPERRLAELHARRSQIDEEIARVEAGDVRLLDDAAIKDRFQQFMQMARDLLTDFREVEQNFRLLDRHVRERIALWEGSKGALIEEIMGERDAIADSDQGSSFRAFWDFLMSSRRQEELSERLEHVLALPAITEMKPDARTRRVHYDWLEAGEHTQRTVAQLSQQLRRFLDDQAWLENRRIMDILRGIETKALVLREAPPPGSVMEIETASADIELPIERPLYAPALRPLIANVAIETGDADLDASALYTQLVVDRARLASHIRRCLQDRLQVTLAELAASQPLLHGLAELVAYLQLSAEAGTFRATVDETVSDTIEWQANDANGAAIVKRATMPRVIFTR

SEQ ID NO: 37812 - protein, 216 aa, Burkholderia ubonensis
MEEQQTPSLDRGDLSTVAVALLKGVVYRDGNERLWAALLELQTHVRDYVAVLGLELVVDEAEGYAFVKSRTEPDAEVDGDQAKLPRLVARRPLSFPVSLLLALLRKKLAEWDAGGGDTRLVLSREDIVELVRVFLPASTNEARLVDQIDTHVNKIVDLGFLRRMKTASGPPTFEVRRILKAFVDAQWLLDFDARLASYQAHLRDSTNSDQTESRDE

SEQ ID NO: 37813 - protein, 1123 aa, Burkholderia ubonensis
MNEPRTLGLDFAADDTLTGFRLERLEVFNWGTFDERVWVLRVDGRNGLLTGDIGSGKSTLVDAITTLLVPAQRIAYNKAAGADSKERTLRSYVLGYYKSERNEVTGAAKPVSLRDHNSYSVILGVFRNAGYDATVTLAQVFWMKDAQAQPARFFVSAERDLSIATDFSRFGTDIAQLRKKLRGLGAEIEDTFPKYSAWFRRRFGIENEQALELFHQTVSMKSVGNLTDFVRSHMLEPFDVAPRVDALIAHFDDLNRAHEAVLKTKRQVELLTPLVDDCDRHSEQGHVLEGWRACREALRPYFAGLKLGLVERRLQLLEEDHARTTSRKARHEEARDQARQRVDDLRRAVAEQGGDRIAQLDVEIREHERESVRRRERAQRYAAIVTLFGETEAADEAAFASQRQRLAEQRSSLVDDEAQQQNAITEWSVAFREGKARRDLLEDEIASLKARRNNIPKEQVAMRASLCSALGLEEDALPFAGELIQVREDARDWEGAAERVLRNFGLSLLVPDEHYANVAAWVDRTHLRGRLVYFRVRSERTARVAEAIELHRHSLAHKLAIKPDSQFYGWLEREIGRRFDYACCDTQEQFRRETRAITRAGQAKAPGERHEKDDRHALDDRSRYVLGWSNTAKISALAAQRQALEARLGEIGQRLGEAQHEHTKVREQLEALARAGEFAEFREIDWSSCAAAIARLADEKARLESASDALAELTAQLDSAQASLKEREAAMSETDSELGGILAKREAAQALREETHALVAEVDAELAERIEALRAEILGEHQLSVESCDNRERDVREALTTRIDNETKSLGRLAERIVKAMAAFKEAYKLETADFDASLAANSEYRDMLARLQADDLPRFETRFKELLNVNTINEIANFHAQLARERATIKERIERINESLRQIDYNAGRYIVLESQPSPDAEIREFQSDLRACTEGELTGSDDSQYSEAKFLQVKRIIDRFRGREGLTEQDRRWRAKVTDVRNWFLFAASERWREDDSEYEHYSDSGGKSGGQKEKLAYTILAASLAYQFGLEWGAVRSRSFRFVVIDEAFGRGSDESAQYGLTLFQKLNLQLLIVTPLQKIHIIEPFVSSVGFVQNDGGRASKLRTLSIEEYRAHKAEFEQ

SEQ ID NO: 37814 - protein, 394 aa, Burkholderia ubonensis; identical to SEQ ID NO: 37702

SEQ ID NO: 37815 - protein, 486 aa, Burkholderia ubonensis; identical to SEQ ID NO: 37747

SEQ ID NO: 37816 - protein, 216 aa, Burkholderia ubonensis; identical to SEQ ID NO: 37700

SEQ ID NO: 37817 - protein, 1123 aa, Burkholderia ubonensis; identical to SEQ ID NO: 37749

SEQ ID NO: 37818 - protein, 394 aa, Burkholderia ubonensis; identical to SEQ ID NO: 37702

SEQ ID NO: 37819 - protein, 486 aa, Burkholderia ubonensis; identical to SEQ ID NO: 37807

SEQ ID NO: 37820 - protein, 216 aa, Burkholderia ubonensis; identical to SEQ ID NO: 37808

SEQ ID NO: 37821 - protein, 1123 aa, Burkholderia ubonensis
MNEPRTLGLDFAADDTLTGFRLERLEVFNWGTFDDRAWVLRVDGRNGLLTGDIGSGKSTLVDAITTLLVPAQRIAYNKAAGADSKERTLRSYVLGYYKSERNEVTGAAKPVSLRDHNSYSVILGVFRNAGYDATVTLAQVFWMKDAQAQPARFFVSAERDLSIATDFSRFGTDIAQLRKKLRGLGAEIEDTFPKYSAWFRRRFGIENEQALELFHQTVSMKSVGNLTDFVRSHMLEPFDVAPRVDALIAHFDDLNRAHEAVLKTKRQVELLTPLVDDCDRHSEQGHVLEGWRACREALRPYFAGLKLGLVERRLQLLEEDHARTTSRKARHEEARDQARQRVDDLRRAVAEQGGDRIAQLDVEIREHERESVRRRERAQRYAAIVTLFGETEAADEAAFASQRQRLAEQRSSLVDDEAQQQNAITEWSVAFREGKARRDLLEDEIASLKARRNNIPKEQVAMRASLCSALGLEEDALPFAGELIQVREDARDWEGAAERVLRNFGLSLLVPDEHYANVAAWVDRTHLRGRLVYFRVRSERTARVAEAIELHRHSLAHKLAIKPDSQFYGWLEREIGRRFDYACCDTQEQFRRETRAITRAGQAKAPGERHEKDDRHALDDRSRYVLGWSNTAKISALAAQRQALEARLGEIGQRLGEAQHEHTKVREQLEALARAGEFAEFREIDWSSCAAAIARLADEKARLESASDALAELTAQLDSAQASLKESEAAMSETDSELGGILAKREAAQALREETHALVAEVDAELAERIEALRAEILGEHQLSVESCDNRERDVREALTTRIDNETKSLGRLAERIVKAMAAFKEAYKLETADFDASLAANSEYRDMLARLQADDLPRFETRFKELLNVNTINEIANFHAQLARERATIKERIERINESLRQIDYNAGRYIVLESQPSPDAEIREFQSDLRACTEGELTGSDDSQYSEAKFLQVKRIIDRFRGREGLTEQDRRWRAKVTDVRNWFLFAASERWREDDSEYEHYSDSGGKSGGQKEKLAYTILAASLAYQFGLEWGAVRSRSFRFVVIDEAFGRGSDESAQYGLTLFQKLNLQLLIVTPLQKIHIIEPFVSSVGFVQNDGGRASKLRTLSIEEYRAHKAEFEQ

SEQ ID NO: 37822 - protein, 394 aa, Burkholderia ubonensis
MSWTTAVELRARLQRLWERGEWLRSLVDGAEGLFPLRLAIKGPSSSELAERFDTVRAWITEIAATPRIRIEWREINHRILGQQRLPRAAWVDSLDDALTVAGKQRDAARFERLLEITRSRQPKLIAWLAQRPMQALELAGDWERLLAVVDWLQAHPQPGIYLRQAEIAGVDTKFIEARRGVLSQWLDLVLPSEAIDSSRTGAAQFAARYGFRDKPPRIRFRVLDERLAVLPGMGRPDITLDADSFARLALPCRHVFVTENETNFLAFPDVPQAIVLFGAGYGWEALEPAQWLADCALHYWGDIDTHGFAILDQLRCRFPHAGSFLMDRATLMAHEAFWGDEGDQVMRDLPRLTAQERELFDDLRDNRIRRGLRLEQERVGFGWVRAALEERSFV

SEQ ID NO: 37823 - protein, 486 aa, Burkholderia ubonensis; identical to SEQ ID NO: 37699

SEQ ID NO: 37824 - protein, 216 aa, Burkholderia ubonensis; identical to SEQ ID NO: 37700

SEQ ID NO: 37825 - protein, 1123 aa, Burkholderia ubonensis; identical to SEQ ID NO: 37701

SEQ ID NO: 37826 - protein, 394 aa, Burkholderia ubonensis; identical to SEQ ID NO: 37702

SEQ ID NO: 37827 - protein, 486 aa, Burkholderia ubonensis
MFLDYPTLDALRTRHPAWRLLRSDHAPLAVSFLHRAFVAPNVREVAAPFLAEALEDELYALREQLGDGAFPKPALEYLNDWASPEKGWLRKFYRQGSDEPHFDLTPAAGKAIAWLGTLMERSFVGTESRLLTLFELLRQMAEGSETDPERRLAELHARRSQIDEEIARVEAGDVRLLDDAAIKDRFQQFMQMARDLLTDFREVEQNFRLLDRHVRERIALWEGSKGALIEEIMGERDAIADSDQGSSFRAFWDFLMSSRRQEELSERLEHVLALPAITEMKPDARTRRVHYDWLEAGEHTQRTVAQLSQQLRRFLDDQAWLENRRIMDILRGIETKALVLREAPPPGSVMEIETASADIELPIERPLYAPALRPLIANVAIETGDADLDASALYTQIVVDRARLASNIRRCLQDRRQVTLAELAASQPLLHGLAELVAYLQLSAEAGTFRATVDETVSDTIEWQANDANGAAIVKRATMPRVIFTR

SEQ ID NO: 37828 - protein, 216 aa, Burkholderia ubonensis
MEEQQTPSLGRGDLSTVAVALLKGVIYRDGNERLWAALLELQTHVRDYVAVLGLELVVDEAEGYAFVKSRTEPDAELDGDQAKLPRLVARRPLSFPVSLLLALLRKKLAEWDAGGGDTRLVLSREDIVELVRVFLPASTNEARLVDQIDTHVNKIVDLGFLRRMKTASGPPTFEVRRILKAFVDAQWLLDFDARLASYQAHLRDSTNSDQTESRDE

SEQ ID NO: 37829 - protein, 1123 aa, Burkholderia ubonensis
MNEPRTLGLDFAADDTLTGFRLERLEVFNWGTFDERVWVLRVDGRNGLLTGDIGSGKSTLVDAITTLLVPAQRIAYNKAAGADSKERTLRSYVLGYYKSERNEVTGAAKPVSLRDHNSYSVILGVFRNAGYDATVTLAQVFWMKDAQAQPARFFVSAERDLSIATDFSRFGTDIAQLRKKLRGLGAEIEDTFPKYSAWFRRRFGIENEQALELFHQTVSMKSVGNLTDFVRSHMLEPFDVAPRVDALIAHFDDLNRAHEAVLKTKRQVELLTPLVDDCDRHSEQGHVLEGWRACREALRPYFAGLKLGLVERRLQLLEEDHARATSRKARHEEARDQARQRVDDLRRAVAEQGGDRIAQLDVEIREHERESVRRRERAQRYAAIVTLFGETEAADEAAFASQRQRLAEQRSSLVDDEAQQQNAITEWSVAFREGKARRDVLEDEIASLKARRNNIPKEQVAMRASLCSALGLEEDALPFAGELIQVREDARDWEGAAERVLRNFGLSLLVPDEHYANVAAWVDRTHLRGRLVYFRVRSERTARVAEAIELHRHSLAHKLAIKPDSQFYGWLEREIGRRFDYACCDTQEQFRRETRAITRAGQAKAPGERHEKDDRHALDDRSRYVLGWSNTAKISALAAQRQALEARLGEIGQRLGEAQHEHTKVREQLEALARAGEFAEFREIDWSSCAAAIARLADEKARLESASDALAELTAQLDSAQASLKESETAMSETDSELGGILAKREAAQALREETHALVAEVDAELAERIEALRAEILGEHQLSVESCDNRERDVREALTTRIDNETKSLGRLAERIVKAMAAFKEAYKLETADFDASLDANSEYRDMLARLQADDLPRFETRFKELLNVNTINEIANFHAQLARERATIKERIERINESLRQIDYNAGRYIILESQPSPDAEIREFQSDLRACTEGELTGSDDSQYSEAKFLQVKRIIDRFRGREGLTEQDRRWRAKVTDVRNWFLFAASERWREDDSEYEHYSDSGGKSGGQKEKLAYTILAASLAYQFGLEWGAVRSRSFRFVVIDEAFGRGSDESAQYGLTLFQKLNLQLLIVTPLQKIHIIEPFVSSVGFVQNDGGRASKLRTLSIEEYRAHKAEFEQ

SEQ ID NO: 37830 - protein, 394 aa, Burkholderia ubonensis
MSWTTAVELRIRLQRLWERGEWLRSLVDGTEGLFPLRLALKGPSSSELAERFDTVRAWITEIAATPRIRIEWREINHRILGVQRLPRAAWVDSLDDALTVAGKHRDAARFERLLEITRSRQPKLIAWLAQRPMQALELAGDWERLLAVVDWLQAHPQPGIYLRQAEIAGVDTKFIEARRGVLSQWLDLVLPSEAIDSSRTGVAQFAARYGFREKQPRIRFRVLDERLAVLPGMGRPDIALDADSFARLALPCRHVFVTENETNFLAFPDVPQAIVLFGAGYGWEALEPARWLADCALHYWGDIDTHGFAILDQLRCRFPHAGSFLMDRATLMAHEAFWGDEADQVMRDLPRLTAQERELFDDLRDNRIRRGLRLEQERIGFGWVRAALEERALV

SEQ ID NO: 37831 - protein, 486 aa, Burkholderia ubonensis
MFLDYPTLDALRTRHPAWRLLRSDHAPLAVSFLHRAFVAPNVREVAAPFLAEALEDELYALREQLGDGAFPKPALEYLNDWASPEKGWLRKFYRQGSDEPHFDLTPAAGKAIAWLGTLMERSFVGTESRLLTLFELLRQMAEGSETDPERRLAELHARRSQIDEEIARVEAGDVRLLDDAAIKDRFQQFMQMARDLLTDFREVEQNFRLLDRHVRERIALWEGSKGALIEEIMGERDAIADSDQGSSFRAFWDFLMSSRRQEELSERLEHVLALPAITEMKPDARTRRVHYDWLEAGEHTQRTVAQLSQQLRRFLDDQAWLENRRIMDILRGIETKALVLREAPPPGSVMEIETASADIELPIERPLYAPALRPLIANVAIETGDADLDASALYTQIVVDRARLASHIRRCLQDRRQVTLAELAASQPLLHGLAELVAYLQLSAEAGTFRATVDETVSDTIEWQANDANGAAIVKRATMPRVIFTR

SEQ ID NO: 37832 - protein, 216 aa, Burkholderia ubonensis; identical to SEQ ID NO: 37744

SEQ ID NO: 37833 - protein, 1123 aa, Burkholderia ubonensis
MNEPRTLGLDFAADDTLTGFRLERLEVFNWGTFDERVWVLRVDGRNGLLTGDIGSGKSTLVDAITTLLVPAQRIAYNKAAGADSKERTLRSYVLGYYKSERNEVTGTAKPVSLRDHNSYSVILGVFRNAGYDATVTLAQVFWMKDAQAQPARFFVSAERDLSIATDFSRFGTDIAQLRKKLRGLGAEIEDTFPKYSAWFRRRFGIENEQALELFHQTVSMKSVGNLTDFVRSHMLEPFDVAPRVDALIAHFDDLNRAHEAVLKTKRQVELLTPLVDDCDRHSEQGHVLEGWRACREALRPYFAGLKLGLVERRLQLLEEDHARATSRKARHEEARDQARQRVDDLRRAVAEQGGDRIAQLDVEIREHERESVRRRERAQRYAAIVTLFGETEAVDEAAFASQRQRLAEQRSSLVDDEAQQQNAITEWSVAFREGKARRDVLEDEIASLKARRNNIPKEQVAMRASLCSALGLEEDALPFAGELIQVREDARDWEGAAERVLRNFGLSLLVPDEHYANVAAWVDRTHLRGRLVYFRVRSERTARVAEAIELHRHSLAHKLAIKPDSQFYGWLEREIGRRFDYACCDTQEQFRRETRAITRAGQAKAPGERHEKDDRHALDDRSRYVLGWSNTAKISALAAQRQALEARLGEIGQKLGEAQHEHTKVREQLEALARAGEFAEFREIDWSSCAAAIARLADEKARLESASDALAELTAQLDSAQASLKESEAAMSETDSELGGILAKREAAQALREETHALVAEVDAELAERIEALRAEILGEHQLSVESCDNRERDVREALTTRIDNETKSLGRLAERIVKAMAAFKEAYKLETADFDASLDANSEYRDMLARLQADDLPRFETRFKELLNVNTINEIANFHAQLARERATIKERIERINESLRQIDYNAGRYIILESQPSPDAEIREFQSDLRACTEGELTGSDDSQYSEAKFLQVKRIIDRFRGREGLTEQDRRWRAKVTDVRNWFLFAASERWREDDSEYEHYSDSGGKSGGQKEKLAYTILAASLAYQFGLEWGAVRSRSFRFVVIDEAFGRGSDESAQYGLTLFQKLNLQLLIVTPLQKIHIIEPFVSSVGFVQNDGGRASKLRTLSIEEYRAHKAEFEQ

SEQ ID NO: 37834 - protein, 394 aa, Burkholderia ubonensis
MSWTTAVELRIRLQCLWERGEWLRSLVDGAEGLFPLRLAIKGPSSSELAERFDAVRAWITEIAATPRIRIEWREINHRILGQQRLPRAAWVDSLDDALTVAGKHRDAARFERLLEITRSRQPKLIAWLAQRPMQALELAGDWERLLAVVDWLQAHPQPGIYLRQAEIAGVDTKFIEARRGVLSQWLDLVLPSDAIDSSRTGAAQFAARYGFRDKPLRIRFRVLDERLAVLPGMGRPDITLDADSFARLALPCRHVFVTENETNFLAFPDVPQAIVLFGAGYGWEALEPARWLADCALHYWGDIDTHGFAILDQLRCRFPHAGSFLMDRATLMAHEAFWGDEGDQVMRDLPRLTAQERELFDDLRDNRIRHGLRLEQERVGFGWVRAALEERALV

SEQ ID NO: 37835 - protein, 486 aa, Burkholderia ubonensis
MFLDYPTLDALRTRHPAWRLLRSDHAPLAVSFLHRAFVAPNVREVAAPFLAEALEDELYALREQLGDGAFPKPALEYLNDWASPEKGWLRKFYRQGSDEPHFDLTPAAGKAIAWLGTLMERSFVGTESRLLTLFELLRQMAEGSETDPERRLAELHARRSQLDEEIARVEAGDVRLLDDAAIKDRFQQFMQMARDLLTDFREVEQNFRLLDRHVRERIALWEGSKGALIEEIMGERDAIADSDQGSSFRAFWDFLMSSRRQEELSERLEHVLALPAITEMKPDARTRRVHYDWLEAGEHTQRTVAQLSQQLRRFLDDQAWLENRRIMDILRGIETKALVLREAPPPGSVMEIETASADIELPIERPLYAPALRPLIANVAIETGDADLDASALYTQIVVDRARLASHIRRCLQDRRQVTLAELAASQPLLHGLAELVAYLQLSAEVGTFRATVDETVSDTIEWQANDANGAAIVKRATMPRVIFTR

SEQ ID NO: 37836 - protein, 216 aa, Burkholderia ubonensis
MEEQQTPSLGRGDLSTVAIALLKGVIYRDGNERLWAALLELQTHVRDYVAVLGLELVVDEAEGYAFVKSRTEPDAEVDGDQAKLPRLVARRPLSFPVSLLLALLRKKLAEWDAGGGDTRLVLSREDIVELVRVFLPASTNEARLVDQIDTHVNKIVDLGFLRRMKTASGPPTFEVRRILKAFVDAQWLLDFDARLASYQAHLRDSTNSDQTESRDE

SEQ ID NO: 37837 - protein, 1123 aa, Burkholderia ubonensis
MNEPRTLGLDFAADDTLTGFRLERLEVFNWGTFDDRVWVLRVDGRNGLLTGDIGSGKSTLVDAITTLLVPAQRIAYNKAAGADSKERTLRSYVLGYYKSERNEVTGTAKPVSLRDHNSYSVILGVFRNAGYDATVTLAQVFWMKDAQAQPARFFVSAERDLSIATDFSRFGTDIAQLRKKLRGLGAEIEDTFPKYSAWFRRRFGIENEQALELFHQTVSMKSVGNLTDFVRSHMLEPFDVAPRVDALIAHFDDLNRAHEAVLKTKRQVELLTPLVDDCDRHSEQAHVLEGWRACREALRPYFAGLKLGLVERRLQLLDEDHARATSRKARHEEARDQARQRVDDLRRAVAEQGGDRIAQLDAEIREHERESVRRRERAQRYAAIVTLFGETEAADEAAFASQRQRLAEQRSSLVDDEAQQQNAITEWSVAFREGKARRDLLEDEIASLKARRNNIPKEQVAMRASLCSALDLEEDAVPFAGELIQVREDARDWEGAAERVLRNFGLSLLVPDEHYANVAAWVDRTHLRGRLVYFRVRSERTARAAEAIELHRHSLAHKLAIKPDSQFYGWLEREIGRRFDYACCDTQEQFRRETRAITRAGQAKAPGERHEKDDRHALDDRSRYVLGWSNTAKISALAAQRQALEARLGEIGQRLGEAQHEHTKVREQLEALARAGEFAEFREIDWSSCAAAIARLADEKARLESASDALAELTAQLDSAQASLKESEAAMSETDSELGGILAKREAAQALREETHALVAEVDAELAERIEALRAEILGEHQLSVESCDNRERDVREALTTRIDNETKSLGRLAERIVKAMAAFKEAYKLETADFDASLDANPEYRDMLARLQADDLPRFETRFKELLNVNTINEIANFHAQLARERATIKERIERINESLRQIDYNAGRYIILESQPSPDAEIRDFQSDLRACTEGELTGSDDSQYSEAKFLQVKRIIDRFRGREGLTEQDRRWRAKVTDVRNWFLFAASERWREDDSEYEHYSDSGGKSGGQKEKLAYTILAASLAYQFGLEWGAVRSRSFRFVVIDEAFGRGSDESAQYGLTLFQKLNLQLLIVTPLQKIHIIEPFVSSVGFVQNDGGRASKLRTLSIEEYRAHKAEFEQ

SEQ ID NO: 37838 - protein, 394 aa, Burkholderia ubonensis
MSWTTAVELRARLQHLWARGEWLRSFVDGTEGLFPLRLAIKGPSSSELAERFDAVRAWIAEIAATPHIRIEWREINHRILGVQRLPRAAWVDSLDDALAVAGKHRDAAQFARLLEITRARQPKLAAWLAQRPLQALEFAGDWERLLAVVDWLQAHPHPGVYLRQAEIAGVDTKFIEARRGVLSQWLDLVLPSEAIDSSRTGVAQFAARYGFREKQPRIRFRVLDERLAVLPGMGRPDIALDADSFARLALPCRHVFVTENETNFLAFPDVPQAIVLFGAGYGWEALEPARWLADCALHYWGDIDTHGFAILDQLRCRFPHVNSFLMDRATLMAHEAFWGDEGDQVVRDLPRLTAQERELFDDLRDNRIRRGLRLEQERVGFGWVRAALEERSFV

SEQ ID NO: 37839 - protein, 486 aa, Burkholderia ubonensis
MFLDYPTLDALRTRHPAWRLLRSDHAPLAVSFLHRAFVAPNVREVAAPFLAEALEDELYALREQLGDGAFPKPALEYLNDWASPEKGWLRKFYRQGSDEPHFDLTPAAGKAIAWLGTLMERSFVGTESRLLTLFELLRQMAEGSETDPERRLAELHARRSQIDEEIARVEAGDVRLLDDAAIKDRFQQFMQMARDLLTDFREVEQNFRLLDRHVRERIALWEGSKGALIEEIMGERDAIADSDQGSSFRAFWDFLMSSRRQEELSERLEHVLALPAITEMKPDARTRRVHYDWLEAGEHTQRTVAQLSQQLRRFLDDQAWLENRRIMDILRGIETKALVLREAPPPGSVMEIETASADIELPIERPLYAPALRPLIANVAIETGDADLDASALYTQIVVDRARLASHIRRCLQDRLQVTLAELAASQPLVHGLAELVAYLQLSAEAGTFRATVDETVSDTIEWQANDANGAAIVKRATMPRVIFTR

SEQ ID NO: 37840 - protein, 216 aa, Burkholderia ubonensis; identical to SEQ ID NO: 37836

SEQ ID NO: 37841 - protein, 1123 aa, Burkholderia ubonensis
MNEPRTLGLDFAADDARTGFRLERLEVFNWGTFDDRAWVLRVDGRNGLLTGDIGSGKSTLVDAITTLLVPAQRIAYNKAAGADSKERTLRSYVLGYYKSERNEVTGTAKPVSLRDHNSYSVILGVFRNAGYDATVTLAQVFWMKDAQAQPARFFVSAERDLSIATDFSRFGTDIAQLRKKLRGLGAEIEDTYPKYSAWFRRRFGIENEQALELFHQTVSMKSVGNLTDFVRSHMLEPFDVAPRVDALIAHFDDLNRAHEAVLKTKRQVELLTPLVDDCDRHSEQGNVLEGWRACREALRPYFAGLKLGLVERRLQLLEEDHARATSRKARHEEARDQARQRVDDLRRAVAEQGGDRIAQLDVEIREHERESVRRRERAQRYAAIVTLFGETAAADEAAFASQRQRLAEQRSSLVDDEAQQQNAITEWSVAFREGKARRDLLEDEIASLKARRNNIPKEQVAMRASLCSALGLEEDALPFAGELIQVREDARDWEGAAERVLRNFGLSLLVPDVHYANVVAWVDRTHLRGRLVYFRVRSERTARVAEAIELHRHSLAHKLAIKPDSQFYGWLEREIGRRFDYACCDTQEQFRRETRAITRAGQAKAPGERHEKDDRHALDDRSRYVLGWSNTAKISALAAQRQALEARLGEIGQRLGEAQHEHTKVRKQLEALARAGEFAEFREIDWSSCAAAVARLADEKARLESASDALAELTAQLDSAQASLKESEAAMSETDSELGGILAKREAAQALREETHALVADVDAELAERIEALRAEILGEHQLSVESCDNRERDVREALTTRIDNETKSLGRLAERIVKAMAAFKEAYKLETADFDASLAANPEYRDMLARLQADDLPRFETRFKELLNVNTINEIANFHAQLARERATIKERIERINESLRQIDYNAGRYIVLESQPSPDAEIREFQSDLRACTEGELTGSDDSQYSEAKFLQVKRIIDRFRGREGLTEQDRRWRAKVTDVRNWFLFAASERWREDDSEYEHYSDSGGKSGGQKEKLAYTILAASLAYQFGLEWGAVRSRSFRFVVIDEAFGRGSDESAQYGLTLFQKLNLQLLIVTPLQKIHIIEPFVSSVGFVQNDGGRASKLRTLSIEEYRAHKAEFEQ

SEQ ID NO: 37842 - protein, 394 aa, Burkholderia ubonensis
MSWTTAVELRARVQHLWARGEWLRSFVDGTEGLFPLRLAIKGPSSSELAERFDAVRAWIAEIAATPHIRIEWREINHRILGVQRLPRAAWVDSLDDALTVAGKHRDAAQFARLLEITRSRQPKLVAWLAQRPMQALELAGDWERLLAVVDWLQAHPQPGIYLRQAEIAGVDTKFIEARRGVLSQWLDLVLPSEAIDSSRTGVTQFAARYGFREKQPRIRFRVLDERLAVLPGMGRPDIALDADSFARLALPCRHVFVTENETNFLAFPDVPQAIVLFGAGYGWEALEPARWLTDCALHYWGDIDTHGFAILDQLRCRFPHAGSFLMDRATLMAHEAFWGDEGDQVMRDLPRLTAQERELFDDLRDNRIRHGLRLEQERVGFGWVRAALEERSFV

SEQ ID NO: 37843 - protein, 486 aa, Burkholderia ubonensis
MFLDYPTLDALRTRHPAWRLLRSDHAPLAVSFLHRAFVAPNVREVAAPFLAEALEDELYALREQLGDGAFPKPALEYLNDWASPEKGWLRKFYRQGSDEPHFDLTPAAGKAIAWLGTLMERSFVGTESRLLTLFELLRQMAEGSETDPERRLAELHARRSQIDEEIARVEAGDVRLLDDAAIKDRFQQFMQMARDLLTDFREVEQNFRLLDRHVRERIALWEGSKGALIEEIMGERDAIADSDQGSSFRAFWDFLMSSRRQEELSERLEHVLALPAITEMKPDARTRRVHYDWLEAGEHTQRTVAQLSQQLRRFLDDQAWLENRRIMDILRGIETKALVLREAPPPGSVMEIETASADIELPIERPLYAPALRPLIANVAIETGDADLDASALYTQIVVDRARLASHIRRCLQDRRQVTLAELAASQPLLHGLAELVAYLQLSAEAGSFRATVDETVSDTIEWQANDANGAAIVKRATMPRVIFTR

SEQ ID NO: 37844 - protein, 216 aa, Burkholderia ubonensis
MEEQQTPSLGRGDLSTVAIALLKGVVYRDVNERLWAALLELQTHVRDYVAVLGLELVVDEAEGYAFVKSRTEPDAEVDGDQVKLPRLVARRPLSFPVSLLLALLRKKLAEWDAGGGDTRLVLSREDIVELVRVFLPASTNEARLVDQIDTHVNKIVDLGFLRRMKTASGPPTFEVRRILKAFVDAQWLLDFDARLASYQAHLRDSTNSDQTESRDE

SEQ ID NO: 37845 - protein, 1123 aa, Burkholderia ubonensis
MNEPRTLGLDFAADDTRTGFRLERLEVFNWGTFDDRAWVLRVDGRNGLLTGDIGSGKSTLVDAITTLLVPAQRIAYNKAAGADSKERTLRSYVLGYYKSERNEVTGTAKPVSLRDHNSYSVILGVFRNAGYDATVTLAQVFWMKDAQAQPARFFVSAERDLSIATDFSRFGTDIAQLRKKLRGLGAEIEDAFPKYSAWFRRRFGIENEQALELFHQTVSMKSVGNLTDFVRSHMLEPFDVAPRVDALIAHFDDLNRAHEAVLKTKRQVELLTPLVDDCDRHSEQGHVLEGWRACREALRPYFAGLKLGLVERRLQLLEEDHARATSRKARHEEARDQARQRVDDLRRAVAEQGGDRIAQLDVEIREHERESVRRRERAQRYAAIVTLFGETEAADEAAFASQRQRLAEQRSSLVDDEAQQQNAITEWSVAFREGKARRDVLEDEIASLKARRNNIPKEQVAMRASLCSALGLEEDALPFAGELIQVREDARDWEGAAERVLRNFGLSLLVPDEHYANVAAWVDRTHLRGRLVYFRVRSERTARAAEAIELHRHSLAHKLAIKPDSQFYGWLEREIGRRFDYACCDTQEQFRRETRAITRAGQAKAPGERHEKDDRHALDDRSRYVLGWSNTAKISALAAQRQALEARLGEIGQRLGEAQHEHTKVREQLEALARAGEFAEFREIDWSSCAAAIARLADEKARLESASDALAELTAQLDSAQASLKESEAAMSETDSELGGILAKREAAQALREETHALVAEVDAELAERIEALRAEILGEHQLSVESCDNRERDVREALTTRIDNETKSLGRLAERIVKAMAAFKEAYKLETADFDASLDANPEYRDMLARLQADDLPRFETRFKELLNVNTINEIANFHAQLARERATIKERIERINESLRQIDYNAGRYIILESQPSPDAEIRDFQSDLRACTEGELTGSDDSQYSEAKFLQVKRIIDRFRGREGLTEQDRRWRAKVTDVRNWFLFAASERWREDDSEYEHYSDSGGKSGGQKEKLAYTILAASLAYQFGLEWGAVRSRSFRFVVIDEAFGRGSDESAQYGLTLFQKLNLQLLIVTPLQKIHIIEPFVSSVGFVQNDGGRASKLRTLSIEEYRAHKAEFEQ

SEQ ID NO: 37846 - protein, 394 aa, Burkholderia ubonensis
MSWTTAVELRARLQHLWARGEWLRSFVDGTEGLFPLRLAIKGPSSSELAERFDAVRAWIAEIAATPHIRIEWREINHRILGVQRLPRAAWVDSLDDALAVAGKHRDAAQFARLLEITRARQPKLAAWLAQRPLQALEFAGDWERLLAVVDWLQAHPHPGVYLRQAEIAGVDTKFIEARRGVLSQWLDLVLPSEAIDSSRTGAAQFAARYGFREKQPRIRFRVLDERLAVLPGMGRPDIALDADSFARLALPCRHVFVTENETNFLAFPDVPQAIVLFGAGYGWEALEPARWLADCALHYWGDIDTHGFAILDQLRCRFPHVNSFLMDRATLMAHEAFWGDEGDQVVRDLPRLTAQERELFDDLRDNRIRRGLRLEQERVGFGWVRAALEERSFV

SEQ ID NO: 37847 - protein, 486 aa, Burkholderia ubonensis; identical to SEQ ID NO: 37699

SEQ ID NO: 37848 - protein, 216 aa, Burkholderia ubonensis; identical to SEQ ID NO: 37700

SEQ ID NO: 37849 - protein, 1123 aa, Burkholderia ubonensis; identical to SEQ ID NO: 37737

SEQ ID NO: 37850 - protein, 394 aa, Burkholderia ubonensis; identical to SEQ ID NO: 37810

SEQ ID NO: 37851 - protein, 486 aa, Burkholderia ubonensis
MFLDYPTLDALRTRHPAWRLLRSDHAPLAVSFLHRAFVAPNVREVAAPFLAEALEDELYALREQLGDGAFPKPALDYLNDWASPEKGWLRKFYRQGSDEPHFDLTPAAGKAIAWLGTLMERSFVGTESRLLTLFELLRQMAEGSETDPERRLAELHARRSQLDEEIARVEAGDVRLLDDAAIKDRFQQFMQMARDLLTDFREVEQNFRLLDRHVRERIALWEGSKGALIEEIMGERDAIADSDQGSSFRAFWDFLMSSRRQEELSERLEHVLALPAITEMKPDARTRRVHYDWLEAGEHTQRTVAQLSQQLRRFLDDQAWLENRRIMDILRGIETKALVLREAPPPGSVMEIETASADIELPIERPLYAPALRPLIANVAIETGDADLDASALYTQIVVDRARLASHIRRCLQDRRQVTLAELAASQPLLHGLAELVAYLQLSAEAGSFRATVDETVSDTIEWQANDANGAAIVKRATMPRVIFTR

SEQ ID NO: 37852 - protein, 216 aa, Burkholderia ubonensis; identical to SEQ ID NO: 37680

SEQ ID NO: 37853 - protein, 1123 aa, Burkholderia ubonensis; identical to SEQ ID NO: 37681

SEQ ID NO: 37854 - protein, 394 aa, Burkholderia ubonensis
MSWTTAVELRARLQHLWARGEWLRSLVDGTEGLFPLRLALKGPSSSELAERFDTVRAWITEIAATPRIRIEWREINHRILGVQRLPRAAWVDSLDDALTVAGKHRDAARFERLLEITRSRQPKLIAWLAQRPMQALELAGDWERLLAVVDWLQAHPHPGVYLRQAEIAGVDTKFIEARRGVLSQWLDLVLPSEAIDSSRTGVAQFAARYGFREKQPRIRFRVLDERLAVLPSMGRPDIALDADSFARLALPCRHVFVTENETNFLAFPDVPQAIVLFGAGYGWEALEPARWLADCALHYWGDIDTHGFAILDQLRCRFPHVNSFLMDRATLMAHEAFWGDEGDQVMRDLPRLTAQERELFDDLRDNRIRRGLRLEQERVGFGWVRAALEKRSFV

SEQ ID NO: 37855 - protein, 486 aa, Burkholderia ubonensis; identical to SEQ ID NO: 37699

SEQ ID NO: 37856 - protein, 216 aa, Burkholderia ubonensis; identical to SEQ ID NO: 37700

SEQ ID NO: 37857 - protein, 1123 aa, Burkholderia ubonensis; identical to SEQ ID NO: 37737

SEQ ID NO: 37858 - protein, 399 aa, Burkholderia ubonensis; identical to SEQ ID NO: 37738

SEQ ID NO: 37859 - protein, 486 aa, Burkholderia ubonensis; identical to SEQ ID NO: 37851

SEQ ID NO: 37860 - protein, 216 aa, Burkholderia ubonensis; identical to SEQ ID NO: 37844

SEQ ID NO: 37861 - protein, 1123 aa, Burkholderia ubonensis
MNEPRTLGLDFAADDTRTGFRLERLEVFNWGTFDDRAWVLRVDGRNGLLTGDIGSGKSTLVDAITTLLVPAQRIAYNKAAGADSKERTLRSYVLGYYKSERNEVTGTAKPVSLRDHNSYSVILGVFRNAGYDATVTLAQVFWMKDAQAQPARFFVSAERDLSIATDFSRFGTDIAQLRKKLRGLGAEIEDTFPKYSAWFRRRFGIENEQALELFHQTVSMKSVGNLTDFVRSHMLEPFDVAPRVDALIAHFDDLNRAHEAVLKTKRQVELLTPLVDDCDRHSEQGHVLEGWRACREALRPYFAGLKLGLVERRLQLLEEDHARATSRKARHEEARDQARQRVDDLRRAVAEQGGDRIAQLDVEIREHERESVRRRERAQRYAAIVTLFGETEAADEAAFASQRQRLAEQRSSLVDDEAQQQNAITEWSVAFREGKARRDVLEDEIASLKARRNNIPKEQVAMRASLCSALGLEEDALPFAGELIQVREDARDWEGAAERVLRNFGLSLLVPDEHYANVAAWVDRTHLRGRLVYFRVRSERTARAAEAIELHRHSLAHKLAIKPDSQFYGWLEREIGRRFDYACCDTQEQFRRETRAITRAGQAKAPGERHEKDDRHALDDRSRYVLGWSNTAKISALAAQRQALEARLGEIGQRLGEAQHEHTKVREQLEALARAGEFAEFREIDWSSCAAAIARLADEKARLESASDALAELTAQLDSAQASLKESEAAMSETDSELGGILAKREAAQALREETHALVAEVDAELAERIEALRAEILGEHQLSVESCDNRERDVREALTTRIDNETKSLGRLAERIVKAMAAFKEAYKLETADFDASLDANPEYRDMLARLQADDLPRFETRFKELLNVNTINEIANFHAQLARERATIKERIERINESLRQIDYNAGRYIILESQPSPDAEIRDFQSDLRACTEGELTGSDDSQYSEAKFLQVKRIIDRFRGREGLTEQDRRWRAKVTDVRNWFLFAASERWREDDSEYEHYSDSGGKSGGQKEKLAYTILAASLAYQFGLEWGAVRSRSFRFVVIDEAFGRGSDESAQYGLTLFQKLNLQLLIVTPLQKIHIIEPFVSSVGFVQNDGGRASKLRTLSIDEYRAHKAEFEQ

SEQ ID NO: 37862 - protein, 394 aa, Burkholderia ubonensis; identical to SEQ ID NO: 37854

SEQ ID NO: 37863 - protein, 486 aa, Burkholderia ubonensis
MFLDYPTLDALRTRHPAWRLLRSDHAPLAVSFLHRAFVAPNVREVAAPFLAEALEDELYALREQLGDGAFPKPALEYLNDWASPEKGWLRKFYRQGSDEPHFDLTPAAGKAISWLGTLMERSFVGTESRLLTLFELLRQMAEGSETDPERRLAELHARRSQIDEEIARVEAGDVRLLDDAAIKDRFQQFMQMARDLLTDFREVEQNFRLLDRHVRERIALWEGSKGALIEEIMGERDAIADSDQGSSFRAFWDFLMSSRRQEELSERLEHVLALPAITEMKPDARTRRVHYDWLEAGEHTQRTVAQLSQQLRRFLDDQAWLENRRIMDILRGIETKALVLREAPPPGSVMEIETASADIELPIERPLYAPALRPLIANVAIETGDADLDASALYTQIVVDRARLASHIRRCLQDRRQVTLAELAASQPLLHGLAELVAYLQLSAEVGTFRATVDETVSDTIEWQANDANGAAIVKRATMPRVIFTR

SEQ ID NO: 37864 - protein, 216 aa, Burkholderia ubonensis; identical to SEQ ID NO: 37836

SEQ ID NO: 37865 - protein, 1123 aa, Burkholderia ubonensis
MNEPRTLGLDFAADDTLTGFRLERLEVFNWGTFDDRVWVLRVDGRNGLLTGDIGSGKSTLVDAITTLLVPAQRIAYNKAAGADSKERTLRSYVLGYYKSERNEVTGTAKPVSLRDHNSYSVILGVFRNAGYDATVTLAQVFWMKDAQAQPARFFVSAERDLSIATDFSRFGTDIAQLRKKLRGLGAEIEDTFPKYSAWFRRRFGIENEQALELFHQTVSMKSVGNLTDFVRSHMLEPFDVAPRVDALIAHFDDLNRAHEAVLKTKRQVELLTPLVDDCDRHSEQAHVLEGWRACREALRPYFAGLKLGLVERRLQLLDEDHARATSRKARHEEARDQARQRVDDLRRAVAEQGGDRIAQLDAEIREHERESVRRRERAQRYAAIVTLFGETEAADEAAFASQRQRLAEQRSSLVDDEAQQQNAITEWSVAFREGKARRDLLEDEIASLKARRNNIPKEQVAMRASLCSALGLEEDAVPFAGELIQVREDARDWEGAAERVLRNFGLSLLVPDEHYANVAAWVDRTHLRGRLVYFRVRSERSARAAEAIELHRHSLAHKLAIKPDSQFYGWLEREIGRRFDYACCDTQEQFRRETRAITRAGQAKAPGERHEKDDRHALDDRSRYVLGWSNTAKISALAAQRQALEARLGEIGQRLGEAQHEHTKVREQLEALARAGEFAEFREIDWSSCAAAIARLADEKARLESASDALAELTAQLDSAQASLKESEAAMSETDSELGGILAKREAAQALREETHALVAEVDAELAERIEALRAEILGEHQLSVESCDNRERDVREALTTRIDNETKSLGRLAERIVKAMAAFKEAYKLETADFDASLDANPEYRDMLARLQADDLPRFETRFKELLNVNTINEIANFHAQLARERATIKERIERINESLRQIDYNAGRYIILESQPSPDAEIRDFQSDLRACTEGELTGSDDSQYSEAKFLQVKRIIDRFRGREGLTEQDRRWRAKVTDVRNWFLFAASERWREDDSEYEHYSDSGGKSGGQKEKLAYTILAASLAYQFGLEWGAVRSRSFRFVVIDEAFGRGSDESAQYGLTLFQKLNLQLLIVTPLQKIHIIEPFVSSVGFVQNDGGRASKLRTLSIDEYRAHKAEFEQ

SEQ ID NO: 37866 - protein, 394 aa, Burkholderia ubonensis
MSWTTAVELRARLQHLWARGEWLRSLVDGTEGLFPLRLALKGPSSSELAERFDTVRAWITEIAATPRIRIEWREINHRILGVQRLPRAAWVDSLDDALAVAGKHRDAAQFARLLEITRARQPKLAAWLAQRPLQALEFAGDWERLLAVVDWLQAHPHPGVYLRQAEIAGVDTKFIEARRGVLSQWLDLVLPSEAIDSSRTGVAQFAARYGFREKQPRIRFRVLDERLAVLPGMGRPDIALDADSFARLALPCRHVFVTENETNFLAFPDVPQAIVLFGAGYGWEALEPARWLADCALHYWGDIDTHGFAILDQLRCRFPHVNSFLMDRATLMAHEAFWGDEGDQVVRDLPRLTAQERELFDDLRDNRIRRGLRLEQERVGFGWVRAALEERSFV

SEQ ID NO: 37867 - protein, 486 aa, Burkholderia ubonensis
MFLDYPTLDALRTRHPAWRLLRSDHAPLAVSFLHRAFVAPNVREVAAPFLAEALEDELYALREQLGDGAFPKPALEYLNDWASPEKGWLRKFYRQGSDEPHFDLTPAAGKAIAWVGTLMERSFVGTESRLLTLFELLRQMAEGSETDPERRLAELHARRSQIDEEIARVEAGDVRLLDDAAIKDRFQQFMQMARDLLTDFREVEQNFRLLDRHVRERIALWEGSKGALIEEIMGERDAIADSDQGSSFRAFWDFLMSSRRQEELSERLEHVLALPAITEMKPDARTRRVHYDWLEAGEHTQRTVAQLSQQLRRFLDDQAWLENRRIMDILRGIETKALVLREAPPSGSVMEIETASADIELPIERPLYAPALRPLIANVAIETGDADLDASALYTQIVVDRARLASHIRRCLQDRRQVTLAELAASQPLLHGLAELVAYLQLSAEAGSFRATVDETVSDTIEWQANDANGAAIVKRATMPRVIFTR

SEQ ID NO: 37868 - protein, 216 aa, Burkholderia ubonensis
MEEQQTSSLGRGDLSTVAIALLKGVVYRDVNEHLWAALLELQTHVRDYVAVLGLELVVDEAEGYAFVKSRTEPDAEVDGDQVKLPRLVARRPLSFPVSLLLALLRKKLAEWDAGGGDTRLVLSREDIVELVRVFLPSSTNEARLVDQIDTHVNKIVDLGFLRRMKTASGPPTFEVRRILKAFVDAQWLLDFDARLASYQAHLRDATNSDQMESRDE

SEQ ID NO: 37869 - protein, 1123 aa, Burkholderia ubonensis
MNEPRTLGLDFTADDTRTGFRLERLEVFNWGTFDERVWVLRVDGRNGLLTGDIGSGKSTLVDAITTLLVPAQRIAYNKAAGADSKERTLRSYVLGYYKSERNEVTGAAKPVSLRDHNSYSVILGVFRNAGYDATVTLAQVFWMKDAQAQPARFFVSAERDLSIATDFSRFGTDIAQLRKKLRGLGAEIEDTFPKYSAWFRRRFGIENEQALELFHQTVSMKSVGNLTDFVRSHMLEPFDVAPRVDALIAHFDDLNRAHEAVLKTKRQVELLTPLVDDCDRHSEQAHVLEGWRACREALRPYFAGLKLGLVERRLQLLDEDHARATSRKARHEEARDQARQRVDDLRRAVAEQGGDRIAQLDAEIREHERESVRRRERAQRYAAIVTLFGETEAADEAAFASQRQRLAEQRSSLVDDEAQQQNAITEWSVAFREGKARRDLLEDEIASLKARRNNIPKEQVAMRASLCSALGLEEDALPFAGELIQVREDARDWEGAAERVLRNFGLSLLVPDEHYANVVAWVDRTHLRGRLVYFRVRSERTARAAEAIELHRHSLAHKLAIKPDSQFYGWLEREIGRRFDYACCDTQEQFRRETRAITRAGQAKAPGERHEKDDRHALDDRSRYVLGWSNTAKISALAAQRQALEARLGEIGQRLGEAQHEHTKVREQLEALARAGEFAEFREIDWSSCAAAIARLADEKARLESASDALAELTAQLDSAQASLKESEAAMSETDSELGGILAKREAAQALREETHALVAEVDAELAERIEALRAEILGEHQLSVESCDNRERDVREALTTRIDNETKSLGRLAERIVKAMAAFKEAYKLETADFDASLDANPEYRDMLARLQADDLPRFETRFKELLNVNTINEIANFHAQLARERATIKERIERINESLRQIDYNAGRYIILESQPSPDAEIRDFQSDLRACTEGELTGSDDSQYSEAKFLQVKRIIDRFRGREGLTEQDRRWRAKVTDVRNWFLFAASERWREDDSEYEHYSDSGGKSGGQKEKLAYTILAASLAYQFGLEWGAVRSRSFRFVVIDEAFGRGSDESAQYGLTLFQKLNLQLLIVTPLQKIHIIEPFVSSVGFVQNDGGRASKLRTLSIEEYRAHKAEFEQ

SEQ ID NO: 37870 - protein, 394 aa, Burkholderia ubonensis
MSWTTAVELRARLQHLWARGEWLRSFVDGTEGLFPLRLAIKGPSSSELAERFDAVRTWIAEIAATPHIRIEWREINHRILGVQRLPRAAWVDSLDDALAVAGKHRDAAQFARLLEITRARQPKLAAWLAQRPLQALEFAADWERLLAVVDWLQAHPHPGVYLRQAEIAGVDTKFIEARRGVLSQWLDLVLPSEAIDSSRTGVAQFAARYGFREKQPRIRFRVLDERLAVLPGMGRPDIALDADSFARLALPCRHVFVTENETNFLAFPDVPQAIVLFGAGYGWEALEPARWLADCALHYWGDIDTHGFAILDQLRCRFPHVNSFLMDRATLMAHEAFWGDEGDQVMRDLPRLTAQERELFDDLRDNRIRHGLRLEQERVGFGWVRAALEERSFV

SEQ ID NO: 37871 - protein, 486 aa, Burkholderia ubonensis; identical to SEQ ID NO: 37699

SEQ ID NO: 37872 - protein, 216 aa, Burkholderia ubonensis; identical to SEQ ID NO: 37700

SEQ ID NO: 37873 - protein, 1123 aa, Burkholderia ubonensis
MNEPRTLGLDFAADDTLTGFRLERLEVFNWGTFDDRAWVLRVDGRNGLLTGDIGSGKSTLVDAITTLLVPAQRIAYNKAAGADSKERTLRSYVLGYYKSERNEVTGAAKPVSLRDHNSYSVILGVFRNAGYDATVTLAQVFWMKDAQAQPARFFVSAERDLSIATDFSRFGTDIAQLRKKLRGLGAEIEDTFPKYSAWFRRRFGIENEQALELFHQTVSMKSVGNLTDFVRSHMLEPFDVAPRVDALIAHFDDLNRAHEAVLKTKRQVELLTPLVDDCDRHSAQGRVLEGWRACREALRPYFAGLKLGLVERRLQLLEEDHARATSRKARHEEARDQARQRVDDLRRAVAEQGGDRIAQLDVEIREHERESVRRRERAQRYAAIVTLFGETEAADEAAFASQRQRLAEQRSSLVDDEAQQQNAITEWSVAFREGKARRDLLEDEIASLKARRNNIPKEQVAMRASLCSALGLEEDALPFAGELIQVREDARDWEGAAERVLRNFGLSLLVPDEHYANVAAWVDRTHLRGRLVYFRVRSERTARAAEAIELHRHSLAHKLAIKPDSQFYGWLEREIGRRFDYACCDTQEQFRRETRAITRAGQAKAPGERHEKDDRHALDDRSRYVLGWSNTAKISALAAQRQALEARLGEIGQRLGEAQHEHTKVREQLEALARAGEFAEFREIDWSSCAAAIARLADEKARLESASDALAELTAQLDSAQASLKESEAAMSETDSELGGILAKREAAQALREETHALVAEVDAELAERIEALRAEILGEHQLSVESCDNRERDVREALTTRIDNETKSLGRLAERIVKAMAAFKEAYKLETADFDASLAANSEYRDMLARLQADDLPRFETRFKELLNVNTINEIANFHAQLARERATIKERIERINESLRQIDYNAGRYIVLESQPSPDAEIREFQSDLRACTEGELTGSDDSQYSEAKFLQVKRIIDRFRGREGLTEQDRRWRAKVTDVRNWFLFAASERWREDDSEYEHYSDSGGKSGGQKEKLAYTILAASLAYQFGLEWGAVRSRSFRFVVIDEAFGRGSDESAQYGLTLFQKLNLQLLIVTPLQKIHIIEPFVSSVGFVQNDGGRASKLRTLSIEEYRAHKAEFEQ

SEQ ID NO: 37874 - protein, 394 aa, Burkholderia ubonensis
MSWTTAVELRARLQRLWERGEWLRSLVDGAEGLFPLRLAIKGPSSSELAERFDTVRAWITEIAATPRIRIEWREINHRILGQQRLPRAAWVDSLDDALTVAGKHRDAARFERLLEITRSRQPKLIAWLAQRPMQALELAGDWERLLAVVDWLQAHPQPGIYLRQAEIAGVDTKFIEARRGVLSQWLDLVLPSEAIDSSRTGAAQFAARYGFRDKPPRIRFRVLDERLAVLPGMGRPDITLDADSFARLALPCRHVFVTENETNFLAFPDVPQAIVLFGAGYGWEALEPAQWLTDCALHYWGDIDTHGFAILDQLRCRFPHAGSFLMDRATLIAHEAFWGDEGDQVMRDLPRLTAQERELFDDLRDNRIRRGLRLEQERVGFGWVRAALEERSFV

SEQ ID NO: 37875 - protein, 486 aa, Burkholderia ubonensis
MFLDYPTLDALRTRHPAWRLLRSDHAPLAVSFLHRAFVAPNVREVAAPFLAEALEDELYALREQLGDGAFPKPALEYLNDWASPEKGWLRKFYRQGSDEPHFDLTPAAGKAIAWLGTLMERSFVGTESRLLTLFELLRQMAEGSETDPERRLAELHARRSQIDEEIARVEAGDVRLLDDAAIKDRFQQFMQMARDLLTDFREVEQNFRLLDRHVRERIALWEGSKGALIEEIMGERDAIADSDQGSSFRAFWDFLMSSRRQEELSERLEHVLALPAITEMKPDARTRRVHYDWLEAGEHTQRTVAQLSQQLRRFLDDQAWLENRRIMDILRGIETKALVLRDAPPPGSVMEIETASADIELPIERPLYAPALRPLIANVAIETGDADLDASALYTQIVVDRARLASHIRRCLQDRRQVTLAELAASQPLVHGLAELVAYLQLSAEAGTFRATVDETVSDTIEWQANDANGAAIVKRATMPRVIFTR

SEQ ID NO: 37876 - protein, 216 aa, Burkholderia ubonensis
MEEQQTPSLGRGDLSTVAVALLKGVVYRDGNERLWAALLELQTHVRDYVAVLGLELVVDEAEGYAFVKSRTEPDAEVDGDQVKLPRLVARRPLSFPVSLLLALLRKKLAEWDAGGGDTRLVLSREDIVELVRVFLPASTNEARLVDQIDTHVNKIVDLGFLRRMKTASGPPTFEVRRILKAFVDAQWLLDFDARLASYQAHLRDSTNSDQTESRDE

SEQ ID NO: 37877 - protein, 1123 aa, Burkholderia ubonensis
MNEPRTLGLDFAADDTRTGFRLERLEVFNWGTFDERVWVLRVDGRNGLLTGDIGSGKSTLVDAITTLLVPAQRIAYNKAAGADSKERTLRSYVLGYYKSERNEVTGAAKPVSLRDHNHYSVILGVFRNAGYDATVTLAQVFWMKDAQAQPARFFVSAERDLSIATDFSRFGTDIAQLRKKLRGLGAEIEDTFPKYSAWFRRRFGIENEQALELFHQTVSMKSVGNLTDFVRSHMLEPFDVAPRVDALIAHFDDLNRAHEAVLKTKRQVELLTPLVDDCDRHSEQGHVLEGWRACREALRPYFAGLKLGLVERRLQLLEEDHARATLRKARHEEARDQARQRVDDLRRAVAEQGGDRIAQLDVEIREHERESVRRRERAQRYAAIVTLFGETEAADEAAFASQRQRLAEQRSSLVDDEAQQQNAITEWSVAFREGKARRDLLEDEIASLKARRNNIPKEQVAMRASLCSALGLEEDALPFAGELIQVREDARDWEGAAERVLRNFGLSLLVPDEHYANVAAWVDRTHLRGRLVYFRVRSERTARVAEAIELHRHSLAHKLAIKPDSQFYGWLEREIGRRFDYACCDTQEQFRRETRAITRAGQAKAPGERHEKDDRHALDDRSRYVLGWSNTAKISALAAQRQALEARLGEIGQRLGEVQHEHTKVREQLEALARAGEFAEFREIDWSSCAAAIARLADEKARLESASDALAELTAQLDSAQASLKESEAAMSETDSELGGILAKREAAQALREETHALVAEVDAELAERIEALRAEILGEHQLSVESCDNRERDVREALTTRIDNETKSLGRLAERIVKAMAAFKEAYKLETADFDASLAANSEYRDMLARLQADDLPRFETRFKELLNVNTINEIANFHAQLARERATIKERIERINESLRQIDYNAGRYIVLESQPSPDAEIREFQSDLRACTEGELTGSDDSQYSEAKFLQVKRIIDRFRGREGLTEQDRRWRAKVTDVRNWFLFAASERWREDDSEYEHYSDSGGKSGGQKEKLAYTILAASLAYQFGLEWGAVRSRSFRFVVIDEAFGRGSDESAQYGLTLFQKLNLQLLIVTPLQKIHIIEPFVSSVGFVQNDGGRASKLRTLSIEEYRAHKAEFEQ

SEQ ID NO: 37878 - protein, 394 aa, Burkholderia ubonensis; identical to SEQ ID NO: 37702

SEQ ID NO: 37879 - protein, 486 aa, Burkholderia ubonensis; identical to SEQ ID NO: 37699

SEQ ID NO: 37880 - protein, 216 aa, Burkholderia ubonensis; identical to SEQ ID NO: 37700

SEQ ID NO: 37881 - protein, 1123 aa, Burkholderia ubonensis; identical to SEQ ID NO: 37701

SEQ ID NO: 37882 - protein, 394 aa, Burkholderia ubonensis; identical to SEQ ID NO: 37702

SEQ ID NO: 37883 - protein, 486 aa, Burkholderia ubonensis; identical to SEQ ID NO: 37699

SEQ ID NO: 37884 - protein, 216 aa, Burkholderia ubonensis
MEEQQTPSLDRGDLSTVAIALLKGVVYRDGSERLWAALLELQTHVRDYVAVLGLELVVDEAEGYAFVKSRTEPDAEVDGDQAKLPRLVARRPLSFPVSLLLALLRKKLAEWDAGGGDTRLVLSREDIVELVRVFLPASTNEARLVDQIDTHVNKIVDLGFLRRMKTASGPPTFEVRRILKAFVDAQWLLDFDARLASYQAHLRDSTNSDQTESRDE

SEQ ID NO: 37885 - protein, 1123 aa, Burkholderia ubonensis; identical to SEQ ID NO: 37745

SEQ ID NO: 37886 - protein, 394 aa, Burkholderia ubonensis
MSWTTAVELRARLQRLWERGEWLRSLVDGAEGLFPLRLAIKGPSSSELAERFDTVRAWITEIAATPHIRIEWREINHRILGVQRLPRAAWVDSLDDALTVAGKQRDAARFERLLEITRSRQPKLIAWLAQRPMQALELAGDWERLLAVVDWLQAHPQPGIYLRQAEIAGVDTKFIEARRGVLSQWLDLVLPSEAIDSSRTGAAQFAARYGFRDKPPRIRFRVLDERLAVLPGMGRPDITLDADSFARLALPCRHVFVTENETNFLAFPDVPQAIVLFGAGYGWEALEPAQWLTDCALHYWGDIDTHGFAILDQLRCRFPHAGSFLMDRATLIAHEAFWGDEGDQVMRDLPRLTAQERELFDDLRDNRIRRGLRLEQERVGFGWVRAALEERSFV

SEQ ID NO: 37887 - protein, 493 aa, Burkholderia cepacia
MKTALALHELKAMREKPMWMLLGSHQAPLTMALLQSLFSESSTQLGSASLIEKLSVELDGLRARGEDIEKTPQILVAEWVQAKWLARSFPEGASEELYELSADVVPALQLVRGQLEPRQTATESGLAVVIDSVLRLASDTDLDPASRLKALHEESRRITEEIRHVMKHGVSPLDPARASERGRHIVAMTEAIAVDFRRVREAFERLNRDLRRQLVEHDGSRGEVLEKVFLGSDVIAESDEGKSFLAFWRLLTDPSQFEGLKAALEALESRPFVRSLGLEERRRLFRVTETLLIEGGMVQDVMATLSRSLKTFVQSREFQEQRKIQRLIRTAIAESLALKDQLTNGRTLDYTLTLSTSSLRSVAQLMLADPQERPGETSVDEAEAPEIDLEVMREMIDNADIDIPLLKQNVRSALAERNQVSVGELTRMFEITQGLASIVGYMSLGQRYGIVLQNSEREFHPWERVSWAGQDGVVRHARIAQILFTRDCLNDLD

SEQ ID NO: 37888 - protein, 242 aa, Burkholderia cepacia
MLDEGDDESRRPVDCGQEKALFEGDSSTLPYDVRRAYALLLRGPSIDERHSKLWPVLIDHELRLRQLLHAAFLDLVIDREQKIAFARPVDAPELDVPQLLREVRLTFVDSALVLFLRMELTLAEAEGRRATVSRSEMVDHLKAYEASDNVDRARFSRQVEAAIEKAKKYNFLRLIRNSGDRFEVSPALKLVFSHEQISELSRTYRRIREQADGRPAEVDGAGSFPGVDEPDEFDEDNVMDGE

SEQ ID NO: 37889 - protein, 1149 aa, Burkholderia cepacia
METAQLFEDPELSPAAADETAHRGEDHRPTWSDHDLEEAGQQQFRLRQMQVMNWGTFSKLHVFDISPRGHLLVGPSGSGKSTILDAHSALMAPPNSEFNAAARGNDKVTRDRTMVTYVRGAWATQESDEGIIAAQYLRPDTTLSAVAEVYANAQGQMLTLVGMWWIKGKSTLAKDVRHCFFVIEREFSLKELSFFMQADYNLRSFAKHLPEVKPFDTHASFRERFKARLGIDHDLALRLLHRTQSSKNLGDINAFMRDNMLDEPQTFSLAKALCDDFNTLAAAHQDVVEARKQRDLLNLARSHHELYQEHHAEVARVDELLKQLDHHREYLQYTLRGRRVDELKIVLKGLHQSVDALARKANDEQTELQRLMTQRAGMNDGNVAGLQSQLATKETQLKQVRRARARVSVWLQTLGWPEPQDAGHFGECVGRAGVLRDRGQGEEGEAKAEELRQKKFEAERQLKDLLADAASLEQRKSNLPRELVNVRDQIALALNLDPASLPFGGELLDVSEKFKRWQGALERLLAPLTRSFLVPEEHYPGVVNWLESNHTGQHVLYLRMRPHQKRFDNGPKAPGRMLDSSADEYGDWLRDEIAVHYGDFVCAETTEEFRNSPRAVSLHGQIKRGGARHEKNDRTRLDERRGWAIGFSNEQKKLELLHEIHAQQKVESEASRELAELLVTQNKEREKLNAAAELTQVVWEDIDDVSVADEVQRLLNQIEEAQRSHPEIQELDGQIKAQGVKASQVGSAHETEKKKYADTEQRINGLIRDLENTRDDVRMPPVDGDELQLLFGHLDGLTLENLEQRRLSARSELKDRKNDADKAQANDRSLLEEVLRTFQREHKIAAADMGTTLDDWPDYARLLAKIEEDDLPRFEERFFRLLNEQSDRHLARLRQRLVTEKDEIRGRMNIVNDALSQTEFNAGTYLVLENRPRTLPDVTAFLAELKNCLERNIKPDATREEREEQFKALNTIVQRLHSDKPEDERWKALVLDVRQHVEFVAKEFDADGRVRDIFQSGAGKSGGQRQKLAATCLAAALRYQLAGTQRPLPQFCTVLMDEAFDKADSEFTAMTLNIFNTFGFQMLMATPMKAVRTLEPFIGGAHVFSNRLRNSSGAVAIEYDMAHRRLLGLSHQRSLEKGNADGEMPQSED

SEQ ID NO: 37890 - protein, 319 aa, Burkholderia cepacia
MWRSVNWRTMGNVTIPEKVLFEDAQAVADCAGLRRHWDTLHARWRRIGERYPVLAGERDCTNAVIRTADWSDDDFRRLMELLAWCRQNPASGLYLRQLPLVDIDTKWVEGRRGVVEPLLRILMGKEGDIREVMGLRRSPDTVRMRLLDAGLREQLLGMEDLQIPVGQWNHVFRYPPKRLLIVENLECGLALPDIEGVAVVMALGNNVTALRGIEWAPAADVLYWGDIDTWGLHILSRARGIFPHLRSVLMTEGVVESHRHLLTDEPTQDKRPAVNLTKDEAELLSDLQTGRWGERRRLEQERIHWPKVTEEVRRQWTYS

SEQ ID NO: 37891 - protein, 486 aa, Burkholderia ubonensis; identical to SEQ ID NO: 37699

SEQ ID NO: 37892 - protein, 216 aa, Burkholderia ubonensis; identical to SEQ ID NO: 37700

SEQ ID NO: 37893 - protein, 1123 aa, Burkholderia ubonensis; identical to SEQ ID NO: 37733

SEQ ID NO: 37894 - protein, 394 aa, Burkholderia ubonensis
MSWTTAVELRARLQRLWERGEWLRSLVDGAEGLFPLRLAIKGPSSSELAERFDTVRAWITEIAATPRIRIEWREINHRILGVQRLPRAAWVDSLDDALAVAGKHRDAAQFARLLEITRSRQPKLIAWLAQRPMQALELAGDWERLLAVVDWLQAHPQPGIYLRQAEIAGIDTKFIEARRGVLSQWLDLVLPSEAIDSSRTGAAQFAARYGFRDKPPRIRFRVLDERLAVLPGMGRPDITLDADSFARLALPCRHVFVTENETNFLAFPDVPQAIVLFGAGYGWEALEPAQWLTDCALHYWGDIDTHGFAILDQLRCRFPHAGSFLMDRATLIAHEAFWGDEGDQVMRDLPRLTAQERELFDDLRDNRIRHGLRLEQERVGFGWVRAALEERSFV

SEQ ID NO: 37895 - protein, 481 aa, Burkholderia cepacia
MREGPMWRLLASYQAPVTVSLLQSLFPETSTQLTSASLMERLSVEVDGLRARGEEINKTPQMIIADWVHQKWLARSFPEGASEEQYELAADVVPAMRLVMGLLEPRQTATESGLAVVIDSVLRLAADTDPDPESRLRALHEESRRITEEIRRVMQHGVSPLDPARASERGRHIVATTEAIAADFRRVREAFEILNRDLRRQLVAHAGPRGEVLDKVFLDSDVIAESDEGKSFLAFWRLLTDPSQLEGLQAALEALESRPFIRLLSLEERKRLFRVTEMLLVEGTMVQDVMTTLGRSLRTFVQSREFQEQRRIQNLIRKAITESLELKDTLTNGRTIDFSLTLSTSSLRSVAQLTLTDPRERPGETSVDDAEAPEIDLEAMREMIDNADIDMPLLKANIRAALAERAQVSVRDLTIMFEVAQGLASIVGYMSLGQRVGIVLDNRDREFHPTELVSWVGQDGIVRQARIAQLLFTRECLDELD

SEQ ID NO: 37896 - protein, 182 aa, Burkholderia cepacia
MRLRQLLHAAFLDLVIDREQKIAFARPAHIPDEDVPQLLREVRLTFVDSALVLHLRMMLVQAEAEGRRATVSRFEMIDHLKAYEASDNVDQTRFNRQVDGAIEKAKKYNFLRLIRNSGERFEISPVLKLVFSHDQIEELRRTYQDIRNQLGGRPLEGDGDLTNRSDSKSSGDPDDGHDIDEV

SEQ ID NO: 37897 - protein, 1041 aa, Burkholderia cepacia
MVTYIRGAWATRETDLGGIAAQYLRPDTTLSAVAEVYANSRSQTLTLVGMWWIKGKSTFAKDVRHSFFVIERAFKLKELSFFMQTDYNLRSFQKHLPEVKLFETHASFRERFKARLGIDHDLALRLLHRTQSSKNLGDINTFMRDNMLDEPQTFSLAKALCEEFNTLAAAHRDVVDARKQRDLLRDAKSHEEQYQEHHAKVDRIETLLKQVDHHSKYLQYTLRRGRANALTIELERLRQQVEALGRRANSEQAELERLITLRGGMNDGNVAGLTAQLETTATRLNQVGRERTRVAGWLKTLGWPEPEDAAHFGEYLGKANILREHGHPHEEEAKEHALRNDLSVAQTQLSELLQEIRSMELRKSNLPWQLVDVRDQIATALKLDPGILPFGGELLDVPKKFERWQGALERLLGPLTRSFLVPEAHYRDVVDWLESNHTGQHVLYLRMRTHQRLADDGPKSPIRMLDTADDKYGDWLRDEISQHYGDFVCAETMDEFREAARAISLQGQIKRGGTRHEKNDRTRLDNRKEWSIGFSNEQKKLELLDELHAQQTKISESKQVLDDLVASRKREEQKLAAAQELSQVMWADIDTVSVALQLQRLQVQLENAQRAHPEVRELDTQIEAQRQTVSDAQGARGSESDKYDRSVEQMAALSRELEATPAELQVPPPDAGELQELFGKVDRLTLDNLESRRERARGDLKEQRGQADKDRSNARKDLEEALRTFRRNHPLAAADMGETLDDWPDYARVLVRIEQDDLPRFEERFFRLLNEQSDRHIARLRQRLVTEKEEIRGRMNIVNDALSQSQFNPGTYLRLENRPRTLPEVTTFLADLTACLERNIKPDATRDEREEQFKALSKLVERLHSDKSEDERWKAQVLDVRQHVEFVAKEFDAEGSVRDIFQSGAGKSGGQRQKLAATCLAAALRYQLAGTDRPLPQFCTVLMDEAFDKADSEFTAMTLNIFHTFGFQMLMATPMKAVRTLEPFIGGAHVFSNKSRDSSGAVSIEYDMTHHRLIGLGAPRPDDPGRAANDDSDEGGARAVD

SEQ ID NO: 37898 - protein, 272 aa, Burkholderia cepacia
MQHPVMIGMPECAKVLVSAADWSDDDFMRLLEFLSWGKHHPTSGLYLRQLPLKGIDTKWVERRLGVVVPLLKTILGRDGDLHQLLGLRRAPPTIRMRLLDPLVREQLGGADYLEMPVDQWNTVLHRPPARLLVVENLDTGLAAPDIRDAAVVMGHGNGITLLQKIAWSRAAEILYWGDIDTWGLHILSRMRGIYPRLESILMTEEVLESHQHFWVDEETQDMRPAEHHTSKEAKLLRDLQQRRWGRPIRLEQERVHWPMAVEALTRRWGGLA

SEQ ID NO: 37899 - protein, 486 aa, Burkholderia ubonensis; identical to SEQ ID NO: 37699

SEQ ID NO: 37900 - protein, 216 aa, Burkholderia ubonensis; identical to SEQ ID NO: 37700

SEQ ID NO: 37901 - protein, 1123 aa, Burkholderia ubonensis; identical to SEQ ID NO: 37701

SEQ ID NO: 37902 - protein, 394 aa, Burkholderia ubonensis; identical to SEQ ID NO: 37702

SEQ ID NO: 37903 - protein, 486 aa, Burkholderia ubonensis
MFLDYPTLDALRTRHPAWRLLRSDHAPLAVSFLHRAFVAPNVREVAAPFLAEALEDELYALREQLGDGAFPKPALDYLNDWASPEKGWLRKFYRQGSDEPHFDLTPAAGKAIAWLGTLMERSFVGTESRLLTLFELLRQMAEGSETDPERRLAELHARRSQIDEEIARVEAGDVRLLDDAAIKDRFQQFMQMARDLLTDFREVEQNFRLLDRHVRERIALWEGSKGALIEEIMGERDAIADSDQGSSFRAFWDFLMSSRRQEELSERLEHVLALPAITEMKPDARTRRVHYDWLEAGEHTQRTVAQLSQQLRRFLDDQAWLENRRIMDILRGIETKALALREAPPPGSVMEIETASADIELPIERPLYAPALRPLIANVAIETGDADLDASALYTQIVVDRARLASHIRRCLQDRRQVTLAELAASQPLLHGLAELVAYLQLSAEAGTFRATVDETVSDTIEWQANDANGAAIVKRATMPRVIFTR

SEQ ID NO: 37904 - protein, 216 aa, Burkholderia ubonensis; identical to SEQ ID NO: 37700

SEQ ID NO: 37905 - protein, 1123 aa, Burkholderia ubonensis
MNEPRTLGLDFAADDTLTGFRLERLEVFNWGTFDDRAWVLRVDGRNGLLTGDIGSGKSTLVDAITTLLVPAQRIAYNKAAGADSKERTLRSYVLGYYKSERNEVTGTAKPVSLRDHNSYSVILGVFRNAGYDATVTLAQVFWMKDAQAQPARFFVSAERDLSIATDFSRFGTDIAQLRKKLRGLGAEIEDTFPKYSAWFRRRFGIENEQALELFHQTVSMKSVGNLTDFVRSHMLEPFDVAPRVDALIAHFDDLNRAHEAVLKTKRQVELLTPLVDDCDRHSEQGHVLEGWRACREALRPYFAGLKLGLVERRLQLLEEDHARATSRKARHEEARDQARQRVDDLRRAVAEQGGDRIAQLDVEIREHERESVRRRERAQRYAAIVTLFGETEAADEAAFASQRQRLAEQRSSLVDDEAQQQNAITEWSVAFREGKARRDLLEDEIASLKARRNNIPKEQVAMRASLCSALGLEEDALPFAGELIQVREDARDWEGAAERVLRNFGLSLLVPDEHYANVAAWVDRTHLRGRLVYFRVRSERTARAAEAIELHRHSLAHKLAIKPDSQFYGWLEREIGRRFDYACCDTQEQFRRETRAITRAGQAKAPGERHEKDDRHALDDRSRYVLGWSNTAKISALAAQRQALEARLGEIGQRLGEAQHEHTKVREQLEALARAGEFAEFREIDWSSCAAAIARLADEKARLESASDALAELTAQLDSAQASLKESEAAMSETDSELGGILAKREAAQALREETHALVAEVDAELAERIEALRAEILGEHQLSVESCDNRERDVREALTTRIDNETKSLGRLAERIVKAMAAFKEAYKLETADFDASLAATPEYRDMLARLQADDLPRFETRFKELLNVNTINEIANFHAQLARERATIKERIERINESLRQIDYNAGRYIVLESQPSPDAEIREFQSDLRACTEGELTGSDDSQYSEAKFLQVKRIIDRFRGREGLTEQDRRWRAKVTDVRNWFLFAASERWREDDSEYEHYSDSGGKSGGQKEKLAYTILAASLAYQFGLEWGAVRSRSFRFVVIDEAFGRGSDESAQYGLTLFQKLNLQLLIVTPLQKIHIIEPFVSSVGFVQNDGGRASKLRTLSIEEYRAHKAEFEQ

SEQ ID NO: 37906 - protein, 394 aa, Burkholderia ubonensis
MSWTTAVELRARLQRLWERGEWLRSLVDGAEGLFPLRLAIKGPSSSELAERFDTVRAWITEIAATPRIRIEWREINHRILGQQRLPRAAWVDSLDDALTVAGKQRDAARFERLLEITRSRQPKLIAWLAQRPMQALELAGDWERLLAVVDWLQAHPQPGIYLRQAEIAGVDTKFIEARRGVLSQWLDLVLPSEAIDSSRTGAAQFAARYGFRDKPPRIRFRVLDERLAVLPGMGRPDITLDADSFARLALPCRHVFVTENETNFLAFPDVPQAIVLFGAGYGWEALEPARWLADCALHYWGDIDTHGFAILDQLRCRFPHAGSFLMDRATLMAHEAFWGDEADQVMRDLPRLTAQERELFDDLRDNRIRRGLRLEQERVGFGWVRAALEERSFV

SEQ ID NO: 37907 - protein, 493 aa, Burkholderia multivorans
MKTALALHELKAMREKPMWMLLGSHQAPLTMALLQSLFFESSTQLGSASLMEKLSIELDGLRARGEDIDKTPQILVAEWVQAKWLARSFPEGASEERYELSADIVPALQLVRAQLEPRQAATESGLAVVIDSVLRLASDTDPDPASRLTALHEESRRITEEIRHVMKHGVSPLDPARASERGRHIVAMTEAIAVDFRRVREAFERLNRDLRRQLVEHDGSRGEVLEKVFLGSDVIAESDEGKSFLAFWRLLTDPSQFEGLKAALEALESRPFIRSLGLDERRRLFRVTETLLVEGGMVQDVMATLSRSLKTFVQSREFQEQRKIQRLIRSAIAESLALKDQLTNGRTLDFTLTLSTSSLRSVAQLVLTDPQERPGETSVGEAEVPEIDLEVMREMIDNADIDIPLLKQNVRSALAERSQVSVGDLTRMFEITQGLASIVGYMSLGQRYGIVLQNSEREFHPWERVSWAGQDDVVRHARIAQILFTRDCLNDLD

SEQ ID NO: 37908 - protein, 1149 aa, Burkholderia multivorans
METAQLFEDPELSPVATDGAARREGEPRPTWSDRHLEEAGQQQFRLRQMQVMNWGTFSKLHVFDISPRGHLLVGPSGSGKSTILDAHSALMAPPNSEFNAAARGNDKVTRDRTMVTYVRGAWATQESEEGIIAAQYLRPDTTLSAVAEVYANAQGQMLTLVGMWWIKGKSTLAKDVRHCFFVIERAFSLKELSFFMQADYNLRSFAKHLPEVKPFDTHASFRERFKARLGIDHDLALRLLHRTQSSKNLGDINAFMRDNMLDEPQTFGLAKALCDDFNTLAAAHQDVVEAREQRDLLNLARSHHERYRAHHAELARVDELLTQLDHHREYLQYTLRGRRVDELKIVLEGLRQSVDALARKANDEQTELQRLMTQRAGMNDGNVAGLQSQLVTKETQLKQVRRARARVSVWLQTLGWPEPQDAGHFGEWVGRAGVLRDRGPGEEGEVKAEELRQKRFEAERQLKELLADAASLEQRKSNLPRELVNVRDQIALALNLDPASLPFGGELLDIPEKFRQWQGALERLLAPLTRSFLVPEEYYPGVVNWLESNHTGQHVLYLRMRPHQKRFDNGPKAPGRMLDSSADEYGGWLRNEIASHYGEFVCAETAEEFRNSPRAISLHGQIKRGGARHEKNDRTRLDERRHWVIGFSNEQKKLELLDEIHAQQKVEREASRALAELQATQNKEREKLNAAAELTQVVWEDIDDVSVADEVQRLLKQIEEAQRSHPEIQELDGQIQAQGVKASQVGSAHETEKKKFADTEQQINGLIRDRENTRDDVRMPPVDGDELQLLFGHLDGLTLENLEQRRLSVRSELKDRRNDADKAQANDRSLLEEVLRTFQREHRMAAADMGATLDDWSDYAQLLAKIEEDDLPRFEERFFRLLNEQSDRHLARLRQRLITEKDEIRGRMNIVNDALSQSEFNAGTYLVLENRPRTLPDVTAFLAELKNCLERNIKPDATREEREEQFKALNTIVQRLHSDKPEDERWKALVLDVRQHVEFVAKEFDADGRVRDIFQSGAGKSGGQRQKLAATCLAAALRYQLAGSQRPLPQFCTVLMDEAFDKADSEFTAMTLNIFNTFGFQMLMATPMKAVRTLEPFIGGAHVFSNKLRNSSGAVAIEYDMAHRRLVGLGHQRSEERGNAGGEIPRSED

SEQ ID NO: 37909 - protein, 310 aa, Burkholderia multivorans
MGNVTIPERVLFENAQAVADCAGLRRHWDTLHARWRRIGEQYPVLAGQRDCTNAVIRTADWSDDDFRRLMELLAWCGQNPASGLYLRQLPLIDIDTKWVEGRRGVVEPLVRVLMGKDGDIREVMGLRRSPDTVRMRLLDPGLREQLLGMEDLQIPIGQWNHGFRYPPKRLLIVENLESGLALPDIEGVAVVMALGNNVTTLRGIEWALAADVLYWGDIDTWGLHILSRARGIFPHLRSVLMTEGVVESHRHLLTEEPTQDRRPAVNLTKDEAQLLSDLQTGRWGERRRLEQERIHWPNVIEEVCRQWTDS

SEQ ID NO: 37910 - protein, 457 aa, Thiobacillus denitrificans
MAGANRNIYVNVLTRLHALFFGTSAALLPAYETVRSEIEEVLSDMTLQDWQSEEGEESAPDIPNTQLGYAARAYRRLRQCGWLEEEQDGYRIRVAMPPDVGRLLGNLLEIAQQRNRLYGGIVQTIHNNIIQVQLAPADQAAALSEAARQAREFFLHLRSLAYGLREVSQRLRSEHDPRILLGGFFSDFVEEFLVADYKTLYTRDNPFRYRAEILSKVRSIRFSHDARTTLPEAYLRQRIVRSEIEALRRVDDDLATLEQVFSEVDAHLERINEFRAGLERRVAEAVRYMDKTQPGAAARIARLVKRAALSDDAATLTAPHRLMRVLPFSPRSPRTPVSPKRPPEPERLRRTEPDPVRLARQKAIRNYLARRRLDPRAVETYLDQQMGSRQELRAQEFCIESVEDFVAFSHLSQLSQLIRSGESGQRLNRRFDVRAGMARIDTEWLACRDFTIIRKTI

SEQ ID NO: 37911 - protein, 205 aa, Thiobacillus denitrificans
MLRDLKHLLDRNDELSESDFKSAANALLTRQFLYLADERPHYRLITDHFEYFRALFDALGWQLYLDQDFGYVGVLPGDEETYLRLDLTETLLLFVARLAFEEGVEARQTQDGKVHLSAADLLERYLALTHRESPKKGDYIGLLKHFQRHGLLRFGDEDAATGLPRIALLPALRQVAGDHCLERLEAHLEKAGQANEIGLPEAGEQ

SEQ ID NO: 37912 - protein, 823 aa, Thiobacillus denitrificans
MEFSALGKQNEQDQAEILRLTGLIEASGSEAKRRELEARIETQRTHANQAGNDLNSIRRNLSVVWKLLDFREDLPKPLTTVLEALADTLPKDELLVPIWPEAPEIVEQLANEVRTGLEAVLSGIKERTRKFGNEVEAMNTDLLGLRERLQTLQRGETPLSRKTQALIALLDQHNIGSRPLCDCVEIVDERWRDCIERYLGSNREALIVAPEGARDAITVYRRQGRELFGARVINTRKTQDWLKRCESGSLAEIVTTDDDHARAYINRLLGRVMRVETEDELLRQDRAATDDGMLAANGAIERMAPVQDHLLGRASRELTRKRLEQQFQADADKYAKADRAHKCLAGVSEALADFARKLENGIELTALAGSRADAQAKIKRLNEELGQLDLKEADTLKQKFKATQNSIETRKGKFSALEALKTGLLKQTTIQEEKNRQNNVAFAQATEERTRRTQSATLKMAEASAQFERLLTEYGEDLNKVEEVARQRTRKNRTDQAQSRDAAHGDLREYALKYSALLPGSTNHAPEALHAELEAWSIANLTNLEDTQLAGLTDRAEKARLDAEQIFHAQFIGLLRDNLAGIDDALDELNRNLKKRDFHGEVYQFKKLPKAEYKPLIEWVRSATAEVQANVGSLFDTQALPGSEHFEARKKVRELLMGGADGASALEDKLADYRNYYHFDVEMKDPNRAGSAALLSHRLGKGSGGEHQAPFYVAIGAALAATYRLERDESTGKVKGGMALALFDEAFSKLDVGNTQSALAFLRDLGVQAIIAAPDERHALLAEEMDTIVNVYRDGGAVSIESQYFKPALHALLAIDNPFKTYD

SEQ ID NO: 37913 - protein, 396 aa, Thiobacillus denitrificans
MTDPALGLLNTLFERWQRSDNSSKTLSLSLAGRDSGGYRATSGNCRESFHAVMANAAACGAVTLEWGRFEAEHELRRVLLVDGHKLAGFLGRTPARTQVVALAPRITLLLEHAPPWLQTCWDNAATRWQRGDAALRLRLPQHAADIERLFKALLAVNHNQQENLDLRSFSVQVTDDSKAMERLKASFAEAWCKAHDCESRDVDDLYHSLGLIKTPQPVLLRGAVSLRGEQTLLDLSEVRPWIGLPGETLANLVLPERPGYVLSIENWTSFARHCREVPDTGFILYTGGFPNPSIQSVFKRLGQELSQATPFYHWGDTDVRGLEIFALVTRLSGREVRPHQMGHGQWTQGRLLIPSEIRTVESLRWVPGIADLANRLITSGVPQDFEQESRSPQTPV

SEQ ID NO: 37914 - protein, 497 aa, Burkholderia cepacia
MAVHDLTDQIRQEKVAERYPPLFKRLPDRLFAPLASANRFQYWSLLCVLHAKRFGPEAPLPPSTGFLMREITADIAEELQYQDWAPESDDVTPATPLAIRAIMVFNRLREAGWIRVDRVGVREMVTMAPAVAHFMNRLVEFAHTGPEFVSGKIRSIEANLKLLLDETTDGASLQEAARQSRALLEHVRIAGTNVRDLMLEIGRTDATGEFVRRFFDDYVERMFIGDYKELRTREHPLARRQEILRLVSHIQQTQDLRSRLIQWYLEKQAGRDPTRAEAMFERDIQKVEDLRRIDEYLDRLDDEIRRANKLALAYLDYRLRAARPLDELIGQAIDTVVKHGSKAAALAPFAPGDCIAGERLAAPRVETKRPPPSGLRKQVMSAEQEARARLALMARDRRTMSLPKLAAFVRQQLGEANAMSSIALKVDSIEAVRALQVLCTIAAANATPSKVLRANARAMSSGFTTVRMEGEEDQNQRISHLPFTIARTTKPAKGGNQ

SEQ ID NO: 37915 - protein, 220 aa, Burkholderia cepacia
MSFWANAADATKNVVTEDDFEAAANRLITEQVLYAADRGSKVAYGLIRDFEREFKRALEPLGYVVRVNSQLRYACAIPKHAKTSPVTVDQTLLALVLRKIFDEETRSGHHDENGEVACDLVTLEVKYKQTTGGRELATGGKLVALMQWMRRWGLARVSDEDGNQFGHDADQPYVVIIRPGIAEVLGEAALTRIALFTDPATEVEGVDHAVTLSIEEGGAA

SEQ ID NO: 37916 - protein, 1147 aa, Burkholderia cepacia
MKKLIRIRVVQFFLYEMRDVNVGMNCGIFGANGSGKSSLLDAVQIVMLGANESRGSTGVAFNAQADESNHNSRNIRSYCLGQYGDSPDARVRDSANTYITLVWEDTETKEIVSTGVCIYASVDREKSDVQGRYTLPVDLALSDHLELVDGEYRPRPWASFRQMLSQRAHGEEVLFHDSERFVNAMLFRLRGARGAPRLDAYRQAFRFGLRMKFDKSVDDIVRQQVLETRPTNIKRFKDVLHTFQEMAALVRSVQAKLDEAELIETDFADAHRRNSHSVSLAALAQAAALEVANEAVTAAEEAEGRAAATLEAANARRDEVNCQVEAAEQRARDSASDRDKHASHADAALLRESLAGIQDRLNHQRMGLHRSIKAIGKAIDAQIPGKLVADSAEATTLAFKDIRALLEDDKVGNRAAVESTVRKALRAAKLLSNEVFEEMQSVGRAQTTAEADLAGVRENQERISKGKPPLEGPAAALKRVLAHANVDATPVCDLVRVDDPDWQPAIESYLGTSNMQALLVDEADERKAFQVSRRAGVYEAKVVMPSKFSNRGSPRRGAVAELISGSSAAAVNYLRSKFGDTQRADTEDECFAHRFAMTKDGMRLADGEMVRKKPTDPALFKIGPTSTATRTSIAERARQLQEQVEALKDRYDKLKMLLNNLSPFVGAEQDKVHEILEVFDQISKEVSEETDLTRRLEALDTEEYRQLVQAAEEASTAVIALRKQHLDTVQAVGAAETECRQKNEDTTKKKADAITQQGIADAARAAEGFDANYASDQWERLLTRQGLSFQEIVTDCTRRSNGAKDDSRQKATNAMQKLSAFLVRHNEFMPAGTQDDWRSARAWLEARVIILNETGLRENKARMEDALSAAKSTFRNDVAVALHEHLEWLSDTINRMNEALRLAPMFTNNERYQFRSHVRPAFAVLLKFIKDVAQYGPTEDLLGGAGELPKEFEELMREKTIAGAAAVKSPLDDYREFFDFDIEVLREEATTGSTRHIGWLSKRVGSGSGGEHRAPLYVIAGAALSSAYRLERGDDTGIRLLVIDEAFIKMDPRNIVATMRYFEELGLQIFMASTGDALGSLTAFLDRYYDIMRDAESNVVVLEGHDVPPETREMFRADLPEFNPELIEAEIRRQYQPQTDSSESIAT

SEQ ID NO: 37917 - protein, 387 aa, Burkholderia cepacia
MDPLARKALEHLFKSADRHEAGATVRRPALTSSALSEYHDLRSLKAKEDFEAVMTHAQAEGAIVVLRPRGDPHGLIERVELIDVVRLASILGKIPHAMRVQSARRALAMCLGEHPVLNDVLSGWEKLKKVRGTGPDAAPNWAMACDVITYCRTQVALGATETPVRDASARLFKNSKRIESLTPCLDVLLAGNVEDDARPEAEVLQELGLYREPQPARLAGNIVVRRERGAFPLDCPYGALPPSTVLGLGSFPSQVLTIENQTTFHVWARQNCDSDVLCLYTAGMPSPAWRAMYLRLLADLPVSTPVLHWGDVDEGGFRIAAFLSRCATEAGHTLLPWKMCPADVPESLRRAAPTRTVERMVKYARETGWDGIATELAEAKIVAEQEG

SEQ ID NO: 37918 - protein, 486 aa, Burkholderia ubonensis; identical to SEQ ID NO: 37875

SEQ ID NO: 37919 - protein, 216 aa, Burkholderia ubonensis
MEEQQTSSLGRGDLSTVAVALLKGVVYRDGNERLWAALLELQTHVRDYVAVLGLELVVDEAEGYAFVKSRTEPDAEVDGDQAKLPRLVARRPLSFPVSLLLALLRKKLAEWDAGGGDTRLVLSREDIVELVRAFLPASTNEARLVDQIDTHVNKIVDLGFLRRMKTASGPPTFEVRRILKAFVDAQWLLDFDARLASYQAHLRDSTNSDQTESRDE

SEQ ID NO: 37920 - protein, 1123 aa, Burkholderia ubonensis
MNEPRTLGLDFAADDTRTGFRLERLEVFNWGTFDERVWVLRVDGRNGLLTGDIGSGKSTLVDAITTLLVPAQRIAYNKAAGADSKERTLRSYVLGYYKSERNEVTGAAKPVSLRDHNHYSVILGVFRNAGYDATVTLAQVFWMKDAQAQPARFFVSAERDLSIATDFSRFGTDIAQLRKKLRGLGAEIEDTFPKYSAWFRRRFGIENEQALELFHQTVSMKSVGNLTDFVRSHMLEPFDVAPRVDALIAHFDDLNRAHEAVLKTKRQVELLTPLVDDCDRHSEQGHALEGWRACREALRPYFAGLKLGLVERRLQLLEEDHARATSRKARHDEARDQARQRVDDLRRAVAEQGGDRIAQLDVEIREHERESVRRRERAQRYAAIVTLFGETEAADDAAFASQRQRLAEQRSSLVDDEAQQQNAITEWSVAFREGKARRDLLEDEIASLKARRNNIPKEQVAMRASLCSALGLEEDALPFAGELIQVREDARDWEGAAERVLRNFGLSLLVPDEHYASVAAWVDRTHLRGRLVYFRVRSERSARAAEAIELHRHSLAHKLAIKPDSQFYGWLEREIGRRFDYACCDTQEQFRRETRAITRAGQAKAPGERHEKDDRHALDDRSRYVLGWSNTAKISALAAQRQALEARLGEIGQRLGEAQHEHTKVREQLEALARAGEFAEFREIDWSSCAAAIARLADEKARLESASDALAELTAQLDSAQASLKEREAAMSETDSELGGILAKREAAQALREETLALVAEVDAELAERIEALRAEILGEHQLSVESCDNRERDVREALTTRIDNETKSLGRLAERIVKAMAAFKEAYKLETADFDASLDANSEYRDMLARLQADDLPRFETRFKELLNVNTINEIANFHAQLARERATIKERIERINESLRQIDYNAGRYIILESQPSPDAEIREFQSDLRACTEGELTGSDDSQYSEAKFLQVKRIIDRFRGREGLTEQDRRWRAKVTDVRNWFLFAASERWREDDSEYEHYSDSGGKSGGQKEKLAYTILAASLAYQFGLEWGAVRSRSFRFVVIDEAFGRGSDESAQYGLTLFQKLNLQLLIVTPLQKIHIIEPFVSSVGFVQNDGGRASKLRTLSIEEYRAHKAEFEQ

SEQ ID NO: 37921 - protein, 394 aa, Burkholderia ubonensis
MSWTTAVELRARLQQLWARGEWLRSFVDGTEGLFPLRLAIKGPSSSELAERFDAVRAWIAEIAATPHIRIEWREINHRILGVQRLPRAAWVDSLDDALAVAGKHRDAAQFARLLEITRARQPKLTAWLAQRPLQALEFAGDWERLLAVVDWLQAHPHPGVYLRQAEIAGVDTKFIEARRGVLSQWLDLVLPSEAIDSSRTGVAQFAARYGFREKQPRIRFRVLDERLAVLPGMGRPDIALDADSFARLALPCRHVFVTENETNFLAFPDVPQAIVLFGAGYGWEALEPARWLADCALHYWGDIDTHGFAILDQLRCRFPHVNSFLMDRATLMAHEAFWGDEGDQVVRDLPRLTAQERELFDDLRDNRIRHGLRLEQERVGFGWVRAALEERSFV

SEQ ID NO: 37922 - protein, 486 aa, Burkholderia ubonensis; identical to SEQ ID NO: 37699

SEQ ID NO: 37923 - protein, 216 aa, Burkholderia ubonensis; identical to SEQ ID NO: 37700

SEQ ID NO: 37924 - protein, 1123 aa, Burkholderia ubonensis
MNEPRTLGLDFAADDTLTGFRLERLEVFNWGTFDDRAWVLRVDGRNGLLTGDIGSGKSTLVDAITTLLVPAQRIAYNKAAGADSKERTLRSYVLGYYKSERNEVTGTAKPVSLRDHNSYSVILGVFRNAGYDATVTLAQVFWMKDAQAQPARFFVSAERDLSIATDFSRFGTDIAQLRKKLRGLGAEIEDTFPKYSAWFRRRFGIENEQALELFHQTVSMKSVGNLTDFVRSHMLEPFDVAPRVDALIAHFDDLNRAHEAVLKTKRQVELLTPLVDDCDRHSEQGHVLEGWRACREALRPYFAGLKLGLVERRLQLLEEDHARATSRKARHEEARDQARQRVDDLRRAVAEQGGDRIAQLDVEIREHERESVRRRERAQRYAAIVTLFGETEAVDEAAFASQRQRLAEQRSSLVDDEAQQQNAITEWSVAFREGKARRDVLEDEIASLKARRNNIPKEQVAMRASLCSALGLEEDALPFAGELIQVREDARDWEGAAERVLRNFGLSLLVPDEHYANVAAWVDRTHLRGRLVYFRVRSERTARAAEAIELHRHSLAHKLAIKPDSQFYGWLEREIGRRFDYACCDTQEQFRRETRAITRAGQAKAPGERHEKDDRHALDDRSRYVLGWSNTAKISALAAQRQALEARLGEIGQRLGEAQHEHTKVREQLEALARAGEFAEFREIDWSSCAAAIARLADEKARLESASDALAELTAQLDSAQASLKESEAAMSETDSELGGILAKREAAQALREETHALVAEVDAELAERIEALRAEILGEHQLSVESCDNRERDVREALTTRIDNETKSLGRLAERIVKAMAAFKEAYKLETADFDASLAANSEYRDMLARLQADDLPRFETRFKELLNVNTINEIANFHAQLARERATIKERIERINESLRQIDYNAGRYIVLESQPSPDAEIREFQSDLRACTEGELTGSDDSQYSEAKFLQVKRIIDRFRGREGLTEQDRRWRAKVTDVRNWFLFAASERWREDDSEYEHYSDSGGKSGGQKEKLAYTILAASLAYQFGLEWGAVRSRSFRFVVIDEAFGRGSDESAQYGLTLFQKLNLQLLIVTPLQKIHIIEPFVSSVGFVQNDGGRASKLRTLSIEEYRAHKAEFEQ

SEQ ID NO: 37925 - protein, 394 aa, Burkholderia ubonensis
MSWTTAVELRARLQRLWERGEWLRSLVDGAEGLFPLRLAIKGPSSSELAERFDTVRAWITEIAATPRIRIEWREINHRILGQQRLPRAAWVDSLDDALTVAGKQRDAARFERLLEITRSRQPKLIAWLAQRPMQALELAGDWERLLAVVDWLQAHPQPGIYLRQAEIAGVDTKFIEARRGVLSQWLDLVLPSEAIDSSRTGVAQFAARYGFREKQPRIRFRVLDERLAVLPGMGRPDIALDADSFARLALPCRHVFVTENETNFLAFPDVPQAIVLFGAGYGWEALEPARWLADCALHYWGDIDTHGFAILDQLRCRFPHAGSFLMDRATLMAHEAFWGDEADQVMRDLPRLTAQERELFDDLRDNRIRRGLRLEQERIGFGWVRAALEERALV

SEQ ID NO: 37926 - protein, 486 aa, Burkholderia ubonensis; identical to SEQ ID NO: 37699

SEQ ID NO: 37927 - protein, 216 aa, Burkholderia ubonensis; identical to SEQ ID NO: 37700

SEQ ID NO: 37928 - protein, 1123 aa, Burkholderia ubonensis
MNEPRTLGLDFAADDTLTGFRLERLEVFNWGTFDDRAWVLRVDGRNGLLTGDIGSGKSTLVDAITTLLVPAQRIAYNKAAGADSKERTLRSYVLGYYKSERNEVTGTAKPVSLRDHNSYSVILGVFRNAGYDATVTLAQVFWMKDAQAQPARFFVSAERDLSIATDFSRFGTDIAQLRKKLRGLGAEIEDTFPKYSAWFRRRFGIENEQALELFHQTVSMKSVGNLTDFVRSHMLEPFDVAPRVDALIAHFDDLNRAHEAVLKTKRQVELLTPLVDDCDRHSAQGRVLEGWRACREALRPYFAGLKLGLVERRLQLLEEDHARATSRKARHEEARDQARQRVDDLRRAVAEQGGDRIAQLDVEIREHERESVRRRERAQRYAAIVTLFGETEAADEAAFASQRQRLAEQRSSLVDDEAQQQNAITEWSVAFREGKARRDLLEDEIASLKARRNNIPKEQVAMRASLCSALGLEEDALPFAGELIQVREDARDWEGAAERVLRNFGLSLLVPDEHYANVAAWVDRTHLRGRLVYFRVRSERTARAAEAIELHRHSLAHKLAIKPDSQFYGWLEREIVRRFDYACCDTQEQFRRETRAITRAGQAKAPGERHEKDDRHALDDRSRYVLGWSNTAKISALAAQRQALEARLGEIGQRLGEAQHEHTKVREQLEALARAGEFAEFREIDWSSCAAAIARLADEKARLESASDALAELTAQLDSAQASLKESEAAMSETDSELGGILAKREAAQALREETHALVAEVDAELAERIEALRAEILGEHQLSVESCDNRERDVREALTTRIDNETKSLGRLAERIVKAMAAFKEAYKLETADFDASLAATPEYRDMLARLQADDLPRFETRFKELLNVNTINEIANFHAQLARERATIKERIERINESLRQIDYNAGRYIVLESQPSPDAEIREFQSDLRACTEGELTGSDDSQYSEAKFLQVKRIIDRFRGREGLTEQDRRWRAKVTDVRNWFLFAASERWREDDSEYEHYSDSGGKSGGQKEKLAYTILAASLAYQFGLEWGAVRSRSFRFVVIDEAFGRGSDESAQYGLTLFQKLNLQLLIVTPLQKIHIIEPFVSSVGFVQNDGGRASKLRTLSIEEYRAHKAEFEQ

SEQ ID NO: 37929 - protein, 394 aa, Burkholderia ubonensis; identical to SEQ ID NO: 37906

SEQ ID NO: 37930 - protein, 497 aa, Burkholderia cepacia; identical to SEQ ID NO: 37914

SEQ ID NO: 37931 - protein, 220 aa, Burkholderia cepacia; identical to SEQ ID NO: 37915

SEQ ID NO: 37932 - protein, 1147 aa, Burkholderia cepacia; identical to SEQ ID NO: 37916

SEQ ID NO: 37933 - protein, 387 aa, Burkholderia cepacia; identical to SEQ ID NO: 37917

SEQ ID NO: 37934 - protein, 486 aa, Burkholderia ubonensis; identical to SEQ ID NO: 37699

SEQ ID NO: 37935 - protein, 216 aa, Burkholderia ubonensis
MEEQQTPSLGRGDLSTVAVALLKGVVYRDGNERLWAALLELQTHVRDYVAVLGLELVVDEAEGYAFVKSRTEPDAEVDGDQAKLPRLVARRPLSFPVSLLLALLRKKLAEWDAGGGDTRLVLSREDIVELVRVFLPASTNEARLVDQIDTHVNKIVDLGFLRRMKTASGPPTFEVRRILKAFVDAQWLLDFDARLASYQAHLRDSTNSDQTESRDE

SEQ ID NO: 37936 - protein, 1123 aa, Burkholderia ubonensis
MNEPRTLGLDFAADDTRTGFRLERLEVFNWGTFDERVWVLRVDGRNGLLTGDIGSGKSTLVDAITTLLVPAQRIAYNKAAGADSKERTLRSYVLGYYKSERNEVTGAAKPVSLRDHNSYSVILGVFRNAGYDATVTLAQVFWMKDAQAQPARFFVSAERDLSIATDFSRFGTDIAQLRKKLRGLGAEIEDTFPKYSAWFRRRFGIENEQALELFHQTVSMKSVGNLTDFVRSHMLEPFDVAPRVDALIAHFDDLNRAHEAVLKTKRQVELLTPLVDDCDRHSEQGHVLEGWRACREALRPYFAGLKLGLVERRLQLLEEDHARATSRKARHEEARDQARQRVDDLRRAVAEQGGDRIAQLDVEIREHERESVRRRERAQRYAAIVTLFGETEAADDAAFASQRQRLAEQRSSLVDDEAQQQNAITEWSVAFREGKARRDLLEDEIASLKARRNNIPKEQVAMRASLCSALGLEEDALPFAGELIQVREDARDWEGAAERVLRNFGLSLLVPDEHYASVAAWVDRTHLRGRLVYFRVRSERSARAAEAIELHRHSLAHKLAIKPDSQFYGWLEREIGRRFDYACCDTQEQFRRETRAITRAGQAKAPGERHEKDDRHALDDRSRYVLGWSNTAKISALAAQRQALEARLGEIGQRLGEAQHEHTKVREQLEALARAGEFAEFREIDWSSCAAAIARLADEKARLESASDALAELTAQLDSAQASLKEREAAMSETDSELGGILAKREAAQALREETLALVAEVDAELAERIEALRAEILGEHQLSVESCDNRERDVREALTTRIDNETKSLGRLAERIVKAMAAFKEAYKLETADFDASLDANSEYRDMLARLQADDLPRFETRFKELLNVNTINEIANFHAQLARERATIKERIERINESLRQIDYNAGRYIILESQPSPDAEIREFQSDLRACTEGELTGSDDSQYSEAKFLQVKRIIDRFRGREGLTEQDRRWRAKVTDVRNWFLFAASERWREDDSEYEHYSDSGGKSGGQKEKLAYTILAASLAYQFGLEWGAVRSRSFRFVVIDEAFGRGSDESAQYGLTLFQKLNLQLLIVTPLQKIHIIEPFVSSVGFVQNDGGRASKLRTLSIEEYRAHKAEFEQ

SEQ ID NO: 37937 - protein, 394 aa, Burkholderia ubonensis
MSWTTAVELRARLQQLWARGEWLRSFVDGTEGLFPLRLAIKGPSSSELAERFDAVRAWIAEIAATPHIRIEWREINHRILGVQRLPRAAWVDSLDDALAVAGKHRDAAQFARLLEITRARQPKLAAWLAQRPLQALEFAGDWERLLAVVDWLQAHPHPGVYLRQAEIAGVDTKFIEARRGVLSQWLDLVLPSEAIDSSRTGVAQFAARYGFREKQPRIRFRVLDERLAVLPGMGRPDIALDADSFARLALPCRHVFVTENETNFLAFPDVPQAIVLFGAGYGWEALEPARWLADCALHYWGDIDTHGFAILDQLRCRFPHVNSFLMDRATLMAHEAFWGDEGDQVVRDLPRLTAQERELFDDLRDNRIRHGLRLEQERVGFGWVRAALEERSFV

SEQ ID NO: 37938 - protein, 488 aa, Burkholderia stagnalis; identical to SEQ ID NO: 37795

SEQ ID NO: 37939 - protein, 217 aa, Burkholderia stagnalis; identical to SEQ ID NO: 37796

SEQ ID NO: 37940 - protein, 1123 aa, Burkholderia stagnalis; identical to SEQ ID NO: 37797

SEQ ID NO: 37941 - protein, 394 aa, Burkholderia stagnalis; identical to SEQ ID NO: 37798

SEQ ID NO: 37942 - protein, 486 aa, Burkholderia ubonensis; identical to SEQ ID NO: 37803

SEQ ID NO: 37943 - protein, 216 aa, Burkholderia ubonensis; identical to SEQ ID NO: 37804

SEQ ID NO: 37944 - protein, 1123 aa, Burkholderia ubonensis
MNEPRTLGLDFAADDTLTGFRLERLEVFNWGTFDDRAWVLRVDGRNGLLTGDIGSGKSTLVDAITTLLVPAQRIAYNKAAGADSKERTLRSYVLGYYKSERNEVTGAAKPVSLRDHNSYSVILGVFRNAGYDATVTLAQVFWMKDAQAQPARFFVSAERDLSIATDFSRFGTDIAQLRKKLRGLGAEIEDTFPKYSAWFRRRFGIENEQALELFHQTVSMKSVGNLTDFVRSHMLEPFDVAPRVDALIAHFDDLNRAHEAVLKTKRQVELLTPLVDDCDRHSAQGRVLEGWRACREALRPYFAGLKLGLVERRLQLLEEDHARATSRKARHEEARDQARQRVDDLRRAVAEQGGDRIAQLDVEIREHERESVRRRERAQRYAAIVTLFGETEAADEAAFASQRQRLAEQRSSLVDDEAQQQNAITEWSVAFREGKARRDLLEDEIASLKARRNNIPKEQVAMRASLCSALGLEEDALPFAGELIQVREDARDWEGAAERVLRNFGLSLLVPDEHYANVAAWVDRTHLRGRLVYFRVRSERSARAAEAIELHRHSLAHKLAIKPDSLFYGWLEREIGRRFDYACCDTQEQFRRETRAITRAGQAKAPGERHEKDDRHALDDRSRYVLGWSNTAKISALEAQRQALEARLGEIGQRLGEAQHEHTKVREQLEALARAGEFAEFREIDWSSCAAAIARLADEKARLESASDALAELTAQLDSAQASLKESEAAMSETDSELGGILAKREAAQALREETHALVAEVDAELAERIEALRAEILGEHQLSVESCDNRERDVREALTTRIDNETKSLGRLAERIVKAMAAFKEAYKLETADFDASLAANSEYRDMLARLQADDLPRFETRFKELLNVNTINEIANFHAQLARERATIKERIERINESLRQIDYNAGRYIVLESQPSPDAEIREFQSDLRACTEGELTGSDDSQYSEAKFLQVKRIIDRFRGREGLTEQDRRWRAKVTDVRNWFLFAASERWREDDSEYEHYSDSGGKSGGQKEKLAYTILAASLAYQFGLEWGAVRSRSFRFVVIDEAFGRGSDESAQYGLTLFQKLNLQLLIVTPLQKIHIIEPFVSSVGFVQNDGGRASKLRTLSIEEYRAHKAEFEQ

SEQ ID NO: 37945 - protein, 394 aa, Burkholderia ubonensis; identical to SEQ ID NO: 37806

SEQ ID NO: 37946 - protein, 499 aa, Burkholderia anthina; identical to SEQ ID NO: 37703

SEQ ID NO: 37947 - protein, 253 aa, Burkholderia anthina; identical to SEQ ID NO: 37704

SEQ ID NO: 37948 - protein, 1109 aa, Burkholderia anthina; identical to SEQ ID NO: 37705

SEQ ID NO: 37949 - protein, 381 aa, Burkholderia anthina; identical to SEQ ID NO: 37706

SEQ ID NO: 37950 - protein, 486 aa, Burkholderia ubonensis
MFLDYPTLDALRTRHPAWRLLRSDHAPLAVSFLHRAFVAPNVREVAAPFLAEALEDELYALREQLGDGAFPKPALEYLNDWASPEKGWLRKFYRQGSDEPHFDLTPAAGKAIAWLGTLMERSFVGTESRLLTLFELLRQMAEGSETDPERRLAELHARRSQLDEEIARVEAGDVRLLDDAAIKDRFQQFMQMARDLLTDFREVEQNFRLLDRHVRERIALWEGSKGALIEEIMGERDAIADSDQGSSFRAFWDFLMSSRRQEELSERLEHVLALPAITEMKPDARTRRVHYDWLEAGEHTQRTVAQLSQQLRRFLDDQAWLENRRIMDILRGIETKALVLREAPPPGSVMEIETASADIELPIERPLYAPALRPLIANVAIETGDADLDASALYTQIVVDRARLASHIRRCLQDRRQVTLAELAASQPLLHGLAELVAYLQLSAEVGTFRATVDETVSDTIEWQANDTNGAAIVKRATMPRVIFTR

SEQ ID NO: 37951 - protein, 216 aa, Burkholderia ubonensis; identical to SEQ ID NO: 37836

SEQ ID NO: 37952 - protein, 1123 aa, Burkholderia ubonensis
MNEPRTLGLDFAADDTLTGFRLERLEVFNWGTFDDRVWVLRVDGRNGLLTGDIGSGKSTLVDAITTLLVPAQRIAYNKAAGADSKERTLRSYVLGYYKSERNEVTGTAKPVSLRDHNSYSVILGVFRNAGYDATVTLAQVFWMKDAQAQPARFFVSAERDLSIATDFSRFGTDIAQLRKKLRGLGAEIEDTFPKYSAWFRRRFGIENEQALELFHQTVSMKSVGNLTDFVRSHMLEPFDVAPRVDALIAHFDDLNRAHEAVLKTKRQVELLTPLVDDCDRHSEQAHVLEGWRACREALRPYFAGLKLGLVERRLQLLDEDHARATSRKARHEEARDQARQRVDDLRRAVAEQGGDRIAQLDVEIREHERESVRRRERAQRYAAIVTLFGETEAADEAAFASQRQRLAEQRSSLVDDEAQQQNAITEWSVAFREGKARRDVLEDEIASLKARRNNIPKEQVAMRASLCSALGLEEDALPFAGELIQVREDARDWEGAAERVLRNFGLSLLVPDEHYANVAAWVDRTHLRGRLVYFRVRSERSARAAEAIELHRHSLAHKLAIKPDSLFYGWLEREIGRRFDYACCDTQEQFRRETRAITRAGQAKAPGERHEKDDRHALDDRSRYVLGWSNTAKISALAAQRQALEARLGEIGQRLGEAQHEHTKVREQLEALARAGEFAEFREIDWSSCAAAIARLADEKARLESASDALAELTAQLDSAQASLKESEAAMSETDSELGGILAKREAAQALREETHALVAEVDAELAERIEALRAEILGEHQLSVESCDNRERDVREALTTRIDNETKSLGRLAERIVKAMAAFKEAYKLETADFDASLDANPEYRDMLARLQADDLPRFETRFKELLNVNTINEIANFHAQLARERATIKERIERINESLRQIDYNAGRYIILESQPSPDAEIREFQSDLRACTEGELTGSDDSQYSEAKFLQVKRIIDRFRGREGLTEQDRRWRAKVTDVRNWFLFAASERWREDDSEYEHYSDSGGKSGGQKEKLAYTILAASLAYQFGLEWGAVRSRSFRFVVIDEAFGRGSDESAQYGLTLFQKLNLQLLIVTPLQKIHIIEPFVSSVGFVQNDGGRASKLRTLSIDEYRAHKAEFEQ

SEQ ID NO: 37953 - protein, 394 aa, Burkholderia ubonensis
MSWTTAVELRARLQHLWARGEWLRSLVDGTEGLFPLRLALKGPSSSELAERFDTVRAWITEIAATPRIRIEWREINHRILGVQRLPRAAWVDSLDDALTVAGKHRDAARFERLLEITRSRQPKLIAWLAQRPMQALELAGDWERLLAVVDWLQAHPHPGVYLRQAEIAGVDTKFIEARRGVLSQWLDLVLPSEAIDSSRTGVAQFAARYGFREKQPRIRFRVLDERLAVLPGMGRPDIALDADSFARLALPCRHVFVTENETNFLAFPDVPQAIVLFGAGYGWEALEPARWLADCALHYWGDIDTHGFAILDQLRCRFPHVNSFLMDRATLMAHEAFWGDEGDQVVRDLPRLTAQERELFDDLRDNRIRRGLRLEQERVGFGWVRAALEERSFV

SEQ ID NO: 37954 - protein, 486 aa, Burkholderia ubonensis; identical to SEQ ID NO: 37831

SEQ ID NO: 37955 - protein, 216 aa, Burkholderia ubonensis; identical to SEQ ID NO: 37744

SEQ ID NO: 37956 - protein, 1123 aa, Burkholderia ubonensis
MNEPRTLGLDFAADDTLTGFRLERLEVFNWGTFDERVWVLRVDGRNGLLTGDIGSGKSTLVDAITTLLVPAQRIAYNKAAGADSKERTLRSYVLGYYKSERNEVTGTAKPVSLRDHNSYSVILGVFRNAGYDATVTLAQVFWMKDAQAQPARFFVSAERDLSIATDFSRFGTDIAQLRKKLRGLGAEIEDTFPKYSAWFRRRFGIENEQALELFHQTVSMKSVGNLTDFVRSHMLEPFDVAPRVDALIAHFDDLNRAHEAVLKTKRQVELLTPLVDDCDRHSEQGHVLEGWRACREALRPYFAGLKLGLVERRLQLLEEDHARATSRKARHEEARDQARQRVDDLRRAVAEQGGDRIAQLDVEIREHERESVRRRERAQRYAAIVTLFGETEAVDEAAFASQRQRLAEQRSSLVDDEAQQQNAITEWSVAFREGKARRDVLEDEIASLKARRNNIPKEQVAMRASLCSALGLEEDALPFAGELIQVREDARDWEGAAERVLRNFGLSLLVPDEHYANVAAWVDRTHLRGRLVYFRVRSERTARVAEAIELHRHSLAHKLAIKPDSQFYGWLEREIGRRFDYACCDTQEQFRRETRAITRAGQAKAPGERHEKDDRHALDDRSRYVLGWSNTAKISALAAQRQALEARLGEIGQRLGEAQHEHTKVREQLEALARAGEFAEFREIDWSSCAAAIARLADEKARLESASDALAELTAQLDSAQASLKESEAAMSETDSELGGILAKREAAQALREETHALVAEVDAELAERIEALRAEILGEHQLSVESCDNRERDVREALTTRIDNETKSLGRLAERIVKAMAAFKEAYKLETADFDASLDANSEYRDMLARLQADDLPRFETRFKELLNVNTINEIANFHAQLARERATIKERIERINESLRQIDYNAGRYIILESQPSPDAEIREFQSDLRACTEGELTGSDDSQYSEAKFLQVKRIIDRFRGREGLTEQDRRWRAKVTDVRNWFLFAASERWREDDSEYEHYSDSGGKSGGQKEKLAYTILAASLAYQFGLEWGAVRSRSFRFVVIDEAFGRGSDESAQYGLTLFQKLNLQLLIVTPLQKIHIIEPFVSSVGFVQNDGGRASKLRTLSIEEYRAHKAEFEQ

SEQ ID NO: 37957 - protein, 394 aa, Burkholderia ubonensis
MSWTTAVELRIRLQRLWERGEWLRSLVDGTEGLFPLRLALKGPSSSELAERFDTVRAWITEIAATPRIRIEWREINHRILGVQRLPRAAWVDSLDDALTVAGKHRDAARFERLLEITRSRQPKLIAWLAQRPMQALELAGDWERLLAVVDWLQAHPQPGIYLRQAEIAGVDTKFIEARRGVLSQWLDLVLPSEAIDSSRTGAAQFAARYGFRDKPPRIRFRVLDERLAVLPGMGRPDITLDADSFARLALPCRHVFVTENETNFLAFPDVPQAIVLFGAGYGWEALEPAQWLTDCALHYWGDIDTHGFAILDQLRCRFPHVNSFLMDRATLMAHEAFWGDEGDQVMRDLPRLTAQERELFDDLRDNRIRHGLRLEQERVGFGWVRAALEERALV

SEQ ID NO: 37958 - protein, 486 aa, Burkholderia ubonensis; identical to SEQ ID NO: 37827

SEQ ID NO: 37959 - protein, 216 aa, Burkholderia ubonensis; identical to SEQ ID NO: 37828

SEQ ID NO: 37960 - protein, 1123 aa, Burkholderia ubonensis; identical to SEQ ID NO: 37829

SEQ ID NO: 37961 - protein, 394 aa, Burkholderia ubonensis
MSWTTAVELRIRLQRLWERGEWLRSLVDGTEGLFPLRLALKGPSSSELAERFDTVRAWITEIAATPRIRIEWREINHRILGVQRLPRAAWVDSLDDALTVAGKHRDAARFERLLEITRSRQPKLIAWLAQRPMQALELAGDWERLLAVVDWLQAHPQPGIYLRQAEIAGVDTKFIEARRGVLSQWLDLVLPSEAIDSSRTGAAQFAARYGFRDKPPRIRFRVLDERLVVLPGMGRPDITLDADSFARLALPCRHVFVTENETNFLAFPDVPQAIVLFGAGYGWEALEPARWLADCALHYWGDIDTHGFAILDQLRCRFPHAGSFLMDRATLMAHEAFWGDEADQVMRDLPRLTAQERELFDDLRDNRIRRGLRLEQERIGFGWVRAALEERALV

SEQ ID NO: 37962 - protein, 486 aa, Burkholderia ubonensis; identical to SEQ ID NO: 37803

SEQ ID NO: 37963 - protein, 216 aa, Burkholderia ubonensis; identical to SEQ ID NO: 37804

SEQ ID NO: 37964 - protein, 1123 aa, Burkholderia ubonensis
MNEPRTLGLDFAADDTLTGFRLERLEVFNWGTFDDRAWVLRVDGRNGLLTGDIGSGKSTLVDAITTLLVPAQRIAYNKAAGADSKERTLRSYVLGYYKSERNEVTGAAKPVSLRDHNSYSVILGVFRNAGHDATVTLAQVFWMKDAQAQPARFFVSAERDLSIATDFSRFGTDIAQLRKKLRGLGAEIEDTFPKYSAWFRRRFGIENEQALELFHQTVSMKSVGNLTDFVRSHMLEPFDVAPRVDALIAHFDDLNRAHEAVLKTKRQVELLTPLVDDCDRHSAQGRVLEGWRACREALRPYFAGLKLGLVERRLQLLEEDHARATSRKARHEEARDQARQRVDDLRRAVAEQGGDRIAQLDVEIREHERESVRRRERAQRYAAIVTLFGETEAADEAAFASQRQRLAEQRSSLVDDEAQQQNAITEWSVAFREGKARRDLLEDEIASLKARRNNIPKEQVAMRASLCSALGLEEDALPFAGELIQVREDARDWEGAAERVLRNFGLSLLVPDEHYANVAAWVDRTHLRGRLVYFRVRSERSARAAEAIELHRHSLAHKLAIKPDSLFYGWLEREIGRRFDYACCDTQEQFRRETRAITRAGQAKAPGERHEKDDRHALDDRSRYVLGWSNTAKISALEAQRQALEARLGEIGQRLGEAQHEHTKVREQLEALARAGEFAEFREIDWSSCAAAIARLADEKARLESASDALAELTAQLDSAQASLKESEAAMSETDSELGGILAKREAAQALREETHALVAEVDAELAERIEALRAEILGEHQLSVESCDNRERDVREALTTRIDNETKSLGRLAERIVKAMAAFKEAYKLETADFDASLAANSEYRDMLARLQADDLPRFETRFKELLNVNTINEIANFHAQLARERATIKERIERINESLRQIDYNAGRYIVLESQPSPDAEIREFQSDLRACTEGELTGSDDSQYSEAKFLQVKRIIDRFRGREGLTEQDRRWRAKVTDVRNWFLFAASERWREDDSEYEHYSDSGGKSGGQKEKLAYTILAASLAYQFGLEWGAVRSRSFRFVVIDEAFGRGSDESAQYGLTLFQKLNLQLLIVTPLQKIHIIEPFVSSVGFVQNDGGRASKLRTLSIEEYRAHKAEFEQ

SEQ ID NO: 37965 - protein, 394 aa, Burkholderia ubonensis; identical to SEQ ID NO: 37806

SEQ ID NO: 37966 - protein, 486 aa, Burkholderia ubonensis; identical to SEQ ID NO: 37831

SEQ ID NO: 37967 - protein, 216 aa, Burkholderia ubonensis; identical to SEQ ID NO: 37744

SEQ ID NO: 37968 - protein, 1123 aa, Burkholderia ubonensis; identical to SEQ ID NO: 37833

SEQ ID NO: 37969 - protein, 394 aa, Burkholderia ubonensis; identical to SEQ ID NO: 37834

SEQ ID NO: 37970 - protein, 488 aa, Burkholderia stagnalis; identical to SEQ ID NO: 37795

SEQ ID NO: 37971 - protein, 217 aa, Burkholderia stagnalis; identical to SEQ ID NO: 37796

SEQ ID NO: 37972 - protein, 1123 aa, Burkholderia stagnalis; identical to SEQ ID NO: 37797

SEQ ID NO: 37973 - protein, 394 aa, Burkholderia stagnalis; identical to SEQ ID NO: 37798

SEQ ID NO: 37974 - protein, 488 aa, Burkholderia stagnalis; identical to SEQ ID NO: 37795

SEQ ID NO: 37975 - protein, 217 aa, Burkholderia stagnalis; identical to SEQ ID NO: 37796

SEQ ID NO: 37976 - protein, 1123 aa, Burkholderia stagnalis; identical to SEQ ID NO: 37797

SEQ ID NO: 37977 - protein, 394 aa, Burkholderia stagnalis; identical to SEQ ID NO: 37798

SEQ ID NO: 37978 - protein, 486 aa, Burkholderia ubonensis; identical to SEQ ID NO: 37803

SEQ ID NO: 37979 - protein, 216 aa, Burkholderia ubonensis; identical to SEQ ID NO: 37804

SEQ ID NO: 37980 - protein, 1123 aa, Burkholderia ubonensis
MNEPRTLGLDFAADDTLTGFRLERLEVFNWGTFDDRAWVLRVDGRNGLLTGDIGSGKSTLVDAITTLLVPAQRIAYNKAAGADSKERTLRSYVLGYYKSERNEVTGTAKPVSLRDHNSYSVILGVFRNAGYDATITLAQVFWMKDAQAQPARFFVSAERDLSIATDFSRFGTDIAQLRKKLRGLGAEIEDTFPKYSAWFRRRFGIENEQALELFHQTVSMKSVGNLTDFVRSHMLEPFDVAPRVDALIAHFDDLNRAHEAVLKTKRQVELLTPLVDDCDRHSEQAHVLEGWRACREALRPYFAGLKLGLVERRLQLLEEDHARATSRRARHEEARDQARQRVDDLRRAVAEQGGDRIAQLDVEIREHERESVRRRERAQRYAAIVTLFGETEAADEAAFASQRQRLAEQRSSLVDDEAQQQNAITEWSVAFREGKARRDLLEDEIASLKARRNNIPKEQVAMRASLCSALGLEEDALPFAGELIQVREDARDWEGAAERVLRNFGLSLLVPDEHYANVAAWVDRTHLRGRLVYFRVRSERTARVAEAIELHRHSLAHKLAIKPDSQFYGWLEREIGRRFDYACCDTQEQFRRETRAITRAGQAKAPGERHEKDDRHALDDRSRYVLGWSNTAKISALAAQRQALEARLGEIGQRLGEVQHEHTKVREQLEALARAGEFAEFREIDWSSCAAAIARLADEKARLESASDALAELTAQLDSAQASLKESEAAMSETDSELGGILAKREAAQALREETHALVAEVDAELAERIEALRAEILGEHQLSVESCDNRERDVREALTTRIDNETKSLGRLAERIVKAMAAFKEAYKLETADFDASLAANSEYRDMLARLQADDLPRFETRFKELLNVNTINEIANFHAQLARERATIKERIERINESLRQIDYNAGRYIVLESQPSPDAEIREFQSDLRACTEGELTGSDDSQYSEAKFLQVKRIIDRFRGREGLTEQDRRWRAKVTDVRNWFLFAASERWREDDSEYEHYSDSGGKSGGQKEKLAYTILAASLAYQFGLEWGAVRSRSFRFVVIDEAFGRGSDESAQYGLTLFQKLNLQLLIVTPLQKIHIIEPFVSSVGFVQNDGGRASKLRTLSIEEYRAHKAEFEQ

SEQ ID NO: 37981 - protein, 394 aa, Burkholderia ubonensis; identical to SEQ ID NO: 37702

SEQ ID NO: 37982 - protein, 488 aa, Burkholderia stagnalis; identical to SEQ ID NO: 37795

SEQ ID NO: 37983 - protein, 217 aa, Burkholderia stagnalis; identical to SEQ ID NO: 37796

SEQ ID NO: 37984 - protein, 1123 aa, Burkholderia stagnalis; identical to SEQ ID NO: 37797

SEQ ID NO: 37985 - protein, 394 aa, Burkholderia stagnalis; identical to SEQ ID NO: 37798

SEQ ID NO: 37986 - protein, 486 aa, Burkholderia ubonensis; identical to SEQ ID NO: 37699

SEQ ID NO: 37987 - protein, 216 aa, Burkholderia ubonensis; identical to SEQ ID NO: 37700

SEQ ID NO: 37988 - protein, 1123 aa, Burkholderia ubonensis; identical to SEQ ID NO: 37761

SEQ ID NO: 37989 - protein, 394 aa, Burkholderia ubonensis; identical to SEQ ID NO: 37762

SEQ ID NO: 37990 - protein, 476 aa, Burkholderia cepacia
MWRLLASYQAPVTVSLLQSLFPETSTQLTSASLMERLSVEVDGLRARGEEINKTPQMIIADWVHQKWLARSFPEGASEEQYELAADVVPAMRLVMGLLEPRQTATESGLAVVIDSVLRLAADTDPDPESRLRALHEESRRITEEIRRVMQHGVSPLDPARASERGRHIVATTEAIAADFRRVREAFEILNRDLRRQLVAHGGPRGEVLDKVFLDSDVIAESDEGKSFLAFWRLLTDPSQLEGLQAALEALESRPFIRLLSLEERKRLFRVTEMLLVEGTMVQDVMTTLGRSLRTFVQSREFQEQRRIQNLIRRAITESLELKDTLTNGRTIDFSLTLSTSSLRSVAQLTLTDPRERPGETSVDDAEAPEIDLEAMREMIDNADIDMPLLKANIRAALAERAQVSVRDLTIMFEVAQGLASIVGYMSLGQRVGIVLDNRDREFHPTELVSWVGQDGIVRQARIAQLLFTRECLDELD

SEQ ID NO: 37991 - protein, 264 aa, Burkholderia cepacia
MLALMIRILRTRYRKSTTRAQASCWTMTASQRPGWMVAWKCHCLRAKSTLPHEVRRAYALLLRGPSLDERHSKLWPVLIDHELRLRQLLHAAFLDLVIDREQKIAFARPAHIPDGDVPQLLREVRLTFVDSALVLHLRMMLVQAEAEGRRATVSRFEMIDHLKAYEASDNVDQTRFNRQVDGAIEKAKKYNFLRLIRNSGERFEISPVLKLVFSHDQIEELRRTYQDIRNQLGGRPLEGDGDLTNRSDSQSSGDPDDGHDIDEV

SEQ ID NO: 37992 - protein, 1041 aa, Burkholderia cepacia
MVTYIRGAWATRETDLGGIAAQYLRPDTTLSAVAEVYANSRGQTLTLVGMWWIKGKSTLAKDVRHSFFVIERAFKLKELSFFMQTDYNLRSFQKHLPEVKLFETHASFRERFKARLGIDHDLALRLLHRTQSSKNLGDINTFMRDNMLDEPQTFSLAKALCEEFNTLAAAHRDVVDARKQRDLLRDAKSHEEQYQEHHAKVDRIETLLKQVDHHSKYLQYTLRRGRANELTIELERLRQQVEALGRRANSEQAELERLITLRGGMNDGNVAGLTAQLETTATRLNQVGRERTRVAGWLKTLGWPEPEDAAHFGEYLGKANILREHGHPHEEEAKEHALRNDLSVAQTQLSELLQEIRSMELRKSNLPWQLVDVRDQIATALKLDPGILPFGGELLDVPKKFERWQGALERLLGPLTRSFLVPEAHYRDVVDWLESNHTGQHVLYLRMRTHQRRADDGPKSPIRMLDTADDKYGDWLRDEISQHYGDFVCAETMDEFREAARAISLQGQIKRGGTRHEKNDRTRLDNRKEWSIGFSNEQKKLELLDELHAQQTKISESKQVLDDLVASRKREEQKLAAAQELSQVMWADIDTVSVALQLQRLQVQLEDAQRAHPEVRELDTQIETQRQTVSDAQGARGSESDKYDRSVEQMATLSRELEATPAELQVPPPDAGELQELFGKVDRLTLDNLESRRERARGDLKEQRGQADKDRSNARKDLEEALRTFRRNHPLAAADMGETLDDWPDYARVLVRIEQDDLPRFEERFFRLLNEQSDRHIAKLRQRLVTEKEEIRGRMNIVNDALSQSQFNPGTYLRLENRPRTLPEVTTFLADLTACLERNIKPDATRDEREEQFKALSKLVERLHSDKSEDERWKAQVLDVRQHVEFVAKEFDAEGSVRDIFQSGAGKSGGQRQKLAATCLAAALRYQLAGTDRPLPQFCTVLMDEAFDKADSEFTAMTLNIFHTFGFQMLMATPMKAVRTLEPFIGGAHVFSNKSRDSSGAVSIEYDMTHHRLIGLGAPRPDDPSRAANDDSDEGGARAVD

SEQ ID NO: 37993 - protein, 267 aa, Burkholderia cepacia
MIGMPECAKVLVSAADWSDDDFMRLLEFLSWGKDHPASGLYLRQLPLKGIDTKWVERRLGVVVPLLKTILGRDGDLHQLLGLRRAPPTIRMRLLDPLVREQLGGADYLEMPVDQWNTVLHRPPARLLVVENLDTGLAAPDIRDAAVVMGHGNGITLLQKVAWSRAAEILYWGDIDTWGLHILSRMRGIYPRLESILMTEEVLESHQHFWVDEETQDMRPAEHHTSKEAKLLRDLQQRRWGRPIRLEQERVHWPMAVEALTRRWGGLA

SEQ ID NO: 37994 - protein, 486 aa, Burkholderia ubonensis; identical to SEQ ID NO: 37803

SEQ ID NO: 37995 - protein, 216 aa, Burkholderia ubonensis; identical to SEQ ID NO: 37804

SEQ ID NO: 37996 - protein, 1123 aa, Burkholderia ubonensis; identical to SEQ ID NO: 37980

SEQ ID NO: 37997 - protein, 394 aa, Burkholderia ubonensis; identical to SEQ ID NO: 37702

SEQ ID NO: 37998 - protein, 486 aa, Burkholderia ubonensis; identical to SEQ ID NO: 37699

SEQ ID NO: 37999 - protein, 216 aa, Burkholderia ubonensis; identical to SEQ ID NO: 37744

SEQ ID NO: 38000 - protein, 1123 aa, Burkholderia ubonensis; identical to SEQ ID NO: 37745

SEQ ID NO: 38001 - protein, 394 aa, Burkholderia ubonensis; identical to SEQ ID NO: 37702

SEQ ID NO: 38002 - protein, 486 aa, Burkholderia ubonensis
MFLDYPTLDALRTRHPAWRLLRSDHAPLAVSFLHRAFGAPNVREVAAPFLAEALEDELYALREQFGDGAFPKPALDYLNDWASPEKGWLRKFYRQGSDEPHFDLTPAAGKAIAWLGTLMERSFVGTESRLLTLFELLRQMAEGSETDPERRLAELHARRSQIDEEIARVEAGDVRLLDDAAIKDRFQQFMQMARDLLTDFREVEQNFRLLDRHVRERIALWEGSKGALIEEIMGERDAIADSDQGSSFRAFWDFLMSSRRQEELSERLEHVLALPAITEMKPDARTRRVHYDWLEAGEHTQRTVAQLSQQLRRFLDDQAWLENRRIMDILRGIETKALVLREAPPPGSVMEIETASADIELPIERPLYAPALRPLIANVAIETGDADLDASALYTQIVVDRARLASHIRRCLQDRRQVTLAELAASQPLLHGLAELVAYLQLSAEAGTFRATVDETVSDTIEWQANDANGAAIVKRATMPRVIFTR

SEQ ID NO: 38003 - protein, 216 aa, Burkholderia ubonensis
MEEQQTPSLDRGDLSTVAIALLKGVVYRDGNERLWAALLELQTHVRDYVAVLGLELVVDEAEGYAFVKSRTEPDAEVDGHQAKLPRLVARRPLSFPVSLLLALLRKKLAEWDAGGGDTRLVLSREDIVELVRVFLPASTNEARLVDQIDTHVNKIVDLGFLRRMKTASGPPTFEVRRILKAFVDAQWLLDFDARLASYQAHLRDSTNSDQTESRDE

SEQ ID NO: 38004 - protein, 1123 aa, Burkholderia ubonensis
MNEPRTLGLDFAADDTLTGFRLERLEVFNWGTFDERVWVLRVDGRNGLLTGDIGSGKSTLVDAITTLLVPAQRIAYNKAAGADSKERTLRSYVLGYYKSERNEVTGAAKPVSLRDHNSYSVILGVFRNAGYDATVTLAQVFWMKDAQAQPARFFVSAERDLSIATDFSRFGTDIAQLRKKLRGLGAEIEDTFPKYSAWFRRRFGIENEQALELFHQTVSMKSVGNLTDFVRSHMLEPFDVAPRVDALIAHFDDLNRAHEAVLKTKRQVELLTPLVDDCDRHSEQGHVLEGWRACREALRPYFAGLKLGLVERRLQLLEEDHARATSRKARHEEARDQARQRVDDLRRAVAEQGGDHIAQLDVEIREHERESVRRRERAQRYAAIVTLFGETEAADEAAFASQRQRLAEQRSSLVDDEAQQQNAITEWSVAFREGKARRDLLEDEIASLKARRNNIPKEQVAMRASLCSALGLEEDALPFAGELIQVREDARDWEGAAERVLRNFGLSLLVPDEHYANVAAWVDRTHLRGRLVYFRVRSERTARAAEAIELHRHSLAHKLAIKPDSQFYGWLEREIGRRFDYACCDTQEQFRRETRAITRAGQAKAPGERHEKDDRHALDDRSRYVLGWSNTAKISALAAQRQALEARLGEIGQRLGEAQHEHTKVREQLEALARAGEFAEFREIDWSSCAAAIARLADEKARLESASDALAELTAQLDSAQASLKESEAAMSETDSELGGILAKREAAQALREETHALVAEVDAELAERIEALRAEILGEHQLSVESCDNRERDVREALTTRIDNETKSLGRLAERIVKAMAAFKEAYKLETADFDASLAANSEYRDMLARLQADDLPRFETRFKELLNVNTINEIANFHAQLARERATIKERIERINESLRQIDYNAGRYIVLESQPSPDAEIREFQSDLRACTEGELTGSDDSQYSEAKFLQVKRIIDRFRGREGLTEQDRRWRAKVTDVRNWFLFAASERWREDDSEYEHYSDSGGKSGGQKEKLAYTILAASLAYQFGLEWGAVRSRSFRFVVIDEAFGRGSDESAQYGLTLFQKLNLQLLIVTPLQKIHIIEPFVSSVGFVQNDGGRASKLRTLSIEEYRAHKAEFEQ

SEQ ID NO: 38005 - protein, 394 aa, Burkholderia ubonensis; identical to SEQ ID NO: 37702

SEQ ID NO: 38006 - protein, 486 aa, Burkholderia ubonensis; identical to SEQ ID NO: 37679

SEQ ID NO: 38007 - protein, 216 aa, Burkholderia ubonensis; identical to SEQ ID NO: 37680

SEQ ID NO: 38008 - protein, 1123 aa, Burkholderia ubonensis
MNEPRTLGLDFAADDTRTGFRLERLEVFNWGTFDERVWVLRVDGRNGLLTGDIGSGKSTLVDAITTLLVPAQRIAYNKAAGADSKERTLRSYVLGYYKSERNEVTGTAKPVSLRDHNSYSVILGVFRNAGYDATVTLAQVFWMKDAQAQPARFFVSAERDLSIATDFSRFGTDIAQLRKKLRGLGAEIEDAFPKYSAWFRRRFGIENEQALELFHQTVSMKSVGNLTDFVRSHMLEPFDVAPRVDALIAHFDDLNRAHEAVLKTKRQVELLTPLVDDCDRHSEQGHVLEGWRACREALRPYFAGLKLGLVERRLQLLEEDHARATSRKARHEEARDQARQRVDDLRRAVAEQGGDRIAQLDVEIREHERESVRRRERAQRYAAIVTLFGETEAADEAAFASQRQRLAEQRSSLVDDEAQQQNAITEWSVAFREGKARRDVLEDEIASLKARRNNIPKEQVAMRASLCSALGLEEDALPFAGELIQVREDARDWEGAAERVLRNFGLSLLVPDEHYANVAAWVDRTHLRGRLVYFRVRSERTARAAEAIELHRHSLAHKLAIKPDSQFYGWLEREIGRRFDYACCDTQEQFRRETRAITRAGQAKAPGERHEKDDRHALDDRSRYVLGWSNTAKISALAAQRQALEARLGEIGQRLGEAQHEHTKVREQLEALARAGEFAEFREIDWSSCAAAIARLADEKARLESASDALAELTAQLDSAQASLKESEAAMSETDSELGGILAKREAAQALREETHALVAEVDAELAERIEALRAEILGEHQLSVESCDNRERDVREALTTRIDNETKSLGRLAERIVKAMAAFKEAYKLETADFDASLDANPEYRDMLARLQADDLPRFETRFKELLNVNTINEIANFHAQLARERATIKERIERINESLRQIDYNAGRYIILESQPSPDAEIREFQSDLRACTEGELTGSDDSQYSEVKFLQVKRIIDRFRGREGLTEQDRRWRAKVTDVRNWFLFAASERWREDDGEYEHYSDSGGKSGGQKEKLAYTILAASLAYQFGLEWGAVRSRSFRFVVIDEAFGRGSDESAQYGLTLFQKLNLQLLIVTPLQKIHIIEPFVSSVGFVQNDGGRASKLRTLSIDEYRAHKAEFEQ

SEQ ID NO: 38009 - protein, 394 aa, Burkholderia ubonensis
MSWTTAVELRARLQHLWARGEWLRSLVDGTEGLFPLRLALKGPSSSELAERFDTVRAWITEIAATPRIRIEWREINHRILGVQRLPRAAWVDSLDDALTVAGKHRDAARFARLLEITRARQPKLAAWLAQRPLQALEFAGDWERLLAVVDWLQAHPQPGIYLRQAEIAGVDTKFIEARRGVLSQWLDLVLPSEAIDSSRTGVAQFAARYGFREKQPRIRFRVLDERLAVLPGMGRPDIALDADSFARLALPCRHVFVTENETNFLAFPDVPQAIVLFGAGYGWEALEPARWLADCALHYWGDIDTHGFAILDQLRCRFPHVNSFLMDRATLMAHEAFWGDEGDQVMRDLPRLTAQERELFDDLRDNRIRRGLRLEQERVGFGWVRAALEERSFV

SEQ ID NO: 38010 - protein, 486 aa, Burkholderia ubonensis; identical to SEQ ID NO: 37699

SEQ ID NO: 38011 - protein, 216 aa, Burkholderia ubonensis
MEEQQTPSLDRGDLSTVAVALLKGVVYRDGNERLWAALLELQTHVRDYVAVLGLELVVDEAEGYAFVKSRTEPDAEVDGDQAKLPRLVARRPLSFPVSLLLALLRKKLAEWDAGGGDTRLVLSREDIVELVRLFLPASTNEARLVDQIDTHVNKIVDLGFLRRMKTASGPPTFEVRRILKAFVDAQWLLDFDARLASYQAHLRDSTNSDQTESRDE

SEQ ID NO: 38012 - protein, 1123 aa, Burkholderia ubonensis
MNEPRTLGLDFAADDTLTGFRLERLEVFNWGTFDDRAWVLRVDGRNGLLTGDIGSGKSTLVDAITTLLVPAQRIAYNKAAGADSKERTLRSYVLGYYKSERNEVTGAAKPVSLRDHNSYSVILGVFRNAGYDATVTLAQVFWMKDAQAQPARFFVSAERDLSIATDFSRFGTDIAQLRKKLRGLGAEIEDTFPKYSAWFRRRFGIENEQALELFHQTVSMKSVGNLTDFVRSHMLEPFDVAPRVDALIAHFDDLNRAHEAVLKTKRQVELLTPLVDDCDRHSEQAHVLEGWRACREALRPYFAGLKLGLVERRLQLLEEDHARATSRRARHEEARDQARQRVDDLRRAVAEQGGDRIAQLDVEIREHERESVRRRERAQRYAAIVTLFGETEAADEAAFASQRQRLAEQRSSLVDDEAQQQNAITEWSVAFRDGKARRDLLEDEIASLKARRNNIPKEQVAMRASLCSALGLEEDALPFAGELIQVREDARDWEGAAERVLRNFGLSLLVPDEHYASVAAWVDRTHLRGRLVYFRVRSERSARAAEAIELHRHSLAHKLAIKPDSLFYGWLEREIGRRFDYACCDTQEQFRRETRAITRAGQAKAPGERHEKDDRHALDDRSRYVLGWSNTAKISALAAQRQALEARLGEIGQRLGEVQHEHTKVREQLEALARAGEFAEFREIDWSSCAAAIARLADEKARLESASDALAELTAQLDSAQASLKESEAAMSETDSELGGILAKREAAQALREETHALVAEVDAELAERIEALRAEILGEHQLSVESCDNRERDVREALTTRIDNETKSLGRLAERIVKAMAAFKEAYKLETADFDASLAANSEYRDMLARLQADDLPRFETRFKELLNVNTINEIANFHAQLARERATIKERIERINESLRQIDYNAGRYIVLESQPSPDAEIREFQSDLRACTEGELTGSDDSQYSEAKFLQVKRIIDRFRGREGLTEQDRRWRAKVTDVRNWFLFAASERWREDDSEYEHYSDSGGKSGGQKEKLAYTILAASLAYQFGLEWGAVRSRSFRFVVIDEAFGRGSDESAQYGLTLFQKLNLQLLIVTPLQKIHIIEPFVSSVGFVQNDGGRASKLRTLSIEEYRAHKAEFEQ

SEQ ID NO: 38013 - protein, 394 aa, Burkholderia ubonensis
MSWTTAVELRIRLQRLWERGEWLRSLVDGAEGLFPLRLAIKGPSSSELAERFDTVRAWITEIAATPHIRIEWREINHRILGVQRLPRAAWVDSLDDALTVAGKQRDAARFERLLEITRSRQPKLIAWLAQRPMQALELAGDWERLLAVVDWLQAHPQPGIYLRQAEIAGVDTKFIEARRGVLSQWLDLVLPSEAIDSSRTGAAQFAARYGFRDKPPRIRFRVLDERLAVLPGMGRPDITLDADSFARLALPCRHVFVTENETNFLAFPDVPQAIVLFGAGYGWEALEPAQWLTDCALHYWGDIDTHGFAILDQLRCRFPHAGSFLMDRATLIAHEAFWGDEGDQVMRDLPRLTAQERELFDDLRDNRIRRGLRLEQERVGFGWVRAALEERSFV

SEQ ID NO: 38014 - protein, 491 aa, Burkholderia ubonensis
MSSHGRHGTIPRGNHSMSQPAFFEAERKRFFRPLNSSRREFVVACLRALYERLHGPAADYAHTMTRDSLRELLMAVARDNPDRLITEAEADEFSIADDEPLQLTNLVMRTLLTDGWLEQFADREGLVTAFRFSRPGKLFAEALWTLDRPSRSRQRNMRGCRNALEAALQPRGDAHDLVDAYEYAEKVIEDLTEGIDYFQELVRHLMQAASAQRQWGEFVEFLDRFQREYSKQLTADNAMLNRQAIRQNLDRLRQVNDAKFSRMDEQLHDIAHWAVKEHTGASVYEWLLGRIEAIVDAACETKQPGFLKAMETYLKRINGLAMQSLMLRAGQTRHAYLQGIQRVAQAEDREEQDRLLRHYGAYLTDAEVRLLDPASFRLRTATQRRKAVTVTIRPRATREERLAAVLARAEAEAFSLPNELVAEGLRADLRIFRHPVRLSALPAESAEDVLKAMQAVEAARASGDDFLVRRLPTRLDNPAYSGSDYEIELKK

SEQ ID NO: 38015 - protein, 223 aa, Burkholderia ubonensis
MNLSSVIRDQLALINMKQERFRELLIRLFSYGVIVRDEDRTEQALYDDARRIQQLLEDYFDLAGFLLHHDTTNQFYRLYAPGAVVDGLPEDTLEPVPSLRARVSTDFVAAALALRFLYQNKLNSGDIQPQGEVLISFEDLAVALQAQLKRSLPNGVTEKMQLLAELRKHRLLSYSTTFSIADEDALLAIRPTILGIVSNDAMTAALDTDGIVEQETIVGEEAE

SEQ ID NO: 38016 - protein, 234 aa, Burkholderia ubonensis
MSEVVARLNELQVLKHEPLFLREVSSRLFWGMSKVLDKRQALVAALLELDDCPFPESPVQLQVFLPPEGFRGVLFIENLTTYDRAMRSGSAAFEGLALAFASGFKGSAQRLRTPEGCSLFFSDQGGNTRDLRDGFKSWLFGKETRPAYFWGDLDWAGMRILAAMRASFSGLTAWQTGYAPMLQVLREGNGHSPEAAEKQGQKILAETGCAYADGQLVPALSETRRFVDQELFMP

SEQ ID NO: 38017 - protein, 486 aa, Burkholderia ubonensis; identical to SEQ ID NO: 37679

SEQ ID NO: 38018 - protein, 216 aa, Burkholderia ubonensis; identical to SEQ ID NO: 37680

SEQ ID NO: 38019 - protein, 1123 aa, Burkholderia ubonensis; identical to SEQ ID NO: 38008

SEQ ID NO: 38020 - protein, 394 aa, Burkholderia ubonensis; identical to SEQ ID NO: 38009

SEQ ID NO: 38021 - protein, 488 aa, Burkholderia stagnalis; identical to SEQ ID NO: 37795

SEQ ID NO: 38022 - protein, 217 aa, Burkholderia stagnalis; identical to SEQ ID NO: 37796

SEQ ID NO: 38023 - protein, 1123 aa, Burkholderia stagnalis; identical to SEQ ID NO: 37797

SEQ ID NO: 38024 - protein, 394 aa, Burkholderia stagnalis; identical to SEQ ID NO: 37798

SEQ ID NO: 38025 - protein, 488 aa, Burkholderia stagnalis; identical to SEQ ID NO: 37795

SEQ ID NO: 38026 - protein, 217 aa, Burkholderia stagnalis; identical to SEQ ID NO: 37796

SEQ ID NO: 38027 - protein, 1123 aa, Burkholderia stagnalis; identical to SEQ ID NO: 37797

SEQ ID NO: 38028 - protein, 394 aa, Burkholderia stagnalis; identical to SEQ ID NO: 37798

SEQ ID NO: 38029 - protein, 486 aa, Burkholderia ubonensis
MFLDYPTLDALRTRHPAWRLLRSDHAPLAVSFLHRAFVAPNVREVAAPFLAEALEDELYALREQLGDGAFPKPALDYLNDWASPEKGWLRKFYRQGSDEPHFDLTPAAGKAIAWLGTLMERSFVGTESRLLTLFELLRQMAEGSETDPERRLAELHARRSQIDEEIARVEAGDVRLLDDAAIKDRFQQFMQMARDLLTDFREVEQNFRLLDRHVRERIALWEGSKGALIEEIMGERDAIADSDQGSSFRAFWDFLMSSRRQEELSERLEHVLALPAITEMKPDARTRRVHYDWLEAGEHTQRTVAQLSQQLRRFLDDQAWLENRRIMDILRGIETKALVLREAPPPGSVMEIETASADIELPIERPLYAPALRPLIANVAIETGDADLDASALYTQIVVDRARLASHIRRCLQDRLQVTLAELAASQPLLHGLAELVAYLQLSAEAGTFRATVDETVSDTIEWQANDANGAAIVKRATMPRVIFTR

SEQ ID NO: 38030 - protein, 216 aa, Burkholderia ubonensis; identical to SEQ ID NO: 37812

SEQ ID NO: 38031 - protein, 1123 aa, Burkholderia ubonensis
MNEPRTLGLDFAADDTLTGFRLERLEVFNWGTFDERVWVLRVDGRNGLLTGDIGSGKSTLVDAITTLLVPAQRIAYNKAAGADSKERTLRSYVLGYYKSERNEVTGAAKPVSLRDHNSYSVILGVFRNAGYDATITLAQVFWMKDAQAQPARFFVSAERDLSIATDFSRFGTDIAQLRKKLRGLGAEIEDTFPKYSAWFRRRFGIENEQALELFHQTVSMKSVGNLTDFVRSHMLEPFDVAPRVDALIAHFDDLNRAHEAVLKTKRQVELLTPLVDDCDRHSEQAHVLEGWRACREALRPYFAGLKLGLVERRLQLLEEDHARATSRRARHEEARDQARQRVDDLRRAVAEQGGDRIAQLDVEIREHERESVRRRERAQRYAAIVTLFGETEAADEAAFASQRQRLAEQRSSLVDDEAQQQNAITEWSVAFREGKARRDLLEDEIASLKARRNNIPKEQVAMRASLCSALGLEEDALPFAGELIQVREDARDWEGAAERVLRNFGLSLLVPDEHYANVAAWVDRTHLRGRLVYFRVRSERTARAAEAIELHRHSLAHKLAIKPDSQFYGWLEREIGRRFDYACCDTQEQFRRETRAITRAGQAKAPGERHEKDDRHALDDRSRYVLGWSNTAKISALAAQRQALEARLGEIGQRLGEAQHEHTKVREQLEALARAGEFAEFREIDWSSCAAAIARLADEKARLESASDALAELTAQLDSAQASLKESEAAMSETDSELGGILAKREAAQALREETHALVAEVDAELAERIEALRAEILGEHQLSVESCDNRERDVREALTTRIDNETKSLGRLAERIVKAMAAFKEAYKLETADFDASLAANSEYRDMLARLQADDLPRFETRFKELLNVNTINEIANFHAQLARERATIKERIERINESLRQIDYNAGRYIVLESQPSPDAEIREFQSDLRACTEGELTGSDDSQYSEAKFLQVKRIIDRFRGREGLTEQDRRWRAKVTDVRNWFLFAASERWREDDSEYEHYSDSGGKSGGQKEKLAYTILAASLAYQFGLEWGAVRSRSFRFVVIDEAFGRGSDESAQYGLTLFQKLNLQLLIVTPLQKIHIIEPFVSSVGFVQNDGGRASKLRTLSIEEYRAHKAEFEQ

SEQ ID NO: 38032 - protein, 394 aa, Burkholderia ubonensis
MSWTTAVELRIRLQRLWERGEWLRSLVDGAEGLFPLRLAIKGPSSSELAERFDTVRAWITEIAATPRIRIEWREINHRILGQQRLPRAAWVDSLDDALTVAGKQRDAARFERLLEITRSRQPKLIAWLAQRPMQALELAGDWERLLAVVDWLQAHPQPGIYLRQAEIAGVDTKFIEARRGVLSQWLDLVLPSEAIDSSRTGAAQFAARYGFRDKPPRIRFRVLDERLAVLPGMGRPDITLDADSFARLALPCRHVFVTENETNFLAFPDVPQAIVLFGAGYGWEALEPAQWLADCALHYWGDIDTHGFAILDQLRCRFPHAGSFLMDRATLMAHEAFWGDEGDQVMRDLPRLTAQERELFDDLRDNRIRRGLRLEQERVGFGWVRAALEERALV

SEQ ID NO: 38033 - protein, 486 aa, Burkholderia ubonensis; identical to SEQ ID NO: 38029

SEQ ID NO: 38034 - protein, 216 aa, Burkholderia ubonensis; identical to SEQ ID NO: 37812

SEQ ID NO: 38035 - protein, 1123 aa, Burkholderia ubonensis; identical to SEQ ID NO: 38031

SEQ ID NO: 38036 - protein, 394 aa, Burkholderia ubonensis; identical to SEQ ID NO: 38032

SEQ ID NO: 38037 - protein, 486 aa, Burkholderia ubonensis; identical to SEQ ID NO: 37699

SEQ ID NO: 38038 - protein, 216 aa, Burkholderia ubonensis; identical to SEQ ID NO: 37700

SEQ ID NO: 38039 - protein, 1123 aa, Burkholderia ubonensis; identical to SEQ ID NO: 37737

SEQ ID NO: 38040 - protein, 399 aa, Burkholderia ubonensis; identical to SEQ ID NO: 37738

SEQ ID NO: 38041 - protein, 486 aa, Burkholderia ubonensis; identical to SEQ ID NO: 37699

SEQ ID NO: 38042 - protein, 216 aa, Burkholderia ubonensis; identical to SEQ ID NO: 37700

SEQ ID NO: 38043 - protein, 1123 aa, Burkholderia ubonensis; identical to SEQ ID NO: 37737

SEQ ID NO: 38044 - protein, 399 aa, Burkholderia ubonensis; identical to SEQ ID NO: 37738

SEQ ID NO: 38045 - protein, 486 aa, Burkholderia ubonensis; identical to SEQ ID NO: 37699

SEQ ID NO: 38046 - protein, 216 aa, Burkholderia ubonensis; identical to SEQ ID NO: 37700

SEQ ID NO: 38047 - protein, 1123 aa, Burkholderia ubonensis; identical to SEQ ID NO: 37924

SEQ ID NO: 38048 - protein, 394 aa, Burkholderia ubonensis; identical to SEQ ID NO: 37925

SEQ ID NO: 38049 - protein, 486 aa, Burkholderia ubonensis; identical to SEQ ID NO: 37827

SEQ ID NO: 38050 - protein, 216 aa, Burkholderia ubonensis; identical to SEQ ID NO: 37828

SEQ ID NO: 38051 - protein, 1123 aa, Burkholderia ubonensis; identical to SEQ ID NO: 37829

SEQ ID NO: 38052 - protein, 394 aa, Burkholderia ubonensis; identical to SEQ ID NO: 37961

SEQ ID NO: 38053 - protein, 472 aa, Burkholderia cepacia
MFFEAERQRFFRPLNSSRRELVAACLRALYDRLHGPMADYAHNLTRDALRELLLPVVRQYQSVKAQEGGDDELSGAEADDPQALVGMVIRALLTDAWLEQFADRTGLVTAFRFSRPGKLFAEALWSLDRPSRSRQRNMRGCRNALQAALSDRGDAHDLVDAYEYAEKVIEDLTDGIDYFQELVRHLMQTASVQTQWSEFVEFLDRFQRDYSKQLTADNATLNRQAIVQKLERLRLVPEAKFKRMDEQLREVAHWAVKEHVGTSVYDWLLTRIEDIVDAACQSKQPGFLKAMETYLKRVNGLALQSMMLRAGQTRHAYLAAIQQVAEAPKEQQDLLLAHIGQFLAPAEVRLLDPASFRLRTAAQRRKAVTISVRPRPSREERLAAAMARAEAEAFSIPNEEVAELLRRDLRIFQHPIRVSALPTATARDTLRAMQAVEAVRSEVGADLSIKKLPTRLENELYSGNDYEIDLKK

SEQ ID NO: 38054 - protein, 223 aa, Burkholderia cepacia
MSLLSHINEQLALANIKPDRFREIINRLMAHGAIVREEDRVEQLLYDDARRVEGLLEGYFDIAGFRLHHDSNNQFYRLYVAGAVVDGLREDTLEPTPSLRARVSPDFVAMALALRFLYQNKLNTGDIQPQGEALVSFEEIAATMQTQLKRPLPNSMGDKIALLAELKRHRLLSYTAEFSISDEDALLAIRPTILGIVSNDALSAALEAEGVVDQETSAEETDQ

SEQ ID NO: 38055 - protein, 1210 aa, Burkholderia cepacia
MKLDRLVLVNWGQMQPGNYELGNMTLLTGPTGAGKSTMLDGLQTIMTAAYQGIVAYNPGQEEVQQNQRRGKSRRTLESFVVGAEYSRFSRPAGAQGYLAAVFRPGPEDGSAKMFTALVAASARVDGSGERRDAKLERLVLVIVEDAALSVEQFFENIDQGICVPVEDIVKRLKAKYPKVIVYDDHKRDYLSGLYGRFRGRVSIPWDEAQNAARAWSQSIAYKPIGSVHDLVRDDILEFDGKLLQESITRISDLMRQVTTLKVEGKRIEATVIRLRELKEAIGKTTATFEEQVQHDLLLAKMQLSVDEERIASERKKIKDDSALVDQHELKAKTEAQLKRNVDSSRINIAAKLSGIPAHTEKKTLDERLERATSAARGKLAELHAGLLAAAHIKNTGDAIVKRPVPEQFPKLRASVDGVSKALVSTNVDRLAGLLNSVGNANSDDVLSIEKLLQLAPAFDGIDAGLSQLHNSLVGTEGSVLMAVAAESESLGQRVEAAKKERGELADRKQRLAAGAGNYNRDTVLALERIRERLPDAGVQVLCDLVEPASEEWQGAIEGYMDGARFNLIVKPDWEARTIDFLQSWGSRSKVVQGKRCLERADQSRVPGTSIIHELRTDHPIARAYLIEQFGSVVKVADSEELRRTPRGLTKDGKGSGAMTMFICERRDFVLGRKARERALQRTTEMLEAADKDISELKSSQGALDGFRTLLTTLKEPTFDAQPLAQHAGDIDATRRTLSQLDLTEVEQLRAELARLEELIRAHDLAIESAKRVVTLAEQRIKTAEDVIERIDGGRDARLQERENQIRRLKHLCEANSEKTYTVMAQEVDDLIASQTYEVPAVQTRLSHLRAQPEKLLGDVREMLAEYNAAVRTDERFQSALPHLTDAPSFDPYYSPLVLLGRSVSMLHNELESIGLYNNRAKVEEAERSFHDVFTKQFCVEIKSKVDEGVRMLRQLNIELEKLKFGTDRFNIDWSKWEPEFQEYYGFFSAVAELADSPDAVDLFGETELSPKHIEVRDRLVKLLLDQDQGRAGRELLRIADYRNYRRYEIWNDSDSGGRIALSTWGTGSGGQLETPAYIVRAAVVTNRLRLFEKGASLKLLVSDESFSRMDEPRARAVLRYLRDSMGLQLVSAMPTKHAGALRPEFDREFSFSRMNVPDNGEIDFVSECDERIFKKDRMREVWEAQRQEVREQAELLFNAAEPEEVTGAAK

SEQ ID NO: 38056 - protein, 234 aa, Burkholderia cepacia
MAEVVERLNELPALAGKPMLLREISSQLFWGMSKVLDKRQGLVAAVLGVDECPFPESPIQLQVFLPPAGCRGVLFIENLMSFERAIRSTSSAFDGLALVYASGFKGSAQRLRTPDGCSLFYAARGGISENLRDGFEAWLFGKEVIPVFFWGDLDWSGMRILSAMRTSFLGLTAWEPGYCQMLAVLIEGNGHSPEAADKQGQKALDTSGCAYADAHLIPALQSYGRFVDQEQINP

SEQ ID NO: 38057 - protein, 486 aa, Burkholderia ubonensis
MFLDYPTLDALRTRHPAWRLLRSDHAPLAVSFLHRAFVAPNVREVAAPFLAEALEDELYALREQLGDGAFPKPALEYLNDWASPEKGWLRKFYRQGSDEPHFDLTPAAGKAIAWLGTLMERSFVGTESRLLTLFELLRQMAEGSETDPERRLADLHARRSQIDEEIARVEAGDVRLLDDAAIKDRFQQFMQMARDLLTDFREVEQNFRLLDRHVRERIALWEGSKGALIEEIMGERDAIADSDQGSTFRAFWDFLMSSRRQEELSERLEHVLALPAITEMKPDARTRRVHYDWLEAGEHTQRTVAQLSQQLRRFLDDQAWLENRRIMDILRGIESKALALREAPPPGSVMEIETASADIELPIERPLYAPALRPLIANVAIETGDADLDASALYTQIVVDRARLASHIRRCLQDRPQVTLAELAASQPLVHGLAELVAYLQLSTEAGSFRATVDETVSDTIEWQANDANGTTIVKRATMPRVIFTR

SEQ ID NO: 38058 - protein, 216 aa, Burkholderia ubonensis
MEEQQTWSLGRDDLSAVAIALFKGVVYRDGNERLWAALLELQTHVRDYVAVLGLELVADEAEGYAFVKSRTEPDAEVNADQAKLPRLVARRPLSFPVSLLLALLRKKLAEWDAGGGDTRLVLSREDIVELVRVFLPSSTNEARLVDQIDTHVNKIVDLGFLRRMKTASGPPTFEVRRILKAFVDAQWLLDFDARLASYQAHLRDSTNSDQTESRDE

SEQ ID NO: 38059 - protein, 1123 aa, Burkholderia ubonensis
MNEPRTLGLDFAADDTRTGFRLERLEVFNWGTFDERVWVLRVDGRNGLLTGDIGSGKSTLVDAITTLLVPAQRIAYNKAAGADSKERTLRSYVLGYYKSERNEVTGAAKPVSLRDHNHYSVILGVFRNAGYDATVTLAQVFWMKDAQAQPARFFVSAERDLSIATDFSRFGTDIAQLRKKLRGLGAEIEDTFPKYSAWFRRRFGIENEQALELFHQTVSMKSVGNLTDFVRSHMLEPFDVAPRVDALIAHFDDLNRAHEAVLKTKRQVELLTPLVDDCDRHSEQGHVLEGWRTCREALRPYFAGLKLGLVERRLQLLDEDRARATSRKARHEEARDQARQRVDDLRRAVAEQGGDRIAQLEVEIREHEREGTRRRDRAQRYAAIVTLFGETEATDEAAFASQRQRLAEQRSSLVDDEAQQQNAITEWSVAFREGKARRDLLEDEIASLKARRNNIPKEQVAMRASLCSALGLEEDALPFAGELIQVREDARDWEGAAERVLRNFGLSLLVPDEHYASVATWVDRTHLRGRLVYFRVRSERAARVAESIELHRHSLAHKLAIKPDSLFYGWLEREIGRRFDYACCDTQEQFRRETRAITCAGQTKAPGERHEKDDRHALDDRSRYVLGWSNTAKISVLEAQRRALEARLGEIGQRLGEAQHEHARTREQLEALARAGEFAEFREIDWSSCAAAIARLTDEKVRLESASDALAELTAQLDSAQARLKENEAAISETDSELGGILAKQEAAQALRNETHALIAEVDAELAERIEALRADILGEHQLSVESCDNRERDVREALTTRIDNETKSLGRLAERIVKAMTAFKEAYKLETADFDASLDANSEYRDMLARLQADDLPRFETRFKELLNVNTINEIANFHAQLARERATIKERIERINESLRQIDYNAGRYIVLESQPSPDAEIREFQSDLRACTEGELTGSDDSQYSEAKFLQVKRIIDRFRGREGLTEQDRRWRAKVTDVRNWFLFAASERWREDDSEYEHYSDSGGKSGGQKEKLAYTILAASLAYQFGLEWGAVRSRSFRFVVIDEAFGRGSDESAQYGLTLFQKLNLQLLIVTPLQKIHIIEPFVSSVGFVQNDGGRASKLRTLSIEEYRAHKAEFEQ

SEQ ID NO: 38060 - protein, 394 aa, Burkholderia ubonensis
MSWTTAVELRDRLLHLWKRGEWLRSLVDGTEGLFPLRLAIKGPSSSELAERFDTVRAWIVEIAAMPRMRIEWREINHRILGQQRLPRAAWVDSLDDALTVTGKQRDAAQFERLLAITRARQPKLTTWLAQCPLQALEFAGDWDRLLAVVDWLQAHPRPGVYLRQAEIADVDTKFIEARRGVLAQWLDLVLPSEAIDSSRTGVAQFAARYGFREKPPRIRFRVLDERLAVLPGMGRPDIALDADSFARLALPCRHVFVTENETNFLAFPDVPQSIALFGAGYGWDALEPARWLADCALHYWGDIDTHGFAILDQLRCRFPHVDSFLMDRATLMAHEAFWGDEGDQVMRDLPRLTVQERELFDDLRDNRIRRGLRLEQERVGFGWVRAALEERSFV

SEQ ID NO: 38061 - protein, 486 aa, Burkholderia ubonensis; identical to SEQ ID NO: 38057

SEQ ID NO: 38062 - protein, 216 aa, Burkholderia ubonensis; identical to SEQ ID NO: 38058

SEQ ID NO: 38063 - protein, 1123 aa, Burkholderia ubonensis; identical to SEQ ID NO: 38059

SEQ ID NO: 38064 - protein, 394 aa, Burkholderia ubonensis; identical to SEQ ID NO: 38060

SEQ ID NO: 38065 - protein, 488 aa, Burkholderia stagnalis; identical to SEQ ID NO: 37795

SEQ ID NO: 38066 - protein, 217 aa, Burkholderia stagnalis; identical to SEQ ID NO: 37796

SEQ ID NO: 38067 - protein, 1123 aa, Burkholderia stagnalis; identical to SEQ ID NO: 37797

SEQ ID NO: 38068 - protein, 394 aa, Burkholderia stagnalis; identical to SEQ ID NO: 37798

SEQ ID NO: 38069 - protein, 499 aa, Burkholderia anthina
MDLDWKQRTHQYVQSRRQHPAWQLLAARSAPLVLSCLQTLFEKSHDGIEVDVAEQMLAAVLEQHANSDEFGVDPEGDCAALARKELRGWIRRSLLIERAGRLYATDALEEALRFVAALDGRLMTSTASRLSIVQREIENLESNLNPDRRSRSRYLQRKIQELERELEDVKTGNMRAMTESEAIEGIREIYNLATSLRADFRRVEDSYREADQALRQSIISERGHRGAVVDKLLNSHDELLETAEGKVFRGFQQQLGRSAELDAMKHRLRQIIQHPATRSALNPSQQHELRWLIIRLIDESAAVIRARARSERDVKGFLRTGLAAEHHRVGELIHDVLQQALALDWTSASTRNMDGPLPPVAISVAGLPLVERIRFKAIQDDARLVLELQARSMDPRSIDDEFWEAFDGLDRQALCESTVALLEQHGTRMGIAELARHLPPTHDLETIALWLSMAREAGVSMDGERESVDVMGRDGMPLRFDVPVVALGFDDVRGLDMEL

SEQ ID NO: 38070 - protein, 253 aa, Burkholderia anthina; identical to SEQ ID NO: 37704

SEQ ID NO: 38071 - protein, 1109 aa, Burkholderia anthina
MISANSDHRAIDALLSTPAFILTRLDLFNWGPFGGRHQAAIDIEGTAIIGQTGSGKTTLIDALMTLIAAQPRYNLASTGGHESDRDLVSYVRGVSGAGREGDTDHISRPGKTVSAIAATFGNGSDTLTIAGIFSLEGSGSSATELDRIWMIERGAEFGLDELLELHNAGGKRALRQHERASSGSLKVYDSKKAYILELRRIFEVGENAFTLLNRAAGLKQLNSIDDLFRDLVLDDRSAFSRALEVASEFDNLAEIREELETARKQRDSLVPIEKGWAQRAERLEQRDLQVRLVSLLPIAVATREHQLWVDRERELGQEKAGCERRIEDHTRRTKELESAAQRLRDIYLRDGGSGIEELEGKLEAERKHLETVRRHANDYVLFAKKLQFSQALTLETFRQNEASAQALLASTAVAIEEAERLAYAKGAALAGTEQTLTEQQAALANAKSHPGSNIPSLYQQFRRDLAGQLNLHDEDLPFVAELVEVQKSQSAWRGAIERAMGGHRLRIMVPASHMKLALAWVNGRDNRLHVRLVDVMAPDRAVEFLIDGFTRKLNFKDHPYREAVRGLLAQIDRHCVASPEVLKHTPHGMTAQGLMSGKSGFFEKQDKTPLSQGWLTGFDNKDILAELERQCDETARELAELTAKFEAARAQVTEVQVRRTMLDRVLSIDFADIDVRQAERNVADSTRRLSALTDPSSDTARAKQAWEEVRAELEKIGQARDESLIQQTKLQEQYDTAVNGRERAFATIGEGLNAIEMALVEQHFDFVGVQTVDTLMRQQAQIDVRLRARLEELAARINDHERQLVRGMGAARAVDTGALAEVGTEVEDVPQYLERLRVLRDEALPEKLDRFLGYLNQSSDEGVTQLLRSIDNEVETIVERIEDLNATMRRVDFQPGRYLQLEPRRVVHESLRTLEQAQRTLRAATLQDDQGESQFNALAEVVRLMRDASERRTTVGAKALLDPRYRLQFAVSVIERSSGAVCETRKGSQGGSGGEKEIIASYILTASLSYALCPDGKDRPLFGTIVLDEAFSKSSQAVAGRIISALREFGLHPLFVTPNKEMRLLRAHTRSAILIHRKGLQATMTSLSWEELDSIARARQMIGRDEITE

SEQ ID NO: 38072 - protein, 381 aa, Burkholderia anthina
MKSPNDMAARLARSWQSADEREARLLYPDSWPLRLPIGRPSPKAFTEQTESVKRHCDAWRSVEIGIVHWETVAYRAGGSPVRLPHLWELRSPSDWVRATQDAAIAAEYERLGEVVRHMDAQFHALVVRQRRLMMERPVHEIIKAGEVALGLSPGCAQGRPLRALGVCNTDSKFFERHRALLCHMLNVRFGGQVSELGLEAFLGAPEDDERWLLVVPLAAGILPFRQQRIRAGELVQLPKCVGHIIIVENERSVHQLAELPDAVAILGAGLSLDWTHDPWLASKRVAYWGDMDTWGLKMLGKVRQAIPSLSALLMNRDCFERYAANLAVRELVPVDGRRPDGLTEDEGAFFEYLLTQERGRLEQEFLPKDIVRAAMHAWYEA

SEQ ID NO: 38073 - protein, 488 aa, Burkholderia stagnalis; identical to SEQ ID NO: 37795

SEQ ID NO: 38074 - protein, 217 aa, Burkholderia stagnalis; identical to SEQ ID NO: 37796

SEQ ID NO: 38075 - protein, 1123 aa, Burkholderia stagnalis; identical to SEQ ID NO: 37797

SEQ ID NO: 38076 - protein, 394 aa, Burkholderia stagnalis; identical to SEQ ID NO: 37798

SEQ ID NO: 38077 - protein, 486 aa, Burkholderia ubonensis
MFLDYPTLDALCTRHPAWRLLRSDHAPLAVSFLHRAFVAPNVREVAAPFLAEALEDELYALREQLGDGAFPKPALEYLNDWASPEKGWLRKFYRQGSDEPHFDLTPAAGKAIAWLGTLMERSFVGTESRLLTLFELLRQMAEGSETDPERRLAELHARRSQLDEEIARVEAGDVRLLDDAAIKDRFQQFMQMARDLLTDFREVEQNFRLLDRHVRERIALWEGSKGALIEEIMGERDAIADSDQGSSFRAFWDFLMSSRRQEELSERLEHVLALPAITEMKPDARTRRVHYDWLEAGEHTQRTVAQLSQQLRRFLDDQAWLENRRIMDILRGIETKALVLREAPPPGSVMEIETASADIELPIERPLYAPALRPLIANVAIETGDADLDASALYTQIVVDRARLASHIRRCLQDRRQVTLAELAASQPLLHGLAELVAYLQLSAEAGTFRATVDETVSDTIEWQANDANGAAIVKRATMPRVIFTR

SEQ ID NO: 38078 - protein, 216 aa, Burkholderia ubonensis
MEEQQTPSLGRGDLSTVAIALLKGVIYRDGNERLWAALLELQTHVRDYVAVLGLELVVDEAEGYAFVKSRTEPDAEVDGDQVKLPRLVARRPLSFPVSLLLALLRKKLAEWDAGGGDTRLVLSREDIVELVRVFLPASTNEARLVDQIDTHVNKIVDLGFLRRMKTASGPPTFEVRRILKAFVDAQWLLDFDARLASYQAHLRDSTNSDQTESRDE

SEQ ID NO: 38079 - protein, 1123 aa, Burkholderia ubonensis
MNEPRTLGLDFAADDTRTGFRLERLEVFNWGTFDDRAWVLRVDGRNGLLTGDIGSGKSTLVDAITTLLVPAQRIAYNKAAGADSKERTLRSYVLGYYKSERNEVTGTAKPVSLRDHNSYSVILGVFRNAGYDATVTLAQVFWMKDAQAQPARFFVSAERDLSIATDFSRFGTDIAQLRKKLRGLGAEIEDAFPKYSAWFRRRFGIENEQALELFHQTVSMKSVGNLTDFVRSHMLEPFDVAPRVDALIAHFDDLNRAHEAVLKTKRQVELLTPLVDDCDRHSEQGHVLEGWRACREALRPYFAGLKLGLVERRLQLLEEDHARATSRKARHEEARDQARQRVDDLRRAVAEQGGDRIAQLDVEIREHERESVRRRERAQRYAAIVTLFGETEAADEAAFASQRQRVAEQRSSLVDDEAQQQNAITEWSVAFREGKARRDVLEDEIASLKARRNNIPKEQVAMRASLCSALGLEEDALPFAGELIQVREDARDWEGAAERVLRNFGLSLLVPDEHYANVAAWVDRTHLRGRLVYFRVRSERTARAAEAIELHRHSLAHKLAIKPDSQFYGWLEREIGRRFDYACCDTQEQFRRETRAITRAGQAKAPGERHEKDDRHALDDRSRYVLGWSNTAKISALAAQRQALEARLGEIGQRLGEAQHEHTKVREQLEALARAGEFAEFREIDWSSCAAAIARLADEKARLESASDALAELTAQLDSAQASLKESEAAMSETDSELGGILAKREAAQALREETHALVAEVDAELAERIEALRAEILGEHQLSVESCDNRERDVREALTTRIDNETKSLGRLAERIVKAMAAFKEAYKLETADFDASLDANPEYRDMLARLQADDLPRFETRFKELLNVNTINEIANFHAQLARERATIKERIERINESLRQIDYNAGRYIILESQPSPDAEIRDFQSDLRACTEGELTGSDDSQYSEAKFLQVKRIIDRFRGREGLTEQDRRWRAKVTDVRNWFLFAASERWREDDSEYEHYSDSGGKSGGQKEKLAYTILAASLAYQFGLEWGAVRSRSFRFVVIDEAFGRGSDESAQYGLTLFQKLNLQLLIVTPLQKIHIIEPFVSSVGFVQNDGGRASKLRTLSIDEYRAHKAEFEQ

SEQ ID NO: 38080 - protein, 394 aa, Burkholderia ubonensis; identical to SEQ ID NO: 37838

SEQ ID NO: 38081 - protein, 486 aa, Burkholderia ubonensis; identical to SEQ ID NO: 37835

SEQ ID NO: 38082 - protein, 216 aa, Burkholderia ubonensis; identical to SEQ ID NO: 37836

SEQ ID NO: 38083 - protein, 1123 aa, Burkholderia ubonensis; identical to SEQ ID NO: 37837

SEQ ID NO: 38084 - protein, 394 aa, Burkholderia ubonensis; identical to SEQ ID NO: 37838

SEQ ID NO: 38085 - protein, 486 aa, Burkholderia ubonensis; identical to SEQ ID NO: 37699

SEQ ID NO: 38086 - protein, 216 aa, Burkholderia ubonensis; identical to SEQ ID NO: 37700

SEQ ID NO: 38087 - protein, 1123 aa, Burkholderia ubonensis; identical to SEQ ID NO: 37924

SEQ ID NO: 38088 - protein, 394 aa, Burkholderia ubonensis; identical to SEQ ID NO: 37925

SEQ ID NO: 38089 - protein, 488 aa, Burkholderia stagnalis; identical to SEQ ID NO: 37795

SEQ ID NO: 38090 - protein, 217 aa, Burkholderia stagnalis; identical to SEQ ID NO: 37796

SEQ ID NO: 38091 - protein, 1123 aa, Burkholderia stagnalis; identical to SEQ ID NO: 37797

SEQ ID NO: 38092 - protein, 394 aa, Burkholderia stagnalis; identical to SEQ ID NO: 37798

SEQ ID NO: 38093 - protein, 486 aa, Burkholderia ubonensis
MFLDYPTLDALRTRHPAWRLLRSDHAPLAVSFLHRAFVAPNVREVAAPFLAEALEDELYALREQLGDGAFPKPALEYLNDWASPEKGWLRKFYRQGSDEPHFDLTPAAGKAIAWLGTLMERSFVGTESRLLTLFELLRQMAEGSETDPERRLADLYARRSQIDEEIARVEAGDVRLLDDAAIKDRFQQFMQMARDLLTDFREVEQNFRLLDRHVRERIALWEGSKGALIEEIMGERDAIADSDQGSSFRAFWDFLMSSRRQEELSERLEHVLALPAITEMKPDARTRRVHYDWLEAGEHTQRTVAQLSQQLRRFLDDQAWLENRRIMDILRGIESKALALREAPPPGTVMEIETASADIELPIERPLYAPALRPLIANVAIETGDADLDASALYTQIVVDRARLASHIRRCLQDRPQVTLAELAASQPLVHGLAELVAYLQLSTEAGSFRATVDETVSDTIEWQANDANGTTIVKRATMPRVIFTR

SEQ ID NO: 38094 - protein, 215 aa, Burkholderia ubonensis
MEEQQTWSLGRDDLSAVAIALLKGVVYRDGNERLWAALLELQTHVRDYVAVLGLELVADEAEGYAFVKSRAEPDAEVNADQAKLPRLVARRPLSFPVSLLLALLRKKLAEWDAGGGDTRLVLSREDIVELVRVFLPSSTNEARLVDQIDTHVNKIVDLGFLRRMKTASGPPTFEVRRILKAFVDAQWLLDFDAQLASYRAHLRDSTNSDQNGESR

SEQ ID NO: 38095 - protein, 1123 aa, Burkholderia ubonensis
MNEPRTLGLDFAADDTRTGFRLERLEVFNWGTFDERVWVLRVDGRNGLLTGDIGSGKSTLVDAITTLLVPAQRIAYNKAAGADSKERTLRSYVLGYYKSERNEVTGAAKPVSLRDHNHYSVILGVFRNAGYDATVTLAQVFWMKDAQAQPARFFVSAERDLSIATDFSRFGTDIAQLRKKLRGLGAEIEDTFPKYSAWFRRRFGIENEQALELFHQTVSMKSVGNLTDFVRSHMLEPFDVAPRVDALIAHFDDLNRAHEAVLKTKRQVELLTPLVDDCDRHSEQGHVLEGWRTCREALRPYFAGLKLGLVERRLQLLDEDRARATSRKARHEEARDQARQRVDDLRRAVAEQGGDRIAQLEVEIREHEREGTRRRDRAQRYAAIVTLFGETEATDEAAFASQRQRLAERRSSLVDDEAQQQNAITEWSVAFREGKARRDLLEDEIASLKARRNNIPKEQVAMRASLCSALGLEEDALPFAGELIQVREDARDWEGAAERVLRNFGLSLLVPDEHYASVATWVDRTHLRGRLVYFRVRSERAARVAESIELHRHSLAHKLAIKPDSLFYGWLEREIGRRFDYACCDTQEQFRRETRAITCAGQTKAPGERHEKDDRHALDDRSRYVLGWSNTAKISVLEAQRRALEARLGEIGQRLGEAQHEHARTREQLEALARAGEFAEFREIDWSSCAAAIARLTDEKVRLESASDALAELTAQLDSAQARLKENEAAISETDSELGGILAKQEAAQALRNETHALIAEVDAELAERIEALRADILGEHQLSVESCDNRERDVREALTTRIDNETKSLGRLAERIVKAMTAFKEAYKLETADFDASLDANPEYRDMLARLQADDLPRFETRFKELLNVNTINEIANFHAQLARERATIKERIERINESLRQIDYNAGRYIVLESQPSPDAEIREFQSDLRACTEGELTGSDDSQYSEAKFLQVKRIIDRFRGREGLTEQDRRWRAKVTDVRNWFLFAASERWREDDSEYEHYSDSGGKSGGQKEKLAYTILAASLAYQFGLEWGAVRSRSFRFVVIDEAFGRGSDESAQYGLTLFQKLNLQLLIVTPLQKIHIIEPFVSSVGFVQNDGGRASKLRTLSIEEYRAHKAEFEQ

SEQ ID NO: 38096 - protein, 394 aa, Burkholderia ubonensis
MSWTTAVELRDRLLHLWKRGEWLRSLVDGTEGLFPLRLAIKGPSSSELAERFDTVRAWIVEIAAMPRMRIEWREINHRILGQQRLPRAAWVDSLDDALTVTGKQRDAAQFERLLAITRARQPKLTTWLAQCPLQALEFAGDWDRLLAVVDWLQAHPQPGIYLRQAEIAGVDTKFIEARRGVLAQWLDLVLPSEAIDSSRTGVAQFAARYGFREKPPRIRFRVLDERLAVLPGMGRPDIALDADSFARLALPCRHVFVTENETNFLAFPDVPQSIALFGAGYGWDALEPARWLTDCALHYWGDIDTHGFAILDQLRCRFPHVDSFLMDRATLMAHEAFWGDEGDQVMRDLPRLTVQERELFDDLRDNRIRRGLRLEQERVGFGWVRAALEERALV

SEQ ID NO: 38097 - protein, 486 aa, Burkholderia ubonensis
MFLDYPTLDALRTRHPAWRLLRSDHAPLAVSFLHRAFVAPNVREVAAPFLAEALEDELYALREQLGDDAFPKPALEYLNDWASPEKGWLRKFYRQGSDEPHFDLTPAAGKAIAWLGTLMERSFVGTESRLLTLFELLRQMAEGSETDPERRLAELHARRSQIDEEIARVEAGDVRLLDDAAIKDRFQQFMQMARDLLTDFREVEQNFRLLDRHVRERIALWEGSKGALIEEIMGERDAIADSDQGSSFRAFWDFLMSSRRQEELSERLEHVLALPAITEMKPDARMRRVHYDWLEAGEHTQRTVAQLSQQLRRFLDDQAWLENRRIMDILRGIETKALVLREAPPPGSVMEIETASADIELPIERPLYAPALRPLIANVAIETGDADLDASALYTRIVVDRARLASHIRRCLQDRRQVTLAELAASQPLLHGLAELVAYLQLSAEVGTFRATVDETVSDTIEWQANDANGAAIVKRATMPRVIFTR

SEQ ID NO: 38098 - protein, 216 aa, Burkholderia ubonensis
MEELQTPSLGRGDLSTVAIALLKGVIYRDGNERLWAALLELQTHVRDYVAVLGLELVVDEAEGYAFVKSRTEPDAEVDGDQVKLPRLVARRPLSFPVSLLLALLRKKLAEWDAGGGDTRLVLSREDIVELVRVFLPASTNEARLVDQIDTHVNKIVDLGFLRRMKTASGPPTFEVRRILKAFVDAQWLLDFDARLASYQAHLRDATNSDQTESRDE

SEQ ID NO: 38099 - protein, 1123 aa, Burkholderia ubonensis
MNEPRTLGLDFAADDTRTGFRLERLEVFNWGTFDERVWVLRVDGRNGLLTGDIGSGKSTLVDAITTLLVPAQRIAYNKAAGADSKERTLRSYVLGYYKSERNEVTGTAKPVSLRDHNSYSVILGVFRNAGYDATVTLAQVFWMKDAQAQPARFFVSAERDLSIATDFSRFGTDIAQLRKKLRGLGAEIEDTFPKYSAWFRRRFGIENEQALELFHQTVSMKSVGNLTDFVRSHMLEPFDVAPRVDALIAHFDDLNRAHEAVLKTKRQVELLTPLVDDCDRHSEQGHVLEGWRACREALRPYFAGLKLGLVERRLQLLDEDHARATSRKARHEEARDQARQRVDDLRRAVAEQGGDRIAQLDVEIREHERESVRRRERAQRYAAIVTLFGETEAADEAAFASQRQRLAEQRSSLVDDEAQQQNAITEWSVAFREGKARRDVLEDEIASLKARRNNIPKEQVAMRASLCSALGLEEDALPFAGELIQVREDARDWEGAAERVLRNFGLSLLVPDEHYANVAAWVDRTHLRGRLVYFRVRSERTARAAEAIELHRHSLAHKLAIKPDSQFYGWLEREIGRRFDYACCDTQEQFRRETRAITRAGQAKAPGERHEKDDRHALDDRSRYVLGWSNTAKISALAAQRQALEARLGEIGQRLGEAQHEHTKVREQLEALARAGEFAEFREIDWSSCAAAIARLADEKARLESASDALAELTAQLDSAQASLKESEAAMSETDSELGGILAKREAAQALREETHALVAEVDAELAERIEALRAEILGEHQLSVESCDNRERDVREALTTRIDNETKSLGRLAERIVKAMAAFKEAYKLETADFDASLDANPEYRDMLARLQADDLPRFETRFKELLNVNTINEIANFHAQLARERATIKERIERINESLRQIDYNAGRYIILESQPSPDAEIRDFQSDLRACTEGELTGSDDSQYSEAKFLQVKRIIDRFRGREGLTEQDRRWRAKVTDVRNWFLFAASERWREDDSEYEHYSDSGGKSGGQKEKLAYTILAASLAYQFGLEWGAVRSRSFRFVVIDEAFGRGSDESAQYGLTLFQKLNLQLLIVTPLQKIHIIEPFVSSVGFVQNDGGRASKLRTLSIEEYRAHKAEFEQ

SEQ ID NO: 38100 - protein, 394 aa, Burkholderia ubonensis; identical to SEQ ID NO: 37838

SEQ ID NO: 38101 - protein, 488 aa, Burkholderia stagnalis; identical to SEQ ID NO: 37795

SEQ ID NO: 38102 - protein, 217 aa, Burkholderia stagnalis; identical to SEQ ID NO: 37796

SEQ ID NO: 38103 - protein, 1123 aa, Burkholderia stagnalis; identical to SEQ ID NO: 37797

SEQ ID NO: 38104 - protein, 394 aa, Burkholderia stagnalis; identical to SEQ ID NO: 37798

SEQ ID NO: 38105 - protein, 488 aa, Burkholderia stagnalis; identical to SEQ ID NO: 37795

SEQ ID NO: 38106 - protein, 217 aa, Burkholderia stagnalis; identical to SEQ ID NO: 37796

SEQ ID NO: 38107 - protein, 1123 aa, Burkholderia stagnalis; identical to SEQ ID NO: 37797

SEQ ID NO: 38108 - protein, 394 aa, Burkholderia stagnalis; identical to SEQ ID NO: 37798

SEQ ID NO: 38109 - protein, 488 aa, Burkholderia stagnalis; identical to SEQ ID NO: 37795

SEQ ID NO: 38110 - protein, 217 aa, Burkholderia stagnalis; identical to SEQ ID NO: 37796

SEQ ID NO: 38111 - protein, 1123 aa, Burkholderia stagnalis; identical to SEQ ID NO: 37797

SEQ ID NO: 38112 - protein, 394 aa, Burkholderia stagnalis; identical to SEQ ID NO: 37798

SEQ ID NO: 38113 - protein, 486 aa, Burkholderia ubonensis; identical to SEQ ID NO: 37679

SEQ ID NO: 38114 - protein, 216 aa, Burkholderia ubonensis; identical to SEQ ID NO: 37680

SEQ ID NO: 38115 - protein, 1123 aa, Burkholderia ubonensis
MNEPRTLGLDFAADDTRTGFRLERLEVFNWGTFDERVWVLRVDGRNGLLTGDIGSGKSTLVDAITTLLVPAQRIAYNKAAGADSKERTLRSYVLGYYKSERNEVTGTAKPVSLRDHNSYSVILGVFRNAGYDATVTLAQVFWMKDAQAQPARFFVSAERDLSIATDFSRFGTDIAQLRKKLRGLGAEIEDTFPKYSAWFRRRFGIENEQALELFHQTVSMKSVGNLTDFVRSHMLEPFDVAPRVDALIAHFDDLNRAHEAVLKTKRQVELLTPLVDDCDRHSEQGHVLEGWRACREALRPYFAGLKLGLVERRLQLLEEDHARATSRKARHEEARDQARQRVDDLRRAVAEQGGDRIAQLDVEIREHERESVRRRERAQRYAAIVTLFGETEAADEAAFASQRQRVAEQRSSLVDDEAQQQNAITEWSVAFREGKARRDLLEDEIASLKARRNNIPKEQVAMRASLCSALGLEEDALPFAGELIQVREDARDWEGAAERVLRNFGLSLLVPDEHYANVAAWVDRTHLRGRLVYFRVRSERTARAAEAIELHRHSLAHKLAIKPDSQFYGWLEREIGRRFDYACCDTQEQFRRETRAITRAGQAKAPGERHEKDDRHALDDRSRYVLGWSNTAKISALAAQRQALEARLGEIGQRLGEAQHEHTKVREQLEALARAGEFAEFREIDWSSCAAAIARLADEKARLESASDALAELTAQLDSAQASLKESEAAMSETDSELGGILAKREAAQALREETHALVAEVDAELAERIEALRAEILGEHQLSVESCDNRERDVREALTTRIDNETKSLGRLAERIVKAMAAFKEAYKLETADFDASLDANPEYRDMLARLQADDLPRFETRFKELLNVNTINEIANFHAQLARERATIKERIERINESLRQIDYNAGRYIILESQPSPDAEIRDFQSDLRACTEGELTGSDDSQYSEAKFLQVKRIIDRFRGREGLTEQDRRWRAKVTDVRNWFLFAASERWREDDSEYEHYSDSGGKSGGQKEKLAYTILAASLAYQFGLEWGAVRSRSFRFVVIDEAFGRGSDESAQYGLTLFQKLNLQLLIVTPLQKIHIIEPFVSSVGFVQNDGGRASKLRTLSIDEYRAHKAEFEQ

SEQ ID NO: 38116 - protein, 394 aa, Burkholderia ubonensis
MSWTTAVELRARLQHLWARGEWLRSFVDGTEGLFPLRLAIKGPSSSELAERFDAVRAWIAEIAATPHIRIEWREINHRILGMQRLPRAAWVDSLDDALTVAGKHRDAARFERLLEITRSRQPKLIAWLAQRPMQALELAGDWERLLAVVDWLQAHPHPGVYLRQAEIAGVDTKFIEARRGVLSQWLDLVLPSEAIDSSRTGVAQFAARYGFREKQPRIRFRVLDERLAVLPSMGRPDIALDADSFARLALPCRHVFVTENETNFLAFPDVPQAIVLFGAGYGWEALEPARWLADCALHYWGDIDTHGFAILDQLRCRFPHVNSFLMDRATLMAHEAFWGDEGDQVVRDLPRLTAQERELFDDLRDNRIRRGLRLEQERVGFGWVRAALEERSFV

SEQ ID NO: 38117 - protein, 488 aa, Burkholderia stagnalis; identical to SEQ ID NO: 37795

SEQ ID NO: 38118 - protein, 217 aa, Burkholderia stagnalis; identical to SEQ ID NO: 37796

SEQ ID NO: 38119 - protein, 1123 aa, Burkholderia stagnalis; identical to SEQ ID NO: 37797

SEQ ID NO: 38120 - protein, 394 aa, Burkholderia stagnalis; identical to SEQ ID NO: 37798

SEQ ID NO: 38121 - protein, 488 aa, Burkholderia stagnalis; identical to SEQ ID NO: 37795

SEQ ID NO: 38122 - protein, 217 aa, Burkholderia stagnalis; identical to SEQ ID NO: 37796

SEQ ID NO: 38123 - protein, 1123 aa, Burkholderia stagnalis; identical to SEQ ID NO: 37797

SEQ ID NO: 38124 - protein, 394 aa, Burkholderia stagnalis; identical to SEQ ID NO: 37798

SEQ ID NO: 38125 - protein, 486 aa, Burkholderia ubonensis; identical to SEQ ID NO: 37835

SEQ ID NO: 38126 - protein, 216 aa, Burkholderia ubonensis; identical to SEQ ID NO: 37836

SEQ ID NO: 38127 - protein, 1123 aa, Burkholderia ubonensis; identical to SEQ ID NO: 37837

SEQ ID NO: 38128 - protein, 394 aa, Burkholderia ubonensis; identical to SEQ ID NO: 37838

SEQ ID NO: 38129 - protein, 488 aa, Burkholderia stagnalis; identical to SEQ ID NO: 37795

SEQ ID NO: 38130 - protein, 217 aa, Burkholderia stagnalis; identical to SEQ ID NO: 37796

SEQ ID NO: 38131 - protein, 1123 aa, Burkholderia stagnalis; identical to SEQ ID NO: 37797

SEQ ID NO: 38132 - protein, 394 aa, Burkholderia stagnalis; identical to SEQ ID NO: 37798

SEQ ID NO: 38133 - protein, 488 aa, Burkholderia stagnalis; identical to SEQ ID NO: 37795

SEQ ID NO: 38134 - protein, 217 aa, Burkholderia stagnalis; identical to SEQ ID NO: 37796

SEQ ID NO: 38135 - protein, 1123 aa, Burkholderia stagnalis; identical to SEQ ID NO: 37797

SEQ ID NO: 38136 - protein, 394 aa, Burkholderia stagnalis; identical to SEQ ID NO: 37798

SEQ ID NO: 38137 - protein, 488 aa, Burkholderia stagnalis; identical to SEQ ID NO: 37795

SEQ ID NO: 38138 - protein, 217 aa, Burkholderia stagnalis; identical to SEQ ID NO: 37796

SEQ ID NO: 38139 - protein, 1123 aa, Burkholderia stagnalis; identical to SEQ ID NO: 37797

SEQ ID NO: 38140 - protein, 394 aa, Burkholderia stagnalis; identical to SEQ ID NO: 37798

SEQ ID NO: 38141 - protein, 488 aa, Burkholderia stagnalis; identical to SEQ ID NO: 37795

SEQ ID NO: 38142 - protein, 217 aa, Burkholderia stagnalis; identical to SEQ ID NO: 37796

SEQ ID NO: 38143 - protein, 1123 aa, Burkholderia stagnalis; identical to SEQ ID NO: 37797

SEQ ID NO: 38144 - protein, 394 aa, Burkholderia stagnalis; identical to SEQ ID NO: 37798

SEQ ID NO: 38145 - protein, 486 aa, Burkholderia ubonensis; identical to SEQ ID NO: 37699

SEQ ID NO: 38146 - protein, 216 aa, Burkholderia ubonensis; identical to SEQ ID NO: 37700

SEQ ID NO: 38147 - protein, 1123 aa, Burkholderia ubonensis; identical to SEQ ID NO: 37733

SEQ ID NO: 38148 - protein, 394 aa, Burkholderia ubonensis; identical to SEQ ID NO: 37702

SEQ ID NO: 38149 - protein, 488 aa, Burkholderia stagnalis; identical to SEQ ID NO: 37795

SEQ ID NO: 38150 - protein, 217 aa, Burkholderia stagnalis; identical to SEQ ID NO: 37796

SEQ ID NO: 38151 - protein, 1123 aa, Burkholderia stagnalis; identical to SEQ ID NO: 37797

SEQ ID NO: 38152 - protein, 394 aa, Burkholderia stagnalis; identical to SEQ ID NO: 37798

SEQ ID NO: 38153 - protein, 486 aa, Burkholderia ubonensis; identical to SEQ ID NO: 38029

SEQ ID NO: 38154 - protein, 216 aa, Burkholderia ubonensis; identical to SEQ ID NO: 37812

SEQ ID NO: 38155 - protein, 1123 aa, Burkholderia ubonensis; identical to SEQ ID NO: 38031

SEQ ID NO: 38156 - protein, 394 aa, Burkholderia ubonensis; identical to SEQ ID NO: 38032

SEQ ID NO: 38157 - protein, 488 aa, Burkholderia stagnalis; identical to SEQ ID NO: 37795

SEQ ID NO: 38158 - protein, 217 aa, Burkholderia stagnalis; identical to SEQ ID NO: 37796

SEQ ID NO: 38159 - protein, 1123 aa, Burkholderia stagnalis; identical to SEQ ID NO: 37797

SEQ ID NO: 38160 - protein, 394 aa, Burkholderia stagnalis; identical to SEQ ID NO: 37798

SEQ ID NO: 38161 - protein, 488 aa, Burkholderia stagnalis; identical to SEQ ID NO: 37795

SEQ ID NO: 38162 - protein, 217 aa, Burkholderia stagnalis; identical to SEQ ID NO: 37796

SEQ ID NO: 38163 - protein, 1123 aa, Burkholderia stagnalis; identical to SEQ ID NO: 37797

SEQ ID NO: 38164 - protein, 394 aa, Burkholderia stagnalis; identical to SEQ ID NO: 37798

SEQ ID NO: 38165 - protein, 497 aa, Burkholderia sp. MSMB1459WGS
MAVHDLTDQIRQEKVAERYPPLFNRLPDRLFAPLASANRFQYWTLLCALHAKRFGPEAPLPPSTGFLMREITADIAEELQYQDWTPESDDVTPATPLAIRAIMVFNRLRDAGWIRVDRVGVREMVTMAPAVAHFMNRLVEFAHTGPEFVSGKIRSIEANLKLLLDESTDGASLQEAARQSRALLEHVRIAGTNVRDLMLEIGRVDATGEFVRRFFDDYVERMFIGDYKELRTREHPLARRQEILRLVTHIQQTQDLRTRLIQWYLEKQAGRDPTRAEAMFERDIQKVEDLRRIDEYLDRLDDEIRRANKLALAYLDYRLRAARPLDDLINQAIDAVVKHGSNAAALAPFAPGDCIGGERLASPRIETRRAPPTGLRKQVMSPEQEARARLALMARDRRTMSLPKLAAFVRQQLGEADAAPSTALQVNSIESVRALQVLCTIATANATSSKLLRANARAMSSGFTTVRMEGEEDRNHGISHLPFTIARTTKPAKGGNQ

SEQ ID NO: 38166 - protein, 220 aa, Burkholderia sp. MSMB1459WGS
MSFWTDAATATKNVVTEDDFEAAANRLITEQVLYAADRGSKVAYGLIRDFEREFKRALEPLGYIVRVNSQLRYACAIPKHARTSPVTVDQTLLALVLRKIFDEETRSGHHDENGEVACDLVTLEVKYKQMTGGRELATGGKLAALIQWMRRWGLARVSDEDGNPFGHDAGQPYALIIRPGIAEILGEGALARIALFTSPDAEADGADLTITSTTQEGGAA

SEQ ID NO: 38167 - protein, 1147 aa, Burkholderia sp. MSMB1459WGS
MKKLIRIRVVQFFLYEMRDVEVGTNCGIFGANGSGKSSLLDAVQIVMLGANESRSSAGVAFNAQADESNHNSRNIRSYCLGQYGDSPDARVRDSANTYITLVWEDTTTREIVSTGVSIYVSAEREKSDVQGRYILPADIALSDHLELVDGEYRPRPWASFRQMLSQRAHGEEVLFHDSERFVSAMLFRLRGARGAPRLDAYRQAFRFGLRMKFDKSVDDIVRQQVLETRPTNIKRFKDVLHTFQEMAALVRNVQAKLDEAELIETDFADAHRRNTHSVSLAALAQAAELEVANETVSAAEQAEAHAAAALKDANARRDEVNRQVEAAEQRARDSASARDKHASHADAALLRESLIKIQNRLTEQRTGLHRSIKAIGRAIDTQIPGKLIADSAEATAHAFKDIHALLEEGKLSTRDAVESTVRKALRAAKLLSNEVFEEMQFVGRAQTAAEAELAGVQENQARIAKGKPPLEGPAAALKRALLNAGIEATPVCDLVRVEDPDWQPAIESYLGTSNLQALLVDETDERNAFRVSRQAAIYDAKVVMPSKFSRRSSPRHGAVAELISGNSAAAVNYLRSKFGDTQRAETEDECFAHRFAMTKDGMLLADGEMVRKKPANPALFKIGPTSTATRTSIAEQARQLHEKIDGLKERYTKLKELFNNLGPFAGAEQDKVHDVLDIFDRIIKEAADEQDLTQRLQALDTEEYRQLVQVAEAAETTLGDVRKQLLAAAEAVGAAETSCQQKREDTKKKQDRAATQKGIAEAARAVDGYDADYASDQWERLLIRQGLSFSEIVVDCKHRSARAETDSRQKWSSAMQKLSAFLVRHNEFVPDGIQDDWRSARAWLQARVTVLTETGLRENKARMEDALSAAKSTFRNDVAVALHEHLEWLSDTINRMNEALRLAPMFTNNERYQFRTHVRPAFAALLKFIKDVAQYGSTEDLLGGAGELPTEFEELMREKTVTGAAAVKSPLDDYREFFDFDIEVLREEASTGTTKHIGWLSKRVGSGSGGEHRAPLYVIAGAALSSAYRLERGDDTGIRLLVIDEAFIKMDPRNIVATMRYFEELGLQVFMASTGDALGSLTAFLDRYYDIMRDAESNVVVLEGHDVLPETREMFRADLPEFNPELVEAEIRRQYLPRADSTESAAA

SEQ ID NO: 38168 - protein, 393 aa, Burkholderia sp. MSMB1459WGS
MSHQDKMDPLARKALERLLQSADKYEAGAAVRRPALTDSALSEYRALRSLKAKEDFEAVMAYAQAEGAIMVRRPRGDPQGLIERIELIELAKLASILGKVPHAVRVRSARQVLASRLSEHSILNDILSSWERLKKVRGIGPDAAANWVMACDVIAYCRDQVALGATETPVRDASARLFKDSKRIESLVPCLDVLLAENIDDDARPDAEVLQELGLYREPQPARLAGNIVVRRERGAFPLDRPYGALPPSTVLGLGSTPSQVLTIENQTTFHVWARQHCDSDVLGLYTAGMPSPAWRAMYLRLLSELPASVPVLHWGDVDEGGFRIAAVLSRCAAEAGHALLPWKMSPSEVPVSLRRAAPQSTVDRMVKYAQETGWDGIAYELAEAKLVAEQEG

SEQ ID NO: 38169 - protein, 486 aa, Burkholderia ubonensis; identical to SEQ ID NO: 38097

SEQ ID NO: 38170 - protein, 216 aa, Burkholderia ubonensis; identical to SEQ ID NO: 38098

SEQ ID NO: 38171 - protein, 1123 aa, Burkholderia ubonensis; identical to SEQ ID NO: 38099

SEQ ID NO: 38172 - protein, 394 aa, Burkholderia ubonensis; identical to SEQ ID NO: 37838

SEQ ID NO: 38173 - protein, 220 aa, Pseudomonas aeruginosa; identical to SEQ ID NO: 33036

SEQ ID NO: 38174 - protein, 979 aa, Pseudomonas aeruginosa; identical to SEQ ID NO: 34267

SEQ ID NO: 38175 - protein, 393 aa, Pseudomonas aeruginosa
MKSPTDIGRSLARQWQRSSVRLDRLLNSASWPQSFNIGKPSARLFSDNIRTVLRHVENWRSVKVGKVDWEPVSYRAGLAPISLPMRWHLRSPSEWIAATDDPSVSQEYAQLEYLVEQVDSSFHALLVAQRSLWLTKPSEEVIATAQLATQLSPGCAQGRPLRLLAEHGVDTKFFERNAILLTKLLDERFEGAASEQGLTTFLDAFEETSQWVLVVPLQPELLPFKRIRLTTSELAETSLPGSRLLVVENEQCVHLLPETLPDTLAVLGAGLDLQWLASAHLAGKQIAYWGDMDTWGLLMLARARHHQPAVEALLMDRELFDQHSLGSAVVEPAKAQELAPEGLMTDEADFYRYLLAQERGRLEQEYLPRRQVEQAISKWFGESVAPAHPERTA

SEQ ID NO: 38176 - protein, 502 aa, Frankia sp. DSM 45899
MDTSVDGSLDYDTVDLLRRHAAWRLLRADHAPLVVSFLARVFVAENVREIAASALVDRLDDTLYALNQRLGAGTYPRAAKAYLDDWSATEHGWLRRFYPPGSDEPHFDATPALEQAVSFLSSLRSRAFVGTESRLNTLFDLLRQMALGTETDPERRLTELRLRRDALDREIERVSRGELDMLDPSAQRDRFQQFGDMARELLADFRQVETNFRELDRALRVQIASFNGAKGELLDEVLSSRGSITDSDQGRSFGAFYDFLLSADRQAEFKALLDQVLGLDALAGADERLRDIHYDWLAAGERTQATVRLLSAQLRRFLDDRVWLENRRIGEILRGIEAHALQLRDAAGPLPGAELEETAPRLVLPMERRLYTPKRRTAVDSDGITAGEGDFESDALYEQVYVDPAELGGAVRDALTSRPRVTLTSLVADRPLRRGLAELVTYLSLSGDGFTVVFDEDNTDELSWDDDDGTRVATVPRVTFVRAGFAAVAPDANDDGEERRDD

SEQ ID NO: 38177 - protein, 211 aa, Frankia sp. DSM 45899; identical to SEQ ID NO: 36430

SEQ ID NO: 38178 - protein, 1131 aa, Frankia sp. DSM 45899; identical to SEQ ID NO: 36431

SEQ ID NO: 38179 - protein, 404 aa, Frankia sp. DSM 45899; identical to SEQ ID NO: 36432

SEQ ID NO: 38180 - protein, 486 aa, Burkholderia ubonensis; identical to SEQ ID NO: 37699

SEQ ID NO: 38181 - protein, 216 aa, Burkholderia ubonensis; identical to SEQ ID NO: 37700

SEQ ID NO: 38182 - protein, 1123 aa, Burkholderia ubonensis; identical to SEQ ID NO: 37701

SEQ ID NO: 38183 - protein, 394 aa, Burkholderia ubonensis; identical to SEQ ID NO: 37702

SEQ ID NO: 38184 - protein, 486 aa, Burkholderia ubonensis; identical to SEQ ID NO: 37675

SEQ ID NO: 38185 - protein, 216 aa, Burkholderia ubonensis; identical to SEQ ID NO: 37680

SEQ ID NO: 38186 - protein, 1123 aa, Burkholderia ubonensis
MNEPRTLGLDFAADDTRTGFRLERLEVFNWGTFDERVWVLRVDGRNGLLTGDIGSGKSTLVDAITTLLVPAQRIAYNKAAGADSKERTLRSYVLGYYKSERNEVTGTAKPVSLRDHNSYSVILGVFRNAGYDATVTLAQVFWMKDAQAQPARFFVSAERDLSIATDFSRFGTDIAQLRKKLRGLGAEIEDTFPKYSAWFRRRFGIENEQALELFHQTVSMKSVGNLTDFVRSHMLEPFDVAPRVDALIAHFDDLNRAHEAVLKTKRQVELLTPLVDDCDRHSEQGHVLEGWRACREALRPYFAGLKLGLVERRLQLLEEDHARATSRKARHEEARDQARQRVDDLRRAVAEQGGDRIAQLDVEIREHERESVRRRERAQRYAAIVTLFGETEAADEAAFASQRQRLAEQRSSLVDDEAQQQNAITEWSVAFREGKARRDVLEDEIASLKARRNNIPKEQVAMRASLCSALGLEEDALPFAGELIQVREDARDWEGAAERVLRNFGLSLLVPDEHYASVAAWVDRTHLRGRLVYFRVRSERSARAAEAIELHRHSLAHKLAIKPDSQFYGWLEREIGRRFDYACCDTQEQFRRETRAITRAGQAKAPGERHEKDDRHALDDRSRYVLGWSNTAKISALAAQRQALEARLGEIGQRLGEAQHEHTKVREQLEALARAGEFAEFREIDWSSCAAAIARLADEKARLESASDALAELTAQLDSAQASLKESEAAMSETDSELGGILAKREAAQALREETHALVAEVDAELAERIEALRAEILGEHQLSVESCDNRERDVREALTTRIDNETKSLGRLAERIVKAMAAFKEAYKLETADFDASLDASPEYRDMLARLQADDLPRFETRFKELLNVNTINEIANFHAQLARERATIKERIERINESLRQIDYNAGRYIVLESQPSPDAEIREFQSDLRACTEGELTGSDDSQYSEAKFLQVKRIIDRFRGREGLTEQDRRWRAKVTDVRNWFLFAASERWREDDSEYEHYSDSGGKSGGQKEKLAYTILAASLAYQFGLEWGAVRSRSFRFVVIDEAFGRGSDESAQYGLTLFQKLNLQLLIVTPLQKIHIIEPFVSSVGFVQNDGGRASKLRTLSIEEYRAHKAEFEQ

SEQ ID NO: 38187 - protein, 394 aa, Burkholderia ubonensis
MSWTTAVELRARLQHLWARGEWLRSFADGTEGLFPLRLAIKGPSSSELAERFDAVRAWIAEIAATPHIRIEWREINHRILGVQRLPRAAWVDSLDDALAVAGKHRDAAQFARLLEITRARQPKLAAWLAQRPLQALEFAGDWERLLAVVDWLQAHPQPGIYLRQAEIAGVDTKFIEARRGVLSQWLDLVLPSEAIDSSRTGAAQFAARYGFRDKPPRIRFRVLDERLAVLPGMGRPDITLDADSFARLALPCRHVFVTENETNFLAFPDVPQAIVLFGAGYGWEALEPARWLADCALHYWGDIDTHGFAILDQLRCRFPHAGSFLMDRATLIAHEAFWGDEGDQVMRDLPRLTAQERELFDDLRDNRIRRGLRLEQERVGFGWVRAALEERSFV

SEQ ID NO: 38188 - protein, 489 aa, Xanthomonas translucens; identical to SEQ ID NO: 32239

SEQ ID NO: 38189 - protein, 234 aa, Xanthomonas translucens
MNWHDHELDPEQERSNDAVDSAAPDAGTDLFPGDSGRLPVEARRALCQLLSGPSVDAQRHSKLWPALLRSEAAIRSALADLFLELVLDREAGIAFTRQADTGELEAPVLLRSSPLTFIDSVLLLYLRQQLAEADARGLRAVVEEAQLGEALAVYEKNLSTDRAGFLRRIGNAVQKMKDNHILTRLRGEDERYEVSPALKLLFSAEDVAALAQVYRQLREGPDSGEDAAAAAQDA

SEQ ID NO: 38190 - protein, 1194 aa, Xanthomonas translucens
MKSSASTPGLFAGDLPDPRLQQFRMRRLQVHNWGTFSGLTEIPIAARGFLFVGRSGSGKSTLLDAMSALLTPPSIVDFNAAAREAERSGRDRNLVSYVRGAWADQQDSESGEIATQYLRKGATWTALVLEYRNGEGSVVSLVRLFWIAGNGTAAADVRKHYIVAERAFDIAADLDGFDLDLRKLKQRLHDVHHFDSFAGYAERFRHQLGIGNEMALRLLHKTQSAKNLGDLNAFLRGFMLEEPKTFDAAERLVGDFAELDGAHQAVVTARRQVETLLPARGHHAELMAVRRQRSELDELKLGIDSYREQRRLALLDARLQELDTQDRGLAGEEGQRRAALENHQRRLDDLEAQRRAQGGERIDALERERGQLEAECDRRAGKRTQAEQACRQLEQVLAGSAQGFAGQAAQARAALEDGTRAAAELDEAISQRIAGKAEDAKRFAEVRAEIDALKRNPSNIPAPMQALRARLSADTGVPEAALPFVGELLQVRNEESDWRGAIERVLHGFAQSLLVDERHYADVADWVNRTHLGIRLVYYRVRDNEHALSGRAPAAGSLLHKLELREHAFAGWLRRELGKRFDYDCVDNAKALRHAERAITREGQVKHPGERYEKDDRHAVNDRRRWLLGFDNRDKLALFEEEGLALAQRIAACDADVAALRARRERDGARRLAQHTLANLAWDEIDVAAPLQRLDDIATALRQLREGDGNLRALGEAIDHARADIKQAERTYESVREERIGLGVERVRLEKQRLNCADANARVVTPLQRQGLNERLAGLGVLSLDNLEAHFRQIGNAIVEQTSASDKEHNRLEQLLLGCFRRYCQQWPEDSGDFTVSLSSAEDFLARLQRLERDGLPRHEARFFELLQSQSKNNLLALQRHTAEARKSIAQRLDEVNASLEQVPFNRGTLLTIELGDRRLPEVIEFHQRLRDVLGHHQTEQRELAEQQFAVLRELVRRLGSQDGEDKRWRELVLDVRLHVEFVGVELDAATRQQVEIYRSGAGKSGGQRQKLATTCLAAALRYQLGGEDGELPRYCAVVLDEAFDKADNEFTALAMNIFENFGFQMVVATPLKSVMTLEPFIGGACFVEISGRHDSGVLLIEYDEQARRLKLPERTRGAATPGDAAPAPEAEQPGTAPSRLRADTAAVVRGDAGEPAVSDGAAAMAPVPHRALPKSKAKSKPESKPGSKPKSKA

SEQ ID NO: 38191 - protein, 489 aa, Xanthomonas translucens; identical to SEQ ID NO: 32239

SEQ ID NO: 38192 - protein, 234 aa, Xanthomonas translucens; identical to SEQ ID NO: 37415

SEQ ID NO: 38193 - protein, 1194 aa, Xanthomonas translucens; identical to SEQ ID NO: 37416

SEQ ID NO: 38194 - protein, 392 aa, Xanthomonas translucens; identical to SEQ ID NO: 37417

SEQ ID NO: 38195 - protein, 489 aa, Stenotrophomonas maltophilia; identical to SEQ ID NO: 30775

SEQ ID NO: 38196 - protein, 233 aa, Stenotrophomonas maltophilia; identical to SEQ ID NO: 32276

SEQ ID NO: 38197 - protein, 1126 aa, Stenotrophomonas maltophilia; identical to SEQ ID NO: 32277

SEQ ID NO: 38198 - protein, 484 aa, Arthrobacter sp. ATCC 21022
MKGQMDYYAINALREKHAGWALLRAQNAPLALHFFMSAFTDPNQRNVGRQQLIDVLDDVLFGVRETYGEEKFPRNASEYLDDWAASERAWLRKYYVQGEDEPHYDLTPAAEDVVRWVESLKGREFVATQSRLTSIFAVLKTLVQQSETDPDVRWAELQQQRNQIDAEMHRIREGDLKVMTAPEALDHFQQLTTLAKDLLSDFREVEQNFRKLDRQVREQIATWDGSQGELLDSIFANQQDIGSSLQGRTFQGFWDYLMSPQLRRELNDLLHRATRIEALARMDNLHTITNLHQDWLPAVEQTQATVRQLSQQMRRLLDDKVFLENKRIMQLIRSIEANALDQRDQPPSNFAMEIEASSVDVALPFERPLYEPGSRVMVMDDVVTADDQDLDASALFSQFHVDRERLKSNIESVLEEENQATLADITAAHPLSQGLAEIVAYYQLAAESDWASINPETTQRLHWTLEDGSVRAAVIDQIIFVRPA

SEQ ID NO: 38199 - protein, 196 aa, Arthrobacter sp. ATCC 21022; identical to SEQ ID NO: 37666

SEQ ID NO: 38200 - protein, 374 aa, Arthrobacter sp. ATCC 21022
MLKRPSATELRDDYAAARDWAARLFAAEGPFSLETADVGRTTIGSNRLPAVAVFASVEDEIEFAGKQRETKQFLSLAAELGGLDPALQAWAAKRPKHLLVLGQDALLAARVALWLRDHPSPSVYVRQLRLPGVHTKFIEAHRRTIDEMVEALRPVLAETLPLDGDSDAADPGLDDSVLGTPIARTPAARFAERHGFLHQPEQVRFRLLDPSIPLLGDARDITVTASAFESLRLPVTHVIITENLVNFLALQERHGTLAIFGKGYGFSSLRDAAWLQSCQVLYWGDLDTHGFRILDQLRSVHPHVASVLMDEATLLAHRDAWSMEASPSRAALTRLTPDEALVYEALQAGTYGDRVRLEQELIAWEWALTRLESD

SEQ ID NO: 38201 - protein, 485 aa, Arthrobacter sp. ATCC 21022; identical to SEQ ID NO: 37668

SEQ ID NO: 38202 - protein, 293 aa, Arthrobacter sp. ATCC 21022; identical to SEQ ID NO: 37669

SEQ ID NO: 38203 - protein, 1147 aa, Arthrobacter sp. ATCC 21022; identical to SEQ ID NO: 37670

SEQ ID NO: 38204 - protein, 520 aa, Microterricola viridarii
MSDIAGELARVREAFDKPTLRLLDRKWAPFVLAVFKSSFSRDRAAVQCERLHAQVDAYLADLRSIGTETPNGTGRSLCVQWMNDQWLYRDLGDDGEGGGTSANAEEQYSLTSHALEALSLVESLARDRALISESRLAMIVDAVRHRATQANPDRDERLRRLDLQIAELASERDRVAGGGEIAAASVEEMREGYANLIDLIGQLPGDFKRVEESVAAMHRQIVNDFRAEERPIGEVLDEYLAKTDALMSLTAEGRAFEGAFELLRDDALLHDLKGDLETILGHPFAAGLKSVERRSFGATVGLIRTGIDDVLTQRNGLTTTLREHIVNHDIVKDRELEGLLREINTELAIWMQTAGPKARVRAEIMPGNLDAPHLRERFYDPQSHVPPAPLADVSAQAPAAPSLDAMRRQGGPQLPEMREALLGALAALDASTDAADASIGDVFNALEPALRRPVEILGLMQLATQLDAVGHAGSVEQPEFDQYLTVRPDGTQRTFEVARITLTDDETAALAALNSGATSD

SEQ ID NO: 38205 - protein, 334 aa, Microterricola viridarii [sequence omitted]

SEQ ID NO: 38206 - protein, 1137 aa, Microterricola viridarii
MSDSPLFYIDGATEGTTQWRAETFQMVNWGGFHGHHSVALAPTATLVSGASGTGKSTLLDAYLALMMPSDTPFNGASNDAGSGRARSAEQRNVLTYLRGKTDDNREAETGALQDQVLRGAAEPTWGAIAMTFVDDNQRRFTVLRTYYAPRATNSYSEVSMRMATFDGALHLGELEDVVAAKFEKRALKARFSGIEVFDTYAAFAQTLYTRLGIGANGEGGKALRLLARIQAGQQVKTVDGLYKSMVLERPATYAAADKAVAHFEDLERSYGAMVTEHQKAQVLERLPELQRQFIEASDRADLVDTFGVTRSGDTPLRYWELGTEQRLLADAGDGNRSERKRVQAELSAASTAEKELKARLAESQRRQRENGGDVLAELQADLATLTDSRDERVRTRARFDDRVAVLAQPTASAAEFAAAQAAAADALAAFPAEQEKAEALHETLRRQQYPLEEQIRTLKKEREFLAGRHSLVPQHLHNARLAIAEAAGMAPDELPFAAELIDLAPGEDRWRQAAEVTLGSVARILLVDETKLAALSKAIDPLQLPVRVHFEGVPLSVADAGSSSHPLDPAFVSGKLVYKESPFSGWVQQRLRLASLDARCVETPAEFDGDGPFVALSGQTRNGSRGAHGMNRDQKPIIGFSSQARQDEIEQELGQLTSSVQQLSGQAHALANELSALRARRDASQMLTDAVWELLDVAAAEAALAAKNAELARVLANSDVLRALQEEEQRLELELEIAQGQRHEASRVAQELAAAQAEIVEREDAVNDQLERIGAEQQVTLTEEQGDHLDAEFAAVGDPDNLESFAAGLKRLRERLTEQSASERERAEQSAKAMLNIFESYQRAWPDPTIGTGLDSYQGYRDILDSVLTLGLHERRQEWKRRLAAWSGQDLVPLAGAFDSAISQIEDRLDPINDILATLPFGAGRDRLQITLRRLHRDDSVAFRRELKQLSSGATEQFTDEQTEERFLRLQAFMAGIRRPEDESKPSPTRDLLLDVRRHVEVTASRLGDGDEVLSTYSSLGGKSGGESQELVAFVVGAALRFQLGDESRTRPRFAPVFLDEGFVKSDAEFAGRAVAAWKGLGFQLIVGAPLDKVTALEPYMDLVLSITKNHAAGFSYITPIADAAVSLVEPVETALA

SEQ ID NO: 38207 - protein, 530 aa, Hydrogenibacillus schlegelii
MKLFEVLPELFFSPLSGPNKHIYAEAALLLFEESRKARFGIPLEALRDSFQELFESWIEQGLSGALDEFDEEANEGAPETPKSSVTNPSGTPENLLGMTEDARQKANALIRRLAEIGWIDIETRESFRDYVVLPAYTNRFLALLNELADPKAIEYQRFAFATYGVLTGEEARRRPALAVREAREITLSFERELLTLYQNMKHHMETVVKQSSLGDVLAHHFEVYQSEIIDKSYHRLKTSDHVSRYRLQILNTVREWRLDAERMEQTIRNGLEEKFYASREEAERDLVSALDTIESVYNDMDEILYQIDLRHHQYVRASYDRARYLSRQHGGLDQALAQILDALARAPEGGVFGASSEDEPALAPEGASARAPEDVPGSAPEGASAVSLPSLFPFRRAEAAVPDSLMTPRKRARAHQMAPPVVSPVPDALRQAVQAEYRKRLEAAITRAEVEAAVRERLGSRQAMELAEWAPERPEEALLLLYLYVYGQDGGSSFLLERIEPREMVASGPYTFANHRLVLRRGGREGDARS

SEQ ID NO: 38208 - protein, 192 aa, Hydrogenibacillus schlegelii
MINRLIAVNFLVRDKERERYAIIRRERDRLERFFRFLGWDFIIDESHEVVFVAPPGAALRRNFNREETIWLLILRLIYEEKRHALSLSRQPVVTLAEIRAKYETFRLPLPGRTALERLVRLVRGYQLLDPLDGEGLTDDSRYVLHHTWLYAVDTQEILALQEKIARFAQSTDREGEPGEGDDEDAADRAERR

SEQ ID NO: 38209 - protein, 422 aa, Hydrogenibacillus schlegelii
MLKWLTALRLINWHYFDDETLTFGRRTLITGKNATGKSTIIDALQVLFIADQRQIRFNAAAHEDAKRKMIDYLRGKVSDEDRHALRDGDFTTYIVAEFDDTDKAEPFVVGAVIDVFADEQYETEYFILAETRLQELSFLEASGALRNRESFRRAHMGFGGRRVIFERNKDEYRRQLLTRLGSLRDRFFNVFSRAIAFQPIRSVRDFVEQYLLEPKPLKIDLLRENFQLYERYRHELEGLEARQKALRSIRGTYREYEKWHRTAIEQDYVVRELRRFLAEADWKAHQERLEKLRAAHEEAIERQRQAEEGERRAREAAEAAYERWKGHEAGVRLKALEEKIAALRRTLEEKERTYQALLHGLDDLIKSSIMCKLPSSANERTGHSGIHNVQHGRLSGFLLFLLPLPILIHIQVAVPSGPRLVY

SEQ ID NO: 38210 - protein, 224 aa, Burkholderia sp. LMG 29324
MDEVTSRPFARQLESHERKFLHTLTGALLTEGRGVHDVLQHFARSLKSFVQSREFLEHRRLHGLLKEATQAALTAKNAVRPNEQIGFELMQSSGRIRSVAQWVLYDPAQRVTDSSMRIAEPSELDLETVSELVRQSEIDFRTLKAHLRTILERQSQVTIGQILTEFPAEQGLGSVVGYVALGAKHGEVTDGIELVTWEGDDATRRRAKVPTIYFMKERYLELVD

SEQ ID NO: 38211 - protein, 245 aa, Burkholderia sp. LMG 29324
MNSLTDLTDESVADEPAPDTTVADTATFRGDTGSLPMDTRRVLVQLLLGPSVDARRQSKLWPVLLRDEAIVRSRMHELFLEVIIDHEQRVAFTRQVVSEDIDVPILLRKASLTFLDTALLLFLRQRLTQADAQGERAVVSRDDMQEHLSVFERGSNPDHAKFEKQIVNAVDKAKKLSLLQFVRGSGERYEVSPTLKLLFSAEEIQDLTRTYAALASSHYAINTDEGNAAEDDASASSAENEEDSL

SEQ ID NO: 38212 - protein, 1117 aa, Burkholderia sp. LMG 29324
MNIDQPVLLDGSGDQFRLTRLQTFNWGTFSNVFDFPIPKEGYLFVGPSGSGKSTVLDAHAALLTPPKWLDFNVAAREAERHGRDRSAMTYLRGAWAQQTGDGGEYVSQYLRSGTTWSAIAETYLDGQGRVVVLAQVLWVKGNTTASSDAKRLYLTLEREFEIQELEFFAKNEFDTRRFKHDLLDAKVYTEFSAYQERFRRMLDIDNERALRLLHKTQSAKNLGDLNVFLRDFMLDEPETFSIAISLIKEFGELNEAHQEVVAARNQIEMLKPAREEHMELERGNSDRNGLQAIQTAIDQYREHRRKVLVDERIAELEVDKEASRQEVQLLSQIVDDEFVKLTDLQRQKLKMGADVLVRLEENIKAAEADKIVRMNKRDQAAAACKVMGWAMPDSVVWFVHRVEAAKQRVLRAHDLTKEVEDRKDQLKADHRQASEEFTTTVAEVKALERQRSNLPARLVDLRERMARDLSIPEAKLPFAGELVEVRSDSTEWRGAIERVLGGFARSILVDEKLYPAVSAYLNERNIGERLVYFRTVQQTSGRTPGPNSLVRKLNFAQGSFGEWVREELKRSYELECTDTLQAFRNAPRAVTREGLVKHNTVRHEKNDRHSVNDRSQWVLGFDNKDKLTLYRNKAAELGGRIAELRMALDKIGDEEVLQQQQLLHCQNLSNLTWNDVDVGALLARIDDLTTRLNAERDARPDLAILDDRIKTQEDIHSKAVGKKNEEDVKGRSIKSDIEKLNVKLAELARLWPASDRPPAFAAQIEARYAATGKEITLENLDPVNGQVDRGLSNELRAIESRLSELRNAIVQRFVEFNRLWPSVAGGLDATLASADDYLAKLKRLEDDNLPAFEDRFFGLLREQSDQNLTLLATKLDEERSAIRSRMELVNESLETAPFNPGTHLVIETTDKSLEDVRLFRASLRESLSHSFSNDRDLAEERFKTLAALVKRLASQETADKNWRNLVLDVRQHVEFVARELDEGDVEVEVYRSGAGKSGGQRQKLAATCLAAALRYQLGGQDRALPSYSTVVLDEAFDKADAEFTAMAMNIFKAFGFQMIVATPLKSVMTLEPFIGGACFVHIKDRKKSAVIPIEYDSESNRLKLTQDVRNAEETAVS

SEQ ID NO: 38213 - protein, 417 aa, Burkholderia sp. LMG 29324
MPKKLLSPESARDFLVRRFNNQHENWLAGEGAWPLVVSLGAPTDKDIAEDASAVRTWAFAWQSRGGPGEVVFEERQFARFGRHRLPVSLSFANATAVATAVGQTRRWETATERYQQMLNRWPVLAQSKVLASKFDVLADYTPEDFERLVTLLTWLEANPDSGLYLRQLPVEGLDTKWLEKRTGLVAGLLRSLREVTVDDSDFHTLCGLRKPAHRVRIRLLCPALRERVGGLCDIEAPIGELATLPIEPKAVVIVENLETGVALPDVPGTVAIMRLGNAVSALHVLRWLRGPEIVYWGDIDTHGFAILDRARRVMPQLRSVLMDEATLISHRPLWVEESSLCPNVPFDELTAEERRVYDNLRAGSWGQRVRLEQERLYWATSIETLVHALEGQTNVEEGVGLSVSPNGLCRAAQSTDG

SEQ ID NO: 38214 - protein, 446 aa, Erysipelothrix sp. LV19
MVNRIFESIQPNFFRILSNASKFEYAECLALLYESLSESNEYTMLRHDAVLILQNYFEQIRLKSDETLVQTSRDRANNYLREMKETGWVEEDIGANYQQMLSLSETAVQFLIFIDTLKYDTELKYSSQIYAIYRSFKPFDLEKGELVLEEAYKNTVSFFDSLRRLNTSIKKYIQKIFDESITNDLSELFQLLTGEYQLKIVDAAYYHLLTKDNPSQYTFTITDSIERILSDYDAMHEMSLRNAVDNESYERNYQDLQLKLTYMLEKFLNIQTLIHEINKKNQAFVTSAIGRIYFLMNESTDITGSINELIKNMALYPDFEVEGLLSDVSILDDASLASPRKRTLKESSYIEEMDETQRDISGIQDKLVELSKYSKQQVDRIVLELLKGKQWIHVKEYDTLDVTMVTLIFLYGYAYDASYTIEQTPDTYINQEGKVLGNYIIRRRPV

SEQ ID NO: 38215 - protein, 212 aa, Erysipelothrix sp. LV19
MNKAEELKNFSMKFSRQTEKEQEQFSEIVNKLLRCNYLCRDNPSDRSHYFDALIIREDMRAYLSIIDTDIIIDELNGVIGLKVNGESSHHRLRLRETIILLCLRKLFFIKKQSVSMIDTIAVTLEEIMQELLNTGYFEKGVGKTEFETTLRKLKSYHLIDYSFTQSPDVIILWPSLLHAVNANTLEEIQKKLDVYKDNMEVDDENTEEDKAD

SEQ ID NO: 38216 - protein, 1070 aa, Erysipelothrix sp. LV19
MKILKKIKLINWHIFSNETIELSGNTLITGENGSGKSTILDAMQYILTAGSTKFNMAANESSTRTLVSYVRGKLGVEGKEFIRSGDVVSHIALEFYNEESDVIQVLGVVLEVGAQSMAKPHFYKVDQPFEDAWFLEDRKVRNYAEFKQTLKGLQIELDTPTTATQRRTLFMNTMGLDLKYRELIPRALAFRPVNDIQDFIYRYLLNEQNIDIDALRDSIREYRRLEKQLEHEQRYFQKLEIIDAKYTQLKKQEYEVSVNESAIQLLRLNLYKNTIEVNEKQIYGDQQRLKQLAKSKEQANERLGIYQEALADMRKNPTLERLEKLKLALAHAKKEYESNEAILKHVETEYHRLIKTLKSVDFKETIHDGNDVQAIQNQLASIKKAVDQKLKTTYLQKIKYEEEIEATHRTRLELEHDIERLKRQQQVYPENVKKLIVVLKERLSEFYHESVEVRPLFEYLEIKDESWRNAIEGYLNTQRFNIIVEPRYFDMAVKIYDQIKHDMNIYGVRVVDVLKTHGKKALEGSLAQHLTVMDEYVLGYMNYLLGSVICVDSVSNLKEHPISITQEAMVYKGYAVFAIRPEIYKRPYIGQAAIQIQLTQRQEEHKALMQTLIEKRQHKDALEVVENTLESINILNLEVSISGLKDRKTLFETYKLNEDAVNQIQSNPNLTLQLQKAQELEVNIKTLQQEISRSDQAIGGLNRNIAATTEKNEDVKATYEILYDAYERTKDDNPSLLFDAEATMKSSLDASSHNHQRAMDTLQTQNKALSANFVDQKLSLQQDMSEYNHMSNSGYGVGLECIDQYLTRYYKLRDVDLIASRNSCRQAREKSEQQFHDSFIHQLSQNIKQARRNIDLLNRQLRKHTFRDEQYRFDISASKSPHFAQYYKIITSDKEAFPSNLFMQMLSQQESEVMKELFRRITAFDDDGKNEQELRRYTDYRNYMSYDIITTKENGDITRLSTVIKEKSGGETQTPFYVTIAASFEQLISKISMVDSGCVVLFDEAFNNMDSQRIRAMLEFYNNLNIQIVIAVPPDRIASISEHVDTVLAVGRSGNSGFTQRIQYGKNDTQ

SEQ ID NO: 38217 - protein, 403 aa, Erysipelothrix sp. LV19
MEKTTPNSILNVLVDKYESSEISKKKSNRNIAIKIKMVNYDEEYYDSRAFKRYQAYQDTFNLLTSLDFVSVESEGEYVLSIMLNLNKIDAIYEWLGRTNIKVFRQERLEILRNHNTHRELAPVCTFLIEREMSFKSNKQYFKDAHELKEILKAIAYLETQRDFECTLRQASQIIYGNTKRLEALQGKVSKLLRAVEPTLEGQTDQSIFELYGIVRNPTYIYLKGSMNLTIKNQVIQLGTLGGSLGFSSDLLQDLSISGEGPRYLITVENLDTFHKIQPTQGVIVYLGGFHNAAKRSFLQRIYTHSPNIHYYHFGDIDAGGFSIFQDLIKKTTIPFEPMLMDVECLHTYHNFTRPLTQNDKTALEAMRNTSFCAVIDYMLRENVKLEQEIVDASVFISNLDNHQ

SEQ ID NO: 38218 - protein, 488 aa, Mycobacterium wolinskyi
MQHADVGRPSLERLYELNRTVADSRSIRLLVTNNLAGYLTLMERHLDRGAKLTETELVVRLERDLAAMGSDNEQSGLQLIKYWASQGWLHRITEQAGDGERNVCYLTYEARAVLDFARRMRREDTIATGGSIAGVAAGLRRVAGQVSNDPERIRADIEQEIEKLQAELDALDEGRRPEPNPLDVEDEARAIALQMEQIISDIGQYGSMLNRITTRLLDSSADTDLGYRERQRQLFDDYESLFASRESASYTAFTRMVQDPEQRAGLVADIEMVTSQLPHLDPGLREVMTGFFTLVSAQTAEVGRTRQRCARRIKRFVASGTLEESRGVTRQLNDALASAHELLKVSLADSRVGLEVPLARADFNSIGAVAFKIRDAVPPTPAEPSDGEVNLSAFAALAAQVDATELADLVNAAVERGPLPLPAAIGMLDSAYLGHVIVLWSWALKQPHDDGIETVRVRFQSLEGADREIEVPALVFTEPIPIVSESLL

SEQ ID NO: 38219 - protein, 239 aa, Mycobacterium wolinskyi
MSDTSIDFDALPSIDAVERSTPERRAPRFDGDASELPDRACWALQHLLSRRYIRKDNHAELWSWVTRYRTELTVRLSELDLRLCIADDHDIAYVEQAEYESQWRRKLLRRETLNTYDSILALHLAKLMRAAARDEDVLISREEIHELFAGVNNDTDRDAASFDKRIDNAIERLTDIEILVRNREDEGSFTVSPVINAIMTASVITELAQQFDQLKRAAGRGADDADADAVEDEVDAHGR

SEQ ID NO: 38220 - protein, 1117 aa, Mycobacterium wolinskyi
MVAEPTNQFYLSRLQVINWGVFDGYHSIPFSPQGTLITGSSGSGKSSLLDAISLAFLPSHRRNFNASGDTTAAGSGTGKRTVDKYVRGAWGERRDGTSRQIMYLRGTGPAWSAVAVTYSDHTGRAVTGLVLKWLAAEKVSDPGSRYYLIDADRDIFGLCNRWAANGYDAAVFRDDGWSGGRSESQYLAQLYSIIGIRASEAAQQLLGKAKSLKSVGGLEQFVREFMLDEPASLSGVEEALEQINPLVEARGLLDVARRKRNTLGNIEAVQARYADEAAKFGVIDTVDNAMVRDYVDHLRLQQAGPEIDNLDDQITQLGAQRDEFGAQQRQLKNEHNSLMAQINTVTVDLVPLQQRLSEAERVSEEVARRRSGYEDKIVALGFTAPDTAEDFWSLRESLMEEADRLHRELSTGNTAYVEASAKEVRAREAREAVEAELERVQRLGSPLPRTEYEMRARIARALDVAERDLVYVAELMELKPDEARWRLAVEKVLRGAGLRLLVPDEHWDAALRFVNENDMRGRIQLQHVRHGAQLREPAPETLATKVRVADPTHDSAVEALNVIASVGDYACVDRPEEFAEHPRAVTDQGLRKDSGRLSIKDDRSKLRPSDYIFLGDSEAKVHALQHDLANAHDAYSTARSARERLDEHRARLQARERACRALCDQYMQWSDIDTDSVDELLERLQDEHDLLVTENPDVERLQQRADDCWERVEKVIQQIGSLNERETNLDRRRTALLELVERLDPGEVPQHARDTLDSYAADIALPLELLESDPFRNELIRVIGRERDRLRGDRNRSHDELAGIMAAYDSSFPDAIPNDSDDFDERVHDYVALCRRIDERELPDAYERMQRLITEQAPGAILNLHMIADNEARRITEQIARVNTGLGAVEFNRGTRLTLHAGTRHLAAVDELNEKAQRIAARVSLVSFGDETAMFEQYTDILQLRKLLAGNTPEDRQWTRDALDVRNRFVLYCEERDAETGEVIRTYSNSGDNSGGEQEKLMAFCLAGALSFNLASPDSNDTRPMFAQLMLDEAFSKSDPQFAQQALSAFRKFGFQLVIVATVQNTTTIQPYIDSVVMVSKADAAVPNARPVASVTAASISEFTDLRRNSGDVVPAS

SEQ ID NO: 38221 - protein, 483 aa, Mycobacterium sp. NAZ190054
MGITSSVLRYRRLQQEAPEWSLLRARTAALIVAVVQDYFPPERRIRSAAEVITELDRDLERLRESGAEFESTATAYVTGWVSAGYLIRRPGEARGSETLAPSAAALNAVAMVSGIEAPQRAASASRLGSIAANLIFLQRDSDPNSATRLALLEAERTAVENRIAEVQRGEFPVLDTEAARERVAETLGLAQEVPVDFARVRSTIEGLSRELRAKILDDSAEAGATLGNVFRGVDLLAESEAGRSVNGFYDVILDAEQSSRLQEAISAILSRDFAAELSAQQRSELRGLLSRLEDEAATVRQTMVLLSRSLRHFVLSRQYEEHRRLRQLIQRCQSLAVQVSAHHRPEKPLSLELTRIGMQIRSIAALRLHNPGEGRVPTDFERHDAGEVDFAELAAQVRESEIDFEELRTNVIATLWSTAGPVTIGQVLQEHPATQGLASIVGLMVLGAEHGDTADSTERVTFERRTVRLPTITFAPGSFEDHR

SEQ ID NO: 38222 - protein, 198 aa, Mycobacterium sp. NAZ190054
MNDDDEAFPFDARRALVQLLRGPVVTHDAHRQQWSAILTHRAEIERRLADVFLDLVLDEDDGIAFTRPQPAPDDPRLAPPQVLRTETLTFMDTLVVLALRYELLVAQPGQRVIVEYDDIVAGMDPYRGRYTTDDAGFRKRINASWEKMKKYSLVSQVDTPGRFEVSPVLRQLFDADEVALVEAEYRRLLDIHAEVPDG

SEQ ID NO: 38223 - protein, 1092 aa, Mycobacterium sp. NAZ190054
MAEDLLRHGQHRLARVQLFNWGTFDGYHDLPVARRGFLITGPSGSGKSTLLDAISAVLVPPTKLSFNAAAQGRGRTVASYIRGAYARGSDAETRELRVRYLRDGATWSAVGLTMTTAGTGDDTVTTLVALFHLKRGSNDLGESGRAFLLFDHDLDITDLRHVVTDGINVRALKKRWPEALYNKSYPQFGQRLRARLGIADENAQLLLHRAMSAKGLDSLDRLFRDYMLDEPDTFAEARRAVEFFADLDEAHRRVVQTRKQIAALTPLEELTVARDRTDQEARELGEELTALDGLSARFELELAESWRGDAESAYADAVTREEQAGSRRQAAAVTLREAERARDGNRSLRELTDALDHAEERVQRVLTARRRMGEALRSWNATVPDTAEEFATVRSQITRETAELVEKSDQHDAAYGALMLASSRADDQVSDLRQQIAALAREKSNLDHKLLKARALIVATAGLPARSLPFAGELIDVTAPDWAGAAERVLGGLGRTMLVAEEHADDVAAAVDAAHLGTRLVWRRVNLSRTHRVPAVDAGSIVNVLRVAESPWQHWLHFELATRFDYQRVDDASELKRYQRAVTRAGQTRNGDRHIKDDRHRVDDRTQYVLGTNNDSKLEILRDALRKSEIAADSARKRADAARVESGNRRDRIASAPSIVAVQWDEIDLGSAEAHRLGVTEQLAALRGDAEVDRLEGAVKEAQHVADTTEAAYQDARDALHTAREHANRVEARIEELCRTAVESAAPPDALTARYRARFDDGRRATLRLDGFPAAEKAVANQIRAAHSQAEKSLMQTQHAIESVLQQYLHDWPHPELAAESGYADDAVAFLRRLRADDLPSVENRFFELNDRQSNQNLGTLAMRIRRAAGEIRRRIDEVNSSLARSEFDRGRFLKIDVRDSPHPDVTEFLAAIARVQERSLLADDRRSQEQRFERMRELLGRLGSSDPGDVAWRNRCLDTRRHVTFVGVEIDTDGIAVNHHDSSDALSGGQAQKLVFFCLAAALRYQLVGPDADLPMYGTVILDEAFDRSDPEYTRRAADVFDQFGFHLVLATPLKMIRTLQEYVGGVATVSIRDSKASRLAVASIGEADDG

SEQ ID NO: 38224 - protein, 389 aa, Mycobacterium sp. NAZ190054
MGDPPKLVLPADITEKARRVVDRNLKSWLFGGTVAPLITRLGSPTEAHVAAHRSAVEAWVRAWQSSGLDVSWEERRWPSLGRQLLPGTVTLEDVDAITSAAGATARWHRAQERCARLRSLADEPTWRDVLVRTFRRWNSMADSDFDRLLGVLQWLRQHPDSGLLIRQLPIPGVDSKWLGTHRAAVGSLAVPLGIPEHLGLRERELLRAVAILDPALRHGLPRLFAASDAELASVDLAPPLVVVVENLQTLEAMPDLPNTVAVFGWGDNVMAVAEFHWVLAARTVLYWGDLDTHGFAIMARFRANRPCDSLLMDYATLQTWRDLAVPHPATEFVDSELLTRDELAALDLLRRDGLRLEQERIPMAAAGEQLRSRLSRIDLSEGSIPRNFS

SEQ ID NO: 38225 - protein, 480 aa, Mycobacterium sp. NAZ190054
MDDNSTLSAVDLLEVNRDLQSSRAIRLLATTNLGLYATLMERHLADGVLPETELVVRLERDLDDLGDAQSGLALIKSWASQGWLHRIVDVRSDQNVCYLTQDARRALDFLRGMRRQDTIATGGSINGIASRLKQVAIRVGSDPARIRKTIEAEIAQLQQELEELDRGERPQPDVTDAYDEARAIALQMERLITDIGQYGSMIEQATAALDEPIDSNLEYRDRQRQMYADYQAAWDSQGRDSHRAFLRMINDPDQRAEFEADVAAVADALPALDPALRKVMAGFFELVGHQIDEVERIQQRCAQRVKRFTAFGTLEQSRGVARQLNEAIGAARNLLKSSLIDSRLDIELPLARHAISSVGALSFKIGDLSDPKPARPADGEVDLASFAALTTQVDAPAMSDMLNAAVTKGPVSLPEAVAMLDNAYLGHVIVLWSWALKQPNADTTTSTTVRFRSLDGKDREIAVPHLMFTEPITTLVGAAQ

SEQ ID NO: 38226 - protein, 229 aa, Mycobacterium sp. NAZ190054
MTTEHEADFEAFSQLPQVDQTARPPHQRRPRFDGDVSELPDRACWALQHLLTRRYISAETDSDIYAWVLEYRGQLATRLSELDLILRVVDGTDVAFVEQARYESAKGIKLLRREPLGTYDSILALHLAQMMRAAGGQSVLISREEMHNLFSGVLNDTDRDAVTFAGRIDAAIARLTGLEILRKSRDDEDSYTISPVITAVMTASVITELQQQFELLLNGGTPEAEVDLD

SEQ ID NO: 38227 - protein, 1120 aa, Mycobacterium sp. NAZ190054
MTEQFHLSRLQVINWGVFDGYHDIPFSEGGALIAGASGSGKSSLLDAISLGFLPFNRRNFNASGDNTAAGSSAGRRTVDKYVRGAWGQRSDGGTNRVMYLRGDGTAWSAVAVTYAGDSGRTVTGLVLKWLTGESRSDSSSRFVLGDGDFDIEDVCNRWAAGRFDTGVFKEHGWRFTTKVESQYLAQLYATIGIRASDAAQQLLGKAKSLKSVGGLEQFVREFMLDEPESLSRLPEALKQIDPLVEARELLAVAQKKRKILGDIEKIQQRYASESTDLGIIDLVDLPMVRAYTDHVRLTQCPAQIDQLDSTIDQLDNEYEDVTRSLNLAKAEADSLNAQISGSSASIGPLQSQVTAAETEAEQVSRRRNAYEDMLTAQQLDIPETADDFWNLREELLAEATELLAKVERNREASTDAEYAQKSARMARDEAAKELKRVEHVGSALPEFALVMREQICTAVGVDAAELPYIAELMDLRPDQTRWRTAVEKVLRGVGLRLMVPDQHWTKVLQFVNETNMRGRLQLHHVRAKFLGAEPVDPEQNTLAGKLFAVDPAHPCAAEAVDVVASAGDHICVDTPEVFARFRRAVTDTGLYKDSDRLAIKDDRRPLKQSEYLYQGDVSAKINALTVDLAAAEEAYQKARRTADDIAAQRQRWRDRAAACKAICEQFPQWSQIDTETADGHADRLREQYELLLADHPDIEALNARADECWSQIQKLMTRRGAIQTRRDDLDERRTRLLELQDRLKPAFVSEPLTELLNRYAAQVPVSLELLEPEPHRDALFSAIKKEREQLRESRRRSYDELARILNTFDTSFPDAIPNDSDNFDERVHDYVALCRHIDERELPEAYERMMRLVTEQAPDAILTLHRVAEQEARRISDQIDRVNTGLGAVEFNRGTRLTLRATPRTLTAVSELTEIVRAISRRIAEVGLGDKQAILDQYADILRLRNRLASTAPEDKAWTRDALDVRNRFTFDCAEWDVSTEELIRTHSNAGDNSGGEQEKLMAFCLAGALSFNLASPDSDDNRPVFAQLMLDEAFSKSDPQFAQQALQAFRKFGFQLVIVATVQNATTIQPYIDSVVMVSKTEATGRNARPVATVATRTISEFGQLRREMRATAKVPAGV

SEQ ID NO: 38228 - protein, 499 aa, Bifidobacterium bifidum
MERLRPVYETGVLRLLLRQNSMMYVALLRAAFDPLTGELPRETLEESFSQSLSRLVDSGEYQLREDQTIADASRRILADLTREGDDDYAWLANSHDAASHRFLYRLTARAHRAIEALSRLEDDSRTLSGAQANSIIMEIEHARMQLTADPGERVALLNREIKARKHEIRQIRHGQRQAALTESQVEDVIAVIHNTLRGVPIDLRELVLTERDNGDALRRRMQAGDMSVDDILTSYHDEYRRSFSESDSGRRFEDAFQVIITDEGRQQIDAALRDIAHTPYLAGESGVLLDQVRAELSRIYDGIEAVRRQMRVSDEAISRLVRQQTDTRYRTMLGKLNRLYAHINADAKAHQGDDARPYRTDTAAGRFPPLPSRPARPMVRTTTPGLSVPQTPGDATAPDLRSMIDNGGPRLRRMAALILESPVYADDGNGAIDIVASFNGLPKAERKESELVGFLGELGCGDEAGVAWHCISADGSPRDWITGPVLAQEDELHDIVKED

SEQ ID NO: 38229 - protein, 345 aa, Bifidobacterium bifidum [sequence omitted]

SEQ ID NO: 38230 - protein, 1194 aa, Bifidobacterium bifidum
MSGKDMQMIADRWMMESRRLVNWGSYEGYHEFRPSTDSQLPVTLLAGASESGKSTLVDAQISLLYPTGTPFNKASNSGRSERSDYTYLRGMIGVGGSDGVDEPMYLRGRDESGAPRSIWGAIVDTYRNFTTGQILSCGKFLYLMPGDGRGDVRRLYLAWDKPIDPRRMDVFRESSFTPTQLKSTYPGCVTFPNAEAFHTHIWDVMGLSAEACRLLARIQSADAPSRLDDIFKQGVLGVPEALDLARATVEDYERYDANFRSMEEKTRRMGKLRAITASYGDYESARDAVHSFDAVNPATKSGSATIRAWAIRRMIGEVSERQPLDRRLRDERRSEARAAGKRIESLRTRIDAVRERMRGLDGGDLTRLDAEMRQAERALADITAGRQRIGRMFEAAGEEFPKDEHAWDERRIEAVTFMRSYEQRKGLLDDMRNQTYAAHASVKQTLQRLNDDYERQKSQRTRISRQMDETRAMLCRATGLGPSELPYVAELMDVREDQEHWRLAMNAAYGSMAQTILVDKRHERGFAAKVSAIDPHAMARRTWQFVDTERGGAGNGPGGANTGATGGTDGEVWLSSKLRYREDSPFAGWLREQTSSERLDALCVDGIDDSDHAVRQVQADGQIKSGKRGQHGIKDRQQVIGFVNESYLAQLRTRIQDAQRQCDETAQSYASAKEQADRLQRERELADQLAYTAWEKIDENSAKAAIADIERTIASVRNNPKLAELDTLQESLSKELDRSQRQRIDIERQAELADQAVNAAQAWLDEHAAQPQPQTRPLDGEAADISPKAVTNGRTLLTDEVEEALAESYEQRLSGLGDATTRAHMIIGAGAPQRMAQGDTFADRVIAGIGKDLEARVSMLEGRAASARTAVEARMGAYIEMYAGGDDTIAASVDDYRYYQDELESLSKLATVEATAVEYHNCLDKLLMSFLTIKRAIDTDAGDIHDQLERINAMLDGQQFGPRHGSLSLHADVRRPERAFWSALTRVIGTLNDRKAAQTDDDLDGARCAFASCAAMIDMLRREIGQIRDVNGVKSYGARNLDPRCRSSFYALVRHSDGQVERITSTGGRSGGALQELTSFVYGAALIYLLGGGMDNKLKPSYTTLFLDEALIKADGRYTRRALSVLPRLGFQVIVSAPESKTGEILEVSTKAYVTRKDPDTGYTTLHEARLDGIDETEGADEPEGTVESDDAAE

SEQ ID NO: 38231 - protein, 539 aa, Bifidobacterium longum
MRELERLRPVYETGVLRLLLRQNAMLYVSLLRSTFDPLTGELPRETVEERFAQSLNALADAGEYAPREDQTFAEAAHQILADLTREGEGDYAWLANSHDAASHRFLYRLTARAHRAIEALSRLEDESRALSGAQANSIIMEIEHARMQLTADPGERIKLLNREIKERKHEIKRIQQGKQHATLSEAQVEDVIAVIHNTLRGVPIDLRELVLDERDNGDALRRRMQAGDISVDENLTRYHDEYRRSFRESDSGRRFEDAFQVIITDEGRQQIDEALRAIAKTPYLAGESGVLLGQIRDELARIYDGIEAVRRQMRVSDEAISRLVRQQTDTRYRTMLTRLNRLYARLNADAKTHMGDASRPYDTATSDALFAPLPMRPAKSMTRATAPGLSDLAAEAPQSTPVADLRDMVNSGGPRLLRMVSLIRRNPVTVDRSDDRPGATLVDIAASFNRLPESERRESEIVGFLGGLGAVSGNAIADEPSTDGVGVGLDSDIATEPAPAQRGDTATWHCVSIDGEPRNWITRPVLADMDELSIIVEEG

SEQ ID NO: 38232 - protein, 224 aa, Bifidobacterium longum; identical to SEQ ID NO: 31043

SEQ ID NO: 38233 - protein, 1182 aa, Bifidobacterium longum
MMQATDVQMIADRWMLESRRLINWGSYEGYHEFRPSTDHKLPVTLLAGASESGKSTLVDAQISLLYPTGTPFNKASNSGRSERSDYTYLRGMVGVGSTETGDEPLYLRGRDENGAPQPVWGAIVDTYRNQTTGQVLSCAKFLYLMPGDGRGDVRRQYVVWGKPVDPRRMDQYRDAPFTPAQLKATYPDCLTFPSAEAFHTHIWSAMGLSEAACRLLHKIQSADAPSRLDDIFKQGVLGVPEALDLARTTVEDYERYDENFHAMDEKTRRMDTLRGIQQAYGEYAAARGKARAFEPVKPAVDGTVPAVLRDWALARMRGEVAVQLPADRAEQQNSEAEAKLLRRRTEDLHTRLDMIRGQMQGLDGGDLTRLELELDQARRTLEDVQANRTRIEQTFASIGETLPGDEQAWNERRINAVNFKREYNKRDGECEEALTAAINARAGARGDLERLQRDFDRQRSQRTRISQQMDETRAMLCRATGLTPAELPYVAELMDVNEHEEDWRLAMNVAYAPIAQTILVDKRHEQGFAAKVSTIDPRTMPRRTWQFVDTARHYDDTGAHANILTGEQDGDWLSGKLRYRDDSPFADWLRSQTQDERFDALCVTAIDDTDRTNRQVQADGQIKSGARGQHGTKDRAQVIGFVNETYLNALAAQVDAARNALSQADTDYTAAKTQSDNLHRELELANQLAYTSWERIDIAGAQRTITDTQDAIASIKNDPKLAELAKQRDELNAELDRVERQRIESDQAAARAGSAVEAALIWLRDHADTGTTDAAGATADNDDDAASGPLPDEVTAALAESYDNRFAGLADAAMRAHMIIGAGAAGTQAPGESFPERTIAGIGKDMASRINLLNGQADAARTGVESKMSTYIALYAADDDSLTASVEDYRYYLDELASLTQLAAVAATDAEYRRCLEQLLRSFLTIKRAIDTDASDIHDQLDRINAMLKGQQFGPKHGSLSLHADVRRPERTFWAQLIRVIGTLNDWKSADVNDSDASRKAFAACAPMVGLLRAELAQVKDANGVKSYGARNLDPRCRSSFYAIVHHADGPDERITSTGGRSGGALQELTSFVYGAALIYLLGGGLTSEPSYTTLFLDEALIKADGRYTQRALTVLPRLGFQVIVSAPESKTGEILEVSTKAYVTYKDPDTGLTSLREAVLHQNDMDDESSSDILKDDGVAE

SEQ ID NO: 38234 - protein, 397 aa, Bifidobacterium longum
MGTMAGMKDIAAITTCVKKHMRSHMYDIEPAWPFPVPVGLPDQAFLETNAIAVHDNNNEIRQWASKNGCEIITKHRTIGTSVELISKVVVPDESIAMRVVGRTLAAECREARRRIACLVAACDVAPETIESAARMTGHEQPDDFDLLVSAVRYFRHHDVTGMTPRQIPLTGFSGKWLNESKTNRRKAICRLLGVETLGLSKRPTELRFRYLDPVRDDAELERIIWCPWEGEALSGIKYAVIVENKDTYQTMPPIAQGICIWGSGRAVSDAVPAVPALRDMRIVYWGDMDADGLEILSTLRESGIECDSILMDCDAYDRYHRFGTDRTERSAKIAMREPKPTPGLQSAERRLYERLCADKTIAYRRIEQERIPMRDAVDELRKLGIPVESIENQDLPI

SEQ ID NO: 38235 - protein, 477 aa, Klebsiella pneumoniae
MEENTRQRTENYISAKNQHPAWILLASRRAPLVLSCLKTLFEKAHDGIPLEDAIQSLSGILIEHVSQEQYDINQDNPSLQASRELREWIKRRLIVERDGRIFATDALEVAITFVESLDNRFMTSTASRLSTVQREIENLETRLNPNPANRVATLRRRIAELERELQEAEAGHIEVLETHQAVEHIREVFNLASSLRADFRRVEDSWREADRALRQSIIGEQYHRGDIVERLLNDQDALLNTPEGRVFDSFQQQLRQSVELTAMSERLRVILSHPSASNALNRLQRHDLRWLVKRLVDESQTVLQARARSERDVRGFMKTGLAAEHHRVGHLLNEFLNLALKLDWQRQMIRKQEVPLPAVGVAVTGVPAIERLRFKEVDDEAEQTLDLSNHAADLTQIGDDFWDAFNGLDREALIQQTLQLLAKENRPVGLAELAALLPPAHDLETFAVWIGMAREAGIEVIDSQREFTELSDGEGRR

SEQ ID NO: 38236 - protein, 249 aa, Klebsiella pneumoniae
MAGFFDKLINRSVAANAGSEPETSDEEITDELVEDSAASGETRTLKKIREAIQELLKYGLLEEASKPNLYRVVLTHPEEVTRILEPLDLDIGIDEIRGLLYVKVRLDETPEQDEWSHPLVRRQRLNLEQSLLVAILRQHFVAWEQESGTGASQAQIAIDDLLPQLQIYLGDPGSESKERTRLLTLLDQLKGHGLVTSPDAHERIVIRPIIAHLADPMNLQALLAWLREQITQQTSPDDSSAKESSEEDV

SEQ ID NO: 38237 - protein, 891 aa, Klebsiella pneumoniae
MNQIARLAGKESFILTRIELFNWGGFHGLHQAAIHQEGTAVIGPTGSGKTTLVDALMTLLCANPRYNLASTGGHESDRDLISYVRGVSGPGDGGEGQSHIARPGKTVTGIAATLEREGQQVRLGALLWFDSTSSSAADLKKLWVFSDNPTQTLDHWLNIWHDGGARSLKQMEKETTGIWIWLNNKKQYLARLRDFFEVGENAFTLLNRAAGLKQLNSIDEIFRELVLDDHSAFDRATEVANSFDGLTEIHQELETARKQQQSLQPVALSWDKYQKQEQQLADRKALESLLPIWFAQQASQLWREKVSHIEVELGESQTREEQIQSQLELQKKVVTDCLQRYLQVGGANIDELNERIKDWQKTLGSRETLAHQYQQLTRNLGLPPDLSQPQLEANQHEAEARCEQFADDIKLKQEEVYQKGVLSHRMTEELRERETERAEIARRPDSNLPAHYQAFRSELAEALNVDESELPFVAELIQVKPEEAQWRGAIERAVGSNRLRILVAPESAQEALRWVNQRNNRLHVRLLEVKLPHSPARFFDDGFTRKLLWKDHPWREAVKALLAENDRHCVDSPEQLRDTPHAMTVQGLMSGKQRFYDKQDQKRLDEDWLTGFDNRDRLNFLAKEIAALQEQVKTANAAFEFAKGEVGFLQNQAISFQKIQQIDYDSIDVPGAKSQLDALRERLENLIRPDSDASVAKAKLDEAQTVESELDKQLRAANKVTNGLDTELTSARAAERKAQQTAQQGMQDEERELCASHFPVVALVQLPDIRDLERQHERGIQQEIEGIKGELHRLNIELTKRMSEAKRVDTGALVEAGADLDDIPVYLQRLQELTEEALPEKLNRFLDYLNRSSDDGVTQLLSHIDHEVLVIEARLSELNETMFRVDFQPDR

SEQ ID NO: 38238 - protein, 466 aa, Pseudomonas aeruginosa
MGCLRTLFERAHDGIPMEDALQALSEMLAAYASQELYEIDPDATHLQAGRELREWIKRRLVVEREGRIYATDALESAIQFVDSLDSRIMTSTASRLSVVQREIENLETGLNPSPTGRIASLRRRIQDLEHELARVETGHVVVLDEAQAIEGIREVYNLATSLRADFRRVEDSWREADRALRHSIISEQSHRGEIVDRLLDGQDALLNTPEGRVFESFQQQLRQSAELETMRERLRTILRHPAVPKALNRPQQRELRWLALRLVRESQAVLQARARSERDVRGFMKTGLAAEHHRVGQLLNDFFNLALSVDWQRQSERRKPACLPPVGVAITGIPAIERLRFKTLDDDDTGELDLSLKPAGLEQIDDDFWDAFDGLDREALIQDTLAVLAEQGRPVSLGELASLLPPAHDLETFALWLAMAREAGIEVLTEERQLVELVDEDEQRWRFNLPYVGLDHEALKDIDWEL

SEQ ID NO: 38239 - protein, 213 aa, Pseudomonas aeruginosa
MSAAVQVDERRTPQRVREAVQEMLKYGLLEESYKPNLYRSALANIEAVDTILEPLDLAMGVDEVRGLVFVTVRQGEVAEQDDWSHPLVRRQRLNLEQSLLIAILRQHFIAYEQESGTGATQALVAVDELIPQLQVYLGELGSEAKERNRVITLLDQLKGHGLVSALDAHDRVIIRPIITHLANPENLQALVVWLREQVEGATTPAAAAEEDKA

SEQ ID NO: 38240 - protein, 1101 aa, Pseudomonas aeruginosa
MKQALLWRDSETFILSSIELYNWGGFQGYHRAEIDPSGTAVIGPTGSGKTTLVDALMTLLCANPRYNLASTGGHESDRDLASYVRGVTGPGDGGVEQSHIARQGKTVTAIAATLERDGTQVRLGAVLWFEGTSSSASDLKKLWLLSESTEQTLEHWLSQHHAGGMRALRQMEKDGTGIWPYPSKKAFLARLRDYFEVGENAFTLLNRAAGLKQLNSIDEIFRELVLDDRSAFGRAAEVASSFDDLTDIHRELETARKQQRSLQPVAEGWERYRALQEQLQDKQALEGILPVWFAEQGYRLWLAETNRLETEHKQAELDQEQCRSQLEIQKGVVDQHRQSYLRVGGAGIDQLRGRIADWVRECDKRRLKAEQYQRLAKGLGLADELSAAALKENQQQIAARLEILTQQITDARQKAFDAGLVQQELNGRLQRLQQDRAEVERRPGSNLPGHFHAFRGELAQMLGVDESALPFVAELVQVKPEELAWRGAIERAIGSHRLRILVPQGASEAALRWVNQRHNRLHVRLLEVKEPSSRPVFFDDGYTRKLTFKEHPYREAVKALLADNDRHCVESTEQLRHTPHAMTAQGLMSGKERFFDKQDQKRLDEDWLTGFDNRDRLAFLTEQIREVNEQLAPAKLALDAAQGDVRKLEDQASLLQRVEELQFEEIDLPGAERQLESLRAQLDTLTRPDSDLALIKAELDEAEALLDSLDRQRQQLIEQCGQLKLQFEQAASATRKAYRGAEKGLNDTQRELAQTHFPTLTADDLGDIVELERQHTRELQGQLKALGDKLGDQKTELAKRMSDALKVDTGALAEVGRELVDVPRYLERLRVLTEEALPEKLKRFLEYLNRSSDDGVTQLLSYIDHEVSMIEERLDDLNSTMQRVDFQPGRYLRLVAKKVIHESLRTLQQAQRQLNSARFIDDEGESHYKALQALVGLLKDACEHSRNQGAKALLDPRFRLEFAVSVIDRESRSVIETRTGSQGGSGGEKEIIASYVLTASLSYALCPDGSSRPLFGTIVLDEAFSRSSHAVAGRIIAALREFGLHAVFITPNKEMRLLRHHTRSAVVVHRRGVESSLVSLSWEALDEHHQQRIKAMHEVAH

SEQ ID NO: 38241 - protein, 235 aa, Pseudomonas aeruginosa
MSLGCARGRPLRLLAEHGVDTKFFERNASLLTRLLDERFEGAASEQGLTTFLDAFEESSHWVLVVPLQPELLPFKRLRLTTAELAETPLPGSRLLVVENEQCVHLLPETLPDTLAVLGAGLDLQWLASAHLAGKQIAYWGDMDTWGLLMLARARLHQPAVEALLMEQELFEQHSPGNAVVEPAKARESAPPGLLADEADFYRYLLVQERGRLEQEYLPKVQVERAIEQWARAVPV

SEQ ID NO: 38242 - protein, 509 aa, Bradyrhizobium diazoefficiens
MTLFRHLHDDAFLAFSRDHKHLYAACLPDLHERFFSGAPSFPTPQQVVHAIYDVMRANPVLWNEGDDFGSLPEMISARRRRIRKADVALASEKGDKALGLARQLYARLLVWGWLEEEEYGLRVTVDMAMGPLLVLQRLASLNKDLSQRFGGLIVQIRLNLEAVEKLRPEITDRKQREAALAVREARNQADQFTKSLRAILADLKRVRRTVMESKTVATRLEAFFEEFIEQLLLKDFESILTVNHPYRFRDAIVDLARRISYSPETMQVLAEEYIASSMAADIEDGRMAAADDLLAIESIFDQIGEMFDRIEAFRRQLEARVRNTIKYAERGGQGLVGRAGDLVRRLDALLRDGRHHKATIEWSIEPLRSPWSEHHQAPARQPRRPVEARELAEPPSDPLYELRKKLRLEYIARIAPRPEDVRRFLEGQVPPFATREARFMEIDTVDDFLAFDCARRYALTGEVPAQVAAGFELEPCPDTPPHDSEWLRCANFLVKRSGALRKARAAHAQ

SEQ ID NO: 38243 - protein, 212 aa, Bradyrhizobium diazoefficiens; identical to SEQ ID NO: 30452

SEQ ID NO: 38244 - protein, 1030 aa, Bradyrhizobium diazoefficiens
MALEARKSDSRETVLALFVAVGTVLSSKDFIEQRGKSQFPAQWEDVRARIVAAVGEGNFVNHRDRASDYVREYMRHLLPHSSFGEQNASALQKSIVNAMTLDHNQTATQFVRNYILEDSPIGIKELRESIQTYRNISETIRKMRLRLEALRALRGVLAALEEALETKFREEWVAKRATWLAARATNLDFKTKRRTEMARRDAAAKELEFIDDDVKAIDKEIERLTAAIAEHDAKTGRKSLQQTADVAGQAAHRASADFKARMENIRRLEPLRAMCADGFEDFVPALERLLTATAGADIGGVSDEVTAAEKSFAASGAKWLPKIDEARQRIIAELSGLRGRRDEVLERIRQHAAGGARAYLGDDTELLCRRLRQGGMVPRVLCDIIEVAEPEWVGAAEALLGRDREAVFVDRADISAATSIFKEGRREFRHASLVSLNKLEQFRAKPERGTFPSIFRSQDPDAMAFIMRRYGNVRLADTLDQFNRPGRAIMKDGLYDDGLVRSHRWIESSQYKIGKAAQANALRSLQDQAEELGRILIDKGKEAHAAEQAFAALKNICEGRNDLGACAAAFAAAQTEVAEAQARLDALDGAGDGGLRDKKRAQQKLKEKRLEERKAQQKAFGEHDGEVRSAERRLGEGENVPGSELNLRVARSIYRKFFPLYSTAKGRAVYRDRLDAAAQKGFAEKHRAIAEKALKDANVSDNERARIERRVRELLYDYFDQFGMSSQVGAESEPLREVKPWMERLISDIESNELRQYERQARDAAEKASTLLRGEFINALTARIGKMERELQSLNRSLYAHPFHNERYSFHRTQMVEFQPILKIIEIAKTSPEALDILFRGDVPDDFPHKDTIVALEALLEDPDKDFTQFEDYRNFYTFEIHMEDVATGRSTRWEQRRGTGSGAEQQVPIYVAIGASLAAVYGSAERRAGKPAGFALAMFDEAFSKMDGKNQRQMMSFYKNLGLQFVIAAPFEKRVAVLEHMDTIVEVDRIGEQSRATVVELKEKAKRELMAIDPDLMSEDELATRLAAE

SEQ ID NO: 38245 - protein, 212 aa, Bradyrhizobium diazoefficiens
MARRFTDAIGLLNDLLNRFEAGAASPIAHPDYPAFPSVVAADAFLKQIREAESAGAVSLGWGRGPMRDQVAHVRLASAEILYRYLRRTPASRIAEDAAVRLVAGAAMHDSLKNSASQVAEVWGRGKTWHGFASSDVETLRDAFVLAQAILANKHLGVDYKTFSRRTVGHSKTLERIEGAVVRLLSGILEFPPARGHARRSGQSALSASRHRC

SEQ ID NO: 38246 - protein, 510 aa, Xylella fastidiosa; identical to SEQ ID NO: 34084

SEQ ID NO: 38247 - protein, 234 aa, Xylella fastidiosa; identical to SEQ ID NO: 34085

SEQ ID NO: 38248 - protein, 1144 aa, Xylella fastidiosa; identical to SEQ ID NO: 34086

SEQ ID NO: 38249 - protein, 405 aa, Xylella fastidiosa; identical to SEQ ID NO: 34087

SEQ ID NO: 38250 - protein, 234 aa, Xylella fastidiosa; identical to SEQ ID NO: 33079

SEQ ID NO: 38251 - protein, 1143 aa, Xylella fastidiosa
MRETSTLGLNFVADDKRVGFRLQHLEVVNWGTFNTRVWCYTLDGRSGLLTGDIGSGKSTLIDAITTLLVPAQRVAYNKAAGADARERSLRSYVLGYYKSERNDATGTAKPVALRGTSDYSIILGVFHNVGYDKVITLAQVFWLKDSQSQPARLFVVAERALGIAADFNNLGGDIKTLRKKLRGAGCEVFDSFPPYGAWFRRRFGIQHEQALELFHQTVSMKSVGNLTDFVCSHMLEPCDMGSRIEALICHFDDLDRAHHAVLTAKQQVKLLLPLVDDGQKHQTQLGNIQTLEAGRDTLRPYFAQLKGELLKHRLDALAAEAAQLAVEIQRLEEQRKTADSEVTQLQQDLRDNGGDRLETLATEIEQLEQAKAQRHKKSDRYQTLLANIGETAPADAIGFLTQQQRFAQRTEELNAAIATLHNDKSEKDFALRNARKDHTTLLAEINSLQQRQSNISAAQIRIRHDLCVALSIDAEALPFAGELIQMREDARDWEGAAERLLHGFGLTLLVPDAYYKAVATWVNHKQLDGRLVYFHMRPRNTTQEAALHAQALVHKLIIKPESPHYTWLQQELQRRCNVVCCDTIEQFHREVRAITQAGQIKDPSGRHEKDDRHRIDDRSRYVLGWSNADKLHTLNAQRQHLEDSMGMLGQDIGTIQRECQKQQERLDALNKLGEYPEFADIDWMSLVRQIAGRKKEQEQLQATSNILQTLQQQLTAAQTQVSVLERKCKNAWHEQGEVKSQQKTAQQMWNQARSVWDDAPLSQAQITLLAGWRQQALGEHVLSVESCDNHEQQVRQWLQKRIDAENAHLRQLNDRITGAMHRFKNQFKAETVEMDADLAALPEYARMLNDLQKDDLPRFEARFKALLNVNTINEIASFNAQLNRERETITERIKDINQSLHGIDYNQDRYINQSLHGIDSQKGRYITLLAQPSPDAEIRDFQQDLRACTEGTLTGSDDEQYSDAKFLQVKRIIDRFRGREGLSDADRRWTAKVTDVRNWFVFSASERWRADESEYEHYADSGGKSGGQKEKLAYTVLAASLAYQFGLKWDEVRSESFRFVIIDEAFGRGSDESAEYGLRLFQKLNLQLLIVTPLQKIHIIEPFVSSVGFVHNKGGCDSQLRCLSIEEYQTEKANGSAAGGAAR

SEQ ID NO: 38252 - protein, 401 aa, Xylella fastidiosa; identical to SEQ ID NO: 30398

SEQ ID NO: 38253 - protein, 510 aa, Xylella fastidiosa; identical to SEQ ID NO: 34084

SEQ ID NO: 38254 - protein, 234 aa, Xylella fastidiosa; identical to SEQ ID NO: 34085

SEQ ID NO: 38255 - protein, 1144 aa, Xylella fastidiosa; identical to SEQ ID NO: 34086

SEQ ID NO: 38256 - protein, 405 aa, Xylella fastidiosa; identical to SEQ ID NO: 34087

SEQ ID NO: 38257 - protein, 234 aa, Xylella fastidiosa; identical to SEQ ID NO: 33079

SEQ ID NO: 38258 - protein, 1143 aa, Xylella fastidiosa; identical to SEQ ID NO: 38251

SEQ ID NO: 38259 - protein, 401 aa, Xylella fastidiosa; identical to SEQ ID NO: 30398

SEQ ID NO: 38260 - protein, 510 aa, Xylella fastidiosa; identical to SEQ ID NO: 33085

SEQ ID NO: 38261 - protein, 240 aa, Xylella fastidiosa; identical to SEQ ID NO: 33086

SEQ ID NO: 38262 - protein, 1144 aa, Xylella fastidiosa; identical to SEQ ID NO: 33087

SEQ ID NO: 38263 - protein, 401 aa, Xylella fastidiosa; identical to SEQ ID NO: 33088

SEQ ID NO: 38264 - protein, 510 aa, Xylella fastidiosa; identical to SEQ ID NO: 34084

SEQ ID NO: 38265 - protein, 234 aa, Xylella fastidiosa; identical to SEQ ID NO: 34085

SEQ ID NO: 38266 - protein, 1144 aa, Xylella fastidiosa; identical to SEQ ID NO: 34086

SEQ ID NO: 38267 - protein, 405 aa, Xylella fastidiosa; identical to SEQ ID NO: 34087

SEQ ID NO: 38268 - protein, 485 aa, Arthrobacter sp. Hiyo8
MSRSAMSSADAISARLRDLELLTKGPAWALTRSAPWVIAVLQASFTRTKPQLPLEEFHADVDAFLEQLRRQDPGLGGQGSGKAFADEWTRKQFLTRRSQSGQIVYEITEAAARVLAFLDSLSSERSTLNGSRLGTLLGDVEKLANETNPDQSARLESLEEEIQERQQLIEDISSGDFDGLLDDEEAVEAAGNILDLAASLPADYKKMRDRIEELVGELRNQIIEESLSKGATMAQVLEADKRLRQSPEGRTFRSFTAFLEDPQQQLRFRSAIGDVLSRQFADDLSHEDRETLKNLVAELRTQHSQIQRIYGRLSESLNNYIQSDDIRQSVRLRQVLREAEQAIRSMPYERDRPGLVRGPVLFNAGFESLAMVKLFDPDEFAAPPKLADPIAFSDSDRVRSLRSAKARPDVVRSAMAGAATLAEAWANLPEGERHINTVRALLSEALHGGAAFDRAAWENIDFEQIDGSTRTAYLPLVTLTKDSDD

SEQ ID NO: 38269 - protein, 231 aa, Arthrobacter sp. Hiyo8
MTDAHPTEHAPSSEQRVDIAQHVHSDPFRVTPRDTFVDGAALFPGDTGVLPMKVRQALVRLLKGPYVDGGRDEKLWTTLLDNQVILRSRLSELFLNLQLDHERKIAVLRPVDPEAIGGSTRSSILRQQRALSRVETIVLLRLRLLLDRHVTAQTEPVITREEIAELVAHYQPSGQQDALRDTDVVNRTITKLLARQLLLPTGIEDTFAISKALPWRSPSKTSATSRPKSRH

SEQ ID NO: 38270 - protein, 121 aa, Arthrobacter sp. Hiyo8
MTIATMLPIGELTNPGQMRLALVQVVNWGTFHGAHTMHVDRNGTLLTGNSGVGKSTLFDAMLRVFDARPRSNEAAAQRAGGAVEDKRTTFTYMRGKVGDKAVGEGSASAFQRPVPRGPPSR

SEQ ID NO: 38271 - protein, 484 aa, Dechloromonas denitrificans
MTLDFATLDTLRTHHPAWRLLRSDHAPLVASFLHRVFVLPNVRVMAAADLAEALEDELYALRLHLGEAAFPKPALDYLNDWAAPDKGWLRKFYRPGTDEAQFDLTPATEKAIAWLAQLAERQFIGTESRLLTLFDLLKQMSEGSEADPAKRIAELHKKRDDIDAEIMRVLSGDVPLLDDTALKDRFQQFMQGARELLTDFREVEHNFRQLDRRVRERIALWEGSKGALLEDIMGERDAIADSDQGKSFRAFWDFLLSSRRQEELTELLDRVLGLPAVTDLKPDSRTRRVHYDWMEAGEHTQRTVAALSQQLRRFLDDRAWLENRRIMNILHGIESKVLALRDAQPTGNVMEMAEACAAIELAMERPLFTPAIKPVIADLALQAGDEDIDPSALFDQVVVDKARLTRHIRHALQDRAQITLGELVSSQPLQQGLAELVAYLQLGSETFSTVVDEDTPEPIRWPTVAADGQAITRSARLPRVIFMR

SEQ ID NO: 38272 - protein, 225 aa, Dechloromonas denitrificans
MEEEFSNTTPAAHLMVTPAADLSVLLISLLKSVLYRDGDERQWAALLNLQARVRDYVAVLNLDLVLDEAEGYAFLKSRPEPADDDPAPRLPRLVARRPLSFAVSLLLALLRKKLAEFDAGGGDTRLVLSRDNIVELVRVFLPDGPNEAKLIDQIETTINKVAELGFLQKLKPAGGASAGLATYEVRRILKAFIDAQWLAEFDTRLATYQSQLAGVTNAKEGAGHE

SEQ ID NO: 38273 - protein, 1130 aa, Dechloromonas denitrificans
MNDPQSLGLDFCADDTLSGFRLTRLEAFNWGTFDSRVWTLQLDGKNGLLTGDIGSGKSTLVDAITTLLVPANRIAYNKAAGADSKERTLRSYVLGHYKSERNDVTGAAKPVSLRDQNSYSVILGVFHNAGYDQTVTLAQVFWMKEVQGQPARFFLGAERGLSIASDFAHFGSDIAQLRKKLRGVGAELHDSFPPYAAWFRRRFGIENDQALELFHQTVSMKSVGNLTDFVRSHMLEPFEVGPRLQALIGHFDDLNRAHQAVLKTQQQVELLTPLIADCGRHRALVAEIESLRGCRENLRPHFAGLKLGLIDKRLGLLAEEWERVDAQVQKLDAVHEEQRQQVDELKQAINDNGGDRLERLAAEIHKKEQLRDVRKTKAGRYGELATVLGESVAADASTFAAQRGKYQSWRDEARNCDADLQNALTEHGVTLRQGRQEHDQQTAEIDSLKRRRSNIDDQQIQIRAAMCAALELNVDDMPFAGELIQVRDDERDWEGAAERLLRGFGLALLVPDAHYKAVAEWVDGAHLRGRLVYFHVRPRKAAELPDLHRDSLVRKLAIKPDSPHYDWLERELAHRFDVACCATQEQFRRETRAITRAGQIKDPSGRHEKDDRHRIDDRSRYVLGWSNSAKIAALESKRCQLETRLGELGSQIGKVQKERDGLTSRLDALTRLEEFTAFDELDWASVATEIAQLTDERSRLESASDVLKQLNENLRALQKAQKETGSELQSAREKRAKVEQRQADALELRQQTETLLQGAVVDDGLASTLESMRAEALGEHQLSVESCDNREQEVRKWLQDKIDAEQKRLERLAEKIIKAMASFKEAFKLETAEMDASLEAAFEYENLLTQLNRDDLPRFVERFKELLNVNTINEIANFNAQLARERETIKERIAHINKSLGEIDYNPGRYIVLESQISPDAEIRDFQQELRACTEGAVTGSDDTQYSEAKFLQVKAIIDRFRGREGLSEQDRRWTTKVTDVRNWFLFAASERWREDNSEHEHYSDSGGKSGGQKEKLAYTILAASLAYQFGLEWGAVRSRSFRFVVIDEAFGRGSDESAQYGLKLFRQLNLQLLIVTPLQKIHIIEPYVSSVGFVHNEGGRASKLRNLSIEEYRAQKALMPTQAAQELAQ

SEQ ID NO: 38274 - protein, 403 aa, Dechloromonas denitrificans
MTWTGSKELKAQLMRWWERGEFLRDVVTGNSRFPVRLSLKSPSSADITDRFNAVRTWASELAAMDSVRVEWQEVRHRVQGTQKLPTSVWIETIDDALTWLGKRRDWDRFLAQVSATRKTHPALLAWLEKRPLQALELSAEWPRLLAVVTWLVEHQRPGIYLRQVDLPGVHSKFIEAHRSILAELLDLALPVDAVDISKTGISQFAARYGFLEKPTRIRFRVLDPAIRAVPGSACPDVTLNADSFSRLELAVKRIFITENETNFLAFPPVRDALVIFGAGYGWDALARSHWMKNCSILYWGDIDTHGFGILDQLRGYFGHVDSFLMDRATLDAHAAVWGDEGKPLLADLHRLTPEERALYDDLRDNRIRTGLRLEQEHIGFHWLAHRLQQLLDGSTGLNSVTLP

SEQ ID NO: 38275 - protein, 468 aa, Lachnoanaerobaculum saburreum
MNIFDEIDENLFRPLTGTNKRKYADILALIWDKCKRMPMYSIEKSTVFDMAEEYLLGLGESVELDIEEQEEISGNISDMRVVAGTLIRRLRDTGWILEKPGEYEDEDKLALQYKVVPILKSFKEVVSPTIVTYKGKLFKIYSMFEHISEQGSPYEGVLKEASEDFDNLNQALRTLSASIEDHINELTMGKSPQEILEFFEKYEEKIVVGSYHRFKTNDNLFYYRSSLYESLDKCEDSLFDALVLDCMDTERVEKDEAEVKIRELITKVRMDIEEMEGLMRAIDDRHIIYRTRAVQRAQFLLLSDGSSKSKINNILRFYASTIDSKEDGYKDDDTVGSEIFQIFCQNFFDSNSIATPVKKRKPTPIELMSIFEEPDMELVEEKNKKMMEYIKNALTSENVNRFARDILAGNHAVQISSVFEKDPDTFTKIIGLYTYSKTSEREYDIRLKDNVVEINGVRFKDFIVEERR

SEQ ID NO: 38276 - protein, 191 aa, Lachnoanaerobaculum saburreum
MAVDIKEEIANYLLNNCFLMGTVDTTREKYYYVINHEESFRQIFLPIGYTLVVHRNLRVIQLINNHGSGRVILKKYESIILLILRLLYVEKRESLSTSEDRVFATVEEIKNEYEKLNLPRKFDRVLLEESLRNIKRYNLLKVEDRLSDMDAKIRIYPSVMLAMPDVNINKAYEETAKLLAQYENSEDGDEE

SEQ ID NO: 38277 - protein, 1109 aa, Lachnoanaerobaculum saburreum
MIRMTRLHLINWHNFQDDIIDFKNITYLLGVNAVGKTTIMDAVRYCLTTNKDFNTAGNKKSGRTLLGSVHQKQRAEDSYLRPGHTVSYIGIEFLDEAIKKNFVIIARIESETPKQDLKGVYQDWYITKPGFVLENIPFFTKKNDAKRPTSRDAFKLENKGMDRASNQSDAKIRICRVLGIGEANSPIGKKFNEVFHMGTGLDDIKDIREFIYTYILPEPEVNIEFLQKDMLELERLQEILQEASDREELLKEINERIKSAKELLGKVKINESLVAYANLHGNIEETNEKKYLIEEWNKSLEMLDKRLLELSESENKASALLYEAQRAAEENVENKEMLSLESENKNNKLENEKLILEAGIFEDVLQKLFLLVDRLNKVGFYVKVADSIKDENAETDDRISEIKNSAKLFADIEEEIKNRDAKIRNDIAELNEKSDVLSKKIKSLEAGVMCYPDEAIFVRDKINSFLSEQSKRADAKLLCELLYMTDNSWQDAVESYLNTQRFNIIVEPENYLAAKKVFVSLGDKVKGIGLIDTRKIKEPEYKSLNESYLGDKIDSENIYAKSYARYVMKNVICCESSDDLENFSKSVTRDRLRFQNFCLQRMAKKEHFIGVDAIAKQLKSAKEEFAGVKKELTKLEEEKKNFDSIYNGYTKFRAGDNFGKLENYCESKSKSKALSAKIEDIAKKIEEFKKNPILLAMYDRVKECKKNLNAVRDEITDNKAKKQNLNSDINGAKNLLEELEANLSNLQAIYEKSVEEYPEFINDVEKKYQNERKSKKASVIAYNFSNRVIQDNIAFNNYLNQELIPLQQRYMATYTCDYATGLGGANRYMQEFLTLQNIELERHKSELVNAQIRCKDRFRKEVLFRMKDDILRARQQFKQINRVMENLEYGEESYRFGIDKSKDRELGMFYDIIMDKDNMQIDRDNEMLMLIAESNKSEIFESQIDDFMQRIMIDVEEHARQNLSGQKSGAKSMGMYVDYRTYLDYDIIVKNCVTGNEVGLSKVNAEGSGGENQAPFYVAICASLLQIYEKSKEGSIRLILLDEAFNNMTSDRIEPMMNMFKKLNLQLVLIATAEKATAILPYCDITYSIVKSGNRNAIGVFERIEDGLH

SEQ ID NO: 38278 - protein, 401 aa, Lachnoanaerobaculum saburreum
MDYIKDILNRLIDMYERREGFKKEPSSLRVIQADIKKIYPEYADRYNHNVYKDINTAIEKLINENLIESKADETGKYEKVKLNVENISECYKRVKRIDIPKQCEKIKDVLDLFKDKNMPVLCGIVSDWSNLVSNYKKLPYDIKYDKERLFNILKILEAILELGRESYIRNFSTAMFKDSKRFQREFKSTVESILFDYTDEVVEKDKILEYYNLYENTTYVYIKGDIVIKFEDSVIHVREINGGIALSNSSLEKIVEIKVIAKSVITVENLTTYHDEDEKDSVYIYLGGYHNRSKQVILKKIYDENKHCEYLHEGDIDVYGFLILENLREKTEIPFKPLNMGVDTLKRFYDAKIYKELTASDINMIEKKKGKLGEYRQVLEFMLLHNCKVEQESIRAVEILN

SEQ ID NO: 38279 - protein, 472 aa, Selenomonas sp. oral taxon 136
MELFDVLPERFFGLLAGKCRRIYAEAGLCLYEQYRLAQFGIEQEILRDKFQELIESWAEAGVAYEDDVFSEKDNAIEESRAKANHMIRRMKEFGWLDYEQRENFKIFILLPHYSSRLWGLFANLCEGRAVEYQRFAFTTYQVLSGDGAKVQPSMAVLEAERLAEEFVEELRILLNNIKSKMEQVSSQTSLQDVLSHHFVEYRADIVDRSYHRLKTSDHVSRYRIRILHEVQDIRQNTERFRSLCDDAVRRLLADSMDAAEYRMKASLQAIEEIYRGLDDMFAQIDRRHNQYVRASYERALYLQQEGSARTESMIAGILMAVAEARDQRWDIDELPCIFRLQTTNMLLPSSRYVPRKKRVLRPNTDTPVRSVYETLRERVRRESAERVARSISRQKIETWILNVLGQRSSMEIGELLALLRETESPDLLQLLYVYLYGYDDWAKYRLGKNKEIEEQDTVRYSNRTVRRKGKIK

SEQ ID NO: 38280 - protein, 199 aa, Selenomonas sp. oral taxon 136
MRLELLNEEERTRIRSVIQALLSCNFLTREHDTALYIAARRYREEIAEYFQVIGWEFRVDERYEIVWLLSTGMAHRRALTMEESIWLLVLRLIYEEKRTSLNLSAFPMTTLAEIRAKYLALHLPDLKKTAIQRLTQLTKQYRLADVLDRDLSEESRIRLFHTLALAVDGEELSDLYNRLYIYRQRKEEDNEDAAENEGD

SEQ ID NO: 38281 - protein, 1106 aa, Selenomonas sp. oral taxon 136
MKTLRKMKVINWHYFDEEEIAFGAATMLSGHSGAGKSTLLDALQYLFIGSQTQTRFNAAVTQEARRTLLHYLRGKIKAEGVQYLRADEFTSYIALEFYDDVKKNSFIVGYVVDVFHDDRMQEEFFLIDQHTLSDLDFRNTDGTLYTQETFHRRYAHGNSVFETGKKQWQKRLMNRLGQLSSRFLPAFSRAIAFRPIDHVRDFIYEYVLLPRDLKLDVLREVFYSYQKFERDLQDLRARKHELEMLKDHYDTYCKLRDTVYEQEFVLLSFRHKNAEEKLDVGRQQRQTCRDRLDDLQTKLHAQERLSKRRNQEQQEAYAAWQGNDEKRRRDELLETQKERVEKYRSLTDARQLMRKKLMCEFEEVSALGAYPAGEFFRLPEGMPQALEELARTLKYAAEDTIQTTQIEQIQEQLKAGGEILAAVSDLWQRGNLLLEQAQSAAVQRREELCSEIEGLKRRQRRYRPEMMRLKALLEERLAGRSKVYVLCEEIEILDEEWRDTLEGYLNTRRFDLLVEREFFREALHIYETEKRERNIEGVGLVNTEAEKKYLGQQENKSLAALLLTQNPLAQACIDHLLGNVMQADNEQDMLRYRSAATKSCMSYKGLVARQIPRRFYEIPYIGAGAIDRQLEIRERELAEVRQRLVVLAEGAGHMKQISSVLHEPLHRYANAAKSMNVLAELDACKADLERISGELNAMDLSEAVRLKSVYEESKRRAEEAAHDCAETMRTQAHAESELDQVERSIPNLERTAAAAAEAVESWRETYPELCTGAEARLASLMQETRGGRSMEERLQSYEISRRGNETRRDNMWQKLLVAREHYGLAHGDTGHVYDPDHSYYTEILERLSGTDIPSFEEKAREALAQSEMEFKAHFIFSMREAIESARYEFRELNYALNQFQFHKDKYSFLVTPSAKYKPFYDAVMMADWETAGGLFADADTAANEQAMELFDKLVKGTPEEQEEFSDYRRYLDYDIRITDTVGQNYLYSRVLRQTSGGETQTPFYIAILAAFQQIYNDKTIRLTVFDEAFNKMDEERIKSCIELIKRMKMQLIVAVPDEKLAAIAPLMDQSIIVTNVGNHCFTDELGDVTTWEKGLNHGADASADAL

SEQ ID NO: 38282 - protein, 420 aa, Selenomonas sp. oral taxon 136
MELMPLQMHYEDIILTTLLEKYENSKAAVGERGRRPQFRILKSALSADYTDEMDVDKREAIHAAACELERQKLIAIIWERHGAGRIERILLFSTNVSTLYQRMGKLMPLIRVKEYQTQLSLLASERTPWVKNFYAAMMESLVDNVIPAILPKEQVLYANLIRAILALPGEGESAIPKRVFSQRIFRNSKYFEQNIELPLLRLLRRFADEPCESDAEYLDAAGIAVTQGKAWIAGNLTFLLGDRRYFLADFPGGLMLTYDTITAMKIDVLPPEILTIENLTNAETLTRTVDTNHLLIYTAGFPNRTVQALLLKIASLHRTFHIRHWGDIDYGGIRIFEFLRGRYFPTLSQYRMDVDTFRAYLPFAQSLTPAQKKRLSGLLKQEEFSMWHSLIRVMLDEGKWVEQEVMLWQDSSGMDSLNEE

SEQ ID NO: 38283 - protein, 450 aa, Pseudomonas aeruginosa; identical to SEQ ID NO: 37026

SEQ ID NO: 38284 - protein, 220 aa, Pseudomonas aeruginosa; identical to SEQ ID NO: 33787

SEQ ID NO: 38285 - protein, 979 aa, Pseudomonas aeruginosa
MGAVLWFEGTSSSASDLKKLWLLSESPEQTLEHWLSQHHAGGMRALRQMEKDGTGIWPYPSKKAFLARLRDYFEVGENAFTLLNRAAGLKQLNSIDEIFRELVLDDRSAFERAAEVAGSFDDLTDIHRELETARKQQRSLQPVADGWERYQVLQEQLRDKQALEGILPVWFAEQGYRLWLAETNRLEKEYKKAELDQEQCKSQLEAQKGVVDQHRQRYLRVGGAGIDQLRERIADWVRECDKRSLKAEQYQLLAKGLGLADELSAAALKENQQHIAARLEILDQQITDARQKAFDAGLVQQELNGRLQTLQQEGAEVEKRPGSNLPGQFHAFRSDLAQALGVNESALPFVAELVQVKPEELDWRGAIERAIGSHRLRILVPQDSSQAALRWVNQRHNRLHVRLLEVQEPTSRPVFFDDGFTRKLTFKEHPYREAIKALLADNDRHCVESPEQLRHTPHAMTAQGLMSGKERFFDKQDQKRLDEDWLTGFDNRDRLAFLAEQIREVNEQLEPAKLALDAAQGDVRQLETQASLLNRVKELQFEDIDLPGAQSQLESLRTQLATLTRPDSNLAMIKVELDAAEALQESLDQQLRQLIEQYVQLKTQFDQAASATRKAYNSAEKGLNDTQRELAQAHFPTLTADDLGDIVELERKHTRELQGQLKALGEKLGDQKSELAKRMSDALKVDTGALAEVGRELVDVPRYLERLRVLTEEALPEKLKRFLEYLNRSSDDGVTQLLSYIDHEVSMIEERLDDLNSTMQRVDFQPGRYLRLVAGKVIHESLRTLQRAQRQLNSARFIDDEGESHYKALQDLVGLLKDACEHSRNQGAKALLDPRFRLEFAVSVIDRESRNVIETRTGSQGGSGGEKEIIASYVLTASLSYALCPDGSSRPLFGTIVLDEAFSRSSHAVAGRIIAALREFGLHAVFITPNKEMRLLRHHTRSAVVVHRRGLESSLVSLSWEALDEHHQQRIKAMHEVAH

SEQ ID NO: 38286 - protein, 393 aa, Pseudomonas aeruginosa; identical to SEQ ID NO: 32927

SEQ ID NO: 38287 - protein, 450 aa, Pseudomonas aeruginosa
MEDALQALSEMLAAYASQDLYEIDPDATHIQAGRELREWIKRRLVVEREGRIYATDALESAIQFVDSLDSRIMTSTASRLSVVQREIENLETGLNPSPSGRIASLRRRIQDLEHELAQVEAGHVVVLDEAQAIESIREVYNLATSLRADFRRVEDSWREADRALRQSIISEQSHRGEIVDRLLDGQDALLNTPEGRVFESFQQQLRQSAELEVMRERLRTILRHPAVPKALNRPQQRELRWLALRLVRESQAVLQARARSERDVRGFMKAGLAAEHHRVGQLLNDFFNLALSVDWQRQAVRRSTVRLPPVGVAITGVPAIERLRFKTLDDDDTGELDLSLKPAGLEQIDDDFWDAFDGLDREALIHDTLAVLVEQGRPVSLGELASLLPPAHDLETFALWLAMAREAGTEVLTEERQLVELVDEDEQRWRFNLPYVGLDHEALKDIDWEL

SEQ ID NO: 38288 - protein, 979 aa, Pseudomonas aeruginosa; identical to SEQ ID NO: 33788

SEQ ID NO: 38289 - protein, 393 aa, Pseudomonas aeruginosa; identical to SEQ ID NO: 32927

SEQ ID NO: 38290 - protein, 450 aa, Pseudomonas aeruginosa; identical to SEQ ID NO: 32924

SEQ ID NO: 38291 - protein, 220 aa, Pseudomonas aeruginosa
MDDEQPLMSAAVQVDERRTPQRVREAVQEMLKYGLLEESHKPNLYRSALSNIEAVDRILEPLDLAMGGDEVRGLVFVIVRQGEVAEQDDWSHPLVRRQRLNLEQSLLIAILRQQFIAYEQESGTGASQASVVVDELIPQLQVYLGELGSEAKERNRIITLLDQLKGHGLVSALDAHDRVIIRPIITHLANPENLQALVAWLREQVEGAATPAADGEEDMA

SEQ ID NO: 38292 - protein, 979 aa, Pseudomonas aeruginosa; identical to SEQ ID NO: 33788

SEQ ID NO: 38293 - protein, 393 aa, Pseudomonas aeruginosa; identical to SEQ ID NO: 32927

SEQ ID NO: 38294 - protein, 450 aa, Pseudomonas aeruginosa; identical to SEQ ID NO: 32924

SEQ ID NO: 38295 - protein, 979 aa, Pseudomonas aeruginosa; identical to SEQ ID NO: 33788

SEQ ID NO: 38296 - protein, 393 aa, Pseudomonas aeruginosa; identical to SEQ ID NO: 32927

SEQ ID NO: 38297 - protein, 450 aa, Pseudomonas aeruginosa; identical to SEQ ID NO: 32924

SEQ ID NO: 38298 - protein, 979 aa, Pseudomonas aeruginosa; identical to SEQ ID NO: 33788

SEQ ID NO: 38299 - protein, 393 aa, Pseudomonas aeruginosa; identical to SEQ ID NO: 32927

SEQ ID NO: 38300 - protein, 450 aa, Pseudomonas aeruginosa; identical to SEQ ID NO: 37026

SEQ ID NO: 38301 - protein, 220 aa, Pseudomonas aeruginosa; identical to SEQ ID NO: 33787

SEQ ID NO: 38302 - protein, 979 aa, Pseudomonas aeruginosa; identical to SEQ ID NO: 38285

SEQ ID NO: 38303 - protein, 393 aa, Pseudomonas aeruginosa; identical to SEQ ID NO: 32927

SEQ ID NO: 38304 - protein, 450 aa, Pseudomonas aeruginosa; identical to SEQ ID NO: 37026

SEQ ID NO: 38305 - protein, 220 aa, Pseudomonas aeruginosa; identical to SEQ ID NO: 33787

SEQ ID NO: 38306 - protein, 979 aa, Pseudomonas aeruginosa; identical to SEQ ID NO: 38285

SEQ ID NO: 38307 - protein, 393 aa, Pseudomonas aeruginosa; identical to SEQ ID NO: 32927

SEQ ID NO: 38308 - protein, 450 aa, Pseudomonas aeruginosa; identical to SEQ ID NO: 37026

SEQ ID NO: 38309 - protein, 220 aa, Pseudomonas aeruginosa; identical to SEQ ID NO: 33787

SEQ ID NO: 38310 - protein, 979 aa, Pseudomonas aeruginosa; identical to SEQ ID NO: 38285

SEQ ID NO: 38311 - protein, 393 aa, Pseudomonas aeruginosa; identical to SEQ ID NO: 32927

SEQ ID NO: 38312 - protein, 450 aa, Pseudomonas aeruginosa
MEDALQALSEMLAAYASQDLYEIDPDATHIQAGRELREWIKRRLVVEREGRIYATDALESAIQFVDSLDSRIMTSTASRLSVVQREIENLETGLNPSPSGRIASLRRRIQDLEHELAQVEAGHVVVLDEAQAIESIREVYNLATSLRADFRRVEDSWREADRALRQSIISEQSHRGEIVDRLLDGQDALLNTPEGRVFESFQQQLRQSAELEVMRERLRTILRHPAVPKALNRPQQRELRWLALRLVRESQAVLQARARSERDVRGFMKTGLAAEHHRVGQLLNDFFNLALSVDWQRQAVRRSTVRLPPVGVAITGVPAIERLRFKTLDDDDTGELDLSLKPAGLEQIDDDFWDAFDGLDREALIHDTLAVLVEQGRPVSLGELASLLPPAHDLETFALWLAMAREAGTEVLTEERQLVELVDKDEQRWRFNLPYVGLDHEALKDIDWEL

SEQ ID NO: 38313 - protein, 979 aa, Pseudomonas aeruginosa; identical to SEQ ID NO: 33788

SEQ ID NO: 38314 - protein, 393 aa, Pseudomonas aeruginosa; identical to SEQ ID NO: 32927

SEQ ID NO: 38315 - protein, 450 aa, Pseudomonas aeruginosa; identical to SEQ ID NO: 32924

SEQ ID NO: 38316 - protein, 979 aa, Pseudomonas aeruginosa; identical to SEQ ID NO: 33788

SEQ ID NO: 38317 - protein, 393 aa, Pseudomonas aeruginosa; identical to SEQ ID NO: 32927

SEQ ID NO: 38318 - protein, 498 aa, Rhodococcus sp. SC4
MSITADVHRLLRLRQDHAAWTLLRADSAPAILALLGRHFEHGTRRLPAPELFARLDSDLQTMRDEGLDFPRTGQAYCTEWVRSGYLLRRAAAGTREETLEPTEGAFAAMAFVAGFTSQASSATESRLTTLSTQLQALARDSDPRAETRLAALLTERASIDQQVAAVESGVFPVLDGERAVERSAEILALASEVPADFARVRAELEELNRDLRARILDDDGDRGDTLGDVFRGVDLIGDSDAGRSFTAFYDMILDPARSSQIDEWIDVVLQRPFAAMLTHDQKRRFRALLTEMETAGSEVHSTMTSLSRSLRHFVQSRHYEEHRRLQRLLRTAQQSAVAVATRRRPYDLLDLELVRVGMSIESVTALRLHNPADNLVTEPVLTHDAGTVDLDELRKLVRESEIDMDELSDNVAATLRAHGRATIGDVLREYPATQGLASAVGLMVLATHHGHAIDGTEDIHWISGAGVARRATIRRRLFDPAADEFTTRRAFEPTGSST

SEQ ID NO: 38319 - protein, 201 aa, Rhodococcus sp. SC4
MNDEPTTGGHYPGDTGELDLETRRAFVQLLKGPLVTAAKHPEVWRAVIRDERLLRSRLADVFLDLVIDDENELAFTRPPETGNANTPTVLRTERLTFMDTVMLLALRQRLLRAQPGERVMVDLDELREQLELYRTAGDTDPAGYAKRVNASWKKLDKYSLLTKTSTDDRMEVSPVLRQLFDAEQVALVEVEFRRILEEDTP

SEQ ID NO: 38320 - protein, 1095 aa, Rhodococcus sp. SC4
MIHPGQRRLARVQVVNWGTLHGHHDLSVARKGFLITGNSGSGKSTLIDAISAVLVPGNQLRFNAAAQEATNSGRNFVTYIRGAWRREAGADTDGLVASYLRTGATWSGIALTYRADTDDPPITLVKLMHLGRGQNAAADVTHLHLILEHELDLTDFTSFTTRGIDTRAIRKRWPESTVSPAYGPFARSFRSRLGISSEGAQRLLHRTLSAKSLGSLDQLFRDYMLDTPNTFAMAERAVNQFHDLQEAHRVVVDARRQVEMLAPLVDLADTRQRGLQSLRDTDEENAHLGAVHAEMTLSLLRGECTERHALTPLLEAGANEATAAAERARQETLDLTMKLEGIGGGRLATLHAQRDTELKTLARVRTRRDQIAEAVSAWEGTVPETAEEFARLRGQLEDQARQATTAHEERHGARYALAEQRGTAQKERAALITDREIVARKRSNIDPSLLRARESICSAAGVPDDAVPFAGELIAVRDEYSEWTGPIERVLGGLGRTLLVPDDVYPAVAAAVDATHLGARLVYRRVRVGVTPKAVPKTGALSLVRRVEVADGPLAAWIHHHLADRYDYACVDTAAGFADHVRAVTRAGQVKHSAERHEKDDRSRIDDRRRWVLGFDNEAKLEDIRRRIADLDVTIAGATSRLDALDREDQQIAVQNRAAQTVLDAQWVDVDVTGAQAAVDAVESRLESWQQDNPEHSAVSVALELAKKAENEADAARRQADTALTVHRTAVTELETRIAQAELHADDAAPDAVAARIKARFQKFARRVTSDNIDKALFEVGQGIGKDRADAQNAVSAANASIVRILSQYLARWESRGGELRIDAEYVDDALTILQRLRSDGLPRYEDRFFQLLHDQSHRNIGELARTIRKAPAEIRSRIDPVNNSLHRSAFDTDRWLRIDVRERRSPAAADFLDDLTRITSGGWDIEQRPAAEERFERMAAVLERLASKEPADQRWQRQVLDTRLHVGFIGVEVDGAGEARNYHDSSSGLSGGQAQKLVFFCLAAALRYQLAPDGADLPRYGTVILDEAFDRADSAYTRRALDVFAQFGFHMVLATPLKLLGTLEEYIGGAVTVSIRDRMHTELSLIEFDDVGAT

SEQ ID NO: 38321 - protein, 397 aa, Rhodococcus sp. SC4
MSVRCVLPPAAAAKALTTYSSRRRRWLADPALAEQDSLTVALHPPSEHQIAEDPDTVVAWVRSWRGYTGVGHVDWAIRRWPSFGTQEVPVRLTLAGADQIASASGRETEWRALVMRRDALVDRLGPDTPALSAAVAVTAAKWLDLDDDDFVRLTTIARWLSDHPNSGYFIRQLPVPGVDTKWLSSHRGMVETLLEGVRGSRELGIRSLPNMRDVALCDPDLLIGTPRRFATSLDELTALPLAPARTLILENKEGLHALPRLAETVALHGGGYTVHELAGIPWVVDSEVWYWGDLDSHGFAILDRLRRHLPHVRSLLMDTDTLNRWRTLAVREHKPTFNEVSHLTESEAAALESLREDDLRLEQERIPWPYALKRLLVTFGAGQSSAAADCPTCPDSK

SEQ ID NO: 38322 - protein, 450 aa, Pseudomonas aeruginosa; identical to SEQ ID NO: 32505

SEQ ID NO: 38323 - protein, 249 aa, Pseudomonas aeruginosa; identical to SEQ ID NO: 32506

SEQ ID NO: 38324 - protein, 1101 aa, Pseudomonas aeruginosa
MKQALLWRDSETFILTSIELYNWGGFQGYHRAEIDPSGTAVIGPTGSGKTTLVDALMTLLCANPRYNLASTGGHESDRDLVSYVRGVTGPGDGGIEQSHIARQGKTVTAIAATLERDGAQVRLGAVLWFERTSSSASDLKKLWLLSESPEQTLEHWLSQHHAGGMRALRQMEKDGTGIWPYPSKKAFLARLRDYFEVGENAFTLLNRAAGLKQLNSIDEIFRELVLDDRSAFERAAEVAGSFDDLTDIHRELETARKQQRSLQPVADGWERYQVLQEQLHDKQALEGILPVWFAEQGYRLWLAETNRLEKEYKKAELDQEQCKSQLEAQKGVVDQHRQRYLRVGGAGIDQLRERIADWVRECDKRSLKAEQYQLLAKGLGLADELSAAALKENQQHIAARLEILDQQITDARQKAFDAGLVQQELNGRLQTLQQEGAEVEKRPGSNLPGQFHAFRSDLAQALGVNESALPFVAELVQVKPEELDWRGAIERAIGSHRLRILVPQDSSQAALRWVNQRHNRLHVRLLEVQEPTSRPVFFDDGFTRKLTFKEHPYREAIKALLADNDRHCVESPEQLRHTPHAMTAQGLMSGKERFFDKQDQKRLDEDWLTGFDNRDRLAFLAEQIREVNERLEPAKLALDAAQGDVRQLETQASLLNRVKELQFEDIDLPGAQSQLESLRTQLATLTRPDSNLAMIKVELDAAEALQESLDQQLRQLIEQYVQLKTQFDQAASATRKAYNSAEKGLNDTQRELAQAHFPTLTADDLGDIVELERKHTRELQGQLKALGEKLGDQKSELAKRMSDALKVDTGALAEVGRELVDVPRYLERLRVLTEEALPEKLKRFLEYLNRSSDDGVTQLLSYIDHEVSMIEERLDDLNSTMQRVDFQPGRYLRLVAGKVIHESLRTLQRAQRQLNSARFIDDEGESHYKALQDLVGLLKDACEHSRNQGAKALLDPRFRLEFAVSVIDRESRNVIETRTGSQGGSGGEKEIIASYVLTASLSYALCPDGSSRPLFGTIVLDEAFSRSSHAVAGRIIAALREFGLHAVFITPNKEMRLLRHHTRSAVVVHRRGLESSLVSLSWEALDEHHQQRIKAMHEVAH

SEQ ID NO: 38325 - protein, 393 aa, Pseudomonas aeruginosa
MKSPTDIGRSLARQWQRSSVRLDRLLNSASWPQSFNIGKPSARLFSDNIRTVLRHVENWRSVKVGKVDWEPVSYRAGLAPISLPMRWHLRSPSEWIAATDDPSVSQEYAQLEYLVEQVDSSFHALLVAQRSLWLTKPSEEVIATAQLATQLSPGCAQGRPLRLLAEHGVDTKFFERNAILLTKLLDERFEGAASEQGLTTFLDAFEETSHWVLVVPLQPELLPFKRIRLTTSELAETSLPGSRLLVVENEQCVHLLPETLPDTLAVLGAGLDLQWLASTHLAGKQIAYWGDMDTWGLLMLARARHHQPAVEALLMDRELFDQHSLGSAVVEPAKAQELAPEGLMTDEADFYRYLLAQERGRLEQEYLPRRQVEQAISKWFGESVAPAHPERTA

SEQ ID NO: 38326 - protein, 461 aa, Fervidicola ferrireducens
MAFFDKIPENLFSVLASKNKHVYLDSLFIIFQAYQEEMLVKKDDLVERLKSYLENSSFLPEEEEDEERPDDASLSALAHFILRKLEKTGWIYRDYSENFIEEIIYLHDYSIKILNTLYELQVDEVKDYGSYVHSAYNNLKNQDLERNEDAIFALREAYRRTKDLVNELKSLLNNLRKYHQSLYEKEEIRQILREHFDEFRELIDERIYHPLKTLDSIPRYKTPIINILNSWLYDKEMMDLLVKSSVRRRIYKDEEEALEKVTGMITEIVNIYYNIDVLLKEIDRKRAAYTRASVERMQYLLNVDMSLKGKIVEILKALPENEEIVTAVNEAVLLFPQSYIDENSLYVKKSERKLQDIKFTKIKEPEEEGVFEKEMESLKERLKSALTRKKVFEFFKKLLKGKREVFSEEINLENDEEFLMLILGVIMHDEKGSFYDVAFEEKGSVSVNGYRIPRMKIKKKV

SEQ ID NO: 38327 - protein, 208 aa, Fervidicola ferrireducens
MWHEEYEKMSDSQKQEFARLVNFLLSHNFILREKYDKTSMNVRINPDYRFVERYFEVFSGYLSMAGWDVHKDNHYGVISIFNRFEQNRARLKKFETIVLFALRLLYEEEREKISLRKDVIVTKGDVVRKLLNTGAIDRKPAERDLNETLNLFKNYQIIEKIENPLDDYESKIIIYPSILHVLPSEKINVIYRMIEEKSAEEEIPEGEE

SEQ ID NO: 38328 - protein, 1116 aa, Fervidicola ferrireducens
MKLLKKLLLINWHYILHELIEFDMVNFLTGKNGAGKSTIVDALQLLILGDTKGDYFNKAANERSKRNLKGYLRGEIADDTEGGILVLREGNFSSYIVGEFCDTAKKSTFCYGVAFDVYENGEVDHRFFYLESPLPENHFIVDGIPLNTKDLRTFLNAKYREKFKIFSSNREYQNHFLAKMGSLNEKFYSVFKKSVSFSPIVEIEKFITEYVCDAPPKIDISDMQENLRYYKELEYQAEQVKKMVRDLEDIEALYNEYLTEEKKLKEQEYLINRAQVESTINQRRALIEEAQIKRALLEEKEGQKDEFERKVRELERRKDDLIREKYSMEDYKKSEYLKAQEENIREQIKEKEAAIHQVQKYFGKVLKDWEMVLDEISSFAGKFDEEFLKTAKEKIKKLGRVTAENITYIEEGEVVSLKNDIALCKDFLEKLFYSVEQEKTKLEEDIRKIESEIENLKKGIKPYDRKLLELKSEIEKALKSKYKKEIKVEILADLLEVRNKKWQNAIEAYLHTQKFYLVPEPECFVDALKIYDRLKFEKGFYDIGLVDTGKLERQNIKVWENSLASEVMTENKYARLFVDFLLGRVVKCEKIEELRNYPTAITPDCMLYQNFVARQLNPERWRFPYIGKKSLEDMLRAKTAEVKEKRILVDELMDGYKRLVRVKNVEPITESFMENLKNAKKEREKLDILFEKLEEIEKQKSLLDLTKLMEIDERIEKAEKELEGAKNEIKRLQEVISEITSEIRLLEHQKEEKEKELKSQLQALEERFDLDFIKDTGEPRFLRELQARKDPENIIRAFQSQVARTQSQKEKKWNLLLNKRSDYNREYKMPFNVSSQDNAEYRKELERLLRTELPAYEEKIRDAKEKARIQFQEDFISKIKENIDKVKEQIDELNSALKQFSFGKDRYRFEVRPNPAYRKFYDMIMDSLLLEGYSIFSIEFQKRHGEALEELFNQIVYVGESTLSADEREKLEKNIETYTDYRTYLTFDLIVTDDQGRESRLSRTLLKKSGGETQTPFYISILASFGRIYRLGNMYRENNTLRLIIFDEAFSKMDHQRVQESIKLLRSFGFQAIISAPTEKIQDIATLVDRNLCVIKAKDSTIVRAFDPREVMEEGE

SEQ ID NO: 38329 - protein, 408 aa, Fervidicola ferrireducens
MDLRKAIVSRLLDKYEKSKRFSGDAKIEKRITLNFSKGEFPFYDIENVESKENVHFALKELEKEGIIKIKWVKFEEGNIVEKVFLNLENLEKAYDAARREPKGAVLKKMAEKLFSFKQEIKSEWLLGFADFEIERIREKKSYPAYLPKEEELFDLTLMALRGIEQKGDEEILERVFSKRYLKDSKKFERVKGKVFAVMKDFLFKEYVEEDEAFERIGILKTIEEILFCGALKAKVAGSALDFSAFVYGTSLNSLSVREMEILDISCSRIITVENKANYYELIKDANSKGDFIVYLGGFYSPSKRLFLEKLYSFIKAKNKNVKFYHWGDIDLGGFKIFVKLKEIIKELKPLYMDVETLEKYKAFGEPFSKDYEKRLRELLGKPEYSEFYEVIQEMLKLGIRLEQEAILA

SEQ ID NO: 38330 - protein, 481 aa, Mycobacterium brisbanense
MEDNAALSAAELLELNRDVQGSRAVRLLATLNLGVYATLMERHLSGGTVAETDLVVRLERDLAELGDSEQSGLALIKSWASQGWLHRVADTRTGHERNVCYLTQDARRALDFVRGVRRNDTIATGGSINGIASRLKQVAVRVGNDPDRIRAGIEAEIAALHAELDELDAGLRPDPDVTAMYDEARSIAMQMERLITDIGLYGSMIEQATAALDDPIDSNADYRDRQRQMYADYQEAWDSAGRDSHRAFLRMINDPQQRAEFEADIATVAATLPELDPALRKVMANFFELVGHQIDEVERIQQRCAQRVKRFTAFGTLEQSRGVARQLNDAIGAARALLKVSLTDSRLDLDVPLARHTISSIGALSFRINDLSAPKPAQIAEGEVDLSTFAALTTQVDAPAMSEMINTALRQAPVSLPDAVGMLDSAYLGHVIVLWSWALKQPRPAGAPEQTTVRFQSLDGRDREMEVPHLVFTEPVLGSAS

SEQ ID NO: 38331 - protein, 223 aa, Mycobacterium brisbanense
MTDAPIDFASLPEVDRNGRAPQQRRPRFDGDVSAMPDRACWALQHLLTRRYISSESDTDVYSWVKEYRSDLAVRLSELDLQLRIVDDIGIAFIEQARYESAKGIKLLRREPLGTYDSILALHLAQMMRAGGDQSFLITRDEIHGLFSGVLNDTDRDTVTFTARIDAAIARLAGLDILRKTRDDEDSYTVSPVISAIMTASVITELQQQFEALLNGGVDDAVRD

SEQ ID NO: 38332 - protein, 1122 aa, Mycobacterium brisbanense
MPSATEQFHLSRLQIINWGVFDGYHSIPFSAGGSLIAGASGSGKSSLLDAISLGFLPFNRRNFNASGDNTAAGSSAGRRTVDKYVRGAWGQRSDGGASQVMYLRGDGTTWSAVAVTYTSNTGRTITGLVLKWLTGESRSDSSSRYVLGDGDLDIEEVCNRWAAGRFDTGVFKDVRGERSDGWRFTTKVESQYLAQLYAAIGIRASDAAQQLLGKAKSLKSVGGLEQFVREFMLDEPDSLARLPEALKQIDPLVEARELLAVAQRKRKILGDIEAIQVRYTSESSDLGIIDLVDQPLVRAYTDHVRLKQCPAQIETLDAEVTQLDNEHADLTRQLNLAKAEGDSLNAQINGASTNVGPLQAQVAAAEAQAEEVSRRRAAYEELVGAQGIEPPESADEFWELREELTRQATEMLGKLEWGRDASTDAEYAQKSARIVRDNAAKELKRVEHVGSALPESAVAMRENICNAVGIDPAELPYVAELLDLRPEEARWRLAVEKVLRPVGLRLLVPDQHYAKVLRFVNETNMRGRLALHHVRVTSTGRVAEPNTLAGKLFVVDPAHPCAAEAADVIAAAGDHICVDTPDVFSRFRRAVTDSGLYKDSDRLAIKDDRRPIKPSEYIYQGDIAAKLDALTAELTEAEDAFQQARHAADEIARQRQQWRDQAAACKAIYEQYPQWSQIDTETADGHADRLREQYELLLADNPDIEALSARAEEIWSDIQTLMTRRGAIQTRRDELDRRRTRLLELQDRLAPAAVSEPISELLHRYAAEIPVELELLNPEPHRDALFSAIRRERDQLTESRRRSYDELARIITTFDTSFPDAIPNDSDDFDERVHDYVAVCRHIDERELPDAYERMMRLITEQAPDAILTLHRVAEQETRRISDQIARVNTGLGAVEFNRGTRLTLRATPRSLAAVSELTDIVKAISRRIAEVGLGDKKAILDQYADILRLRNRLASNTPEDRAWTRDALDVRNRFAFDCAEWDVRTDELIRTHSNAGDNSGGEQEKLMAFCLAGALSFNLASPESGDNTPVFAQLMLDEAFSKSDPQFASQALEAFRKFGFQLVIVATVQNATTIQPYIDGVVMVSKTEATGRNARPVATVVTKTISDFSALRRDLKVPEPV

SEQ ID NO: 38333 - protein, 476 aa, Mycobacterium canariasense
MHELLQLNRDVQSTRAVRLLATQNLAIYATLMERHLLDGVVPETDLVVRLDRDLEDLDEVEQTGLALIKTWASQGWLHRVVKGDRNVCYLTQDARRALDFVRGMRRNDTIATGGSINGIASRLKQVAVRVDNNPARIRAGIEAEIAALHRELEELDAGLRPEPDVTSMYDEARAIALQMERLITDIGLYGTMIEQATAALDDPIETNTEYRDRQRQMYADYQQAWESAGRDSHRAFLRMINDPEQRMAFEGDIAAVAGALPELDPALRKVMAGFFELVGHQIDEVERIQQRCAQRVKRFTAFGTLEQSRGIARQLNEAIGAARALLKVSLTDSRLDIDVPLARHTISSVGALSFRINDLSAPKPAAVAEGDVDLSTFAALTTQVDAPAMSAMINTALRQAPLSLPDAVSMLNTPYLGHVIVLWSWALKQPAAGGGNPDTAQTPQPARVRFHSLDGRDREMEVPHLMFTEPIAGVAS

SEQ ID NO: 38334 - protein, 222 aa, Mycobacterium canariasense
MTDSPVDFASLPEVDRAGRAAAQQPRRPRFEGDVSAMPDRACWALQHLLTRRYISNESDSDIYSWIKEYRADLAVRLSELDLQLQIAEGVEIAFIEQARYESARGVKLLRREPLGTYDSILALHLAQMMRAAGDASFVISRDEIHGLFAGVLNDTDRDAVTFAARIDAAVARLAGLEILRKTRDDEDSYTVSPVISAIMTASVITELQQQFEALLKGGAGDE

SEQ ID NO: 38335 - protein, 1120 aa, Mycobacterium canariasense
MSEQFHLSRLQVINWGVFDGYHDIGFGPGGALIAGASGSGKSSLLDAISLGFLPFNRRNFNASGDNTAAGSSAGRRTVDKYVRGAWGQRSDAGTSQVMYLRGEGTTWSAVAVTYRSNTGRTITGLVLKWLTGESRSDSSSRYVLGDGDLSIEDVCNRWAAGRFDAGVFRGGGERSDGEYQGGWRFSTKVESQYLAQLYSAIGIRSSDAAQQLLGKAKSLKSVGGLEQFVRDFMLDEPDSLARLPEALKQIDPLVEARDLLAVAQRKRKILGDIEAIQVRYASESSDLGIIDLVDAPMVRAYTDHVRLRECPAQIEALDATITQLDNEYADLTRQLNLAKAEGDSLNAQISGASANVGPLQAQVTAAESQAEEVSRRRAAFEELVVAQGIDVPDSADEFWELREALTKQATEMLGKLEWGREASTDAEYAQKSARILRDSAAKELKRVEQVGSALPEFAVAMRDHICTAIGVDPAELPYVAELFDLRPDQQRWRVAVEKVLRGVGLRLLVPDRHHAKVLRFVNETNMRGRLALHHVRNSASGTEPEPNTLAGKLFLVNPDHACAAEALDVITAAGDHICVDTPDVFARFRRAVTDSGLYKESDRVAVKDDRRPLKPSEYIYQGDISAKLEALHTELAEAEETFARARKAADDIAAQRQQWRDRAAACKAIYEQFPQWSQIDIETADGHADRLREQYELLLADHPDIEALSERAEECWTDIQTLMTRRGAIQTRRDDLDSRRTQLLELADRLSPPAVSEPATELLRRFAAEVPVPLELLNPEPHRDALLAAIRRERDQLTESRRRSYEELSRIITTFDTSFPDAIPNDSDDLDERVHDYVAVCRHIDERELPDAYDRMMRLITEQAPDAILTLHRVAEQETRRISEQIDRVNGGLSAVEFNRGTRLTLRATPRSLAAVSELTEIVKAISRRVTEVSMGDKKAILEQYADILRLRNRLASTAPEDRNWTRDALDVRNRFTFDCAEWDVRSDELIRTHSNAGDNSGGEQEKLMAFCLAGALSFNLANPESGDNTPVFAQLMLDEAFSKSDPQFASQALEAFRKFGFQLVIVATVQNATTIQPYIDGVVMVSKTEATGRNARPVASVATKTITDFTALRKDLACV

SEQ ID NO: 38336 - protein, 491 aa, Mycobacterium fortuitum subsp. acetamidolyticum; identical to SEQ ID NO: 32571

SEQ ID NO: 38337 - protein, 254 aa, Mycobacterium fortuitum subsp. acetamidolyticum; identical to SEQ ID NO: 32572

SEQ ID NO: 38338 - protein, 1120 aa, Mycobacterium fortuitum subsp. acetamidolyticum
MAEPTNQFSLSRLQVINWGVFDGYHSIPFSRHGTLITGSSGSGKSSLLDAISLAFLPSHRRNFNASGDTTAAGSGTGKRTVDKYVRGAWGERREGTSRQIMYLRGTGPAWSAVAVTYSDRTGRSVTGLVLKWLAAEKTSDPGSRYYLIDADRDIFGLCNRWASNGYDAAVFRDDGWTGGRSESQYLAQLYSSIGIRASEAAQQLLGKAKSLKSVGGLEQFVREFMLDEPASLSGVEEALEQINPLVEARGLLDVARRKRNTLGNIAAVQARYADEAAKFGVIDTIDNAMIRDYVDHVRLAQAGPEITNLDDQITQLGAQRDEFGTQQRQLKNEHNALMAQINSVAVDLVPLQQRLTEAERISEEVSRRRSAYEEKVTSLGLTPPDNGEEFWSLRETLMEEADRLHRELFTGNQPYVEASAKEVRAREARESVEAELERVQRLGSPLPRTEYEMRARIARALDISERDLVYVAELMELKPDESRWRLAVEKVLRGAGLRLLVPDAYMERALRFVNENDMRGRIQLQHVQHGAQLRTPAPGTLATKLQLADPTHDSAVEALNVIAAVGDYVCVDGPGEFTEQSRAVTDQGLRKDSGRLSIKDDRSRLRPSDYIFLGGTAAKVEALQDDLTAAQDVYQVARTARERLDEHRGQLQSRERACRALCDQYMQWSDIDTDSVDAMLERLQGEHDLLVSDNPDAERLQQRADDCWERVEKVIQQIGSLNERETTLDRRRTALLELSETLTERLGTSEFPSHARDTIDGYAADIALNLELLEPEPYRNELVRVIGRERDRLRADRNRSHDELAGIMAAYDSSFPDAIPNDSDVFDERVHDYVALCRRIDERELPDAYERMQRLITEQAPGAILNLHMIADNEARRITEQIARVNTGLGAVEFNRGTRLTLHAGTRHLAAVDELNEKAQRISSRVSLVSFGDETAMFEQYTDILQLRKLLAGNTPEDRQWTRDALDVRNRFVLYCEERDAETGEVIRTYSNSGDNSGGEQEKLMAFCLAGALSFNLASPDSDDTRPLFAQLMLDEAFSKSDPQFAQQALSAFRKFGFQLVIVSTVQNSTTIQPYIDNVVMVSKSDASAPNARPVASVTSASISEFADLRKTSGEAVASA

SEQ ID NO: 38339 - protein, 502 aa, Mycobacterium thermoresistibile
MDRLIGAEGDIEDQLVDDNRGMSAADLLGMNRELQGSRAIRLLATHNLGLYATLMERHLNEGVVAETELVIRLERDLAELDDHPDGQSGLALIKNWASQGWLHRIVDDRTGQNVCYLTQDARRALDFLRGLRRNDTIATGGSINGIAARLKQVAIRVGGDPARIRKDIEAQIAALQAELEALEAGERPEPDVTDCYDEARAIALQMERIITDIGQYGTMIEQATAALDEPIDSNAAYRERQRRLYADYQAAWESSGRDSHRAFLRMVNDPDQRAEFEADVAAVAEALPALDPQLRKVMTGFFELVGHQIDEVERIQQRCAQRIKRFTAFGTLEQSRGIARQLNEAIAAARALLKTSLADSRLDIEVPLTRHAISSVGALSFKISDLSVPKPAEPAGGEVDLSSFAALTTQVDATAMAERLNTELASGPVSLPQAVDLVDGAGQGAYLGHVIVLWSWALKQPGVDGDCPSTWVRFRSPDGRDRAIEVPNLMFTEPITLAGALS

SEQ ID NO: 38340 - protein, 256 aa, Mycobacterium thermoresistibile; identical to SEQ ID NO: 31521

SEQ ID NO: 38341 - protein, 1129 aa, Mycobacterium thermoresistibile; identical to SEQ ID NO: 31522

SEQ ID NO: 38342 - protein, 502 aa, Tsukamurella tyrosinosolvens
MAQSAAQLYAAFTDNADNDVALRLLRSPHAVAYLALMAARLGTGPVDAEELGDALTVDLQSLQSHFTERARPVPAGPDVLDSWVKAGYVSRTLDDTDREVIQLTRGATTALGQVQAVSLDRNVATETALELVTARLSAVAVTVSADPDDHLRALDQQIAELTQRREALRQGLIPEYDRDKVVDDLKIVSSLAERMPADILGYGEKLREHTRALLTHGLDASDSSEAEAYAKTLQRLFDGHDELANTPEGKAFDAFYTLLSDHRLRRQLETSVASVVHEVELPDDLRDSLTGFLDRMWMQVQRVDEIRGQVYRRINTFVKDGDFLQYQSLRARITEAQRAAVDAFDAASAGRDTGLAVPMSAVDTSSVGALRFHDGVVTLPPEVRETSGEFTIDPARLVGREAIDWDALAAAVNEAVGTSDGATLTDVLAAIDAPRAGDVVGVWSLGARYGTVDEDRLVTVVAHTQRGPREMTVPHVAFAAALPPLTPASAAPEPTTLFEQEA

SEQ ID NO: 38343 - protein, 265 aa, Tsukamurella tyrosinosolvens
MTDETQLDDTLDVPADEGLPEIDLADFSIADDEAVKSLRGADTAPRFDGDTSALPNSVCYALQELIAAPHVSSRSKNWAVIEAEETLLRSRLSELNLLLEINRETKHAFTRQVSENDPRQRNLLRAQSLSLAGSVLALFLRLKHLSSPDETAVVERQEMIDHLLTFRPARDTDEAGFVKKADAAINQLETRRLIRRVGTSDRYAVHSVIASLLTPEQVDLYTAAYRDLASTDQDLGEAAAPVDGAEEQDGEDSTVEPENETQEQQ

SEQ ID NO: 38344 - protein, 1120 aa, Tsukamurella tyrosinosolvens
MTRKHLGQYRLTRLQVVNWGTFDGYKDFPIDERGVILTGPSGSGKSSLMDAHSVVLLPTYDQSFNASADMTAKGAKRAARSMADYVRGAWSVNDDEHQQSKVQYLRGDSATWSAVAATYDNGAGNVTTAVAVKWFPGSGTDGASLKSWYQIHSGAFDLLDLQEWATAGFDTRGWRARHSGVESFDTQAAYQDALRRRVGIGTSSAALALLGKAKAMKNVGDLDAFIRTYMLDRPQTYARAERLVENFTQLDEAYRAAARAEAQEKVLRPMPEAYETYRSATVGTTRAADLLGAPVRSYLRGHKLRLLQEQMDRIEGERAGMDAQIARWEDRAEERKMRYNDLLHRLRQEQGEVGVLEAELQSRELQTQARQRAYERFAAAVEKLGERAPESAEEFAALREQVPGIRDRATEAAEALAGRVHSAYTDESDARRAVESVDDELSVLDRRASLLPPALLDQRDVIARATGVPAEDLPYAAELIDVEPDEQATWAGAAERVLRPLATTLLVPAEHQRAVADYVNANRVHGVLTYQVVDGADPTRPEPGSLATKLTVDTASAAGRWLAGAVARAARHTCVDSPDELEKHEQAVTAEGLVKNAGGRFRKDDRRAVADRSQWVLGTNTGSKREALQRRRDELAAVHAKAAEASATLRDDLAEHKAVADSAAGVLGYTSWAELDHWAAKAEAEELADRISDARSGNADLGELELQADNAYGELAEAQTRIGALTETMNRAGTEFDDLLAEFEKIDAESAPKLAEPDEDFLATALWHLLTADEAKPRRLTLDTFGEVRADLRAELERQQAAATAERDAAEARIVRTAEQFLREWPDASTELSADVASAPDFVAVHENLVAHGLAAATEKFRRLITTDVSHSVSNLFKEVDDTHRAITRGIADVNAGLRRVEFNEGTYLQIAYAARPTPEATEFAKLVDDMVRDAPAAKRAEPAAMAAQFKRIRGLVLRLTGDDPESRRWTENVLDVRTGYSFYGKENAAGAEPDAPAVVTYRNTATNSGGEQEKLVAFCLAAALSFALGSHGIDGSNEPAFAPLMLDEAFSKSDERFSAQSLRAFEQFGFQLLIAAPIRMVGIVEPFIGQVILVDKQVTPDGARSDARYATFGELTPSR

SEQ ID NO: 38345 - protein, 498 aa, Tsukamurella pulmonis
MSAAQLYAAFTDNADNDVALRLLRSPNAVAYLALMAARLGTGPVDAEELGDALTVDLQSLAHHFTDRARPVPAGPDVLDSWVKAGYVSRTLDEDDRESIQLTRGATTALGQVQAVSLDRNVATETALELVTARLSAVAVTVSADPDDHLRALDEQIAELTRRREALKAGLVPEYDRDKVVDDLKIVSSLAERMPADILGYGEKLREHTRALLTHGLDASDSSEAEAYAKTLQRLFDGHDELANTPEGKAFDAFYTLLSDHRLRRQLETSVASVVTEVQLPDDLRDSLTGFLDRMWMQVQRVDEIRGQVYRRINTFVKDGDFLQYQSLRARITEAQRAAVDAFDTTSASRDTGLAVPMSAVDTSSVGALRFHDGIVTLPPEVRETSGEFTIDPARLVGREAIDWDALATAVNEAVRASDGATLTEILAAIDAPRAGDVVGVWSLGARYGTVDEDRLVTILAHTARGPREMTVPHVEFAAALPPLTPASAAPEPTTLFEE

SEQ ID NO: 38346 - protein, 263 aa, Tsukamurella pulmonis
MDDSLDIAADEALPEIDLADFSIADDEAVKSLRGADTAPRFDGDTSALPNSVCYALQELIAAPHVSARSKNWAVIEAEETLLRSRLSELNLLLEINRETKHAFTRQVSENDPRQRNLLRAQSLSLAASVLALFLRLKHLSSPDETAVVERQEMIDHLLTFRPARDTDEAGFVKKADAAINQLETRRLIRRVGTSDRYAVHSVIASLLTPEQVDLYTAAYRDLASTDQDLGEAAAPVDGADEPDGEDGTVDLDSAPEHETQEQQ

SEQ ID NO: 38347 - protein, 1120 aa, Tsukamurella pulmonis
MTRKHLGQYRLTRLQVVNWGTFDGYKDFPIDERGVILTGPSGSGKSSLMDAHSVVLLPTYDQSFNASADMTAKGAKRAARSMADYVRGAWSVNDDEHQQSKVQYLRGESATWSAVAATYDNGAGNVTTAVAVKWFPGSGTDGASLKSWYQIHTGAFDLLDLQGWATAGFDTRGWRARHTGVESFDTQAAYQDALRRRVGIGTSSAALALLGKAKAMKNVGDLDAFIRTYMLDRPQTYARAERLVENFTQLDEAYRAAARAEAQEKVLRPMPEAYAKYRSATVGTTRAADLLGAPVRSYLRGHKLRLLQEQMDRIEGERAGMDGQIARWEDRAEERKMRYNELLHRLRQEQGEVGVLEAELQSRELQTQARQRAYERFAAAVEKLGERAPESAEEFAALREQVPGIRDRATEAAEALAGRVHSAYTDESDARRAVESVDDELSVLDRRASLLPPALLDQRDAIARATGVPAEELPYAAELIDVRPEEQARWAGAAERVLRPLATTLLVPAEHQRAVADHVNATRVQGVLTYQVVDGADSTRPAPDSLAAKLTVDESSEAGRWLAGAVARAARHTCVDSPAELERHEQAVTPEGLVKGAGGRFRKDDRRAVSDRSQWVLGTNTGSKREALQRRRDELAAVHAKAAEASATLRDDLAEHKAVADSAAGVLGYTSWAELDHWAAKAEAEELADRISDARSGNADLGELELQADNAYGELAEAQTRIGALTETMNRAGTEFDDLLAEFEKIDGESAPRLTEEDEDFLATALWHLLTADEARPRRLTLETFGEIRADLRAELERQQNAATAERDAAEARIVRTAEQFLREWPDASTELTADAASAPDFVAVHENLVAHGLAAATEKFRRLITTDVSHSVSNLFKEVDDTHRAITRGIADVNAGLRRVEFNEGTYLQIAYAARPTPEATEFAKLVDDMVRDAPAAKRAEPAAMAAQFKRIRGLVLRLTGDDPESRRWTENVLDVRTGYSFYGRENAVGAEPDAPAVVTYRNTATNSGGEQEKLVAFCLAAALSFALGSHGIDGSNEPAFAPLMLDEAFSKSDERFSAQSLRAFEQFGFQLIIAAPIRMVGIVEPFIGQVILVDKQVTPDGARSDARYATFGELAPSR

SEQ ID NO: 38348 - protein, 502 aa, Tsukamurella sunchonensis
MAQSAAQLYAAFTDNADNDVALRLLRSPHAVAYLALMAARLGTGPVDAEELGDALTVDLQSLQSHFTERARPVPAGPDVLDQWVKHGFVSRTLDENDREAIQLTRGATTALGQVQAVSLDRNVATETALELVTARLSAVAVTVSADPDDHLRALDEQIAELTRRREALRAGLIPEYDRDKVVDDLKIVSSLAERMPADILGYGEKLREHTRALLTHGLDASESSEAEAYAKTLQRLFDGHDELANTPEGKAFDAFYTLLSDHRLRRQLETSVASVVHEIDLPDDLRDSLTGFLDRMWMQVQRVDEIRGQVYRRINTFVKDGDFLQYQSLRARITEAQRAAVDAFDTVSAGRDTGLAVPMTAVDTSSVGALRFHDGIVTLPPEVRETSGEFTIDPARLVGREAIDWDSLASAINAQVGMSDGVTLAEVLAAIEAPRAGDVVGIWSLGARYGTVDADRPVTVVAHTARGPRELTVPHVEFAAALPPLTPASAAPEPTTLFEQEA

SEQ ID NO: 38349 - protein, 260 aa, Tsukamurella sunchonensis
MSDEALDIETLDVPADEALPEIDLADFSIADEDAIKSLRGADTAPRFDGDTSALPNSVCYALQELIAAPHVSAKSKNWAVIEAEETLLRSRLSELNLLLEINRETKHAFTRQVSENDPRQRNLLRAQSLSLAASVLALFLRLKHLSSPDETAVVERQEMLDHLLTFRPARDTDEAGFVKKADAAINQLETRRLIRRIGTSDRYAVHSVIASLLTPEQVDLYTAAYRDLASTDQDLGEAAAPVDDADGDGTVDLDEQEAQA

SEQ ID NO: 38350 - protein, 1115 aa, Tsukamurella sunchonensis
MGQYRLTRLQVVNWGTFDGYKDFPIDDRGVILTGPSGSGKSSLMDAHSVVLLPTYDQSFNASADMTAKGAKRAARSMADYVRGAWSVNDDEHQQSKVQYLRGDSATWSAVAATYDNGAGNVTTAVAVKWFPGSGTDGASLKSWYQIHSGAFDLLGLQDWATAGFDTRGWRSRHGGVESFDTQAAYQDALRRRVGIGTSSAALALLGKAKAMKNVGDLDAFIRTYMLDRPQTYARAERLVENFTQLDEAYRAAARAEAQEKVLRPMPEAYERYRSATVGTTRAADLLGAPVRSYLRGHKLRLLQEQMDRIEGERAGMDAQIARWEDRAEERKMRYNDLLHRLRQEQGEVGVLEAELQSRELQTQARERAYERFAAAVEKLGERAPESAEEFAALREQVPGIRDRATEAAEALAGRVHSAYTDESDARRAVESVDDELSVLDRRASLLPPALLDQRDAIARATGVPAEELPYAAELIDVRPAEQATWAAAAERVLRPLATTLLVPAEHQRAVADHVNAVRVQGVLTYQVVDGADGTRPDPGSLAEKLTVDETSATGRWLAGAVARAARHTCVDSPAELERHEQAVTPEGLVKSAGGRFRKDDRRSVADRSQWVLGTNTGSKREALQRRRDELAAVHAKAADASATLRDDLAEHKAVADSAAGVLGYTSWAELDHWAAKAEAEELADRISDARSGNADLGELELQADNAYGELAEAQTRIGGLTETMNRAGSEFDDLLAEFEKIDGESGPRLSEPDEDFLATALWHLLTADEAKPRRLTLDTFGEVRADLRAELERQQNAATAERDAAESRIVRTAEQFLREWPDASTELSAEAASAPDFVAVHENLVAHGLAAATEKFRRLITTDVSHSVSNLFKEVDDTHRAITRGIADVNAGLRRVEFNEGTYLQIAYAARPTPEATEFAKLVDEMVRDAPAAKRAEPAAMAAQFKRIRGLVLRLTGDDPESRRWTENVLDVRTGYSFYGRENAVGAEPDAPAVVTYRNTATNSGGEQEKLVAFCLAAALSFALGSHGIDGSNEPAFAPLMLDEAFSKSDERFSAQSLRAFEQFGFQLIIAAPIRMVGIVEPFIGQVILVDKQVTPDGARSDARYATFGELTTTR

SEQ ID NO: 38351 - protein, 502 aa, Tsukamurella sunchonensis
MAQSAAQLYAAFTDNADNDVALRLLRSPHAVAYLALMAARLGTGPVDAEELGDALTVDLQSLQNHFTERARPVPAGPDVLDQWVKHGYVSRTLDEDDREVIQLTRGATTALGQVQAVSLDRNVATETALELVTARLSAVAVTVSADPDDHLRALDEQIAELTRRREALRQGLIPEYDRDKVVDDLKIVSSLAERMPADILGYGEKLREHTRALLTHGLDASESSEAEAYAKTLQRLFDGHDELANTPEGKAFDAFYTLLSDHRLRRQLETSVASVVHEIDLPDDLKDSLTGFLDRMWMQVQRVDEIRGQVYRRINTFVKDGDFLQYQSLRARITEAQRAAVDAFDTVSASRDTGLAVPMTAVDTSSVGALRFHDGIVTLPPEVRETSGEFTIDPARLVGREAIDWDSLASAINAQVGMSDGATLAEVLAAIEAPRAGDVVGIWSLGARYGTVDADRPVTVVAHTARGPRELTVPHVEFAAALPPLTPASAAPEPTTLFEQEA

SEQ ID NO: 38352 - protein, 260 aa, Tsukamurella sunchonensis
MSDEALDIETLDVPADDVLPEIDLADFSIADEDAIKSLRGADTAPRFDGDTSQLPNSVCYALQELIAAPHVSAKSKNWAVIEAEETLLRSRLSELNLLLEINRETKHAFTRQVSENDPRQRNLLRAQSLSLAASVLALFLRLKHLSSPDETAVVERQEMLDHLLTFRPARDTDEAGFVKKADAAINQLETRRLIRRVGTSDRYAVHSVIASLLTPEQVDLYTAAYRDLASTDQDLGEAAAPVDGADGDGTVDLDDQEAQA

SEQ ID NO: 38353 - protein, 1124 aa, Tsukamurella sunchonensis
MSAHSTRKHLGQYRLTRLQVVNWGTFDGYKDFPIDERGVILTGPSGSGKSSLMDAHSVVLLPTYDQSFNASADMTAKGAKRAARSMADYVRGAWSVNDDEHQQSKVQYLRGDSATWSAVAATYDNGAGNVTTAVAVKWFPGSGTDGASLKSWYQIHSGAFDLLDLQDWATAGFDTRGWRSRHSGVESFDTQAAYQDALRRRVGIGTSSAALALLGKAKAMKNVGDLDAFIRTYMLDRPQTYARAERLVENFTQLDEAYRAAARAEAQEKVLRPMPEAYERYRSATVGTTRAADLLGAPVRSYLRGHKLRLLQEQMDRIEGERAGMDAQIARWENRAEERKMRYNDLLHRLRQEQGEVGVLEAELQSRELQTQARQRAYERFAAAVEKLGERAPESAEEFAALREQVPGIRDRATEAAEALAGRVHSAYTDESDARRAVESVDDELSVLDRRASLLPPALLDQRDAIARATGVPAEELPYAAELIDVRPAEQATWAAAAERVLRPLATTLLVPAEHQRAVADHVNAVRVQGVLTYQVVDGADGTRPDPGSLAEKLVVDESTKTGRWLAGAVARAARHICVDSPAELERHEQAVTPEGLVKSAGGRFRKDDRRSVADRSQWVLGTNTGSKREALQRRRDELAAVHAKAADASATLRDDLAEHKAVADSAAGVLGYTSWGELDHWAAKAEAEELADRISDARSGNADLGELELQADNAYGELAEAQTRIGGLTETMNRAGTEFDDLLAEFEKIDGESAPKLSEPDEDFLATALWHLLTADEAKPRRLTLDTFGEVRADLRAELERQQNAATAERDAAEARIVRTAEQFLREWPDASTELSAEAASAPDFVAVHENLVAHGLAAATEKFRRLITTDVSHSVSNLFKEVDDTHRAITRGIADVNAGLRRVEFNEGTYLQIAYAARPTPEATEFAKLVDEMVRDAPAAKRAEPAAMAAQFKRIRGLVLRLTGDDPESRRWTENVLDVRTGYSFYGRENAVGAEPDAPAVVTYRNTATNSGGEQEKLVAFCLAAALSFALGSHGIDGSNEPAFAPLMLDEAFSKSDERFSAQSLRAFEQFGFQLIIAAPIRMVGIVEPFIGQVILVDKQVTPDGARSDARYATFGELTTSR

SEQ ID NO: 38354 - protein, 498 aa, Tsukamurella pulmonis; identical to SEQ ID NO: 38345

SEQ ID NO: 38355 - protein, 263 aa, Tsukamurella pulmonis
MDDSLDIAADEALPEIDLADFSIADDEAVKSLRGADTAPRFDGDTSALPNSVCYALQELIAAPHVSARSKNWAVIEAEETLLRSRLSELNLLLEINRETKHAFTRQVSENDPRQRNLLRAQSLSLAASVLALFLRLKHLSSPDEAAVVERQEMIDHLLTFRPARDTDEAGFVKKADAAINQLETRRLIRRVGTSDRYAVHSVIASLLTPEQVDLYTAAYRDLASTDQDLGEAAAPVDGADEPDGEDGTVDLDSAPEHETQEQQ

SEQ ID NO: 38356 - protein, 1120 aa, Tsukamurella pulmonis
MTRKHLGQYRLTRLQVVNWGTFDGYKDFPIDERGVILTGPSGSGKSSLMDAHSVVLLPTYDQSFNASADMTAKGAKRAARSMADYVRGAWSVNDDEHQQSKVQYLRGESATWSAVAATYDNGAGNVTTAVAVKWFPGSGTDGASLKSWYQIHTGAFDLLDLQGWATAGFDTRGWRARHTGVESFDTQAAYQDALRRRVGIGTSSAALALLGKAKAMKNVGDLDAFIRTYMLDRPQTYARAERLVENFTQLDEAYRAAARAEAQEKVLRPMPEAYAKYRSATVGTTRAADLLGAPVRSYLRGHKLRLLQEQMDRIEGERAGMDAQIARWEDRAEERKMRYNELLHRLRQEQGEVGVLEAELQSRELQTQARQRAYERFAAAVEKLGERAPESAEEFAALREQVPGIRDRATEAAEALAGRVHSAYTDESDARRAVESVDDELSVLDRRASLLPPALLDQRDAIARATGVPAEELPYAAELIDVRPEEQARWAGAAERVLRPLATTLLVPAEHQRAVADHVNATRVQGVLTYQVVDGADSTRPAPDSLAAKLTVDESSEAGRWLAGAVARAARHTCVDSPAELERHEQAVTPEGLVKGAGGRFRKDDRRAVSDRSQWVLGTNTGSKREALQRRRDELAAVHAKAAEASATLRDDLAEHKAVADSAAGVLGYTSWAELDHWAAKAEAEELADRISDARSGNADLGELELQADNAYGELAEAQTRIGALTETMNRAGTEFDDLLAEFEKIDGESAPRLTEEDEDFLATALWHLLTADEARPRRLTLETFGEIRADLRAELERQQNAATAERDAAEARIVRTAEQFLREWPDASTELTADAASAPDFVAVHENLVAHGLAAATEKFRRLITTDVSHSVSNLFKEVDDTHRAITRGIADVNAGLRRVEFNEGTYLQIAYAARPTPEATEFAKLVDDMVRDAPAAKRAEPAAMAAQFKRIRGLVLRLTGDDPESRRWTENVLDVRTGYSFYGRENAVGAEPDAPAVVTYRNTATNSGGEQEKLVAFCLAAALSFALGSHGIDGSNEPAFAPLMLDEAFSKSDERFSAQSLRAFEQFGFQLIIAAPIRMVGIVEPFIGQVILVDKQVTPDGARSDARYATFGELAPSR

SEQ ID NO: 38357 - protein, 494 aa, Tsukamurella tyrosinosolvens
MATDIESEFVRIDAALKSPTLRLLDRKSAAIAMPIFTAAFPDDAQPIPVERFHTRVEALLTELSAAGYSVPAGDGKSLAMQWVRERWLYRDSGRGEETYQLTGDAKQAIEYVTRTTRVQLNVSASRIETMRRVISEAAQAANPDRDERKRRLSEEIAVLQSELDRLEGGGEVPRASEAELVEQFANVLREIDGLPSDFRRVEEAVRDMHKVITKKFREEEHPVGQVLDDYLDQAKNLLTSTPEGRAFAGAQELLRNREVLSRLRADLESILASEWAVGLLPEEQRQLRSAVDVIRRGRDDVIDQRQRLSATLREHIENYDHIKNRELDRVLRGLDREMRTWMQSARPRDHVDVELMPPALDVAGLKIRTFDPDSERAPEPLEDVSADAPPSLSLDEIRKKGGPSLRQLQEKIDARLLAGEIATAAALFNQLPHDLRRPVEVLGLLHLLARIDAHVDSGAREPVFTIRPDGSTRRLRMPVVTVRDARDAEVDAHD

SEQ ID NO: 38358 - protein, 254 aa, Tsukamurella tyrosinosolvens
MTPATRRLTLMTDVIDDEDRSDDAEVPVPEDDLGSVLFDGDAGTLYEEQRRCLHALLKHRYISADRHPDHWEVLLKDEGVIKSRLNDLFLDLQVEREPRIAFKRQAVSETGDPLPSLLRDVSHTKEETIVMLALRQRFFAQRQEGDDAVFVDRQTLLDEIGERWPEHLTNRSAALKKAETGIDGLARAGVLLRTADPDRFQISPIIEVLLPVEKLHELLVWLMTQNGAAPVGDESEVDDGLDLDGSGDEQEEDA

SEQ ID NO: 38359 - protein, 1126 aa, Tsukamurella tyrosinosolvens
MTSDQMTIPIVAASDHAQWRLETMQLVNWGGFHGHHIIAVSPGSTLLTGGSGVGKSTLLDAWIALMMPSDIDFNGASNDTGSGRARSAEKRNLPSYLRGKQDKKGDGAGRTRELVLRGGNGEPVWGALACSFANDNGRKYTVMRAFFVRAGGTVNSDVATTFAAVDGAIDINRLEPLASTRFDKRILKNAIPGLVTFNTFREFEESLHTRLGIGDGDGGRKPMRLLARVQAGMQINRVDDLYKTMVLERPVTYEVADDALSHFADLKAAYLKMVDEADKVKALQRLPDLQRDLADARARADLISRFGADQDGPTPFRLWRLRTERGLLATAVTENRREHDEATATHTKAESDEAKYERQLAQIAKDKHDNGGGAIDERRRDIARLQQSRDGAYIANIKFQTRTEAIDLVVPETSGQFAEAQAEAADFLAGFDEREQALQAEEQSIQEEQLAPLATRQRDLLDERKSLQGRTGMVPRRLHEARVRMAQAAGLDSMDDLPFVAELIDVLPDEDYWRKAVETTLGGIARTVLVDRNTRNRLSTAIDGVAIRPRIRFQAVTLAAHEDWRGDPDYVSGKLAFKDSPFSRWVQDRVSDDGIDHRCVPDAASLDGRGPRVTPAGQTRDGDRGAHGESGDGNVIGFSNERRLADIEQLLTELDPQIAEVRGRIADVKACLGDLRRQKEAHVYVQDTAWADIDHLGIDRRIDELEDEIRRLRQAYEILDALEREEERVKPLFQQANGDRVLSANLLQKLQMRWGELVSQQDDVLKAIDVIDEKQTATVTDEQQVYLDSLFAGNWDAVSLDSLESNMHAMRKRLREEAEAARKSGRSATSAMESMFDQYKARWTENNLGTSVDSADGYREILDRIQSEGLHERRGKWRREFTAWSSDDLLRLNEAFDTALEDIEDRLRPVNRILDALPFGGKGFLQIDLRRLPKENLTRFRRSLRELSSGLALELTDLQIETRFKRLSEFMDQISVPEGHTKPSTAERDRYLDVRQHVVITARCLNEHGGEVATYDYIAGKSGGEMQELVAFIVGSALRYQLGDEERSRPRFAPVFLDEAFIKADSEFAGRAVKAWQNLGFQLIVGAPFDKVTSLEESMDLLLHVSKNSRGFSYVTDLPDDDGGAA

SEQ ID NO: 38360 - protein, 404 aa, Tsukamurella tyrosinosolvens
MKTPSAVTLDIERRLRSRWHTDVAGTENAFPHAFPLGRPAAAELRADYAAVHALTVEWQDWASGSGVELTYENRVAKGGSTQAIPSHARVESIDHASSIVAGEWPDRLTRGRERVAVLRARYPGVVDVDRVLRLLDSYTAVDFELLLTVVDWYLEDPSRAALGVTPRQVPIPGVHAKWLQSHRAGVQALSGLDDLGLLPAHPPRIHFTYLDPDHRGGGNRVHDSATVGDVFEPDYLPQVVVISENKDTAIHFPSLPGGISVEGVGKGGRTPAAFPWIRDARYVVYWGDIDRDGYEILDGYREAFDRDIDSIMMDPETYEAYEEFGTDLDQHGRALEAGIPRPVGRLRDGERSVYLSILSDGHIGRRRVEQERIPLDRALDAVTRICGQSPCSGDNAPESGTIRR

SEQ ID NO: 38361 - protein, 502 aa, Tsukamurella tyrosinosolvens; identical to SEQ ID NO: 38342

SEQ ID NO: 38362 - protein, 265 aa, Tsukamurella tyrosinosolvens
MTDETQLDDTLDMPADEGLPEIDLADFSIADDEAVKSLRGADTAPRFDGDTSALPNSVCYALQELIAAPHVSSRSKNWAVIEAEETLLRSRLSELNLLLEINRETKHAFTRQVSENDPRQRNLLRAQSLSLAGSVLALFLRLKHLSSPDETAVVERQEMIDHLLTFRPARDTDEAGFVKKADAAINQLETRRLIRRVGTSDRYAVHSVIASLLTPEQVDLYTAAYRDLASTDQDLGEAAAPVDGAEEQDGEDSTVEPENETQEQQ

SEQ ID NO: 38363 - protein, 1120 aa, Tsukamurella tyrosinosolvens
MTRKHLGQYRLTRLQVVNWGTFDGYKDFPIDERGVILTGPSGSGKSSLMDAHSVVLLPTYDQSFNASADMTAKGAKRAARSMADYVRGAWSVNDDEHQQSKVQYLRGDSATWSAVAATYDNGAGNVTTAVAVKWFPGSGTDGASLKSWYQIHSGAFDLLDLQEWATAGFDTRGWRARHSGVESFDTQAAYQDALRRRVGIGTSSAALALLGKAKAMKNVGDLDAFIRTYMLDRPQTYARAERLVENFTQLDEAYRAAARAEAQEKVLRPMPEAYEKYRSATVGTTRAADLLGAPVRSYLRGHKLRLLQEQMDRIEGERAGMDAQIARWEDRAEERKMRYNDLLHRLRQEQGEVGVLEAELQSRELQTQARQRAYERFAAAVEKLGERAPESAEEFAALREQVPGIRDRATEAAEALAGRVHSAYTDESDARRAVESVDDELSVLDRRASLLPPALLDQRDVIARATGVPAEDLPYAAELIDVEPDEQATWAGAAERVLRPLATTLLVPAEHQRAVADYVNANRVHGVLTYQVVDGADPTRPEPGSLATKLTVDTASAAGRWLAGAVARAARHTCVDSPDELEKHEQAVTAEGLVKNAGGRFRKDDRRAVADRSQWVLGTNTGSKREALQRRRDELAAVHAKAAEASATLRDDLAEHKAVADSAAGVLGYTSWAELDHWAAKAEAEELADRISDARSGNADLGELELQADNAYGELAEAQTRIGALTETMNRAGTEFDDLLAEFEKIDAESAPKLAEPDEDFLATALWHLLTADEAKPRRLTLDTFGEVRADLRAELERQQAAATAERDAAEARIVRTAEQFLREWPDASTELSADVASAPDFVAVHENLVAHGLAAATEKFRRLITTDVSHSVSNLFKEVDDTHRAITRGIADVNAGLRRVEFNEGTYLQIAYAARPTPEATEFAKLVDDMVRDAPAAKRAEPAAMAAQFKRIRGLVLRLTGDDPESRRWTENVLDVRTGYSFYGKENAVGAEPDAPAVVTYRNTATNSGGEQEKLVAFCLAAALSFALGSHGIDGSNEPAFAPLMLDEAFSKSDERFSAQSLRAFEQFGFQLLIAAPIRMVGIVEPFIGQVILVDKQVTPDGARSDARYATFGELAPSR

SEQ ID NO: 38364 - protein, 499 aa, Bifidobacterium bifidum; identical to SEQ ID NO: 32842

SEQ ID NO: 38365 - protein, 301 aa, Bifidobacterium bifidum
MGAVDVEYDGADAEGAVNPYALFEGDTGDMTADARMVAIMLKRERYISGRFYDLALDNRAAVIRSLNNDLLDLVVNEHYRVMYATAVSGPDMTLRALKTRASLKREEAALLAFLRIRVLEYENAHVAPDEWLVSFEEIRAALATGAGYLASRNDEEGVLRQVGAIVSVMCTYGYLRQLDDDETMYRITPLVPVVLDRQLADSWLAVADRDDDGEPAGDMAPAGSRSAAGDTSNADASGADDDGDSDDAGPDAELFEAPLFDDDADADAAENIKGADDANGANDSGIDDETASDGGTAREGE

SEQ ID NO: 38366 - protein, 1196 aa, Bifidobacterium bifidum
MSGKDMQMIADRWMMESRRLVNWGSYEGYHEFRPSTDSQLPVTLLAGASESGKSTLVDAQISLLYPTGTPFNKASNSGRSERSDYTYLRGMIGVGGSDGVDEPMYLRGRDESGAPRSIWGAIVDTYRNFTTGQILSCGKFLYLMPGDGRGDVRRLYLAWDKPIDPRRMDVFRESSFTPTQLKSTYPGCVTFPNAEAFHTHIWDVMGLSAEACRLLARIQSADAPSRLDDIFKQGVLGVPEALDLARATVEDYERYDANFRSMEEKTRRMGKLRAITASYGDYESARDAVHSFDAVNPATKSGSATIRAWAIRRMIGEVSERQPLDRRLRDERRSEARAAGKRIESLRTRIDAVRERMRGLDGGDLTRLDAEMRQAERALADITAGRQRIGRMFEAAGEEFPKDEHAWDERRIEAVTFMRSYEQRKGLLDDMRNQTYAAHASVKQTLQRLNDDYERQKSQRTRISRQMDETRAMLCRATGLGPSELPYVAELMDVREDQEHWRLAMNAAYGSMAQTILVDKRHERGFAAKVSAIDPHAMARRTWQFVDTERGGAGSGPGGANTGATGGTDGEVWLSSKLRYREDSPFAGWLREQTSSERLDALCVDGIDDSDHAVRQVQADGQIKSGKRGQHGIKDRQQVIGFVNESYLAQLRTRIQDAQRQCDETAQSYASAKEQADRLQRERELADQLAYTAWEKIDENSAKAAIADIERTIASVRNNPKLAELDTLQESLSKELDRSQRQRIDIERQAELADQAVNAAQAWLDEHAAQPQPQPQTRPLDGEAADVSPKAVTNGRTLLTDEVEEALAESYEQRLSGLGDATTRAHMIIGAGAPQRMAQGDTFADRVIAGIGKDLEARVSMLEGRAASARTAVEARMGAYIEMYAGGDDTIAASVDDYRYYQDELESLSKLATVEATAVEYHNCLDKLLMSFLTIKRAIDTDAGDIHDQLERINAMLDGQQFGPRHGSLSLHADVRRPERAFWSALTRVIGTLNDRKAAQTDDDLDGARCAFASCAAMIDMLRREIGQIRDVNGVKSYGARNLDPRCRSSFYALVRHSDGQVERITSTGGRSGGALQELTSFVYGAALIYLLGGGMDNKLKPSYTTLFLDEALIKADGRYTRRALSVLPRLGFQVIVSAPESKTGEILEVSTKAYVTRKDPDTGYTTLHEARLDGIDEMDGADAPEGTVESDDAAE

SEQ ID NO: 38367 - protein, 498 aa, Bifidobacterium pseudocatenulatum; identical to SEQ ID NO: 31083

SEQ ID NO: 38368 - protein, 260 aa, Bifidobacterium pseudocatenulatum; identical to SEQ ID NO: 31084

SEQ ID NO: 38369 - protein, 1152 aa, Bifidobacterium pseudocatenulatum; identical to SEQ ID NO: 34968

SEQ ID NO: 38370 - protein, 400 aa, Bifidobacterium pseudocatenulatum; identical to SEQ ID NO: 33459

SEQ ID NO: 38371 - protein, 499 aa, Bifidobacterium bifidum; identical to SEQ ID NO: 32842

SEQ ID NO: 38372 - protein, 301 aa, Bifidobacterium bifidum; identical to SEQ ID NO: 30918

SEQ ID NO: 38373 - protein, 1194 aa, Bifidobacterium bifidum
MSGKDMQMIADRWMMESRRLVNWGSYEGYHEFRPSTDSQLPVTLLAGASESGKSTLVDAQISLLYPTGTPFNKASNSGRSERSDYTYLRGMIGVGGSDGVDEPMYLRGRDESGVPRSIWGAIVDTYRNFTTGQILSCGKFLYLMPGDGRGDVRRLYLAWDKPIDPRRMDVFRESPFTPTQLKSTYPGCVTFPNAEAFHTHIWDVMGLSAEACRLLARIQSADAPSRLDDIFKQGVLGVPEALDLARATVEDYERYDANFRSMEEKTRRMGKLRAITASYGDYESARDAVHSFDAVNPATKSGSATIRAWAIRRMIGEVNERQPLDRRLRDERRSEARAAGKRIESLRTRIDAVRERMRGLDGGDLTRLDAEMRQAERALADITAGRQRIGRMFEAAGEEFPKDEHAWDERRIEAVTFMRSYEQRKGLLDDMRNQTYAAHASVKQTLQRLNDDYERQKSQRTRISRQMDETRAMLCRATGLGPSELPYVAELMDVREDQEHWRLAMNAAYGSMAQTILVDKRHERGFAAKVSAIDPHAMARRTWQFVDIERGGAGNGPGGANTGATGGTAGEVWLSSKLRYREDSPFAGWLREQTSSERLDALCVDGIDDSDHAVRQVQADGQIKSGKRGQHGIKDRQQVIGFVNESYLAQLRTRIQDAQRQCDETAQSYASAKEQADRLQRERELADQLAYTAWEKIDENSAKAAIADIERTIASVRNNPKLAELDTLQESLSKELDRSQRQRIDIERQAELADQAVNAAQTWLDEHAAQPQPQTRPLDGEAADVSPKAVTNGRTLLTDEVEEALAESYEQRLSGLGDATTRAHMIIGAGAPQRMAQGDTFADRIIAGIGKDLEARVSMLEGRAASARTAVEARMGAYIEMYAGGDDTIAASVDDYRYYQDELESLSKLATVEATAVEYHNCLDKLLMSFLTIKRAIDTDAGDIHDQLERINAMLDGQQFGPRHGSLSLHADVRRPERAFWSALTRVIGTLNDRKAAQTDDDLDGARCAFASCAAMIDMLRREIGQIRDVNGVKSYGARNLDPRCRSSFYALVRHSDGQVERITSTGGRSGGALQELTSFVYGAALIYLLGGGMDNKLKPSYTTLFLDEALIKADGRYTRRALSVLPRLGFQVIVSAPESKTGEILEVSTKAYVTRKDPDTGYTTLHEARLDGIDEMDGADEPEGTVESDDAAE

SEQ ID NO: 38374 - protein, 543 aa, Bifidobacterium longum
MADVMRELERLRPVYETGVLRLLLRQNAMLYVSLLRSTFDPLTGELPRETVEERFAQSLNALADAGEYAPREDQTFAEAAHQILADLTREGEGDYAWLANSHDAASHRFLYRLTARAHRAIEALSRLEDESRALSGAQANSIIMEIEHARMQLTADPGERIKLLNREIKERKHEIKRIQQGKQHATLSEAQVEDVIAVIHNTLRGVPIDLRELVLDERDNGDALRRRMQAGDISVDENLTRYHDEYRRSFRESDSGRRFEDAFQVIITDEGRQQIDEALRAIAKTPYLAGESGVLLGQIRDELARIYDGIEAVRRQMRVSDEAISRLVRQQTDTRYRTMLTRLNRLYARLNADAKTHMGDASRPYDTATSDALFAPLPMRPAKSMTRATAPGLSDLAAEAPQSTPVADLRDMVNSGGPRLLRMVSLIRRNPVTVDRSDDRPGATLVDIAASFNRLPESERRESEIVGFLGGLGAVSGNAIADEPSTDGVGVGVDSDIATEPAPAQCGDTATWHCVSIDGEPRNWITRPVLADMDELSIIVEEG

SEQ ID NO: 38375 - protein, 227 aa, Bifidobacterium longum; identical to SEQ ID NO: 31245

SEQ ID NO: 38376 - protein, 1182 aa, Bifidobacterium longum; identical to SEQ ID NO: 33523

SEQ ID NO: 38377 - protein, 394 aa, Bifidobacterium longum; identical to SEQ ID NO: 31243

SEQ ID NO: 38378 - protein, 492 aa, Sinomonas atrocyanea
MLVRLAELESLHRGPAWALTRSAPWTIAALQTAFSRNRPQVELEQFHEELDAFLEDLRAHDAASGAAPTAGAATGRSVADDWTRRRFLARRSHGGRIVYELTEAAARVLAFLDSLSSERSTLTGSRLGTLLGDVERLARETNPDTTARIEALEAEIEERLELVRAMRAGEQTGSLDDETALEAAENILDLAAGVPADFKRMRDRIEDSVGQLRNQIIEESLTRGATMAQVLEADRRLRASSEGRTFRSFTAFLDDPEQQMRFRAAISEVLSRDFADGLGHEERETLRHLVAELREANAQIQRIYGKLSESLNTYVQSDDYRQSVRLRDAIRRAEQAVRQLPYVREESGFAPAPELFGAEFESLSMVKLFDPDELAPPPRLADPISFGREDRVRSARTAKARAAALREAVDVALEAGGGRAQLGDIWSQLPAEEQHINSIRALLAHLLNRGVGFGRDAWAPLEFEQVDGTRRMAFVPQAEVTVEASGPSGEEN

SEQ ID NO: 38379 - protein, 301 aa, Sinomonas atrocyanea
METAAEVTPRDAEVTAEDAEVMPEEPFVPGTALYDGDTGVLPLRVRHVLVRLLKGPYLDGGRDEKAWTTLLDHEDVLRSRLSELFLRLQIDHERTIAVLRPVDPELLGTASRATVLRQQRVLSRVETILLLRLRLLLDRHATAQTEPTVTLEELADVVAHYQPAEEQDALRDADTVNRAVAKLQARRLLIPTPLEDVYLISNALPLALPFENIGDVTRHLEAVAAAGPSRDGGPADDAGQAALGVDLAVGGEGAGEPGGRDRPDGADPLDDDPDPDAAVPGDDVAVPPGGLSGSDETEGLL

SEQ ID NO: 38380 - protein, 1153 aa, Sinomonas atrocyanea
MSVATMLPLGTAVNPGQYRLSLVQVVNWGTFHGAHTMHVDRAGTMLTGNSGVGKSTLFDAIARVFDARPRSNEAAAARAGHSEDRRTTYTYMRGKVGDVAVGEGRASAFQRPGATWSAVALTFDNAAGTAYTLTALFDLPKNGTESSLGRFYLIDSVPLDVAAVEGIIGQTPGRRFTRSGLEAVFPEAQVFDVHKNFAERFRRLLGISSDQALPLLRVIQAGKGLGGSVNSFFRDQVLDPPATLAAADEVVEEFSNLMSIRARLEDIRLQRDQLAPIPALNQEYEAALAEAARLRELADEPFDAVRQSHAVAVQERLIAGIRERAQAKAKELSAERHRRDALAAELRSLEAEYNSAGGNQISALEQARDNATVALRLRREVEAAAKAGMHDAGLDLAFSAEGWEAAHRQAAEALAGLEGDTAALREARFDAFEAHATAKRELAEARSELAALAQSKSLLPQHAVENRAAIAAALGLDEDEMPFGGELIDLAEDQERWRPAAERALRSLATTLLVPGQHFAAVTRWLDANPVRGALRAVDLSSRVPGAELALDSVGERDLLAKLEVAPGPAGHYLRERIAVDFGYTCVEDPDELAGVERGLSLGGVVKRGRGTVEKDDRFAARADFVLGFDNAAKVELLAARVLELEASLAAAAEAAQASEDSHQGLSRRLEALRRVARDERAWEEVSSAAAEDELRRIGTRLEDALAAQGDLEPLRAKVEAARAEHQASTEAAAVLQSEYRQLDSQLVTADRLLEAARARLADAPPSAAATGTLGPLFDEFGQAEDQHDLERIAAEVHGRLAARVHAAESRAQGAAERLTRIFEQFQRDWGPVVAADHGVSIGAAPAFEARYRQIVSEGLPAQEAQFREFFAQRTHESFSTLLHLLDEERRGIAARILPLNSILAGVDFHDGSYLELDIRQTVPASAKQFKDAIASALRARHAPSSAAAAHDAGPSAAGSGAAGGGAGEDQLTVRYKTLEALVKRLASQTPEDRRWRAEVLDTRAHVFISCKEHRVSRDPAGAARDEVFVHADTGSMSGGERQRFTAFIMAAALSYQLGIAEHGFTGYGTVMMDEAFVLASEEFAGQGIAALHEFGFQLLLAAPENVIDLSRYLGSVTEILRDKRTNRSGLIEGPAVPGGPVSQANPVDIVLR

SEQ ID NO: 38381 - protein, 498 aa, Marinobacter sp. T13-3
MDEQTRLRTQSYSVARYQHPAWKVLSATRGPLVLSCLQVLFEQNREEILFEDAQQMLSEILRQHANSDDLELPTDDLAGEARKELRSWIRRGLIVERNGRLIATDALQKALAFVDGLDERVMTSTASRLATVQREIENLETRLNPDAESRADHIRRKIDSLESELEDIKAGRFKVLDGPEAAEGIREVYNLATSLRADFRRVEDSYRDADRRLRQSIISEKHHRGEIVDRLLDGHDTLLETAEGKVFHGFHEQLSRSTELNNMKHRLRTILAHPAARHALSRQQQDELRWLIIRLIQESAAVIKARARSEKDVKGFLKTGLAAENHRVGELLNGILNAALNIDWASHKVRKSDTPLPPLAVAASSLPLVERLRFKSATEEQAQGLELAEQNVDLTEVDEEFWRAFDGLDREALYHETVELLKVTDRPMSIGDLASHLPPTHDLETVALWLAMAREAEVEISNDREAVDITDTNGQKLRFHVPHLTLTRHDAESINWEL

SEQ ID NO: 38382 - protein, 252 aa, Marinobacter sp. T13-3
MPDYFDQLTRQPDEQTADQEPEPPAGPDEKHAGEASTVDETPYTASNLKATAQELLKYGLLEADRKARLYQIAITQTGEINRILEPFDLRLKVDDIRGLAFLVVADQLFRDGDENDDEWSHPLVRRQRLNMEQSLLIAILRQHFIAHEQEAGLGAGDAVVELDELLPQLQLYLGDTGSDAKDQKRLRGLLDNLKNHGIVSDIDANDQVVIRPIITHLANPENLQNLLQHFRKMAGEISHRDGTSDSEEGGIE

SEQ ID NO: 38383 - protein, 1107 aa, Marinobacter sp. T13-3
MNLPQDDLFATEIIPPTAYILTHLDLYNWGPFGGRHCAEIDPKGSAIIGPTGSGKTTLVDALMTLLTQQPRYNLASTGGHESDRDLISYIRGVSGAGNNSGDNSHIARPGKTVTGVSARFSNGDTNLRIGALFWVDGSSSAASDLKRLWLFSERDDQSLDDWLAIHHEGGARELKQHVRDTPGIQANDSKKAYLAQVRRFFEVGENAFTLLNRAAGLKQLNSIDEIFRELVLDDHSAFDRAAEVASEFDDLAAIHSELETARRQHQSLVPIAETHEKHQATYKELEQLKTLKRILPVWFAQAGYDLWTDRIHELDRQLIESQNQIDSLTSTVSGLNNQATTLKDIYLEAGGASIEQLREQIGQQQRWVNERASHANDYRALTRKLDLDDRLSAQALAANQQTGEARLRELSEREETQDKTLLDLRLEHGKLSETLKELTDEIDRIKARPGSNIDGRYQEFRSELAEALNLGEDQLPFVAELVEVKPEEKDWRGAIERALGGHRLRILVPPAAMQSALDRVNARDNRLHVRLMEAQTPQAQAQFMDDGFTRKLNFKDHPHREALKGLLAGIDRHCVDSPEALRQTPHGMTRQGLMSGKKGFFEKRDNQRLDKGWMTGFNNRDRLTALTEELREAQGSEREIQQAMGKAQAALKSTRDEITLYEALAGIRFDTIDLPSAEKELSELQNRLESLTAPDSDVEQARQKYETVNQELEQAQQDLSEARTQYALLDDKRSQATQRCQEMLERLGEGLTDEEQILAGQHFDTPDASQYDRLETLERSQRDKLEKAISTLNKQLQRYQLNLTQLMEKARTLDTGALAETGSDIRDIPEYLERLRVLAEEALPEKLERFLNYLNQSSDQGVTQLLAHINNQVAIIEERIADLNATLKRVDFQPGRYLRLEPRRVTHESLRTLERAQRQLRADALKDDQGESHFKALQNMVQLLRDAADSKRTVGARALLDPRYRLQFEVSVLDRESCTVIETRSGSQGGSGGEKEIIASYILTASLSYALCPTGATQPLFGTIVLDEAFSKSSHAVAGRIISALNEFGLHPLFVTPNKEMRLLRAHTRSAILVHRKELQATLTSLSWEELETHAEKMTRKRDEIPG

SEQ ID NO: 38384 - protein, 383 aa, Marinobacter sp. T13-3
MKSPADLASRLARQWQNADLREQRLLYPGSWPVTLPVGKPSGGDVRNRLEQVRAHLEQWRHVDTGRVHWQPVRFQSAAEPISVPVSWELNSPSEWVEATNDPEVRREYQILGRLVPELDPRFHSLVIRRRSLVMDRPETEVIRCGQLALQLTPDCAEGKPLRALSLAGIDSKFFERNRQLITHMLDVLFEGRASQTGLEAFLGAEDEGHHWLLVADLDGSLLPFSQLRVRARDLQSSPLPGQRLLLVENERCLHQLPNAPGTLAVLGSGLNLSWLGAGWLVGKSIAYWGDLDTWGLYMLARARELQPKLTQLLMDRSTFDQFEESSAVHEPEPAPAEIPEALTPAEAALYSHLNDAERGRLEQEFLPAETAQQAINAWAESSR

SEQ ID NO: 38385 - protein, 489 aa, Sutterella sp. KLE1602; identical to SEQ ID NO: 32027

SEQ ID NO: 38386 - protein, 236 aa, Sutterella sp. KLE1602
MNSPESTDAARNDEQAAGLWRGDAGGLKLDARRALVQLLKGPVLDGMRMPVIWKALLESEDLIRSRLNDLFLDLVIDREQLFAFTRQADTDSVKAPILLKRKPLNYIETYLFLFLRLRLSSAEGRGERAVIGLDEIREHLADIAGRNRDAVGFERHLAGAVTKADHFGVLRRLKSGEDAFEISPVLKMLMTAELVEQVKDYYEGRAVKPGEAAAEIPAGIENDESEDDEDDAEDME

SEQ ID NO: 38387 - protein, 1126 aa, Sutterella sp. KLE1602
MTDLALFPELMPEEQFRAVRLQVHNWGTFSGCNDIPIAEEGFLFVGASGSGKSTLLDAFSQLLIPPRWVDFNAAAHETGGKVKGDRSIVSYVRGAWSELQTDAGVTTQYLREETTASGLALTFRNARRIVTLLQVFWIRGKLNGVGDVKRLYAVVERDVDLKALITGFSESDYDLRRLKLDLGDARCSDLFPPYETAFTALLGIKSSLALKLLHKTQSAKNLGDLNEFLRNFMLDEPRTYAIAARLVDEFVELEASHRAVVAANAQIRVLSPAQTAFGDMQQAEEGRLRAKLLAEALPAYRESWRANLLTAQAAKLENERRTYEENVRTIQADLVARRSTLADLELRERQSGGDQIAGWEAEKARREQDRDRAMRERGKVEAAARELGEALPPTADEFRTLVEAAAAEEAGAADLKKARDAKIEALIGEEHGIKSELDVLCEEIESLESQRSGIPAVQLRIREKVAAEAGLRTTDLPFAGEFIEVLPEQIAWRGALERALRPLALSILVPSEHFEAVSRVVNGANWGAHVRLLRTGGAIVEEAGSLSDDSVIRKIRVTDGVHAQWLESVLRRDYDLACVETPEAFAAARRAVTKTGFVKDTHARYDKNDTRAVDDPRAWVLGMDNRAKLAALRAEEEIRRRDLHEKRRAITALKNEEAEASRRLVHCHTLAAASWIDIDPAPILADIHRLEAQIRAVREGNEALRELAKAIEETRIQIAAVEEKLSDAKADLKTADGALTTVRKRLQTLNDAWSTQIAALTDGMRKGLGDRFGARLGEIRLDTLDDLVNMVAREINDEISKLVARVKDMEIRVTTAFDKFRDQFPAESADLGAGLEFAGDYFRLLETLERDRLPDFEAKFRELLRQQSMQNLSQLRQYLTEERRDILQRLELVNESLHVVPFNVTNGRRTFLRITTQERMLSEVVEFRKRIRDALEGAWDVKVEDGEAEKRFAILAELVSSLKDLPENRRYRDTVLDVRRHVDFIGEEVDDDGRQIEVYRSGAGKSGGQRQKLTTTCLAAALRYQLCGDSVSVPTYALVVLDEAFDKADSDFTTLAMNIFRQFGFQMIVATPDKAVTTLEPFIGGACVVHIVERKYSSVLTIPYDGAVHRLVWKAPAESAEPVKEA

SEQ ID NO: 38388 - protein, 403 aa, Sutterella sp. KLE1602
MKTPAEVRTTAARRFRASCRRWLAGHLGLPDDSAWPFAVPLGVPSEREVLADPQKTLDWRDAWSAEAESGRLKVAFAVRDWTACGRQTVPERAVFESPEAVARAAGELHTWRRALERASRLVDGEDGLREAVVRAWSVLAEWEDEDFAILLSAFRWLADNPESGLYVRQLPVEGMDTKWLTKPRMTVLRDLLAARWRASGRPVPEAQAFEAFAGLRSRPSSVRMRLLDPADRALMHGLSDLSAPPEEIAILPLHPRIVFISENEQSGLAFGDVPGAVLFFGLGKGVTQLDAVPWIHEGTVIYWGDADTWGLQILASLRRRFPKTRAVMMDEATLVRFHAYAVEEPRQAPEAVCEGLLPAEAALWDALKSDKYGMRLRLEQERIPWAHAWAELMKAVAEASRKS

SEQ ID NO: 38389 - protein, 482 aa, Bacteroides intestinalis
MQVEKIIQILRESPSIRLIKSRSVDFFLSFVIEAFEGQSAIMQERLHMLLENRLDEQENALVEDNLEMTRLGESNEQKAKRLIKDWTDKGFLTNYQNEEGEVIYEISSHTSKLMDWVVSLKKEDYIGTESKFKTLFAQLKELVEYSNENREKRLELLRAKKMEIEHQIQRLEMGEEVEVYEDYQIEPRYNSLNKLAKELLSDFKEVDDNFKGIIKEIYERQTDNAEKKVLLNYIFDAYGELKQSQQGKSFYAFWEFLLSADLQKEWDELTGALYETLENRGIDAHDMFLREMKKHLFDAGEKVAKTNDRMSEKLSRIIRQNGQMNAEVTKLVINDIKKLLIEATKQKEKPEASLEYETIDINLPVERPLTLTPIKETVYKDKPDMAELSLDDLERIGKLYNPYHIDRQVLRDRINKVLYDRRQTTLAEVIEWNEGVEKGLSEVFGYIGVLKEYKTVVNEERQQYIVFAENKTISIPEIIITR

SEQ ID NO: 38390 - protein, 194 aa, Bacteroides intestinalis; identical to SEQ ID NO: 31895

SEQ ID NO: 38391 - protein, 1131 aa, Bacteroides intestinalis
MMQQMNLFNTSPEVAGFKLDYLEVWNWGTFDQKVYCMNTQGNNSLLTGANASGKSTLIDALLTLLVPLKRQRFYNQSSGVEKKGNRTEESYFFGNYGNQQQEGAASTTTLRLRDKGARSVLLASFCNVDKRVVTLFQVRYYTGEELKVLFGIAREPLTIKRDFSEFDLHGDWRKRLTKKYNTNDTRRKIEFFDGPVAYGEKMIALFGMRSDKALTLFNQIVGVKVLDDLDSFIRTNMLEEVLAEEKYQELKDNFQNLMEAKTNIDKVKEQIAQLKPINILAKELMAIDTRIAELEQEKSMVVYWFAARTVDLCNEELVRCKSNLRKLEDELKALKVKKSELEQEQTRLSVAIEKDEVGQQIREIEKEINQKVKMRDNRKAKAEEYDKLAKTVELKHSPDAEVFDANRATAKHEKDALQVKIDRQLMEEKRQAQNRQDEINCTISERVDTIRYLQQHKNNISGRVAEIRDEILEAVGATAEEIPFIGELIRVKDIECDWEYSIERILHNFALRLVVPEKYYKQVNEYVNGHNLRGRIVYQRYEGTEPLREFEDRTLKVDSLLRKVEYKPKCLYLDWLEDKLFAEFNYSCVDSLADFNYLQEKAVTKEGLIKARGGKHEKDDRPETRGKEHYVLGWDNKEKIAMLQAEVRQLQQDEKEVATKVRRIEADTKNAQEKRETYSKLFDKYDKFDDIDWWSCALVIQQKEAQKRQLEETNDKVKMLQGQLEGVRKELGALEEKFNEAIGNKALLENRENILKKQSNDCALALAQIGVVDTDAFESQHTDLLNVALVGLDKMRDTLQSDINSALRKQRETKGSKSGDLKNLIYRFKNPTEEITAKYRDWRSDVNRLPEAVEFMGEYQTYYQRLLDEDLPGFESRFNKYLRENIINKVSAFNMFFQNWRQSITKTIDQLNSYLVGIDFKDAPKTYIQLVAAKRLNVDLKEFQDLLSSAIPNIHEMNSTIDGSRIHFEQHIEPLMSRLQDESWRKLVMDVRGWYTYKAEEFYQDDDQKRNTYEAMGQLSGGEKAQLTYTILGSAIAYQFGLTKNGLDSSFRFIAIDEAFRAQDEDKARYLISLCKQLHLQLLVVTPSDNIHIVENDISYVHYVERKGDRSVLYNMPISEFKAERERSMEV

SEQ ID NO: 38392 - protein, 384 aa, Bacteroides intestinalis
MITAAEIRKKTERKYVDYLRSVVAGSEFEPIVIPCDKKASASMDEYQHELTDIRSQSKEVRGFGYTIEWKTVKTKALGEQDLPERVLFRSASDVERFLLKGGEVSQFRKDVAMLFNEFPQLRPWVERYPLKVIENASSWPDLLKVLRYFVANPCPKLYIRELPIEVHTKFIERNKGVLRELLDIVIVEHVCSDEKEFEKRFGLRYDEPWVRIRVLEASIASEYFSGVDDLTMPQSQFCALSLPVQKVFVVENKVNFLTFPKLAGSLLIWGHGFTVGILKSVPFMRHASLYYWGDIDVQGFEILSQFRSYFPQTQSLLMDRATFDTYFEGDKGTPSNVSKPLHLTPAEATLYNHIKSHNLRLEQEKIPQKCIDNIFNSSLKISQV

SEQ ID NO: 38393 - protein, 503 aa, Gordonia sp. QH-12; identical to SEQ ID NO: 32236

SEQ ID NO: 38394 - protein, 199 aa, Gordonia sp. QH-12; identical to SEQ ID NO: 32237

SEQ ID NO: 38395 - protein, 1134 aa, Gordonia sp. QH-12; identical to SEQ ID NO: 32238

SEQ ID NO: 38396 - protein, 497 aa, Steroidobacter denitrificans
MDSNSHERTQSYILARQQNPAWQLLAGRRAPLVLGCLQALFEESQDGVDYDDAQQALAELLAGHVGLSEFEISGDTAMLARRELRTWIRRSLVVEREGRLYATDALETALRFVEALDSRIMTSTASRLAVVQREIERLEARLNPDPQSRAEHLRRQIADLQRELDEAEAGRIEVADAKEAAEGIRELYALATSLRADFRRVEDSWRAADLRLRHAVVNEGHHRGAIVDTLLDGHDTLLETAEGRVFQTFHQQLQQEIELEAMKRRLRTILQHPQAGIALTLSQQADLRWLVMRLVKESASVIRARSRSERDVRSFLRTGLAAEHHRVGQLLNEVFRHAQAVDWNIASVRRQPARLPPLAIACGGLPLVERLRFKSLDQQALRDLDLQRMAGDIDQIDEEFWSSLDSLDREALVRDTVETIRGSDQPLSLAGLAQRLPPTHDLESLAVWLGMAREADCTIGEECETLDLATRDDQNLRFHVPLLGLDPAAFEHFEWEP

SEQ ID NO: 38397 - protein, 202 aa, Steroidobacter denitrificans
MAAAVRATILELMKYGLLEEASKPNLYRNALLHRDEVDRMLGWLELALRIDDIRGLAFIVVAAAPDRDDDEWSHPLVRRQRLTLEQSLLVAILRQQFVAHEVEAGVGAGDARVALDDLIPHLQAYLGDLGSDAQERKRLLTLLEQLKGHGIVSDVDQQERVTIRPIIAHLANPENLTNLVQALREATGGGDIGPTSVEEADE

SEQ ID NO: 38398 - protein, 1102 aa, Steroidobacter denitrificans
MSTSPALASGSYVLTHLDVYDWGAFDGRHSAQIDLAGTAIIGPTGSGKTTLVDALMTLLVASPRYNLASTGGHESDRDLVSYVRGVSGAGNDSEANEHIARPGPVVTAIAARFSNGEAVLRIGGVFWLDGTSSALTDLKRRWLFCQGDTPSLDEWLETHRDGGARALKELERTCPGFKVYDTKQAFLARLRNHFEVGENAFALLNRAAGLKQLNSIDTVFRELVLDDRSAFDSARAVADEFDTLAGIRQELETARRQRDTLAPIDKGWADHQETSVRLDEHNRLLALLPAWFGEQAITLWERRAAAENIKLLEQQQQAEALSKDLALAEAEDQALQVIYLQAGGQRIEELRRHIDTQEEKLERCQRQAKDYQAWTISLGLSPALTLAAVQANQTEIEQRRIDETERWEVQKRAAWEIGAKQQALLAERDRLKHELDESKQRPGSNIPVEQQRFRSLLADHLSLDESALPFVAELVEVQPEQARWRGAIERAIGSERLRLLIAPEHAPAALTWINARDNRLHVRLREADAPAEQARFFDDGFTRKLNFKPHAHRQALKHLLASIDRHCVDDVQALRRTPYAMTVQGLMSGRSGYFDKQDQKPLGRDWMTGFDNRDQLARLAQDLATATELHAVSQSEMRKAEELVENTRKGLSLLDRIKDAVFNDIDVPGAQAELDQLRQQLQALTAPASDVEQARIKWEIAKAGTEALRGKQIELQTQIRLLTQAIEQANDAVGRIRKRIGSGLDEAQRALATQHLETQRVDEPSELDDLERREREGIQRAIERQSARLRNVEQQLVRDMAKAKAADTGALSEVGTELQDVPAYRERLRVLDEEALPEKLGRFLTYLNQSSDQGVTQLLSEIDSEVSVIEERIADLNATLERVDFQPDRYLRLEPQRVEHESLRTLRQARAHLRSAQLKDDQGESHYRALADLVGLLRDAVERRKTLGALALLDPRYRLQFAVLVIERGSGKIIEKRTSSQGGSGGEKEIIASYVLTASLSYALCPPGSQRPLFGTIVLDEAFSKSSQAVAGRIIRALAEFGLHPLFVTPNKELRLLREHTRSAIVVHRKGAQATMTSLSWEALEAHARNRTQRQEHDVEVA

SEQ ID NO: 38399 - protein, 387 aa, Steroidobacter denitrificans
MKSPDELANLLTRQWHSADKRERRLLDPQAWPLQLAIGRPPPALFAHHTARVREHIARWRTVTVGEVRWQDTAFRSAAEPVSLPLHWQLSSPEEWAQASGDAQVQLELQRLRYLLDRVDPRFHALLIRQRGLWHERNDEEVVQAAALTFELEPGIAAGRPLRGLALAGIDSKFIERNRGLVTALLDIRFEGQASQLGLTSFLDAADEGDHWLLVAPLTPGLLPFAQQRVRARELMDTPLPAGHILLIENDRCLHLLPPLPDTIAVLGSGLDLAWLRAHWLRQRHLGYWGDMDTWGLHMLARARSLQPHLQPLLMERALFDRHAAALAVPEPINAGAEPHDGLLDHEQDFYRHLLTLPKGRIEQEFLPGETVTHVLSRWVNTNFGAPE

SEQ ID NO: 38400 - protein, 470 aa, Mycobacterium sp. NRRL B-3805; identical to SEQ ID NO: 32141

SEQ ID NO: 38401 - protein, 223 aa, Mycobacterium sp. NRRL B-3805; identical to SEQ ID NO: 32142

SEQ ID NO: 38402 - protein, 1123 aa, Mycobacterium sp. NRRL B-3805; identical to SEQ ID NO: 32143

SEQ ID NO: 38403 - protein, 487 aa, Burkholderia monticola
MKALRGAAALRNLREQPLWRLLAATKAPVVIALLQSLFTGTDKALSSSVLHERLARDIDSLRSTGEELPQSPQAYVSEWLNQGWLTRRFPIGAPEEEYELSAEALTSVRFVTGLLTPRTTATESRLSVVIHQLSRLAEATNTNPEARLAALRAERERIDTAIADVERGGARVLPSDRAIENAREVIALAQDLAADFRSVRDEFERLNRGLRQSLMENEGSRGDVLEQLFAGVDLIGESDAGRTFNAFWRLLTDSEQAATLRESLDEVTSRPFARQLESHERKFLHGLTGALLNEGRGVHDVLQHFARSLKSFVQSREFLEHRRLHSLLKEATQAALTAKNAVRPNEQVGFELMQSSGRIRSVSQWALYDPTQRVTDWSMRVAEPSELDLETVSELVRQSEIDFRTLKAHLRTILERQSQVTIGQTLIEFPAEQGLGSVVGYVALGAKHGEVTDGIELVSWEGDDTTQRRAKIPTIYFMRERYLELVD

SEQ ID NO: 38404 - protein, 242 aa, Burkholderia monticola
MTDPTDASFADEPGPDTPVADTATFRGDTGSLPIDTRRVLVQLLLGPSVDARRQSKLWPVLLRDEAVVRSRMHELFLEVVIDHEQRVAFTRQVVSEDIDVPVLLRKASLTFLDTALLLFLRQRLTQADAQGERAVVSHNDMQEHLSVFERGNNPDHAKFEKQIVNAVDKAKKLSLLQFVRGSGERYEVSPTLKLLFSAEEIQDLTRTYAALASSQYAINTGEGNATEDDASSSSAENEEDSL

SEQ ID NO: 38405 - protein, 1117 aa, Burkholderia monticola
MNIDQHVLLDGSDDQFRLARIQTFNWGTFSNVFDFPIPKEGYLFVGPSGSGKSTVLDAHAALLTPPKWLDFNVAAREADRHGRDRSAMTYIRGAWAQQTGDGGEYVSQYLRGGTTWSAIAETYRDEQGRVVVLAQVLWVKGNTTASSDAKRLYLTLEREFEIQELEFFVKNEFDTRRFKHDLLDAKVYTEFSAYQERFRRLLDIDNERALRLLHKTQSAKNLGDLNVFLRDFMLDEPETFGIATSLINEFGELNEAHQEVVAARDQIQMLKPARDAHMELERGNNDRIGLQAIQTAIDQYREHRRKVLVDERIAELEVDREASRQEFQRLSQIADDESVKLTDLQRQKLKIGADVLVRLEENIKATEADKLVRMNRRDQAATACKVMGWAMPDSVVWFVQRVESAKQRVLRAHDLTKEVEDRKDQLKADHRQASEEFTTVVAEVKALERQRSNLPARLVDLRERMARDLSIPEAKLPFAGELVEVRSDSTEWRGAIERVLGGFARSILVDEKLYPAVSAYLNERNIGERLVYFRIVQQTSGRMPGPNSLVRKLNFAQGSFGEWVREELKHSYDLECTDTLLAFRNAPRAVTREGLVKHNTVRHEKNDRHSVNDRSQWVLGFDNKDKLTLYKNKAAELGGRITELRVALDKIGDEEVLQQQQLLQCQNLSNLTWNDVDVGALLARIDDLTTRLNAERDARPDLAILDDRIKTQEGVHSTAIGKKNEEDAKGRSIKSDIEKLNVKLAELARLWPTSDRPPAFAAQIAARYVATGKEVTLENLDQVNGQVDRSLSNELRAIESHLGELRNAIVQRFVEFNRLWPSVAGGLDATLASADDYLAKLKRLEDDNLPAFEDRFFGLLREQSDQNLTLLATKLDEERSAIRSRMELVNESLETAPFNPGTHLVIETTDKSLEDVRLFRASLKESLSHSFSNDRDLAEDRFKTLAALVKRLASQETVDKNWRNLVLDVRQHVEFVARELDGDDVEVEVYRSGAGKSGGQRQKLAATCLAAALRYQLGGQDRALPSYSTVVLDEAFDKADAEFTAMAMNIFKAFGFQMIVATPLKSVMTLEPFIGGACFVHIKDRKKSAVIPIEYDSESHRLKLTQDVRNAEETTVS

SEQ ID NO: 38406 - protein, 489 aa, Stenotrophomonas sp. DDT-1
MKHRERISRYRHLREQPQWKLLAADHAPEIIGLLQGLLMDGERTLPSSVLNERLQRALDQLNGDELSRELPRTAQAYIAHWLAQGWLERRLPEGADQEQYELSTAALQAIRFADGLEQARVAATESRLALVIEQLSQLAAQTESDPDARLSALRDERDRIDAEIARVSAGRVIALDGKRALERARQIIGLADELTEDFRRVRDDFEQLNREFRERIIDDEGERGDVLSQLFEGVDVIGESDAGRSFQAFWRLLNDAEQSAQLDAALEAVLARGFARRLDRNERNFLRGFTSTMLERGGQVHDVLQHFARSLRGFVQSRGYLEQRRLNQLLKQAQSEALALRDEFPAQRGIGRDLQLTTSRLRSWSQWKLHDPRSAQVDGNVEYNDAAAISLESVGDLVASSEIDFRTLRRDLHDLLDAQPRLSIAQALSQREAPQGLGSVIGYLSLGTRFGNVVAGEQELAQWRGGDGQIRRARIPLVWFTQERRHELA

SEQ ID NO: 38407 - protein, 233 aa, Stenotrophomonas sp. DDT-1; identical to SEQ ID NO: 31708

SEQ ID NO: 38408 - protein, 1126 aa, Stenotrophomonas sp. DDT-1
MAISKHTPALFNEGLPDPRLQQFRMRRLQVHNWGTFNGLTEVPIAERGFLFVGRSGSGKSTLLDAMSALLTPPAIVDFNAAAREAERSGRDRNLVSYVRGAWADQQDSGTGEIATQYLRKGATWTALVLEYRAGDGRVVSLVRLLWISGNGTSAGDVRKHYMIAERPFDIAKDLGGFDLDLRKLKQKLPDLHHFDTFSGYAERFRDLLGIDNEMALRLLHKTQSAKNLGDLNVFLRDFMLDTPKTFDAAERLVSDFAELDGAHQAVVTARRQVETLLPARAYYNDLKEMHRRRGDDEALKLGVDSFRESRRQALIEARLREMDVRDRGLLGEESQRRAALDNHTERLAELELQRRQQGGERIEELEREQGRAEAERDRRQAKREQARQAAQQLGAELPDDAHGFAELVERAQNELQDRQRASSALDDAISDRLGGKRDDERRFGEVRAELEAMQRTPSNIPAPMQKLRARLAEETGIAEAALPFVGELIQVRSEEQGWQGAIERVLGGFALSLLVDDKHYNDVAEWVNRTHLGMRFTYYRVRRNDDAFAREPSAKSLLHKLELREHVFESWLRRELGKRFDYECVDAKQLRNVDRGITREGQVKHPGDRFEKDDRSAVGDRRRWILGFNNHDKVGAFEREAQELAKRIASCETDIARLRGQRDRDNERRLACHELVSISWNEIDIAAPQQRLSDIEATLRDLREGNADLAKLAKQIDAVRADIEQSRRTYEDVRVERGQLVKERDRLDRARQQSRALVLPSLAQEQEAGLAERLQEQGPLSLETLEAHMRQVSNALNEQLSSSQQDLNRIENQLIGCFRRFIQQWPEESGDFTVSVASAEDFLARLERLERDGLPQHEERFFDLLQNQSKNNLLALQRHSAEARKSIGQRLDEVNASLEQVPFNRGTLLTIELSDRRLPEVAEFHLQLREVLSQQQTEQRELAESQFTVLRQLVNRLGSQEGEDKRWRELVLDVRMHVEFIGVELDAETRQQVEIYRSGAGKSGGQRQKLATTCLAAALRYQLGGADSQLPSYAAVVLDEAFDKADNEFTALAMNIFDNFGFQMVVATPLKSVMTLEPFIGGACFVEISGRHDSGVLLIEYDEEGKRLKLPERSRQQANEPEEAEA

SEQ ID NO: 38409 - protein, 491 aa, Acetobacter malorum
MKLDFTTLNSMRQHNPAWRLLCSDHAPLILSFLHQAFVRPNVRSLEAESMAEALEDTLYALRQQLDENAFPRTAREYLEDWASPDKGWLRKFYQLGTDNAVFDMTPATEKALSWLEQLAERSFVGTESRLRTLFDLLRQMNEGTQSDPDQRLADLHQRRDEIDAEIARIQSGDLSLMDDTGIKERFSQFTRMARDLLADFREVEHNFRRLDRAVRERVALWDGTKGALLDEILAQHDLINESDQGRSFQAFWNFLMSSRRQEELSQQLEHILSLPVIAEQNPDPRLRRIHYDWLEAGDHTQRTVAQLSHRLRQFLDDQSRQETRRIMEILHNIEAHAIAARPYLSDCPPDEALTDLDAMAASPDLIMERPLYSPPLPTILTVDPLPEDTAEDVDPIALYEQVVVDRVRLTENIQQALSEAPQISLAALLSRHPLEQGLSELVAYLQLSSERFESLIDEKTNDHVNWDIMTEDGSIITRHATLQRVIFVRSA

SEQ ID NO: 38410 - protein, 1135 aa, Acetobacter malorum
MTDTQQAPLDFAVDDRLAGFRLHRLEVLNWGTFDKRIWRFDLNGRNALLTGNIGSGKSTLVDAITTLLVPAQRIVYNKAAGADTRERSLRSYVTGHYKSERNDATGSTKSVSLRDTQSYTVILGVFKNEGYLQTVTLAQVFWIKKQQVQPARFFVCAEKELSIQEHFTGFGTDILQLRKNLRAQGSEVEDSFNRYAAWFRRRFGIENEQALDLFLQTVSMKSVDNITDFVRENMLARFDATERIHALISHFEDLDDSHQAVLKAQKQISLLTPLTEDLTAHAESKTRHDTLKACRQALPGYFASQKATLLEQKIAKEQDTAATNQQQLTEQDAVRTTSKQQLDEIKQAIYANGGDRLEQLAIAIQQAEKTSEDRRKNAAYYATLVEKLNEKPAHSAEGFLELTQHLKKQKNEWKKQDTWLAKDLTEQSILFHEEKNQHAEIVTELDSLRKRQSNIDERQIRMRAMLCDALDVSAEDLPFAGELIRVRDDAREWEGAAERLLHGFALSLLVPDHLYAQVVDWVDRTQLKGRLVYYHIQQHRSGSHAVRHSNTLAQKLEVHPDSPMRLWVENELAHRFSFTCCETQDDFRRSSKAVTRPGQVKEPGGRHEKDDRHRIDDRSRYVLGWNNAIKIAALEERQREQEALIQKHAGEIAQAENTRKMLQERFETLTRLERYPDYTQLDWQSAAQTAAQLTAEREALTATSDVLRELKQQKEHAEQTQQQAEAEYMILFKKQALLDQSVETLQARLQHCQTVLNDYTLTPQQEQELTELQIQLNGAELSSLEACEGAETQLRDQLDTQIDHQQRTLDSLRDSILKDMREFRTTYPVEAQDMDDHLEAGPEYCALLAQLKKDDLPRFVSRFKNLLTVNTINEIANFNAHLAQEREIIKERIAVINTSLTQIDYNPDRYIRLEAHQTLDPEIRDFQASLRACTENTVSGDDTEQYSEQRFYLVKTMIERFRGREGLAEQDRRWTNKVTDVRNWFSFAASERWRADETEFDHYTDSGGKSGGQKEKLAYTILAASLAYQFGLEWGEVRSRSFRFVVIDEAFGRGSDDSTQYGLRLFQQLNMQLLIITPLQKIHIIEPFVSSVGFVDNKDGNYSRLRVLSIEEHFANKASLHDAAPALLRHEEQSV

SEQ ID NO: 38411 - protein, 393 aa, Acetobacter malorum
MNWTTPADLKKQLERLWKKGTLPNALISKTCLFPLTLTLRTPSASDITKHLHAVRDWTEMLNAMRHIRLIRHTVKNRVQGTQTIPHKVVIETLEDALALLDKHDTARQILALHALTIEKAPFLLPWLAQNALTAHRHATEWERLLTLAVWMRDNPAPGIYLRQVDLPGIHTKFIERNRTILSQLFQHALPEQSVNRACSGMDQFEPRYGFRTKPLRIRFRVLDAALSPFPTIAHPDITLDSESFAALSLMGCRIFIVENESCFLAFPYLENALVIFGAGYCWDVLKPAHWLQKCSIYYWGDIDTHGFRILDHLRAILPRTHSFLMDEPTLLAYSAFWDKEPSPVRHPLSRLTPSEQSVFTALQTDLFSQNLRLEQERIHFSDLRKILDSLVQP

SEQ ID NO: 38412 - protein, 491 aa, Acetobacter malorum
MKLDFTTLNSMRQHNPAWRLLCSDHAPLILSFLHQAFVRPNVRSLEAESMAEALEDTLYALRQQLDENAFPRTAREYLEDWASPDKGWLRKFYQLGTDNAVFDMTPATEKALSWLEQLAERSFVGTESRLRTLFDLLRQMNEGTQSDPNQRLADLHQRRDEINAEIARIQSGDVSLMDDTGIKERFSQFTRMARDLLADFREVEHNFRRLDRAVRERVALWDGTKGALLDEILAQHDLINESDQGRSFQAFWNFLMSSRRQEELSQQLEHILSLPVIAEQNPDPRLRRIHYDWLEAGDHTQRTVAQLSHRLRQFLDDQSRQETRRIMGILHNIEAHAIAARPYLSNCPPDEALTDLDAMAASPDLIMERPLYSPPLPTILTVDPLPEDTADDVDPIALYEQVVVDRVRLTENIQRALAEVPQISLAALLRRHPLEQGLSELVAYLQLSSERFESLIDEKTNDNVNWDIMTADGSIITRHATLQRVIFVRSA

SEQ ID NO: 38413 - protein, 252 aa, Acetobacter malorum
MSQTVNTAEDAQASVQAPASLSTLAITLLKSVIYREEDESLWGHLLRLQNQVRDYVAVLGLVLIIDPAEGYAYLRSAPEPEEEEGASRMLRLIARRPLSFHVSLVLALLRQQLVRFDAMGGETRLILSRDDIASMLQTFLPENSNEVRQLAQIETYIRRVAELGFLRPLPPTSADAPHAPPRYEVRRILKAYIDVEWLATLDERLEAYLAHARSLEQTDLPLVATPTPPEENTAAESQLFPDHADTGLTNRD

SEQ ID NO: 38414 - protein, 1122 aa, Acetobacter malorum
MTDTQQAPLDFAVDDRLAGFRLHRLEVLNWGTFDKRIWRFDLNGRNALLTGNIGSGKSTLVDAITTLLVPAQRIVYNKAAGADTRERSLRSYVTGHYKSERNDATGSTKSVSLRDTQSYTVILGVFKNEGYLQTVTLAQVFWIKKQQVQPARFFVCAEQELSIQEHFTGFGTDILQLRKNLRAQGSEVEDSFNRYAAWFRRRFGIENEQALDLFLQTVSMKSVDNITDFVRENMLAQFDATERIHALISHFEDLDDSHQAVLKAQKQINLLTPLTEDLTAHTESKTRHDTLKACRQALPGYFASQKATLLEQKIAKEQDVAATNQQKLTEQDAVRTTSKQQLDEIKQAIYANGGDRLEQLAVAIQKAEKTSEDRRKNAAYYATLVEKLNEKPAHSAEGFLELTQHLKKQKNEWKKQDTWLAKDLTEQSILFHEEKNQHAEIVTELDSLRKRQSNIDERQIRMRAMLCDALDVSAEDLPFAGELIRVRDDAREWEGAADRLLHGFALSLLVPDHLYAQVVDWVDRTQLKGRLVYYHIQQHRSGSHAVRHPNTLAHKLEVHPDSSVRLWVENELAHRFSFTCCETQDDFRRSSKAVTRSGQVKEPGGRHEKDDRHRIDDRSRYVLGWNNAIKIAALEERQREQEALIQKHAGEIAQAENTRKMLQERFETLTRLERYPDYTQLDWQSAAQTAAQLTAEREALTATSDVLRELKQQKEHAEQTLRQAEAEYMILFKKQALLDQSVETLQARLQHCQTVLNDYTLTPQQEQELTELQIQLNGAELSSLEACEGAETQLRDQLDIQIDHQQRTLDSLRDSILKDMREFRTTYPVEAQDMDDHLEAGPEYCALLAQLKKDDLPRFVSRFKNLLTVNTINEIANFNAHLAQEREIIKERIAVINTSLTQIDYNPDRYIRLEAHQTLDPEIRDFQASLRACTENSVSGDDTEQYSEQRFYLVKTMIERFRGREGLTDQDRRWTNKVTDVRNWFSFAASERWRADETEFDHYTDSGGKSGGQKEKLAYTILAASLAYQFGLEWGEVRSRSFRFVVIDEAFGRGSDDSTQYGLRLFQQLNMQLLIITPLQKIHIIEPFVSSVGFVDNKDGNYSRLRVLSIEEHFANKASQSA

SEQ ID NO: 38415 - protein, 440 aa, Acetobacter cerevisiae
MRVEDTLYALRQQLDENAFPRTAREYLEDWASPDKGWLRKFYQLGTDNAVFDMTPATEKALSWLEQLAERSFVGTESRLRTLFDLLRQMNEGTQSDPDQRLADLHQRREEIDAEIARIQSGDLSLMDDTGIKERFSQFTRMARDLLADFREVEHNFRRLDRAVRERVALWDGTKGALLDEILAQHDLINESDQGRSFQAFWNFLMSSRRQEELSQQLEHILSLPVIAAQNPDPRLRRIHYDWLEAGDHTQRTVAQLSHRLRQFLDDQSRQETRRIMEILHNIEAHAIAARPYLSDCPPDEALTDLDAMAASPDLIMERPLYSPPLPTILTVDPLPEDTGDDVDPIALYEQVVVDRVRLTENIQQALAEAPQISLAALLRRHPLEQGLSELVAYLQLSSEHFESLIDEKTNDHVNWDIMTTDGSIITRHATLQRVIFVRSA

SEQ ID NO: 38416 - protein, 1135 aa, Acetobacter cerevisiae
MTDTQQAPLDFAVDDRLAGFRLHRLEVLNWGTFDKRIWRFDLNGRNALLTGNIGSGKSTLVDAITTLLVPAQRIVYNKAAGADTRERSLRSYVTGHYKSERNDATGSTKSVSLRDTQSYTVILGVFKNEGYLQTVTLAQVFWIKKQQVQPARFFVCAEKELSIQEHFTGFGTDILQLRKNLRAQGAEVEDSFNRYAAWFRRRFGIENEQALDLFLQTVSMKSVDNITDFVRENMLARFDATDRIHALISHFEDLDDSHQAVLKAQKQISLLTPLTEDLTAHTESKNRHDTLKACRQALPGYFASQKATLLEQKIAKEQAVAATNQQQLTEQDAVRTTSKQQLDEIKQAIYANGGDRLEQLAIAIQQAEKTSEDRRKNAAHYAILVEKLNEKPANSAEGFLELTQHLRKQKGEWKKQDTWLAKDLTEQSILFHEEKNQHAEIITELDSLRKRQSNIDERQIRMRAMLCDALDVSAEDLPFAGELIRVRDDAREWEGAAERLLHNFALSLLVPDHLYTQVVDWVDRTQLKGRLVYYHIQQHRSGSHAGRHPNTLAQKLEVHPDSPMRLWVENELAHRFSFTCCETQDDFRRSSKAVTRSGQVKEPGGRHEKDDRHRIDDRSRYVLGWNNAIKIAALEERQREQEALIQKHAAEIAQAENTRKMLQERFETLTRLERYPDYTQLDWQSAAQTAAQLTAEREALTATSDVLRELKQQKDHAEQALRQAEAEYMILFKKQALLDQSVETLQARLQHCQTVLNDYTLTPQQEQELTELQIQLNGAELSSLEACEGAETQLRDQLDTQIDHQQRTLDCLRDSILKDMRDFRTTYPVEAQDMDDHLEAGPEYCALLAQLKKDDLPRFVSRFKNLLTVNTINEIANFNAHLAQEREIIKERIAVINTSLTQIDYNPDRYIRLEAHQTQDAEIRDFQASLRACTENAVSGDDTEQYSEQRFYLVKTMIERFRGREGLTEQDRRWANKVTDVRNWFSFAASERWRADEAEFDHYTDSGGKSGGQKEKLAYTILAASLAYQFGLEWGEVRSRSFRFVVIDEAFGRGSDDSTQYGLRLFQQLNMQLLIITPLQKIHIIEPFVSSVGFVDNRDGNYSRLRVLSIEEHFANKASLHDAAPALLKHEDQSV

SEQ ID NO: 38417 - protein, 393 aa, Acetobacter cerevisiae
MNWTTPADLKKQLERLWKKGTLPNALITKTCLFPLTLPLRTPGASDITQRLHAVRDWTEIFNAMRHIRLIRHTVKNRVQGTQTLPHKVVIETLEDALALLGKHDTARQILALHAMTAEKAPFLLPWLAQNALTAYRHAPEWERLLTLTVWMRENPAPGIYLRQVDLPGIHTKFIECNKTILSKLFQHALPKHAVNETCSGIDQFEPRYGFRTKPLRIRFRILDRALSPFPTCAHPDITLDSESFAALPLMGCRIFIVENESCFLAFPYLKNALVIFGGGYCWDVLKPALWLQKCSIYYWGDIDTHGFRILDHLRAILPRTHSFLMDEPTLLAYSAFWDKEPSPVRHPLSRLTSSEQSVFTALQTDLFGQNLRLEQERIHFSDLRKILDSLVQP

SEQ ID NO: 38418 - protein, 484 aa, Ferrovum sp. Z-31
MALDYATLNTLRNHHPAWKLLRSDHAPLVASFLHRVFVSSNVRGMNATDLAETLEDELYGLRQRFGDTAFPKNGMDYLNDWASTEKGWLRKYYRHGTDEPQFDLTSATEKAIAWLGTLTERSFVGTESRLMTLFELLRQMSAGSEIDPAKRITELHKRREEIDAEIARVLSGDVPILDDTALKDRFQQFMQLARELLTDFREVEHNFRMLDRRVRERIALWEGSKGALLEEIMGERDAIADSDQGKSFRAFWDFLMSSRRQEELTELLSTVLSLAPVADLQPDARTRRVHYDWLEASEHTQRTVAQLSQQLRRFLDDQAWLENRRIMDILHGIEAQALALREHPPTKDIMNLAIPAASLELPMERPLFTPTLKPLIADIELHAGTEEGDMAALYDQVVVDTVQLARNITQALQERAQITLAELAKAYPLEQGLAELVAYVQLGSQTFAAVVDESTRDLVGWETTAEDGVIVHRTANLPRMIFVR

SEQ ID NO: 38419 - protein, 223 aa, Ferrovum sp. Z-31
MDDDTLAMTPSLGQIDPPDLSVLIISLLKGVIYRDDNERLWGALLSLQARVRDYVSVLALALVLDEAEGYAFLKSRLESEDEEGNPKLPRLVARRPLSFPVSLLLALLRKKLAESDAGGGDTRLVLTREDILELVRVFLPTASNEVKLVDQIETHINKIVDLGFLRRLKVGAGTTTGPTSYEVKRILKAFVDAQWLADFNDRLAAYQAQFTENIDSAGEVSDE

SEQ ID NO: 38420 - protein, 1124 aa, Ferrovum sp. Z-31
MNETRSQSFDFVADDTLSGFRLKRLEVFNWGTFDGQVWTLNLEGKNGLLTGDIGSGKSTLVDAITTLLIPAQRITYNKAAGADTKERSLRSYVLGHYKSERNEITGTARPVSLRDHKNYSVILGVFHNAGYDQTVTLAQVFWMKDAAGQPARFFLGAERDLTITTDFARFGTEISALRKKLRHLGAEIMDSFPPYGSWFRRRFGINNDQALELFHQTVSMKSVGNLTDFVRSHMLEPFEVAPYIQALITHFDDLNRAHEAVLKAKRQVELLTPMVADCQRHANLANEIEEWRKGREGLHTYFAGLKLALLDKRLINLKGEWEKLNAQVERLDDHQDQQRAVIDEIKRGIAANGGDHLERLSSEIKRKGEERDRCRQKAHRYEELITAVGEVPASDGDGFVDQRARLSVYAETVAEQSAALENQEREHDFAFRKGREEYQALSEEISSLKHRRSNIENIQVQIRTTLCAALGIPEEDMPFAGELIQIREEERAWEGAAERFLRSFGLSLLVPDARYPAVAEWVDTNQLRGRLVFFHVRPQKKSLDFPTLHRDSLIRKLSIKPDSPFYDWLERELTHRFDVACCVTPEQFRRETRAMTRAGQIKDPTGRHEKDDRYRIEDRSRYVLGWTNSAKIAALEDKFHRLERQLGELGHLIGKVQGARKEVQTRLIALSRLEEFTEFDELDWTTKAAEVARLEDEFKQFESSSDKLKQLNDQYREANQRLENLRKDLDTARDKRSKTEQKRMDTDLYRQAVSAQITEKPLDAALSARLENTRTEALGQHLLTVESCDNHEQQVRGWLQGRIDGTTKKLSDLRDKIIQEMMAFKEWFKLETADFDANIDAAFEYQNLLDRLNRDDLPRFETRFKELLNTNTINEIANFNARQNRDRELIKERIGRINESLTQIDYNSGRYIVLESQPSPDADIRDFQSELRACTEGTLTGSEDAQYSEAKFLQVKIIVDRFRGRDGLADQDRKWTAKVTDVRNWFLFAASERWRADDIEYEHYSDSGGKSGGQKEKLAYTVLAASLAYQFGLKWGEVKSRSFRFVVIDEAFGRGSDESAQYGLKLFKQLNLQLLIVTPLQKIHTIEPFIAHVGFVHNEGGQASKLRNLTIEEYRTHRPQTLPA

SEQ ID NO: 38421 - protein, 411 aa, Ferrovum sp. Z-31
MSWTTARELKQQVVRLWERGDLLRSEITGESRFPLKLALTIPTSAELTERFDAVRVWIAGLTALPHTRIEWREINHRVQGTQRLPQSIWVDCLEDALLWIGRRAEAARFEELASLTRSTHAALLAWLAKRPFQALELVEVWPQLLEVVIWMQQHPHPGIYLRQVNITGVHSKFIEAHRSVLAEWFDLVLPASAIAAEHTGIRQFAPRYGFLDKPTRIRLRVLDPQIRWISGSPCPDITLDANSFAHLNPPLRRVFITENETNFLAFPQASEAIVIFGAGYGWEALSRATWLHRCDLYYWGDIDTHGFAILDQLRRHFPHTKSLLMDRSTLMAHLTSWGSEPDPITHDLPNLTKIEGALYDELRDNRIRTHLRLEQEMINYSLVEAAIADETDPGSKKAMFGASTSTPWNFG

SEQ ID NO: 38422 - protein, 487 aa, Mycobacterium phlei DSM 43072
MDGTADNTELSAADLLELNRELQGSPTTRLLAATNLGLYATLMERHLLDGVTPETELVVRLERDLDDLGSLEGQSGLSLIKSWASQGWLHRIVDPRTDQNVCYLTQEARRALDFLRGMRRQDTIATGGSMQGIAARLKQVAVRVDRDPVRIRKHIEAEIAALQAELDELEAGQRPEPDVTDAYDEARAIALQMERLITDIGQYGTMIEQATAALDEPIDSNEAYRDRQRQMYEDYQAAWDSKGRESHRAFLRMVNDPDQRAEFEADVAAVAEALPMLDPALRKVMSGFFELVGQQIDEVERIQQRCAQRVKRFTAFGTLEQSRGIARQLNDAIGAARALLKTSLIDSRLDIEVPLAKHAITSIGALSFKIGDLSTPKPAVHAEGEVDLSSFAALTTQVDAPAMSEMLNRAVSSGPVSLPEAVAMVDNAYLGHVIVLWSWALKQPNDAAAHKKSIPVRFRSLDGPDRAIEVPELLFTEPITSTAGVAQ

SEQ ID NO: 38423 - protein, 228 aa, Mycobacterium phlei DSM 43072; identical to SEQ ID NO: 31705

SEQ ID NO: 38424 - protein, 1118 aa, Mycobacterium phlei DSM 43072; identical to SEQ ID NO: 31706

SEQ ID NO: 38425 - protein, 487 aa, Mycobacterium phlei DSM 43070; identical to SEQ ID NO: 38422

SEQ ID NO: 38426 - protein, 228 aa, Mycobacterium phlei DSM 43070; identical to SEQ ID NO: 31705

SEQ ID NO: 38427 - protein, 1118 aa, Mycobacterium phlei DSM 43070; identical to SEQ ID NO: 31706

SEQ ID NO: 38428 - protein, 487 aa, Mycobacterium phlei DSM 43239 = CCUG 21000; identical to SEQ ID NO: 38422

SEQ ID NO: 38429 - protein, 228 aa, Mycobacterium phlei DSM 43239 = CCUG 21000; identical to SEQ ID NO: 31705

SEQ ID NO: 38430 - protein, 1118 aa, Mycobacterium phlei DSM 43239 = CCUG 21000
MTEQFHLSRLQVINWGVFDGYHSIPFSPGGALIAGASGSGKSSLLDAISLGFLPFNRRNFNASGDNTAAGSSAGRRTVDKYVRGAWGQRSDGNTSKVMYLRGEGTTWSAVAVTYSSDSGRTVTGLVLKWLTGESRNDSSSRFVIGDGDLDIEDVCNRWAAGRFDTGVFKDGGWRFTTKVESQYLAQLYATIGIRASDAAQQLLGKAKSLKSVGGLEQFVREFMLDEPESLARLPEALKQIDPLVEARELLAVAQKKRKILGDIEKIQQRYASESTDLGIIDLADMPMVRAYTDHVRLAQCPAQIEVLDTTIEQLDNEYEDVTRSLNLAKAEADSLNAQISGQNASLAPLQSQVTAAEAEAEQVTRRRSAYEDLLIAHDIRVPETAEEFWNLREELLAEATELLARVERNREASTDAEYAQKAARIARDDAARELKRVEHVGSALPEFALAMREQICTALDLDVNELPYIAELLDLKPDQTRWRVAVEKVLRGAGLRLLVPDQHWEKVLRFVNETDMRGRLQLHHVRTRMLGAEPEEPDPNTLAGKLFPVDPKHPCAAEAVDVVAAAGDHVCVDTPDVFARYRRAVTDTGLYKDSDRLAIKDDRRPLRQSDYLYQGDVTAKINALTMDLAAAEEAYQKARRVADDIAAERQRWRDRAAACKAICEQFPQWSQIDTETADRHADRLREQYELLMAEHPDLEALNARADECWSQIQALMTRRGAIQTRRDDLDARRTAILELSERLSPAFVSEPLTELLNRYSATLPVTLELLDPEPFRDALFNTIKKEREQLRESRRRSYDELARILNTFDTAFPDAIPNDSDNFDERVHDYVALCRHIDERELPEAYERMMRLVTEQAPDAILTLHRVAEQEARRIAEQIERVNTGLGAVEFNRGTRLTLRATPRSLTAVAELTEIVRSISRRIAEVGLGDKQAILDQYADILRLRNRLASTNPEDKAWTRDALDVRNRFTFDCAEWDIETGDLIRTHSNAGDNSGGEQEKLMAFCLAGALSFNLAAPNSDDNKPVFAQLMLDEAFSKSDPQFAQQALQAFRKFGFQLIIVATVQNATTIQPYIDSVVMVSKTEATGRNARPVASVATRTISEFTALRKEMREKVPAGV

SEQ ID NO: 38431 - protein, 487 aa, Mycobacterium phlei DSM 43071; identical to SEQ ID NO: 38422

SEQ ID NO: 38432 - protein, 228 aa, Mycobacterium phlei DSM 43071; identical to SEQ ID NO: 31705

SEQ ID NO: 38433 - protein, 1118 aa, Mycobacterium phlei DSM 43071; identical to SEQ ID NO: 31706

SEQ ID NO: 38434 - protein, 487 aa, Mycobacterium phlei; identical to SEQ ID NO: 38422

SEQ ID NO: 38435 - protein, 228 aa, Mycobacterium phlei; identical to SEQ ID NO: 31705

SEQ ID NO: 38436 - protein, 1118 aa, Mycobacterium phlei; identical to SEQ ID NO: 38430

SEQ ID NO: 38437 - protein, 479 aa, Endozoicomonas montiporae CL-33; identical to SEQ ID NO: 33472

SEQ ID NO: 38438 - protein, 200 aa, Endozoicomonas montiporae CL-33; identical to SEQ ID NO: 33473

SEQ ID NO: 38439 - protein, 1133 aa, Endozoicomonas montiporae CL-33
MQNQSLDFSQDQSKAGFRLHGLEVLNWGTFNKKIWKTKPDGNNSLLTGDIGSGKSTLVDAMTTLLVPSQKITYNKAAGAETRERNMTSYVRGYFKSAKDDDTLSAKAVALRDHNSYSVLLARFVNEGFDQTITLAQVFWSRDNNNSPERFFIVARKPLTISKHFSGFGSDITDLKKKVKRLEHTKVFESFSQYQAEFRRQMGIENDQAMDLLYQTVSMKSVGNLTDFVRHHMLESTDVEERVEELSRQFDNLNRAHEAVLKARQQIEKLQPMVDDCQRYETLESEIQSFKQCRDALYAYFADKKIALLGQRIQRRELDQKKLESRLDEVLHSLENLRAGLRETERSIEQNGGQRLSELKTEIDRLGREKDRLVKSNDDYLALCRFLDMPDPKDDNEFFSNREEATESQERLEKQKTDLQNEQVEQAVGLKQLRDEHKSLSKEIDSLKGRKSNIPSRNLTIREALCSALDLTEDTLPFAGELLQVREEEKHWEGAVERVLHNFALSLLVPDEHYNAVAHYVDKTHLKGRLVYYRVRTPAKHPHNTVDKRSLSRKISIKTDSGFYTWLEQEILQRFDYVCCDTLDEFRKESRCITATGQIKSSGSRHEKDDRYRIDDRSRFVLGWSNREKILALETQRNLMEKEIQTAAGIQSEFTKRLKKLGDSQIKLELLLNYQSFGDINWQPLALTIQSLEKEKAELEAGSDILKTLRERLITTEAQIREQETLERKLTKESGAAIEKLKQDRTLKEQAEQQLGDLPEDVKASIFERLEELEEEALDNKKITIENCDSSQVTLRRWLQDRLDTKERGARNLSSNITGQMADYKNAYPNETREVDASMASAGEFGEMLKTLAGEDLPRHEGRFKQMLNEGTIHNMAMFQNWLDQQQQTIRDKIDTINRSLSTIDYSDGTYIRLVADNHRDAEINQFKIDLRNCLGGTLSSDDTETYAENKFIQVKDIIERFNGREGQTDLDKRWTKKVTDVRNWFLFNASERYREDDSEKEFYSDSAGKSGGQKEKLAYTILAAALAYQFGLEWGETRSRSFRFVMIDEAFGRGSDESARYGLELFRKLNLQLLIVTPLQKIHVIEDYVSSVHFVHNEGGCNSVLRNLSIEQYRKEKQQIAEQKQASEEVVLN

SEQ ID NO: 38440 - protein, 388 aa, Endozoicomonas montiporae CL-33; identical to SEQ ID NO: 33474

SEQ ID NO: 38441 - protein, 498 aa, Rhodococcus sp. LB1
MSITADVHRLLRLRQDHAAWTLLRADSAPAILALLGRHFEHGTRRLPAPELFARLDSDLQTMRDEGLDFPRTGQAYCTEWVRSGYLLRRAAAGTREETLEPTEGAFAAMAFVAGFTSQASSATESRLTTLSTQLQALARDSDPRAETRLAALLAERSSIDQQVAAVESGVFPVLDGERAVERSAEILALASEVPADFARVRAELEELNRDLRARILDDDGDRGDTLGDVFRGVDLIGDSDAGRSFSAFYDMILDPARSSQIDEWIDAVLQRPFAAMLTHDQKRRFRALLTEMETAGSEVHSTMTSLSRSLRHFVQSRHYEEHRRLQRLLRSAQQSAVAVATRRRPYDLLDLELVRIGMSIESVAALRLHNPADNLVTEPVLTHDAGTVDLDELRKLVRESEIDMDELSDNVAATLRAHGRATIGDVLREYPATQGLASAVGLMVLATHHGHAIDGTEDIHWISGAGVSRRATIRRRLFDPASDEFTARPAFAPTGSST

SEQ ID NO: 38442 - protein, 201 aa, Rhodococcus sp. LB1
MTDEPTTGGHYPGDTGELDLETRRAFVQLLKGPLVTAAKHPEVWRAVIRDERLLRSRLADVFLDLVIDDENELAFTRPPETGNANTPTVLRTERLTFMDTVMLLALRQRLLRAQAGERVMVDLDELREQLELYRTAGDTDPAGYAKRVSASWKKLDKYSLLTKTSTDDRMEVSPVLRQLFDAEQVALVEVEFRRILEEDTP

SEQ ID NO: 38443 - protein, 1095 aa, Rhodococcus sp. LB1
MIHPGQRRLARVQVINWGTLHGHHDLSVARKGFLITGNSGSGKSTLIDAISAVLVPGNQLRFNAAAQEATNSGRNFVTYIRGAWRREAGADTDGLVASYLRTGATWSGIALTYRADTDDPPITLVKLMHLGRGQNAAADVTHLHLILEHELDLTDFASFTTRGIDTRAIRKRWPESTVSPAYGPFARSFRSRLGISSEGAQRLLHRTLSAKSLGSLDQLFRDYMLDTPNTFAMAERAVNQFHDLQEAHRVVVDARRQVEMLAPLVELADTRRRGLQSLRDTDEENAHLGVVHAEMTLSLLRGERTERHALTPLLEAGASEATAAAERARQETLDLTMKLEGIGGGRLATLHAQRDAELKTLARVRTRRDQVAEAVSAWEGTVPETAEEFARLRGQLEDQAHQATTAHEERHGARYALAEQRGTAQRERAALITDREIVARRRSNIDPSLLRARESICSAAGVPDDAVPFAGELIAVRDEYSEWTGPIERVLGGLGRTLLVPDDVYPAVAAAVDATHLGARLVYRRVRVGVTPSAVPKTGTASLVRRVEVADGPLAAWIHHHLADRYDYACVDTAAGFADHVRAVTRAGQVKHSAERHEKDDRSRIDDRRRWVLGFDNETKLEDIRRRIADLDATIAGATSRLDALDREDQQIAVQNRAAQTVLDAQWADVDVSGAQAAVDAVDSRLESWQQDNPEHSAVSVALELAKKAENEADAARRQADTALSVHRTAVTELETRIAQAELHADDAAPGAVATRIKARFQKFARRVTSDNIDKALFEVGQGIGKDRADAQNAVSAADASIVRILSQYLARWESRGGELRIDAEYVDDALTILQRLRSDGLPRYEDRFFQLLHDQSHRNIGELARTIRKAPAEIRSRIDPVNHSLHRSAFDTDRWLRIDVRERRSPAAADFLDDLTRITSGGWDIEQRPAAEERFERMAAVLERLASKEPADQRWQRQVLDTRLHVGFIGVEVDGAGEARNYHDSSSGLSGGQAQKLVFFCLAAALRYQLAPDGADLPRYGTVILDEAFDRADSAYTRRALDVFAQFGFHMVLATPLKLLGTLEEYIGGAVTVSIRDRMHTELSLIEFDDVGAT

SEQ ID NO: 38444 - protein, 397 aa, Rhodococcus sp. LB1
MSVRCVLPRAAAAKALTTYSSRRRRWLADPALAEQDSLTVALHPPSEHQIAEDPDTVVAWVRSWRGYTGVGHVDWAIRRWPSFGTQEVPVRLTLAGADQIASASGRETEWRALVMRRDALVDRLGPDTPALSAAVAVTAAKWLDLDDDDFVRLTTIARWLSDHPNSGYFIRQLPVPGVDTKWLSSHRGMVETLLEGVRGSRELGIRSLPNMRDVALCDPDLLIGTPRRFATSLDELTALPLAPARTLILENKEGLHALPRLAETVALHGGGYTVHELAGIPWVVDSEVWYWGDLDSHGFAILDRLRRHLPHVRSLLMDTDTLNRWRTLAVREHKPTFNEVSHLTESEAAALESLREDDLRLEQERIPWPYALKRLLVTFGAGQSSAAADCPTCPDSK

SEQ ID NO: 38445 - protein, 481 aa, Collimonas fungivorans
MFFEPDRLNFFRPLAGKHRGVVVACVRALYERLHGPSADYGQNLTRDGLRDLLLPVVQESRQVLLAQEEAAANMELAEDDLIPAGADDQQSSSALLRTLLRDGWLETFGDRAGLVTAYRFTRAGKLFAEAFWAIDRRSARTRQRNVRSCRNALNAALRNVDAYDLIDAYDYAEKVISDLSEGVDYFQELVRRLMLEASQTPWDGFMEFLDRFEKEFKKQLTADSIERHRQAIRDVIARLHSLEHDKSQALEDQLNDIARWASQERQGASTLEWMLDRIEEMVEAACTTKHPELIKAMSVYMQRAASIVQQALMLRGGQTRQAYSLAISQTARLGGAAQDALLERIGAAIAPAEIRLLDPAGFKLRSASQRRKALTVTAQPKVTRDARLAAAMYRAEADAFALSNDDIVHRIRAELRLRDRPIRLSTLPAATTTDVLNNMQVVEAVRGARDDRLTVQKLPSKLWNEFYAGDDYQIEMKHDPE

SEQ ID NO: 38446 - protein, 237 aa, Collimonas fungivorans
MTLNETLNQQLALQSLSLERFREIVGRLFAAGIVLREEDGVEQRLYDDARRIETCLGDYFQLGGFRLEHNLKGEFFRLYAPGAEVPGLPEDGLEPVPGLRARLSPDFVAAALALRFQYQQGLSEGGSRLTDAGEVLTRFEELSATLQTQLKRALPPTNIERQRLLNDLKRHRLIRLAANFSMDDEDALLAIRPTILGIISDDMLEAALESEPLPAGAETEAADLQAVAEESIEGNIE

SEQ ID NO: 38447 - protein, 1206 aa, Collimonas fungivorans
MKLDKLILVNWGALRSQEYPMGNMTLLTGPTGSGKSTMLDALQTVMTAVYQNIFSYNPGQDETTQGARNGKTKRTLWSYIVGAEDNLFARPNGAHGYIAAVFKPSEGEEGREFTALVAASARVDGAGERRQAVSERLALLIIDGAALQLGDLTSTEIDGAMAVVAVEKIEHHLAGKYRGITNFRDSKREYLCQLYGRFRGQKTVSFAEAESAARAWSQSIAHKPIGSVDDLVKHQILELDTSQLSQRIGQISKLMRQVNELRKEGERLSDNVKRLELLGTAVGDTARAHQSASQSQLLVSSLALREDQRQLEAATSAIEGLQALISDETESADKLEQDRGAKNRSLTQIHAQMMGIPAAEQKSRIQNQIEQNDGKIKTVFGSLQHNALAAQQLESAARNVAGMQIPPEQKEIADAARQVVLALSAAGTLDLASHLRSIGELARSEEVDVLKSLMLVNDFEGVDAALGKLHGALAGTEHSFVSALHTQIAQLRAAEHDALRHEKDAASRKANLAEGGADYPQHIRHALKEFRAELAAARAQVLCDLVEPVSAEWQPAIEGYLGGARFNLVVDQAWEGKAIDFVRQKKLRANVIQGSFCLKNLKVERTPSDSIVHELSTEHPIAHAYLHDQFGQVVKVADTEALRHASRGLTRDGKGSGSRTMFTADTDLLVFGQEAKRLAKQRAEQEHAQAERELTQVRTQLRELQGALALMGQLQCPSFAAIDELENLVRELDAARQDLSRLDLTQVSKLEDEAEALGIEIAALEARKTACSKNIGGHEKAIQGHQAALTRLHFGMGAKQARVDSDTEKLRDLCIVNGSLSFTALTDAVAAWVDEGTYSQSQASNNVAKQTALSWQLYGDARNALGEYHAHARIDERFEVTQGDDLRDGDFTPLYALMVTLQERTRAQLTRQKDIGLIKNLEQLRTAEASFNDVFTKQFCYEIRNAVDTGVRTLKTLNTELDKLKFGTDKFRIDWSEWVPEFKAYYDFFCATSEMADTQEAGNLFADPVLSVDNCQVRDRLVQLLLSDDEDKAVKELQRVADYRNYRRYEIYKESDTGSHVRLSEWGTGSGGQLETPAYIIHAAVVTNRLKRFEKGNSLHLLVNDESFAKMDEGRARDVLKFLRDNLGMQLICAMPTKHAGAIKPEFSREWSFSRTVADGNGEVGFVSESDERELRSDKLRELWELRRAQVREQAQINFEAAEQAA

SEQ ID NO: 38448 - protein, 479 aa, Collimonas arenae
MFFEPERLNFFRPLAGKHRSVVVACVRALYERLHGPSADYGQNLTRDGLRDLLLPVIQESRQVLQQQEDAAASLPDDDFIADGGDDQQSSSALLRTLLRDGWLETFGDRAGLVTAYRFTRAGKLFAEAFWSLERRSARTRQRNVRSCRNALNAALRNVDAYDLIDAYDYAEKVISDLSEGVDYFQELVRRLMLEASQTPWDGFMEFLDRFEKEFKKQLTADSIERHRQAIRDVIARLHSLEAEQAQALELQLNDIARWATQERQGPSTLDWMLDRIEEMVEAACTTKHPELIKAMSVYMQRAASIVQQALMLRGGQTRQAYSVAISRTASLSGAEQDALLVRIGGAIAPAEIRLLDPAAFKLRSASQRRKALTVTAQPKVTRDARLAAAMYRAEADAFALSNDDIVHRLRAELRLRDRPIRLSTLPVATTTDVLNNMQVVEAVRGARDPRLTVQKLSSKLWNEFYAGDDYQIEMKHDTE

SEQ ID NO: 38449 - protein, 254 aa, Collimonas arenae
MTLNETLHAQLSLHALSLERFREIVARLFAVGIVMREEDGVEQRLYDDARRIEACLGDYFQLGGFRLEHNLKGEFFRLYAPGAEVPGLPEDGLEPVPGLRARLSPDFVAAALALRFQYQQGLAEGGSRLTDSGEVLTRFEELSATLQTQLKRALPPTSVERQRLLNELKRHRLIRLAANFSMDDEDALLAIRPTILGIISDDMLEAALESEPLAVGSEAAADEEQGDLQGTLDEMPEDALEDSLEAAHKEGSIE

SEQ ID NO: 38450 - protein, 1206 aa, Collimonas arenae
MKLDKLILVNWGALRSQEYPMGNMTLLTGPTGSGKSTMLDALQTVMTAVYQNIFSYNPGQDETTQGARNGKTKRSLWSYIVGAEDNLFARPNGAHGYVAAVFKPSEGEEGSEFTALVAASARVDGAGERRQAVSERLALLIIDGVALQLGDLTSTEIDGGMAVVAVEKIERHLSGKYRGVTNFRDSKREYLCQLYGRFRGQKTVSFAEAESAARAWSQSIAHKPIGSVDDLVKHQILELDTTQLSQRIGQISKLMRQVNELRKEGERLSDNVKRLELLSKTVGDTARAHQAACQSQLLVSSLALREDQRQLETAATAIESLQALIDDEAETVDQLEQDRNAKNRSLTQIHAQMMGIPAAEQKTRIQNRIEQCDGKIKAVFNSLQHNALIAQQLETAARSVAGMQIPLEQKEIADAARQVVLALSAAGTLDLATHLRSIGELAEADEVDVLKSLMLVNDFEGVDAALGKLHGALAGTEHSFVSALHTQIAQLRNAEHEALRREKDAASRKANLAEGGADYPAHIRHALKEFRSELGAARAQVLCDLVEPLSEEWQAAIEGYLGGARFNLVVDQAWEGKAIDFVRQKRLRANVIQGSFCLKNLKIERTPSDSIVHELSTEHPIAHAYLHDQFGQVVKVSDTEALRHTSRGLTKDGKGSGSRTMFTADTDLLVFGQEAKRLAKQRAEQEHAQAEQELLQVRAQLRELQGALALMGQLQCPSFAAIDELGSLVRDLDAARQDLSRLDLTQVSKLEDEAEALSVEIANLEARKTACSKNIGGHEKAIQGHQAAITKLNLGMGSKQARVDSDTAKLRDLCIVNGSLSFTALTDEVAGWVNDGSYTPFQASSNVAKQTALSWQLYGDARNALGEYHAHARIDERFEVAHGDDLRDGDFAPLYAMMVTLQERTRGQLTRQKDIGLIKNLEQLRTAESSFNDVFTKQFCYEIRNAVDTGVRTLKTLNIELDKLKFGTDKFRIDWSEWIPEFKAYYDFFCATSEMSDTQENSSLFSGPGLSAENCQVRDRLVQLLLSDDEDKAVKELQRVADYRNYRRYEIYKESDTGSHVRLSEWGTGSGGQLETPAYIIHSAVVTNRLKRFEKGTSLHLLVNDESFAKMDEGRARDVLKFLRDNLGMQLICAMPTKHAGAIKPEFSREWSFSRTVADGNGEVGFVSESDERELRSDKLRELWELRRAQVREQAQINFEAAEQAA

SEQ ID NO: 38451 - protein, 485 aa, Collimonas pratensis
MFFEPDRLNFFRPLAGKHRGVVVACVRALYERLHGPSADYGQNLTRDGLRDLLLPVVQQALQEARQLLPQQDEAGVELADDDLIPAGADDQQSSSALLRTLLRDGWLETFGDRAGLVTAYRFSRAGKLFAEAFWAIERRSARTRQRNVRSCRNALNAALRNVDAYDLIDAYDYAEKVISDLSEGVDYFQELVRRLMLEASQTPWDGFMEFLDRFEKEFKKQLTADSIERHRQAIRDLIARLHSLEHDKAQALEDQLNDIARWASQERQGPSTLDWMLDRIEEMVEAACTTKHPELIKAMSVYMQRAASIVQQALMLRGGHTRQAYSVAISKTAKLSGAGNAQDAFLERLGAAIAPAEIRLLDPASFKLRSASQRRKALTVTAQPKVTRDARLAAAMYRAEADAFALSNDDIVHRIRAELRLRDRPIRLSNLPVATTTDVLNNMQIVEAVRGARDERLTVQKLPSKLWNEFYAGDDYQIEMKHDPD

SEQ ID NO: 38452 - protein, 240 aa, Collimonas pratensis
MTLIEALHEQLALHNLALERFREIVSRLFAAGIVMREEDGVEQRLYDDARRIEACLHDYFQLAGFRLEHNLKGEFFRLYAPGAEVPGMPEDGLEPVPGLRARLSPDFVAAALALRFQYQQGLSEGGNRLTDSGEVLTRFEELSATLQTQLKRALPPTNIERQRLLNDLKRHRLIRLAANFSMDDEDALLAIRPTILGIISDDMLEAALETDPLPAAESADEDVASPQALLKEESIEGNIE

SEQ ID NO: 38453 - protein, 1208 aa, Collimonas pratensis
MKLDKLILVNWGALRSQEYPMGNMTLLTGPTGSGKSTMLDALQTVMTAVYQNIFSYNPGQDETTQGARNGKTKRSLWSYVVGAEDNLFARPNGAHGYVAAVFKPSEGEEGREFTALVAASARVDGAGERRQAVSERLALLIIDGVALQLGDLTSTEIDGGMAVVAVEKIERHLSGKYHGVTNFRDSKREYLCQLYGRFRGQKTVSFAEAESAARAWSQSIAHKPIGSVDDLVKHQILELDTTQLGQRIGQISKLMRQVNELRKEGERLSDNVKRLELLGKAVGDTARAHQAASQSQLLVSSLALREDQRQLEAATSAIEGLQALIDDETESADKLEQDRNAKNRSLTQIHAQMMGIPAAEQKTRIQNQIEQCDGKIKAVFNSLLHNAQTAQQLDSSARNVAGMQIPPEQKEIADAARQVVLALAAAGTLEIASHLRSIGELAKAEQVDVLKSLMLVNDFEGVDAALVKLHSALAGTEKSFVSALHTQIAQLRAGEHEALRREKDAASRKANLAEGGADYPAHIRHALKEFRSELGAARAQVLCDLVEPASAEWQAAIEGYLGGARFNLVVDQAWEGKAIDFVRQKKLRANVIQGSFCLKNLKIERTPSDSIIHELSTEHPIAHAYLHDQFGQVVKVADTEALRHTSRGLTKDGKGSGSRTMFTTDTDMLVFGQEAKRLAKQRAEQEHAQAEQELTQIRVQLRELQGALALMGQLQCPSFAAIDELENLVRQLDAARQDLSRLDLTQVSKLEDEAQALGLEIAALEARKTACSKNIGGHEKAIQGHQAAMTRLNFGLGGKQARVDADSERLRQLCVVNGSLSFTAVSDEVAGWVSDGSYSQTQAANNVGKQTALSWQLYGDARNALGEYHAHARIDERFEIVQGEDLRDGDFTPLYAMMVTLQERTRAQLTRHKDIGLIKNLEQLRTAESSFNDVFTKQFCYEIRNAVDTGVRTLKTLNTELDKLKFGTDKFRIDWSEWIPEFKAYYDFFCATSEMADTQEASSSLFADPALSAENCLVRDRLVQLLLSDDEDKAVKELQRVADYRNYRRYEIYKESDTGSHVRLSEWGTGSGGQLETPAYIIHAAVVTNRLKRFEKGNSLHLLVNDESFAKMDEGRARDVLKFLRDNLGMQLICAMPTKHAGAIKPEFSREWSFSRTVADGNGEVGFVSESDERELRSDKLRELWELRRAQVREQAQMNFEAAEQATV

SEQ ID NO: 38454 - protein, 479 aa, Collimonas arenae; identical to SEQ ID NO: 38448

SEQ ID NO: 38455 - protein, 254 aa, Collimonas arenae; identical to SEQ ID NO: 38449

SEQ ID NO: 38456 - protein, 1206 aa, Collimonas arenae; identical to SEQ ID NO: 38450

SEQ ID NO: 38457 - protein, 485 aa, Collimonas pratensis
MFFEPDRLNFFRPLAGKHRGVVVACVRALYERLHGPSADYGQNLTRDGLRDLLLPVVQQALQEARQLLPQQDEAGVELADDDLIPAGADDQQSSSALLRTLLRDGWLETFGDRAGLVTAYRFSRAGKLFAEAFWAIERRSARTRQRNVRSCRNALNAALRNVDAYDLIDAYDYAEKVISDLSEGVDYFQELVRRLMLEASQTPWDGFMEFLDRFEKEFKKQLTADSIERHRQAIRDLIARLHSLEHDKAQALEDQLNDIARWASQERQGPSTLDWMLDRIEEMVEAACTTKHPELIKAMSVYMQRAASIVQQALMLRGGHTRQAYSVAISKTAKLSGAGNAQDAFLERLGAAIAPAEIRLLDPASFKLRSASQRRKALTVTAQPKVTRDARLAAAMYRAEADAFALSNDDIVHRIRAELRLRDRPIRLSTLPVATTTDVLNNMQIVEAVRGARDERLTVQKLPSKLWNEFYAGDDYQIEMKHDPD

SEQ ID NO: 38458 - protein, 240 aa, Collimonas pratensis
MTLIEALHEQLALHNLALERFREIVSRLFSAGIVMREEDGVEQRLYDDARRIEACLHDYFQLAGFRLEHNLKGEFFRLYAPGAEVPGMPEDGLEPVPGLRARLSPDFVAAALALRFQYQQGLSEGGNRLTDSGEVLTRFEELSATLQTQLKRALPPTNIERQRLLNDLKRHRLIRLAANFSMDDEDALLAIRPTILGIISDDMLEAALETDPLPAAESADEDVASPQALLEEESIEGNIE

SEQ ID NO: 38459 - protein, 1208 aa, Collimonas pratensis
MKLDKLILVNWGALRSQEYPMGNMTLLTGPTGSGKSTMLDALQTVMTAVYQNIFSYNPGQDETTQGARNGKTKRSLWSYVVGAEDNLFARPNGAHGYVAAVFKPSEGEEGREFTALVAASARVDGAGERRQAVSERLALLIIDGIALQLGDLTSTEIDGGMAVVAVEKIERHLSGKYHGVTNFRDSKREYLCQLYGRFRGQKTVSFAEAESAARAWSQSIAHKPIGSVDDLVKHQILELDTTQLGQRIGQISKLMRQVNELRKEGERLSDNVKRLELLGKAVGDTARAHQAASQSQLLVSSLALREDQRQLEAATSAIEGLQALIDDETESADKLEQDRNAKNRSLTQIHAQMMGIPAAEQKTRIQNQIEQCDGKIKAVFNSLLHNAQTAQQLDSAARNVAGMQIPPEQKEIADAARQVVLALAAASTLEIASHLRSIGELAKAEQVDVLKSLMLVNDFEGVDAALVKLHSALAGTEKSFVSALHTQIAQLRAGEHEALRREKDAASRKANLAEGGADYPAHIRHALKEFRSELGAARAQVLCDLVEPASAEWQAAIEGYLGGARFNLVVDQAWEGKAIDFVRQKKLRANVIQGSFCLKNLKIERTPSDSIIHELSTEHPIAHAYLHDQFGQVVKVADTEALRHTSRGLTKDGKGSGSRTMFTTDTDMLVFGQEAKRLAKQRAEQEHAQAEQELTQIRVQLRELQGALALMGQLQCPSFAAVDELENLVRQLDAARQDLSRLDLTQVSKLEDEAQALGLEIAALEARKTACSKNIGGHEKAIQGHQAAMTRLNFGLGGKQARVDADSERLRQLCVVNGSLSFTAVSDEVAGWVSDGSYSQTQAANNVGKQTALSWQLYGDARNALGEYHAHARIDERFEIVQGEDLRDGDFTPLYAMMVTLQERTRAQLTRQKDIGLIKNLEQLRTAESSFNDVFTKQFCYEIRNAVDTGVRTLKTLNTELDKLKFGTDKFRIDWSEWIPEFKAYYDFFCATSEMADTQEASSSLFADPALSAENCLVRDRLVQLLLSDDEDKAVKELQRVADYRNYRRYEIYKESDTGSHVRLSEWGTGSGGQLETPAYIIHAAVVTNRLKRFEKGNSLHLLVNDESFAKMDEGRARDVLKFLRDNLGMQLICAMPTKHAGAIKPEFSREWSFSRTVADGNGEVGFVSESDERELRSDKLRELWELRRAQVREQAQINFEAAEQATV

SEQ ID NO: 38460 - protein, 483 aa, Leptospira santarosai; identical to SEQ ID NO: 31626

SEQ ID NO: 38461 - protein, 187 aa, Leptospira santarosai; identical to SEQ ID NO: 31354

SEQ ID NO: 38462 - protein, 1118 aa, Leptospira santarosai
MTDLFSPGEIAANTGYRLEFLEILNWGTFHGRIWKLRPEGENFLLTGANGSGKSTLVDAILTLLVPAAKRNYNLASGLESKKRDRSERSYVEGHYGRSSSGSEGILKIRGKQEECYSVLSAVFEANGRFPRIRIAQIFWFESGELKKIYLFSDKELDFEKDLVLGKRTVKELKADLKNSGARLYDQFKAYNVDFRKAVGLESEKAIDLFNQIVAIKSLGVLNEFVREHMLESKDKRSRIEELNRNFSDLSETYEAIVNAKEQLKLLEPIEKKAAEYREWNRKAADLQALIVYVPYYFAEKNYELRQIREQDYLFELSRLKDRSDELSTEIESLNQEERKLFNALENNDTQRRIADLVRKREGILSDLKTRGIERKKYSSYLSKIGLEEAFSEETFYTNLRIAGGMLTETDSIWEEIRDRLGKLTLQKMELQKNFDSVRSELEYLKKKRDNLPRTQSEIRAKIASGIGLSEKRFPFICELIRVKESEKEWTGALERLLRNFGLRMLVAEEDYEAVSAYVNSSYLGGKLVFSRMVPLSGPILQPKDKEEVFYKLELKSELSNVKKEWLEAQILREFGHICGDLNRLRKEEKALTKEGLIKSGRIRHEKDDRKNISDARDYILGWNNTEKIAALESEFALLGQNIDRLNAAIDLIREEENKNKNKRDDLLLFLRFEQFSQIDDESLKGPLQDTERQIRELELRSEEYGKLKEQYELAKARLTDVQGRQRETAKEFNVLEDRLFTLRKDMEDLQQRVRKVDRETSISLEPILNERLRETILTLESIAETERNFSDRLVVERDQYLEKRDSIGEELNKGMDRYVKRFREEADREELSVSVSNAEGFAKLTERIRQDRLPEFQEKFRTMMSDKVAKQILDFKAELDDDVSEIKERIDELNDSLKDLDYSKGKSYIQIRYFDTKDREIVGDSGFKEMLRGSIPDLGDSSHNEEKFAKIRELLKKLKGEGGSDRWSRLVTDPRNWLDFQAAEFLRDNNQILQVYDSSAGKSGGQTVKLAYTILASAIAYQFKIRERNSFRFVVIDEMFNNLDGENSRYALNLFRQLGLQLLVVTPMDKITIVEPYVRSVHFVKNNSEGNDSRVYPISKENVSSGKDENSERKVGNL

SEQ ID NO: 38463 - protein, 392 aa, Leptospira santarosai; identical to SEQ ID NO: 31356

SEQ ID NO: 38464 - protein, 506 aa, Microbacterium laevaniformans
MTQPELSAAAASTDVGVFLQNGRVPAVAQVLELAQLAERDAAWKLLRADSAPVVAGLLGTHLGGDERRVDAEELYERIDADLERLRAQGLILPLTAKGYCGEWRSAGFLVRRPSSEARGETLELSPDAIAGIRFLQGRAAPRSSVTESRLASLAAQVRRLAIDTDPDVSARIALLEEEIGSIERRIESLRSGDESAIDEDRALERVRDVLAQAADVPDDFARVRAEFETLNASLRAKIVESDVSQASVVDEVFRGIDHISDSDAGRSFAAFSQLVLDPALGTAFEADIRRILDRRFARDLTSDERRALRAFLATLKGRSAEIHDVITLFARALRRYVQSQDYQRDRVLRTLLREAQHAGVQAAAHTRPWHPTFLTLDLSAVALSSVGAIDLHDPAEFAATEEIVTQTTSLASLEELRAIARETEIDFDELTRNVNDLLAEVPSCTVADVLARYPATQGVGSVIGLLSIAAEQGTVDDEPEVLAWQGADGVPRAAIVAAHRFTGAVA

SEQ ID NO: 38465 - protein, 219 aa, Microbacterium laevaniformans; identical to SEQ ID NO: 31691

SEQ ID NO: 38466 - protein, 1117 aa, Microbacterium laevaniformans
MTMLSFPTDEPEVDPTRPGQWRLAQIELVNWGTFAGHVSVDVARAGHLFTGASGSGKSSLLDAIAAVLTPDRWLRLNAAAQDGASRQSDRTLMSYVRGAWSKEADETADRATTTYLRSKATWSGILLRYENLRDEPVVLLRVFHAPGTRTEPTALKDARIFTRDHVKLLDVKPHVEGGIDARRMSTAFPDALITTGGRHGRFHERIIRQFGFRGDATLQLLHKTQSAKNLGTLDALFRGFMLDQPGTFARAETAVEQFTELDAAHKHVVDLRKQADALRKVDEAITAFDLAGAEMAAISDLHEGVEPFTAGLKLRLAKEAAGPARAALARAESDLSDAAREQRLAAEALETAKARVRDEGGARVELLQERIDSAQRAEDVTRQYRAQLTAELMRIGAPMPEDSEQFAELLAAAVTEVARDIPAVSYEVRDAASQARKALDEVTRQIQALRDHRSNLDEKLLSARRFLADAVGVPASTFPFAGELISVAEQHSAWRGAAERVLAPFASTLLVRDEHLVAARRAADSRTLGVRLVIEAVPHAVDEPRRPKDARSLVHRLAVSDGPFASYVRKRMASEFDYACVSHPDELDDVERGVTIGGLVKRNSRRYEKDDRHEVGDATRWVLGGDTHARLEALLERRRDAMAAMEEASARDAEADSFRQDAVSRRDVFTRVSTFSWDQVDLATAMAVTAAQRDDLRVLTSESGTLREAQEAAERATRRLDETNAKHARALGAHAVARSHVESIAAHVAELEATPYAPVEERIADALEGRFRAERRSVSLETVDEVARKVQSALSKEKDASASRAADAEASFAGRAAEFRLGWPAASAELTADIRDRYVYRELREGIIARGLPEKESEFRKLLRERSQDVVAHLLSDLRDAPGLIRERILPVNASLGRSPFEGADRFLEIDVKTTRTPEVDEFLTDLRRIVEGNWADESAAGAEQRFAVLQRVIGRLGSKDRVDIDWRNRVLDTRLHVSFLAREKDVAGRVVRVYDSAEGLSGGQRQKLVIFCLAAALRYQLTEEEDEVPRFGSIVLDEAFDKADSRYTRNAMEVFREFGFHMILATPQKLLQTLEPYVGAITSVSNPDRDASRLANVVFSVGEPEVATPPHAESRV

SEQ ID NO: 38467 - protein, 373 aa, Microbacterium laevaniformans
MTTLVTPSDLRARAKKLFDRDARTWAAEQQTDVVLDVPLRPPTEREALDDLDRVRQWVDAWRGVSEDSGIELEWVVRHWSRIGSQEVPVRAVLRGSDSIARAAGEAEGWRRLMARLDELRGLAGSDASGVLRAHGRAISDLDGADFDRLVHVLAWLRENPESGHLVRELPIRGIHTKWIESRRGLVEALHRAGTGAPGLGLREPSPLIRIRALDPSLSFQGLTDVSAPVDDLAASTIRPERVFVFENLATLLAMPDVPRAVAVHGGGHRVDLVARLPWAQTVTYWGDLDSHGFAILNRLRARGVDATSALMDMDTLFAHRDLWGTDPDPNVGVFELLTPDERATLQSLSAEGNIRLEQERLPWSYALERLGVS

SEQ ID NO: 38468 - protein, 483 aa, Brevibacterium ravenspurgense
MDAEQIDRLRRLNPAWKLLRAQNAPLILSFLGRYFIEENHGATAASTLAGALDDELYGLNDQAVSLGEPAPYPKDPTDYLEDWAADDSGWLRRFYPVDSDELHYDATPALEKAYSWVLGLQVRPFVATESRLQTIVELLRQISMGSEEDPEERIAELKRRRDSIDREIRQIEQDPQFGMLDGTRLRDRYQQFTSTARELLADFRQVEENFRSLDRSAREKIATWQGSRGELLDELVSTRANIDGSDQGRSFQAFYDLLLSEARQEELSQLLGRVSELAQIQTDSRLRTIHHDWADAAERTQQTVRQISEQFRRFLDDQIWVENRRVLELVKDIERHAIDVRAQAPKKDSPVGIEVDVPGVDVALPLERPLYDVRPTTEVDSLLQPSEAEDLDTTALTSQVFVDQTKLLSQLAAIIPQGESALLDDIVQMYPIEQGVSELIGYLSLPAEDVQVDINDDVESTIEAQDDELTYQVRLAQIKVTRS

SEQ ID NO: 38469 - protein, 195 aa, Brevibacterium ravenspurgense
MRTPEETAAARSIIALMRGVVYQETAEDVWRDLLKNPAPVRDHFNTIGLDVVVDENEGYAYLRMQEEREGEEPLPRLITRRKLPYNDSLLLVLLRRRLVEFESHGDQGRLAVDRDDIVDSLRVFLADSSDEARIINNIDQSIGRIEKLGFLRKLRGENDVWEVRRILKAYVDAQTLSDFAQKLDEYKSVLNQGGQ

SEQ ID NO: 38470 - protein, 1139 aa, Brevibacterium ravenspurgense
MSEGLFSTVEVEATGKPGYRLERIELYNWGTFDNHVSYLCPNGETALLTGDIGSGKSTIVDAVSTLLLPSHTIEYNKAAGAGRRERSLRSYVEGHYKSERDEQTGTSRPVALRGHNAYSVILGTFTNEGYGETVTLAQVFQQRDSTGQPWRRFFSAPKRLTILDDFSGFGTDINDLLRKLRKKDVAVDDTFPNYARRMRRLLGIRSEQAMDLFQQTVSMKAVGDLNEFVRTHMLEPTDAGGRIRQIIDHFDDLENAYQAVQRAQEQLELLTPLVENADKYDAVIAKKDNLAKQRDAVAMFFSDIRATLRTASIEQLETDLTTVNQQLVAKRETRDKLSAERDDLIAARASAGGERLETLRHKAASAREQQEQREARNQRLQVKLHDAGLAEVKTRADFNQIPGKAQDQLAVLEPEATELDKNRSAIEAEKLLLTEQERENNRELKSLAARRNNLPSNLLDIREQLSAATGIAEDELPFAGELLDVAEEFEEWRGAAERVLRNFALSMLVPQAHYAAVAEWVNRTRLQTTGHGGRTTGVRLVYERVPDRHVPLQRKPSAGLRLADTIEIEDSPFRAYLKSEVESRADHLCADTVEEFRGAQRAVTREGQVRSRDRHEKDDRRRVDDPRGWVLGRISERKQEALIREIQEQYQRQSKLNEKREQLVARQAEVQAQSEALRAVLDFDSWDEVDWESARARLQSAEAEIERLESGSSELAEITRSFESVEQQIKENENALDNVARKATTLEVRLGQERSALERDREILAAGTFEKAQESFEDLQARVPKRIASVEQADELQASTVSAIAKEIESAQEKINGHTTTLLTQMGNVREQFPAETTEMDASVHARNAYREFHSRVKNDDLPRFKTEFKEQLNTNAIREIAGFSSWLRRQADEIDVRIGKINEALSAVDFNEGRYIRLEKSATINQDVRKFRSDLRDVTAEVSDNDDSSLYSEQRFQDVRAIIERFKGREGHTDADKTWTARVTDVRNWFTFSASERDRETDEEWEHFRDSDGKSGGQKEKLAYTILAASLAYQFDLKWGAAKSKDFRFAVIDEAFGRGSDSSTRYALDLFRKLGLQLLIVTPLQKVHIIAPYVKSIGFVDNLGGDNSRLLTMTIEQYYNMADSGGSTPGGSKPGGSV

SEQ ID NO: 38471 - protein, 390 aa, Brevibacterium ravenspurgense
MTRVRAWKSPQDIRTAVQRRWKDGSLLRAYAQGEEFPVITVPLGGPTSAELASRWDEWRAWSSDLSHDSRGGAHYDLELKSVGGRGAVGANSVPHRAVISRFDQAWKLLSVGRDVAAFDELLSVTKKRQLEAPWHWVLRRPLEALRLAAEWPQVLAAYEWLDAARDSGRYLRQVDAAGVDTKFVESNRRPLAEMLGVAAAKGKFEQALGLATKPAYVRMRVDPARSPVPGVDELTLQADQLSEFGFIPDIVLIVENEITFLTVPVPADGAVVWGKGFESQRSQTLAFFAGSDVLYWGDVDTHGFSILHGVRAQLPQAESVLMDEDTLEAHRKLWGSEPAPTNAYLENLTPTERALYDDLVSDRLGRNVRLEQERINWAWALQRLDYRWAQ

SEQ ID NO: 38472 - protein, 499 aa, Ralstonia solanacearum
MDQDWKQRTYQYVQSRRQHPAWQLLAARSAPLVLSCLQSLFEKSHDGIEVEAAEQGLATLLEQHANSDEFGVDPDVDCAALARKELRGWIRRALLIEREGRLYATDALEEALRFVAALDGRLMTSTASRLSIVQREIENLESSLNPDPRSRSRYLERKIQELERELDDVKAGKVHVVTEPEAVEGIREIYSLATSLRADFRRVEDSYREADQALRQSIVSERNHRGAIVDKLLNSHDELLETPEGKVFRGFQQQLGRSAELDAMKHRLREILRHPAARSALRPAQQHELRWLIIRLIDESAAVIRARARSERDVKGFLRTGLAAEHHRVGELIGDILQQALALDWQSASVRGMDSSLPPVAISVAGLPLIERIRFKVIEDEAQELLELRAQSMDPQAMDDEFWEAFDGLDRQALYVQTLALLEQSGEPMGIAELVRHLPPTHDLETIALWLSMAREAEAPVSERRESVDVVGRDGVPLRFNVPEVELSFEQMRGLDMEL

SEQ ID NO: 38473 - protein, 259 aa, Ralstonia solanacearum
MVSIFDTLTAPKEDGQAAADVTSDVALQPELTHRADAELGVGAVPGAPGAFIPRDVKDAFQELLKFGFLEAARKPNLYYIAATGTAQINAILEPLDLALRIDDVRGLAFLVVAASFVADAQDDEWSHPLIRRQRLTLEQSLLVALLRQHYLVHEQEQGIGAQEAPVLVEEVASQLQLYLGNLGSDTRELQRARNLLEKLKPHGIVSEVDQHDQFLIRPIIVHLANPENLQGLLQALKLASADARSDVDVESTPGEGAAA

SEQ ID NO: 38474 - protein, 1108 aa, Ralstonia solanacearum
MTSTEALPATIEELLPPAPFVLTDLDVFNWGPFSGRHHAQIDIEGTAIIGQTGSGKTTLVDALMTLIAAQPRYNLASTGGHESDRDLVSYVRGVSGAGREGDSDHIARPGKTVSAIAATFSNGSTQVTISGLFSLEGSGSSAAELDRIWMVLRGNELDLDGVLELHHAGGKRALRQQEREAGILKVFDSKKAYIGELRRLFEVGENAFTLLNRAAGLKQLNSIDDLFRDLVLDDRSVFQRALEVASEFDTLAQIRQELEIARKQRDALLPIEKGWAQRAANIEQRDLHVRLISILPIAGALRAHHLWTQLASDLARKLELCDQLVEQRTQRRDALDAEALRLRDLYFQDGGSSIELLESKLTAERQRLETMHRHANDYRLIAKRLQFDDTLTEAVFKKNQAQAQALKDEVDETIEALEHEVYTVGAAKSTTEQRLREQQAAVAEAKGRPGSNIPPQYQQFRRDLADELRLDEEELPFVAELVEVQTVQSQWRGAIERAIGGNRLRIMIPPTHMKPALAWVNGRDNRLHVRLVEVMALERPAEFLADGFTQKLNFKNHPYRDAVRGLLAQIDRHCVVSSEVLRLTPHGMTAQGLMSSKSGFFEKQDKTPLSQGWLTGFDNRDILAALDHEVHGTERELKEQAECFEAAKARVSAARSRNLMLERVLAIQFVDIDEPRAQREVDDSTKHLSALMDPQSDTARAKQAWEDVRAQFTKINEDREKSIKLQHTLQTELAAAQRDRERAFALTGDGLDSGQMMLVQAHFDFSDVQTVDALNGRQTQIEHELRAHVEELEKKIADCEKQLVRNMGVAHGVDTGALAEVGSEVDDVPQYLERLRVLREEALPEKLDRFLSYLNQSSDEGVTQLLRSIDNEVETIIERIEDLNATMRRVDFQPLRYLRLEPRKVVHESLRTLEQAQRGLRTAMLQDDQGESQFKALAGVVGLLREAGERRSTVGARALLDPRYRLQFAVSVIDRPSGKVLETRTGSQGGSGGEKEIIASYILTASLSYALCPDGKDRPLFGTIVLDEAFSKSSQAVAGRIISALREFGLHPLFVTPNKEMRLLRSHTRSAILIHRKGPHATMTSLSWEELDAIARSRQMNSPDEIPG

SEQ ID NO: 38475 - protein, 381 aa, Ralstonia solanacearum
MKSPDDISARLAKAWQSADIREARLLDPESWPLLYAIGRPSPRAIAEQTEHVKAHLDRWRAVEIGRVYWETVTYRAGGGAVEVPHRWEIKNPSEWVRAARSATIAAEYRRLGELVQQISSQFHALVVRRRQLVMERPVPEVIKAAEVALTLSPGCAEGRPLRALSVCNIDTKFFERNRALICQMLDVRFEGQVGELGLEHFLGAAEENERWLLVVPLASGMLPFRQQRVRASELSRLAAVASHVVIVENERSLHQLPELPGTVAILGAGLSLGWVSDAWLASKQVAYWGDMDTWGLSMLARVRLMIPSVTALLMDQDCFDHYALELAVREPAPIDGGISDGLTLDEEAFFSYLLAQERGRLEQEFLPKELVSKALCSWHGA

SEQ ID NO: 38476 - protein, 490 aa, Pseudomonas citronellolis; identical to SEQ ID NO: 32137

SEQ ID NO: 38477 - protein, 224 aa, Pseudomonas citronellolis; identical to SEQ ID NO: 32138

SEQ ID NO: 38478 - protein, 1125 aa, Pseudomonas citronellolis; identical to SEQ ID NO: 32139

SEQ ID NO: 38479 - protein, 401 aa, Pseudomonas citronellolis
MTWSQPADLRAQIERLWQRGELLRAVVGDGTLGWPLRLSLKSPSAADLSNRFDAARGWVRDISAMPLVRIEWREWTHRVQGRQRLPDTLWIDTLEDALAMIGKTGDAHRFQALWQQTAEAQPALLPWLHRAPLQTLALAEHWPRLLAVVAWVQTHPRPGVYLRQVDAPGVDSKFIEAHRGTLAQWLDLALPTEAIEPAATGMTGFARRYGFLEKPVRIRLRLLDPQLPQLPGCTGLTDITLDEDSFAALALPAQRVFITENEVNFLAFPPVSGAIVVFGAGYGWGALARADWLHRASLHYWGDIDTHGFAILDSLRKYFPLAASFLMDRSTLMAHALQWGEEPLDKRHTLPLSRLVDDEPALYDDLRGDRIRPQLRLEQERIGYRWLCAALVATVRDDFRP

SEQ ID NO: 38480 - protein, 490 aa, Corynebacterium simulans
MSVEARALSLRRLMHDSAAIRLLAADNAPVILALIAEYFPRGTRARPAAEVYELMVTDFEVIASEFPMPRTPQNYCNDWVKAGWLVRKSGRSSRGETLEPSEEALSALEAIERWEQPVTTVTASRVESISSALQRLARDTNEDIASRVASLEAERARIDREIEKAQLGQFERLTAAETEERVQDVLNMAMAVPSDFARVRHDLEALNHQLRRQLLDPEGYRGDVLEEIFNGVDHIAESDAGRSFQGFYSLLMDRERSVWLDQWIEQVLDSEAGQDVAPERRRQLRRLFRDMEETSFEVNQTMTGLARSLRHYVSSEQFAEDRRMIELLREARGMAIDAAQGSELKAFHRMDTPLQRIGMSIHSVSRIRLANPGREVVEEAPVAYQPGEDDAHALYELVRESEIDFEELHEAIRQTVSDSGPCTIAQVLQAHPPTQGLASVVGLVHIADQHPLPAVRESQEKITWTEEDGAVRAAQIPTMYFDHTTVEELQ

SEQ ID NO: 38481 - protein, 192 aa, Corynebacterium simulans
MTYHSRRALVQLLQGPLIRVQKEPVLWSAIISDEENLRARLHEVFLELVIDETEGFAFTRMVEEDSLSIPQVLRTDKLKHIDTAILLNLRQELGLALPGERVIVDVEDLRESIGYVRAVDNRDEAGFTKRFNAAIKRIQNDYSLLSTTETEGRLEVSPVLRQLFDASTVTAIRDEYARLARAEDTEEDTSDD

SEQ ID NO: 38482 - protein, 1122 aa, Corynebacterium simulans
MTKHTELYPGQYRISRIQLINWGTFHGYFSIPVARKGFLITGGSGSGKSTLLDAMSAVLVPQNHVKFNAASQQDLGRHNGRNLVSYVRGAWRQQENTQTGEITPEYLRESATNSVVALTYDNGQGKQHTLIAIFRLNGGENSVGQIKKLYGLVPGDEDIDKLSPLLTRSLDSRKIRALYKGPGAFFTPTYATFADRFRKRLGIKNVEGQLLLHRTQSAKSLSSLDQLFRDYMLDVPDTFTRADEAVEQFEDLRQAYLRVEDVKAQIDTLGPLPQLHSQRSSAEADKEKAEAMSEALPAVRARLVTEELDFRIRALTAQLSEAQSQSETLNAEVAHLDDAERLAAVAVTQLSAGELDALSAKIETADKEIEHRTKEFQRLAAAAGAWTDDYEFSPHGFAELQATAKLRIADFKVDFANLINEQQEAGVAARDAATACAALDSELRSFSSRRTNIDKALVELRAQLARDTGYGESELPFAGELIDISPQQAEWEPVIQKLLHGFAATLLVPEAARDTINQWVNSRNVGTRLEYRTIPEFASPQASAHSPRQLIHKLEFQDHAMAHWIRQHISRRFNYECVDSVAELDHVTTTPAVTRDGLESRPKDKDGSTRFIKDDRKRFSGTTWYRVGSTNTAKIELLRAQLTQAKATARATAKQVQNLNRKMDVLRSQRDKAQQVLETSFPDIDTASAEAHRQDLQEQYDSLASSPEAQALAAAHEQAKAKLKAARARLNAAQKNLGNVEGELERSTERRRSIGIVPAIEDQDIAKAVEDALHKGKRKLTIDDIDARRDEVQASLQNTARTATRRIEDANAKIVSVLHTYLAQWPAEAADLEPQASFAGEGIEKLKFLRADRLADFRARFLELLNGSTVRNLSHLTTDLRRARSDIERRMEFINKSLERSPFNGERTLRIDVKDARGQVVQDFQRDLDAATSHSLGEFGSDDTEAALARYHALDKILSRLGSSQPEDLRWRNVVLDTRRHVSFIGRELYPDGTTANTYQDSASLSGGQAQKLVFFCLAAALRFRLAEPDQDVPTYGSIILDEAFDRADPTFTRTAMSVFTSFGFHMILATPFKLIQTLSPYVDGTIVVKYDEPIINGRPRARTGYSLIDASTYQDPDYAQP

SEQ ID NO: 38483 - protein, 378 aa, Corynebacterium simulans
MRSPKDLQAHASKYLRNHFAEALADPDSVRVDWPLHPPTATAAARDIDATQGFIRAWQRWPHQEDVIYESRNWSRAGLGTNNIPARITINGAERIATAAGLNLEYARARERAHSIAAVFPDSPDFAHTVRRSYTQWKDLSAYDLKCLEPCLTWLRANPDSGEWERAVPVKGVDGKWIGTHRRLLLTLLAPFGITDLGLRRSDARIRLRYLNHAPALSDIEIPLAHAATLFPHTPPRVLIVENKQTFLALPTLPDTSPPTVALLGAGTAAHQLHALDWLNLIDITYWGDLDAAGFAILNAVRAHFPHTTSLLMDTATVTEFQHLAVPDPGDGSATLTHLTTEEQRAYRLLFTAGRLRIEQERIPFAHVNAVIHATLAAA

SEQ ID NO: 38484 - protein, 468 aa, Zhongshania aliphaticivorans
MFLDRISNNLFKPLASKNARLYGIGLHALYKRLIESQESGDECTPKEAKDFIRRELFNQSQTIEWQDEDELIADTDTDLAGRIYNRLRDTDWLIEMDEIGYRRITSFPPDAAQLLNALSSLGEQGELDLGSICLGVYSSLKNVLESPRENAHLISFAAKSAKTFYAEASALSFTTRELAYRMLNQSKSSEQLDTFFNIFINQVFTRDYKTLHSKDNPYRFRGRILSQSAEIAFDSSVLSEVVNGILSTRNEASAESIQDEVRAELQAITKVFTNIPTLMEGMERYRRSMTRRTREAIRYSYRSTPDIGRRLDAVIGKIASCSAEQFPAPLVGDTFLAAHRLYERPGKKDKAEATALSRPPPPLEQIARDRAFKAYLQRRMDNPVRLKNYLEKNLGDNAKITSCDMQIDNLDDLLAYLEVRKLMAGSQSKGGNYAALAQQFNVQINPGHITENEYVIAPQLVIQRVEGC

SEQ ID NO: 38485 - protein, 211 aa, Zhongshania aliphaticivorans; identical to SEQ ID NO: 31710

SEQ ID NO: 38486 - protein, 1154 aa, Zhongshania aliphaticivorans; identical to SEQ ID NO: 31711

SEQ ID NO: 38487 - protein, 408 aa, Zhongshania aliphaticivorans; identical to SEQ ID NO: 31712

SEQ ID NO: 38488 - protein, 496 aa, Zhongshania aliphaticivorans; identical to SEQ ID NO: 31713

SEQ ID NO: 38489 - protein, 247 aa, Zhongshania aliphaticivorans
MSGDRASEKRVPDKRVPEERAIEEEMLNAEDTEQEPDQALYPGDSGELSLDTRRVLVQLLAGPSLDGQRHSKLWPILIRDEAAIRCRLSELFLQLVIDRDLQVAFTRQAETGDLEAPRLLRRAKLTFLDSILLLHLRQRLTQAEAHGDRAVVSTDEIIEFLGVYQQAGNTDRALFEKRIHASIEKIKKHSILRKIRASENRFEISPTLKLLFSAEEIQALTRIYHDMRAPEASSEQDDEMPSGEGKG

SEQ ID NO: 38490 - protein, 1121 aa, Zhongshania aliphaticivorans; identical to SEQ ID NO: 31715

SEQ ID NO: 38491 - protein, 395 aa, Zhongshania aliphaticivorans; identical to SEQ ID NO: 31716

SEQ ID NO: 38492 - protein, 489 aa, Streptomyces sp. WAC04657
MQFDQVTALTSHPAWALLRADNAALVLSFCGTVFVDENARGVPETVLESRLDDRLYLLNEENPGSFPRSAGAYLAEWTKNGWLRKYYPPGEDEAHFDATAALEKAVAWVRDLPARSFIGTESRLNTIVALLRQMAFGTETDPQTRIDELRRERDAIDAQIARLRAGEVDMLSPLALLDRYQQVESTAVELLRDFREVEANLRELDVRLRHQVATAEGGKGEQLASFLLDRDEIARSDQGQSFQAFFDYLLSPRRQQELRELLQQVNQLPQLGGRANQSLLKIPFAWLEAAENTQDTVRQLTEQLRRFLVDRSRAEDRRVLALVRSIQRHVTALEGRADLPGMALDVPQAHLTLPMERRLYMPVERIELDTAAVEESEDGEVDISELFSGVHVDTEALTGHVLEAVAMSPSGQANLATIVDDHPLTLGLAELLAYFQVEHPGLDMIVDPDRTDLLVYPRVHVPGHTQARVPHVTFVRDEGGTAAGKAEQE

SEQ ID NO: 38493 - protein, 194 aa, Streptomyces sp. WAC04657
MSDALTVPVVHLLKAGVLYQSDAPAVWEQIISHQAAIGDYLSVIGLDVVIDRAEGYAYVRQQDLDSRDDGVPVPRLVTRHRLSFPVSLMLVLLRGRLADSDADSADPRLVLTRDDLVEMIRSFLPPRSNEAQLVDQIDAHIKKLVDLKALRQTKQTSTYEVRRHVKALVDAQVLNDFNDLLATYRDAASAKDDT

SEQ ID NO: 38494 - protein, 1143 aa, Streptomyces sp. WAC04657
MTLTIDPAALIPRPATTAEPAGTFDVGPGYRLARLEVLNWGTFHRTTCTFTIDGHCALLTGGVGSGKSTLVDALTTLLLPAHKIAYNKAAGADAKERDLRSYVLGHHKNERVEASDTTRPVGLRDHTSYSVILGVFTNYALGAHLTLAQVFYWTSPTSTGQPERFYLTAEAPLSIDTDFTGFGTDITDLRRQLKQRGATIHGSAYTQYGKALLRGLGIPSLQALDLFHQTVSMKAVGSLDEFVRERMLEPFDAKTAVDKIVAHFDALTASHNEVVRARRMIEDLTPIVVACNRYDTVQGEITALDKRRSAVPAFFAQHRHRLLTRRHTTLMSGTAELEELQFTRERQLEQLRGTADGLRRRIDGVGGEKLISLTGRIEELGRERERRRKRATEYGAWLAQAGMDPVTDAASFRERTDQISTARSRAEEQEQQARGKLDDLAIARHDNTTATDAVQREITSLQQQRSSIPAQLLALRRELATATGVSDEVLPFAGELIQVRDDEAEWAGAAERVLHGFALSLLVPHAHYDTVSAWVNGRHLGLRLVYYQVPAHTPITMLPDDSTLLTGKLQLKSDSWARDWLAARLRSRADYLCAEDLDAFARATRPAVTRQGLIRGGGGRHEKNDTHRIDDRRNWVLGWSNQAKLDALLAEATRLTRESADITTATRELEKQQQARTGTGAALTLLASVDTHAELDWQRTVAEIEQFEQQKSALEAEAGLDKLTAQLRRTEDEIVQSSKTFTTGQEELGGLRRDIQHIAVLLGRTTTFLARCDLDGMAEHEEALRKFLPAADGDGLLEMLDDAERHAEARLLRSSGSRHDALRHASSQAAGLMTAFRGRYPVHTAELDNTIESAGGYRALHSRLTDEDLPRFEEQFLLYLRTNVIRDIASFQAHLGAQEQQIRERIDVINTSLAGIDYNPGRYIRLNAAPTPNKEVREFQHDLRACTSEALSNDADDAYTEEKFLQVKALLDRFKGRPEHTRLDKEWTARVTDVRRWFVFSASELNREDDAEYEVHSDSGGKSGGQKEKLAYTILAASLAYQFRIDPTAVSPKTFHFVTIDEAFGRGDDPSAHFALDLFQRLGLQLLVVTPLQKLHVIEPHVTRVGYVDRPDKTRSRLNNLTIEEFRAYRQAAAQQANRPPKE

SEQ ID NO: 38495 - protein, 392 aa, Streptomyces sp. WAC04657
MTPAEWTRPEHVVETLRRKWASGRYLTAAAGGHPFEPIGVSLKGPTAADALQYYEQALAWSQCWAPDRNPHLRIQTKSIGGRNGIPSNTVPARAWVDSRDRLWTLLRVTTQVDRFHTLHEQTARQDPGIARWMADHPMKVLANAADWCRLVRTTCWIRDHDTEAVYLREIDTPGVDTKFIETNKGILADLLDCVLPESRVNTSAPKSDLVARYGFRTKPIYIRLRYLGASPLPFSELTVRAEELAGWSPGVRTVFVLENEITYLSLPPVPDAIAILGSGYAAALLRHLPWLDDVDLCYWGDIDTHGFAILNQVRGRFPHTTSLLMDRATLLAHESHWGQEKTQARGGLTHLTPEEAHLEQELRTGAYRPHLRLEQERIAITAVREALARHRE

SEQ ID NO: 38496 - protein, 485 aa, Moorella mulderi DSM 14980
MKLFEVIPERLFQVFSGRNRYIYAEALLLLYEQYRVNRFGIQYEVMRDLMQELIESQEEAGLVFEVEEEQEQEPAAGGLFDGNGEDLARLKAGALLRRLDRLKWIQVEVRENFRRYIVLPHYASRLLAVFQELCENRTVEYQRFAFVTYQLLSGEEARQRPGFAILEAHRMTQEFLEELRVLANNMKYHMEQVVAKTSIQEVLDHHFEEYKAHIIDRSYHRLKTSDHVSRYRQRILATVQEWLLDPEWLARAVEDAMRNEFFASREEAAEQLRRALMDIEEIYRGLDEIFYQIDLRHNQYLRASFERARYLSQHSSGVDQYLARILEWMAAGIRRGDLPAENCLPGLFNLMRLNQLNEQSLYTPRRRRAPHRPEPQVVVAIPEELKRQLREQNLQRVRRAITRDKIRAYVLGRLGERQEMGIEELAPTNMEEFLYLLYVYLYGYDGLAGYRLVPRGANRILNIGGYRFYDRRVVRVDTGRKRRAV

SEQ ID NO: 38497 - protein, 204 aa, Moorella mulderi DSM 14980
MLNLGENLSEQEAGRLREVINRLLAVNFLNKEQEREHYLVARRHRQGLEEFFRFLGWEIVFDDRHECLFVLSPEAGCRRNLTREESIWLLVLRLIYQEKRQGLSLSEFPVTTLHEIRAKYEAFRLPLFNKTRLQELVRLGTQYKLLEPLDDDIRSDDCAFRLFHTLLYAVQADTVEKLYQKIAGYEPEKEEGLLDEVDAPPAAD

SEQ ID NO: 38498 - protein, 1166 aa, Moorella mulderi DSM 14980
MKWMRRLRLINWHYFYDETLEFGRQTLIAGRNSAGKSTIIDALQVLLVANQRQIRFNSAAHDEAKRSLISYLRGKTGGDERKYLREGDFTSYIVAEFYDQQKRENFVVGVVMDVYGDDAIDDEYFILAGVQLADLDFWSPAERWKNREEFHRYCQNLPGRHIFERSKTGYQKALLNRLGQVSERFFPVFVKALSFKPIHNVRDFVYQYILDEKELQLDLLRQNFEIHERYQAELEALEERREQLEAICRQFETFARLRDTVAIQEYVIRGLKHAREVELREHLEEEIRFLVAEVERLDRELDLARARHLEAGQKAREAYQKWQGHQARQREQELKEGLARLDKELQEQEGLLAVLRQTLDREKILLAGLQQMEGDEYWQWQPGEQERLGLALELLSGLVPAGDADWVPGEDTVAAVRDTGLFLAGLHSRCARAAGRLEDRLAQLQQEKTELEGQIRDLENKKRPYPPHVLNLKRLLEERLNRRSPVWIFCEEMDLKDETWRDAVEGYLYTQRFDLLVEPRVFAEALAIYEREKGKHQVEGAGLVDTEKEQKYLGTAQEGSLAGEMVTANPVIQAHIDHLLGRVMKARDEQDLRRYRTAITRTCMSYHNLVARQLEKHRYAVPYIGARAIARQLEIKRRELAETKEQIEVLKDKREKLAAWLERLAEKKSLYAGISEQLDLPARIRRLQEERAALAAELERLDLGEVERLKEEYYYWERRGKELLDEVTEISGLKKSRENELNQKQTELHLQETRVQEALAFWQSWREQYPVELLPRAEERWREVEGQDLPVTSKLVNWENSQKGNITRREQEFQRLRDLRHEYNLRYTYNADPGAPDNEAYRPLLAEIATVDIPRYREKLAEALKQSEEEFKSHFIFKLREAIEAARRDFNELNYALKNFPFHEDRYHFEIKPSERYRRFYDVIMDPGVMEQGSLFELPEDDRAAVLHELFEKLIRGEAGELEEFTDYRNYLDFDIVVTSGEHRYSFSQVLREKSGGETQTPFYVAILASFNHLYATGKTIRLVVFDEAFNKMDEERIQTSLRLIKRMNLQLIAAVPDEKMQHMAPEVDTTLLVHRNGFQCFVDMISRQEMLAGEEVPTGDGQPDGHSDTAGGHAEGLQEEGFAGTGADGAGEEDNRPWRGGVRNGRDGQGPARAVPVQDSLFADQ

SEQ ID NO: 38499 - protein, 427 aa, Moorella mulderi DSM 14980
MLISKYEGSRSFQTGTPGKQRPQFAMKKSPLAGDYFDEMDHRKREAIHAVLAELAAAGVVEVTWPRFQEGRQVEKVYLNFDAIPRAYELAGLVPRAERIYRLRQVLAPLASHPWEWVRGWWAGVNAALGERKTAGLDLEDLDGYEELVKVLLALPELEDSTPERVFSQRVLGDSKAFEQRVKKRLLAILKSYSPEEYETDAEYLDSVGLTDNPKMVLVAGPFTFRVGGTAVDVGELPGGVGLAAHTVRVMEITAVTAPWVLLVENLTSYYQVVQGVSELAVPSREREGDRDLAIPAGLVVYTGGFPHRGVQLFLRRLQDYRESPGTTARPPVYHWGDLDYGGIRICEYIHRNLIPDLQPYLMDVTTYTRYLPAGIPFGDEYAARLRHLAEDPAYAPWHPLLQAMLEHRKWVEQESMGPGATPPVLPP

SEQ ID NO: 38500 - protein, 499 aa, Bifidobacterium bifidum
MERLRPVYETGVLRLLLRQNSMMYVALLRAAFDPLTGELPRETLEESFSQSLSRLVDSGEYQLREDQTIADASRRILADLTREGDDDYAWLANSHDAASHRFLYRLTARAHRAIEALSRLEDDSRTLSGAQANSIIMEIEHARMQLTADPGERVALLNREIKARKHEIRQIRHGQRQAALTESQVEDVIAVIHNTLRGVPIDLRELVLTERDNGDALRRRMQAGDMSVDDILTSYHDEYRRSFSESDSGRRFEDAFQVIITDEGRQQIDAALRDIAHTPYLAGESGVLLDQVRSELSRIYDGIEAVRRQMRVSDEAISRLVRQQTDTRYRTMLGKLNRLYAHVNADAKAHQGDDARPYRTDTAAGRFPPLPSRPARPMVRTTTPGLSVPQTPGDATAPDLRSMIDNGGPRLRRMAALILESPVYADDGNGAIDIVASFNGLPKAERKESELVGFLGELGCGDGAGVAWHCISADGSPRDWITGPVLAQENELHDIVKED

SEQ ID NO: 38501 - protein, 340 aa, Bifidobacterium bifidum
MSDLTNDAAQPDADMDMIGDDMTGTDSADTDSASTGADDMGAVDVEYDGADAEGAVNPYALFEGDTGDMTADARMVAIMLKRERYISGRFYDLALDNRAAVIRSLNNDLLDLVVNEHYRVMYATAVSGPDMTLRALKTRASLKREEAALLAFLRIRVLEYENAHVAPDEWLVSFEEIRAALATGAGYLASRNDEEGVLRQVGAIVSVMCTYGYLRQLDDDETMYRITPLVPVVLDRQLADSWLAVADRDDDGEPAGDMAPAGSRSAAGDTSNADASGADDDGDSDDAGPDAELFEAPLFDDDADVGTAENIKGADDANGANDSDIDDETASDGGTAREGE

SEQ ID NO: 38502 - protein, 1194 aa, Bifidobacterium bifidum
MSGKDMQMIADRWMMESRRLVNWGSYEGYHEFRPSTDSQLPVTLLAGASESGKSTLVDAQISLLYPTGTPFNKASNSGRSERSDYTYLRGMIGVGGSDGVDEPMYLRGRDESGAPRSIWGAIVDTYRNFTTGQILSCGKFLYLMPGDGRGDVRRLYLAWDKPIDPRRMDVFRESSFTPTQLKSTYPGCVTFPNAEAFHTHIWDVMGLSAEACRLLARIQSADAPSRLDDIFKQGVLGVPEALDLARATVEDYERYDANFRSMEEKTRRMGKLRAITASYGDYESARDAVHSFDAVNPATKSGSATIRAWAIRRMIGEVSERQPLDRRLRDERRSEARAAGKRIESLRTRIDAVRERMRGLDGGDLTRLDAEMRQAERALADITAGRQRIGRMFEAAGEEFPKDEHAWDERRIEAVTFMRSYEQRKGLLDDMRNQTYAAHASVKQTLQRLNDDYERQKSQRTRISRQMDETRAMLCRATGLGPSELPYVAELMDVREDQEHWRLAMNAAYGSMAQTILVDKRHERGFAAKVSAIDPHAMARRTWQFVDTERGGAGNGPGGANTGATGGTDGEVWLSSKLRYREDSPFAGWLREQTSSERLDALCVDGIDDSDHAVRQVQADGQIKSGKRGQHGIKDRQQVIGFVNESYLAQLRTRIQDAQRQCDETAQSYASAKEQADRLQRERELADQLAYTAWEKIDENSAKAAIADIERTIASVRNNPKLAELDTLQESLSKELDRSQRQRIDIERQAELADQAVNAAQAWLDEHAAQPQPQTRPLDGEAADVSPKAVTNGRTLLTDEVEEALAESYEQRLSGLGDATTRAHMIIGAGAPQRMAQGDTFADRVIAGIGKDLEARVSMLEGRAASARTAVEARMGAYIEMYAGGDDTIAASVDDYRYYQDELESLSKLATVEATAVEYHNCLDKLLMSFLTIKRAIDTDAGDIHDQLERINAMLDGQQFGPHHGSLSLHADVRRPERAFWSALTRVIGTLNDRKAAQTDDDLDGARCAFASCAAMIDMLRREIGQIRDVNGVKSYGARNLDPRCRSSFYALVRHSDGQVERITSTGGRSGGALQELTSFVYGAALIYLLGGGMDNKLKPSYTTLFLDEALIKADGRYTRRALSVLPRLGFQVIVSAPESKTGEILEVSTKAYVTRKDPDTGYTTLHEARLDGIDETEGADEPEGTVESDDAAE

SEQ ID NO: 38503 - protein, 543 aa, Bifidobacterium longum; identical to SEQ ID NO: 30413

SEQ ID NO: 38504 - protein, 230 aa, Bifidobacterium longum
MTVAEEHEEHEEHEEHEEHMDNANPYALFEGDTGDMPAEARMAAIALKRDRYISGPTYDTVLDNRDAVVRSLNNDLLDLVINERYRIMYATPVAGDDVTLRSLKTRVSLKREEAALLAFLRIRVLEYENVHADPADWLVSFEEIRAALATGAGYLAARNDEEGVAKQIGAIVSAMITYGYLVRLDDEAMYQITPLVPVVLDRELADTWLDVAEHGDGDTEDDDDDEKGAE

SEQ ID NO: 38505 - protein, 1182 aa, Bifidobacterium longum
MMQATDVQMIADRWMLESRRLINWGSYEGYHEFRPSTDHKLPVTLLAGASESGKSTLVDAQISLLYPTGTPFNKASNSGRSERSDYTYLRGMVGVGSTETGDEPLYLRGRDENGAPQPVWGAIVDTYRNQTTGQVLSCAKFLYLMPGDGRGDVRRQYVVWGKPVDPRRMDQYRDAPFTPAQLKATYPDCLTFPSAEAFHTHIWSAMGLSEAACRLLHKIQSADAPSRLDDIFKQGVLGVPEALDLARTTVEDYERYDENFHAMDEKTRRMDTLRGIQQAYGEYAAARGKARAFEPVKPAVDGTVPAVLRDWALARMRGEVAVQLPADRAEQQNSEAEAKLLRRRTEDLRTRLDMIRGQMQGLDGGNLTRLELELDQARRTLEDVQANRTRIEQTFASIGETLPGDEQAWNERRINAVNFKREYNKRDGECEEALTAAINARAGARGDLERLQRDFDRQRSQRTRISQQMDETRAMLCRATGLTPAELPYVAELMDVNEHEEDWRLAMNVAYAPIAQTILVDKRHEQGFAAKVSTIDPRTMPRRTWQFVDTARHYDDTGAHANILTGEQDGDWLSGKLRYRDDSPFADWLRSQTQDERFDALCVTAIDDTDRTNRQVQADGQIKSGARGQHGTKDRAQVIGFVNETYLNALAAQVDAARNALSQADTDYTAAKTQSDNLHRELELANQLAYTSWERIDIAGAQRTITDTQDAIASIKNDPKLAELAKQRDELNAELDRVERQRIESDQAAARAGSAVEAALIWLRDHADTGTTDAAGATADNDDDAASGPLPDEVTAALAESYDNRFAGLADAAMRAHMIIGAGAAGTQAPGESFPERTIAGIGKDMTSRINLLNGQADAARTGVESKMSTYIALYAADDDSLTASVEDYRYYLDELASLTQLAAVAATDAEYRRCLEQLLRSFLTIKRAIDTDASDIHDQLDRINAMLKGQQFGPKHGSLSLHADVRRPERAFWTQLIRVIGTLNDWKSADVNDSDASRKAFAACAPMVGLLRAELAQVKDTNGVKSYGARNLDPRCRSSFYAIVHHADGPDERITSTGGRSGGALQELTSFVYGAALIYLLGGGLTSEPSYTTLFLDEALIKADGRYTQRALTVLPRLGFQVIVSAPESKTGEILEVSTKAYVTYKDPDTGLTSLREAVLYQNDMDDESSSDILKDDGVAE

SEQ ID NO: 38506 - protein, 394 aa, Bifidobacterium longum; identical to SEQ ID NO: 36942

SEQ ID NO: 38507 - protein, 489 aa, Stenotrophomonas maltophilia; identical to SEQ ID NO: 30775

SEQ ID NO: 38508 - protein, 233 aa, Stenotrophomonas maltophilia; identical to SEQ ID NO: 30657

SEQ ID NO: 38509 - protein, 1126 aa, Stenotrophomonas maltophilia
MAISKHTPALFNEGLPDPRLQQFRMRRLQVHNWGTFNGLTEVPIAERGFLFVGRSGSGKSTLLDAMSALLTPPAIVDFNAAAREAERSGRDRNLVSYVRGAWADQQDSGTGEIATQYLRKGATWTALVLEYRAGDGRVVSLVRLLWISGNGTSAGDVRKHYMIAERPFDIAKDLGGFDLDLRKLKQKLSDLHHFDTFSGYAERFRDLLGIDNEMALRLLHKTQSAKNLGDLNVFLRDFMLDTPKTFDAAERLVSDFAELDGAHQAVVTARRQVETLLPARAYYNDLKEMHRRRGDDEALKLGVDSFRESRRQALIEARLREMDVRDRGLLGEEAQRRAALDNHTERLAELELQRRQQGGERIEELEREQGRAEAERDRRQAKREQASLAAQQLGAELPDDAHGFAELVERAQNELQDRQRASSALDDAISDRLGGKRDDERRFGEVRAELEAMQRTPSNIPAPMQKLRARLAEETGIAEAALPFVGELIQVRSEEQGWQGAIERVLGGFALSLLVDDKHYNDVAEWVNRTHLGMRFTYYRVRRNDDAFAREPSAKSLLHKLELREHVFESWLRRELGKRFDYECVDAKQLRNVDRGITREGQVKHPGDRFEKDDRSAVGDRRRWILGFNNHDKVGAFEREAQELAKRIASCETDIARLRGQRDRDNERRLACHELVSISWNEIDIAAPQQRLSDIEATLRDLREGNADLAKLAKQIDAVRADIEQARRTYEDVRVERGQLVKERDRLDRTRQQSRALVLPSLAQEQEAGLAERLQEQGPLSLETLEAHMRQVSNALNEQLSSSQQDLNRIENQLIGCFRRFIQQWPEESGDFTVSVASAEDFLARLERLERDGLPQHEERFFDLLQNQSKNNLLALQRHSAEARKSIGQRLDEVNASLEQVPFNRGTLLTIELSDRRLPEVGEFQLQLREVLSQQQTEQRELAESQFTVLRQLVNRLGSQEGEDKRWRELVLDVRMHVEFIGVELDAETRQQVEIYRSGAGKSGGQRQKLATTCLAAALRYQLGGADSQLPSYAAVVLDEAFDKADNEFTALAMNIFDNFGFQMVVATPLKSVMTLEPFIGGACFVEISGRHDSGVLLIEYDEEGKRLKLPERSRQQANEPEEAEA

SEQ ID NO: 38510 - protein, 487 aa, Hymenobacter sp. PAMC 26554
MSYPLYRSLFSADRAPAAVRVLRSHEAALVLCFLQENFKAGSYAPVRANDWLAGQLADFLETWDVRGDDDAGDLPTLGLSWAERAARLLRDWVRKGYLTLYTDEQGADQHTLTPELESVLDWVQSLLNKPTFVGTESRFLDILQKLRELVQNSADDWQARLAELEKQRSALDAQIRELKLTKTVRTYENYEIAERYQTVSGVARGLLRDFREVEGNFRDITQRIYQQQAAAGHTKGGLLGLALDALDELRLTAQGRSFEAFYRHLNDPRQRAELDALVRQVFELLTDRGLAAGDEFLRKIRPYLLGEGRKVNDSFYALARKLEKILSEKNLRDRRKSLALIHDIRALAFAVMDSPPTDPAFLELEGRADYLATESTVALKERESAIVPRVLAVARPEEPELAALVSPRVVDKARLAANISALLRDQSQVTLRQVVAAHALRHGVPELMAYGSIAANSPKHLINQQQKDIFDLGDGRWCKFPEVIFCR

SEQ ID NO: 38511 - protein, 195 aa, Hymenobacter sp. PAMC 26554
MPAPYASVIIKLLQSHALYDTDDRAHWQQLETHETAVRAHFAQLGVVLDLNRADGYARLTQPEPADDDPAPPLRLLRRVPLSYEQALLGVVLREWLEEHESSAHAASPRLYATREQLRERVELFFRQQPNQKAFLSKLDTIIERLTEHGFLKITHKDDLHPDQTRYEVKPLLKAKISLEKLSEFLEKLRNHAESV

SEQ ID NO: 38512 - protein, 1146 aa, Hymenobacter sp. PAMC 26554
MPSLFEAVAGPAGYRLKLLEVFNWGTFHEGDGGQDIWRLVPDGQNTLLTGSNGSGKTTLVDGLLALLVNPTKRFFNQSSGAESRSGRSEESYVEGHYGRTQDEEKQNTKPEKLRPNQRQTYSILLGVFTNPHSLPITLVQVRWFGTGGMQRKFLVAKAELNIADHIPFGTNTPWVNGLKKRFAPGVVEDFPTFAPYAAAFRRLFGMKEKALTLFNQTVGMKVIGNLDDFIRTNMLEESTAEAEFSKLMGNYQTLLVSYRALEKAKTQLALLRPVHERNHEYEDLQQRLRQTQEDKRRLEPWFAQQQIRLWTAETARLDRELDRLGGLLAQQEADLETADEQRVRLAGQLDNDQIGREIKELERQIRELEKSKSTKEQALNSYNRLARQLELVADPDAGLFEANIAQAGAARQATQALQQQLAEQKYAARTARDAQKADFERLEADVTQLQKSTGKVTGRVADIRQEILDAVEASPVDIPFVAEIMQVKAEEKAVWNEAIEKLLHSFGRDLLVPEHLYAAVRAHVHHERDLRGKVVFHRVDNKTPRPIFPDARTVVAKLDFNPKSPFAAWAENAVAARFGYVCTEDFTTFERAEKAVLPSGLIRNKNRHERDDSAAHRHILGWDNRELLREYQRRGRELSTAISQAESNLRRIDKELERAAKREKDQDAFLLFNQFPKLDWQADAHHVTQLTRQKEALEHENASLKTLKEQLAALRQDIDKLSRDREQTRDEFKDAEKSLQALAAEQREQQHLLETFDAADLAPPAAGLAALTEPVREALTYGQFFVQKEQLERMVTQQLAALHHDKETQKKAIREAMRGFLLPGEEVLRKFADWHSDTRELRNEMDQLAEYLDRYAQIRNEQLAELETRFRDEFNRGVTKALTDYCQSLETQHEAICDTIDEINQSLRDIDFNLNPDTYIELVRTDSRTPSIRAFREEQLKSWVPDLTLLDFAADPKEAQLAHFVAHIQPFITELQARENEKWRQQVADVRNWSTFKAREYYRADKSLKSVYESSGSLSGGEGAQLAYTVLGAAIAHQFGIGRRAAQVARSFRFIVIDEAFSKLDEDKSKYLLNLCRSLGLQLMVVTPLTSLPLLEKDVEVIHWVTKGKPDTRKSVVVDVPIGRYAERKEALLAESEAEEAAAAHD

SEQ ID NO: 38513 - protein, 384 aa, Hymenobacter sp. PAMC 26554
MISLPELRAKALRRYPRVLRAHLAGEVLFPLLIPTDKTLDRGQGHEHIHAQQRELLAHAKNRTGHGYWLTTRLNRKTGQSEIKRVEFETLTDYLSFMDKTAEFAVFESNAALTAATVPTLLPLPALPPLLLDYAAAWPDLLLVCQYFQQHPQPNQYVRNLPLALPTKFIERHQSALRPLLDALIPAPLRADESDFFRRFHLLLEEPGIKLRFLDAAQRLHPAVSQCSLWVSEFRQLNLASQRIFIVENLTTFLSFPPVPEAVAIWGGGFAVSLLAGADWLATKQLFYWGDIDVHGFQILARIRTHYPAIRSLLMDEATFAAHHRGEQGDQFQAAALPQLTAAEQPLYDSLLRTNARLEQEKLPLAYVMAAIAQATGHPTRRGAP

SEQ ID NO: 38514 - protein, 460 aa, Thermovenabulum gondwanense
MAFFDKIPENLFSVLSSKNKHIYVECLFIIFKAYREEVLLRKDDLVERLKSFLEVSNFSPEGEEEELPEDNNLSSIAHFILRKLEKTGWIYRDYAENFFEELIYLHDYSIKILNTLYEIQYQEKKDYNSFVHSAYNNLKNQDVERSEDAIFALLEAHKKTRELIDELKSLLNNLRKYHQMLYEKEEVREILKEHFDEFKELIDDRIYHPLKTFDSIPRYKTPIINILNSWLTDREMMDLLVKSSLKRRIYKDEGEAISKITGMINDILEIYYKIDLLLYEIDKKRASYTRASVERMQYLLNADLSIKGKIVEILKALPERENIYEAVNKNINIFLQNYIDENSLYIKKPERKIPDDKFIKIPEIGDDASDFEREMDFLKERLKNSFTRQKIYKFFKELLKGKSEILSKDIKLENDEEFIMLILGVFMHDEKGSFYDVVFEKGSVFVNGYKIPQMRIKKKV

SEQ ID NO: 38515 - protein, 209 aa, Thermovenabulum gondwanense
MWYEEYENLSDADKREFTRLVNFLLSHNFILREKFDTKLMGLRINPDYRFIERHFEIFTNYLSIAGWELQKDNNYGVISLYNRFELNRARLKKFDTLVLFALRLLYEEEREKLSLRKEVIVTKGDVVKKLLNIGVIDKKPAERDLKDALNFFKNYQIIEKMDNAADEYESKIIIYPTILFIITNEKINSIYNMLGEDFSDEENDLAEEE

SEQ ID NO: 38516 - protein, 1122 aa, Thermovenabulum gondwanense
MKLLKKLLLINWHYIYHEIIEFEIINFLTGKNGAGKSTIIDALQVLILGDTKGDFFNKAANDKSKRTLKSYLRGEIADDGEGGFVVLRSGNFTSYIAGEFYDTVKKTSFSYGVAFDVYEDGEINHKFFYLDFALPENQFVMGGFPLNIRNLRTYFNSKYKERYKIFDSNREYQIHFITKMGSLNEKFYRVFRKSVPFSPIIDIENFISEYVCDVQNKIDISSMQENLRYYKELEYQAEQVKKRVQTLKEIEELFESFLNEEKRLKEQEYLIKRAEVEKKKNEIQDLQKAISEKENTIKEKEQHRLSLEEKLKALEGQREALIKEKYSLQAYQKKEMLEREEKSLLENIKGKKASISSFLEFLSRLLKNWEKTVEDFSTFAEEEFGENLALNIKKGIQGLKALSFENVESIKEEDLSLLKELTFEFKNKIEKLYFSLEQEKSALEALLLELRSEIENLKKGIKPYDKKLLELKSEIETALKNKYRRDVKVEILADLIEVKDKKWHNAVEAYLHTQKFYLITEPRYFVDALKIYDEQKFKKGFYDIGLVDTGKLERQSIKVEKNSLAFEVVTENRYARLFVDYILGRVVKCERVEELRNYATAITPDCMLYQNYVARQLSPERYRTPYIGKKSLEKLLEVKLAEKDEKEGLLNKIKEKYDTLSKIKNIEPVTEIFIENAKSAKKEKQDYISLKEALERVRRELSSLDLSKILEIDEKIQKTESEMENIKREREKITGEINKINSEIQVDNYRLKEVEKELNEKQKEIELSFEHEFVKETGEPRFLRELENRKLPENIISAFLSQVARTRSQKEIKWSKLINKRSDYNREYKMPYDISSPDNGEYKKELERLLNTELPLYEEKIKDAKEKARMQFQDDFISKLKQNIDTVYAQIEELNTALKQFSFGKDRYKFEVKPNPAYRKFYEMIMDGMLLEGYTIFSIEFQNKHRDALEELFNQIVYVGEQNLSVDERARLEDNIQKFTDYRTYLNFDLVVTDEQGRESRLSRTLLKKSGGETQTPFYISILASFGRIYRMGNMYRENNTLRLIIFDEAFSKMDHQRVQESIKLLRNMGFQAIISAPTEKIQDIATLVDRNLCVIRSKNRTIVRAFDPREVLEEGDVSIGL

SEQ ID NO: 38517 - protein, 407 aa, Thermovenabulum gondwanense
MDYKKALLNKLLEKYEKSKIFSGESKVERRIKIDFTKKEFPHYDLENVEAKENIHYALKELEGEGVIEIKWAKFEEGNIVEKVFLNTQNLEKAYEIAKREPKESILNRMTEKLLNLKKDVRGIWLSDFIDYELENIKAKNYPAYLPKEEDLFELTLKALKGIDEKEDEELLERVFSKRYLKGSKEFEKVRAKVFAVLKEFFLKEDVEEKEAFEKIGIVKTIEEILFYGSLKVSLKGNILDFSLFPFGASLNSLSIKELQIIDLSCEKIITVENKANFYYLIKDADLKEDFILYLGGFYSPSKRLFLEKLYEFIKEKNKPVKIFHWGDIDLGGFKIFLKLKEIIPDLIPLYMDRETLIKYKDLGEPLEKVYEEKLRSLLEKQDFKEFHDVIKEMLKLGVRLEQEAVIS

SEQ ID NO: 38518 - protein, 450 aa, Pseudomonas aeruginosa; identical to SEQ ID NO: 31994

SEQ ID NO: 38519 - protein, 249 aa, Pseudomonas aeruginosa; identical to SEQ ID NO: 32020

SEQ ID NO: 38520 - protein, 1101 aa, Pseudomonas aeruginosa; identical to SEQ ID NO: 33001

SEQ ID NO: 38521 - protein, 393 aa, Pseudomonas aeruginosa; identical to SEQ ID NO: 32927

SEQ ID NO: 38522 - protein, 486 aa, Mycobacterium immunogenum; identical to SEQ ID NO: 34318

SEQ ID NO: 38523 - protein, 246 aa, Mycobacterium immunogenum; identical to SEQ ID NO: 34319

SEQ ID NO: 38524 - protein, 1115 aa, Mycobacterium immunogenum; identical to SEQ ID NO: 34320

SEQ ID NO: 38525 - protein, 495 aa, Corynebacterium variabile
MTNPRAEAAYRHASAAFRNPTLYLLHGRYAPFVIAALSLVFTAERPTVTVADAHVEVGDIAEALRASGEENLPVGTGREICRYWVRVGWLVPHIDDSSGTGTEVYRLSAQAVSALEIAGRAGGRVRVSRSRMRTLLDSIDQLVSDSETDPETRRATLLAERDALDAQLSRLEAGEVEPVDDDQLLEEAENVLHLSRELPADFVRVAESINEMQRDVVADLRRDVRPAGEVLREYLHRGQHVMDATPEGRAFAGALELIGEPEHIDRLTDQLQNLLAQPFARHLPVTQQHDLAAVAHRVEQGVTEVLTAQRRASHVITAQVRTHDPVRDREVDDLLRTVMSGLQSWMPQSSRGDRVDPLRSFPAAKVGALRRNLNDLQPESAPEPLHASEEAPEFEGTEGREWGGPRYEDLENYIGSREDADFDLAEAFAHLAAPARRPVDLLGLLEIAHRNGMVETGDIATVEARRPDGTVRRFAFGDVTAGTTGTTTGQENTDD

SEQ ID NO: 38526 - protein, 218 aa, Corynebacterium variabile
MTDPFVTPVAMEEDLDGCFAGDRGVLDPAVRRVLVRLLQRRFLSAEKHPADWTVLLDNQQVIESRLHDLFVRLVVDADRGLAYKQQVRADEADETAVSDIPVLLRDEAYTRAETLVLVCLRSVWQRESTAGEPSARVDVEEVEQTVLTYFTESDGDLARRQKAVRRALERLRHEGIVEEETEGRYLISPLIEIVLSAQKLRELADWLSAQTAQAGELQ

SEQ ID NO: 38527 - protein, 1116 aa, Corynebacterium variabile
MTMLDTLFGLIPSGTRGQQWLAGDLQLVNWGGYDGAHRVRFSPSATLLCGGSGSGKSTLMDAYIALMMPHTTPFNGASNGAVSGRARGEDQRNILSYGRGKIDETRTEHGTRVRVLRGDGTDTWTAVAMTWVDASGPVEKRFTAVRAWYIPATARVLDDAVKVRGVIEGDVDLTDLEDAASRRLSDAAVRATGLETMATDREFLARIHAVLGIGAAGAGTKAMNLLARIQAGQQITTVDELYKRMVLEEPDTFATADAVVEHFDELESTRLRMVTAQRQVRALTPLREARTRIGDAAERLRLIKEIGQFRDDSSPAAMWRTSRRLDLLRAAEEELRSQAVDAESLVATHTAAAEAAEAERDSLIQVLRNSGGDRLETAERELGAARRRCEQITRTREKVEEDLIPLGAVVTDEEAFTALVAQGKSALADPEVKAGVRESYAEARTAASVARDRWNELESEKKATAERTDNIPGELHAARAALAEAAGLSVDELPFVGELVEVRTEFEPWREAFNLALGGFATTLLIDEAQLPQFRAAINQVRTRIRVPFEGVQTGQARITCDPRQLPGRLDYRDTPFTGWLQDRLDQRFGFVCVDSAEELRAHRSALTVSGQMSQGARGAHGGHGRRNVLGFSSHRRVDELAGEIAAAKAEVEAASAEVAAAEAELDEVDVRLAAYRRIVDLTWEEIDVATVTDEVTRWEEAVEGISEGSPEIAAMQNQIAGLKVKIQGLQEKTGRAKGEHQHLMERWDAVAEEIDEAEVALDEAAEAGRELTGEQDAWLRSRFTVTDGETGDPAARLARLDASLESASRVLEEDRASAQTTLADQRAAVRRTMESFLDAWPNPNLRADPDASLKDFERILDDLETSGLHRLEGEWKESLLRLSGNDLTNLDSTLGRALREIRERIEPVNRIMADLPFYDDDHRLQITLRENQSEVRRRFRKELREVRALIGDASTDEERAEVYPRMARLIDRIRRGAPDYASLVDVRNHVRVSAEKITAVSGEHVALYDHIGEKSGGESQELIAFIVGAALRYQLGDADAERPRYAPVFLDEALIKADAHFTARAIGAWRGLGFQLVIGAPIDKYSAIEPHIDVEYDILKDTSGRSWAKPKVGVA

SEQ ID NO: 38528 - protein, 499 aa, Arthrobacter sp. 11W110_air
MSFTENALAHRAELQRLQAAPGWRLTSANPWVLALFREAFPRTRPRVPLEDFHDMTDTFLAALRREGVALREDWTGKNYADDWVARRFLARPRADGRFVYELTESSVRFLSYLDGFTSDKTSLNSSRLATLLSRVENLAQESNPDPEARIAVLREEIARREEMIAALEAGDAPPPMDADAALEAAGDILDLAASLPADFKRMRDGLEKMLHALRQEMVESNAAKGLTMGEILEADRKLRSTSEGRTYEGFTAFLNDADQQARFRQAISEVLERDFADRMSPEDRQALYRLISDMRAQAAEIHRIYGRLSESMHTYVQSDEYRESVQLRQLIRAAETAIHKAPRGRRRAAVVPAPKLYGSAFESLGMVRLFDPADHRAPGRLPEPPSFTETDIHRAARTPRADRKVLGAAVRKAAARRGRATVAEVFAELPAEHRHLNSIRALLAQAAAAGTVPGSAADGAPAASGAGVRSESVSFIQIDGTERTAVLPAVTVAKDPDHE

SEQ ID NO: 38529 - protein, 306 aa, Arthrobacter sp. 11W110_air
MSEPTPAPTAQDLPDDGTDLNTAPDGPAVEVELEDGTDFAEAADTDDVDADDTDSDAPAPARDVLVDGPELFPGDTGTLPLKLRQALVRLLRGPYLDATSSDNVYNTVVDNQEQLRARLSELFLQLVIDEDRKVALLRPVDMAEPHTQVLQRQREMTREETLLLLRMRLLLDRHAGTGNDAVIARRDMVEILEQYVDPGQQDAKGVEDLTDAAIRKLASERRLLLPTELEDTWVISPALPLALPYEHIGDIIAFMQSLTEPDDDGAPAAADGTAAAAPGPEMTEPDAAGTPALDLTELDTAVEEQA

SEQ ID NO: 38530 - protein, 1118 aa, Arthrobacter sp. 11W110_air
MSIETTLPMGDLINPGQNRLASVQIVNWGTFDGAHTIHVDRAGTLLTGDSGVGKSTVFDAILQVMDARPKMNEAAQNNGGTTAEERRTAFSYMRGRLGTQPTSAPASAPGSADAAPGTDPVTGTAYQRPGATWSAACLTFDNGLGQVTSLSVLMDLPEHGTEQHVGRFYLLHNRPLDVAAIETGMRGRFTKGSLEALLPGAQVFDSHKLFAERYRHALGVEDEKAFNLLRILQTGRGLGGTVNDFFRANVLETPKTLTAAEEAVEDFSHLRSIRRQLERARRQRDHLAEVPGLHARYLTARAELERSRALLDRGLPAYRRSLALAGQEREVARLTAETDAARTALADAETRRGELKDAMDALRARYASEGGGAVATLERELAAAQAQLAAREAVETAARADLDAAGLDADFSPAGLQTARRRAADQVRSLAAELAAARERSSDAHGEAWAAKGRIRRLEEEIASFRRRRSNIRQDSLDLRARISAGTGIPAEEMPFAGELIDLAPEHAAWRPAAERALRSLAVSLLVPGEHMAAVTKFLSETNLRGFIRCIDVSVPVDGRTDPDEDHLVTKLLTAPGAMGDWVRRKITAHYDYVCVADPAGLADVDRGVTRGGAVKRNASTTEKDDRHTDPGDQVLGFDNKDKVAALEAELEALQRSFEEADTVSREQARAQDAVAARLAAASRVAEDARTWEELSADAFRAELAAAAERLDTARDANADLEQIRFELETAELDHTAAVEKVGTLKGELARLQAQLDAAVGRRDVFAARGTEALDEELRAALEELFAPYGEARDADAVTAAAAAVERKLLTGAAAQEKALLESKNRLERIFETYTEKWGSDFGTSVDAAEAYADRYEDIVTEGLPQREAEFREYFNNRTYERFSDLLQLLDEERRSISSRLLPLNSVLRRVEYHAGSHLEIEVKDSIPDAAHKFRQDLKNALPLMGRRQDKADMDARYAGLEALVERLKDPEEKRWRAEVLDVRAHVTITCTHRLPDGGAYTNLQASLMSGGEGQRFTAFIMASALAYQLGIVSQGFSTYGTVMMDEAFVKSSLSFAEASINALHEFGFQLLLAAPEDKVDLSRFLGSVTEILRDDATNRSGALQRSGGSVPVNILLR

SEQ ID NO: 38531 - protein, 517 aa, Ralstonia solanacearum GMI1000
MHDIKLQRDTPADLFRHISAEKAVLYRCVMDCFAAAKRQFRLHLRPDEILNEGNWDRIPEHAQPRIEEVQAALAQLTEWGNLESQPDTTRVASISDFYRARFLYRLSQGGEAVEAALTTFERTLRRRAELQTVALEDISNRLQTLLSLADSANPDAAKIHETLRDLVRVFESLADNAQAFMAGIGRSIELQQAEVTAVLAYKKRLIDYLERFIGDLVGRSGDIAQRLVALSPRVDSLLWLAAQREARDSAPDDDPEQLDAVARGWQAWRERWKGLRGWFVTTGHEPPQAELLRSKARAAIPQLLTAVSALNERRSGRSDRSADFRMLAGWFAACEDDSQAHRLARAAFALNPARHFSLNPALAPGVQDLPASTPWAEAPPLRIHPRLREYGEAAPRGALPRVQARDEQRRLLAAQLEQEHAEIEAARLRLATGRATLLSELGALGTHDFALFLKLLGEALTAQMSPDAPVETQSGDGLLHIRLQPLASGTQAMITTPAGVFSGRDHTVTITRMEDLP

SEQ ID NO: 38532 - protein, 416 aa, Ralstonia solanacearum GMI1000
MSNDSHDIGRQQARHRDDERTQALRALLMTPLMTPAHESFAAVRRHADELRAWFARETGWTLHIERDCARLYKRPADLQDASRGLPGYERRRYVLLCLACAVLERADPQITLRVLGDRLLALAADPALASRNFHFTLGAAHERRELVAVCRSLVELGVLQRIAGDEESFVRSTGDAADSGDALYDVRRRVLAGLLAAVRGPSTWPAEQTPVSLDERLASLVAEHMPDSDDGLRTALRHDLARRLLDNPVVYLNTLDAELRAYFVNQRGAMATRLCDATGLVAEQRAEGLALVDEDGELTDVAMPAEGTEAHATLLVAEFLACRSRADAQTPTTLDEITAFLADARTRYGSYWRKSAREPGAERELTTVALERLLKLQLVARMADRIQPLPALARFALGETDIRAPIRSATQSNLFE

SEQ ID NO: 38533 - protein, 1376 aa, Ralstonia solanacearum GMI1000
MTDTRSPALPIPTLARWQPLRLGLVELFHYDSEEFWFRDGRLLLRGNNGTGKSKVLSLTLPFLFDAYLKPSRIEPDGDASKKMAWNLLLGRHERRIGYAWVEFGRVDEDGRHHYLTLGSGLSAVAARGQVDTWFFMLDERRINQDFWLMSPTRVVLTRDRLREALQDCGQFFDTAAPYRRAVDERLFRLGSTRYAALIDTLIQLRQPQLSKKPDEASLSNALTEALPPISNDLLADVADALNQLEEYRRELEEYEALERAVGQFNQRYQRYAATQARRQARNLRTAQTGFDNASRELNAAREALETTQAEEQHADQAWRQADTVLTTNRTRLEELQNDPAMADAKTLEKADADSRQRRKEANTARQTCYDMQTRLERERQATRTRAQRAEHAGRALAESREDAAQAAERAGLSPAYSANPLACAGAHTLQPLALDTARQDLRRASIERREQVALLLRRCDEADHAEQTHARAQTQHDERADEAETAAARREEADTAVDRQGHTLLDAWQRYLDGLRQLHCPDSADALEALAPWTVSLQGDNPARTALHRAQQAASLRLARRQAALQNDRHVLEQERDTLRDERARLEQGEDTMPQPPHWRAPDIRAVRAGAPLWQLVDFRPGTSAADCAGLEAALQASGLLDAWVTPNGMLQDSDGSHAQLPHDAQWLTRERQPQSLAAWLRPAEAASDAPPRVDPTVVQRLLEGVACGAEDNPAAEAWIAPTGRFRLGALAGVWHKPGAEFIGYAARCAARERRQHEIDARLEAIDAALTLLAQNFAQLDADQREAADEWQCAPSDDSLRAAHVEAVSRAREFDMARQRLEHTDRLLRAAAEQWEQARTILERDAEDLTLPPARDALRAIDQALQMFGDCLHTLAVVVRELRDAQTEHAEQLQREQQAESDARHALEQSAEREALADEAGIRLETLRASVGARVEELQQRLSDARGAVTSGETELRQRNDARRLAGEARARAEQKAEAADATLVERTTARQHAVGQLQGFSATGLLVTALPDAELPSMHAPWTIEPALALARRTEQALLHVKDDDEAWNRVQNQVSQDYTELGRALAALSHQAQAETNDFGLVVSIIYQNRPERPDQLSARLAGEIAQRRELLTAGERQVLENHLQAEIASAVQKLLRDAERQVKAINDELDKRPTSTGVRFRLQWETLPEGADGAPVGLEAARRRLLNTSTDLWSAEDRRVVGEMLQQRVAAERSRADADQGGSLLDQLARALDYRRWHRFRVQRWDGQWRPLSGPASSGERALGLTVPLFAAVSSYYTQESYAHAPRLVLLDEVFAGIDDAARAHCWALIREFDLDFVVTSEREWACSAELPGVAIAQLQRHEGIDAVHVSRWTWDGRNRRREDDPNRRFPNA

SEQ ID NO: 38534 - protein, 434 aa, Ralstonia solanacearum GMI1000
MSSSEAKLQRLLGGPALLPLRQRLRRHFERQNDGETRATLQLTQLRAGEHEALALLTGRTSRPTRSMRIDITQIDAALQTAGICRSLREALERLDGPILNRAAARAAIQAAWSEVTQGREVDARLQAWLDTPAAGPQLKRLAKQNTAAAKTLLRQADAVLRDLPAVGLARAQLAAQTLGNAHALDAGQPVASIVLAAWRCAEAAMALSRQEEPTDPEREFDDDEAEDRDDKARLAHERTRDIWARAGVLVNELARPALMLNLPIVDHVTASWTAGEPAYLSLRQLVRTPPAWTVKGTPVFVCENPNLLAIAADRLGARCAPLVCTDGMPAAAQRALLTQLLHAGARLYYHGDFDWPGLRIANHVIRTWRAIPWRLAASDYKAAVKAAPHVRRDLDETDAVAVWDPLLTPAMRDHGLSIAEEAVADGLIEDLRLP

SEQ ID NO: 38535 - protein, 539 aa, Streptomyces avermitilis MA-4680 = NBRC 14893
MSAVVRTLGGMEGNEGKPVRGAEADAEAWQRLSAYSYLSAPERLEYVAVMRVFCGTLLADLSVPDLLAKLAEKGGPGAALDAETLTRRLEELVRWGNLLRSTHTVRATSIAEYQRSRSRYQLSKLGERVQRDADEVLAGADAAREVSSELLALVDRGLREIAAMAAAPGGADPQQALERISTLFVQFAEFAESVRDFYAYLGQVLARYDLDSAEYQGFKELLLDYVEAITEDVSFRAPRIAAHLDAVRPHLPALLDRVDAHAAGIGALAHGLTETRVQRSRGRDLADWEGLRDWFTDTGGHGSQVDQLRDATLRALESLLANAKRMLRSASGEMSRRKDLLRLAAWFDAAEPEEAHDLAVAAFGLYGARHLGVAPDPDRSVPAYVSWWTGPVVDVPVALRERGSRAPRGRAAAAEDHSEQKRRLMERARQQAEARQAAADELRSASGRFEQVRLSAPAMRLLLELLTTALGNAQLHKDAHDFLLDGAQAHDADLDIRLTAWRTPGRSTVLRSVDGDLTADDLTVAVESASAPAVGEASA

SEQ ID NO: 38536 - protein, 445 aa, Streptomyces avermitilis MA-4680 = NBRC 14893
MPLPSAHDVALAAERHTAARLLLAQPLVTGAGPHSDAFPLIRRHADWLAQRFQQVFGYRLLVEASYARLFKAGLGPGSGHRLERPSTGTPFSPRTYAYLSLALAVLVTAPEQLLLSRLVADLRAAAVDAGIEIADTGRQGERRTLAAALRQLVDWGVLVETEGHVAAVAEERAGEALLTVDREIARAVVAGPLAQSRDGADLVRRAADPGFGGPRTYVRWRLVETPVVHLDDLTDAEREWLRTRQRREAQAFSELLGLEAEIRAEGIALVDTEDELTDLHLPGTGTVAQAALLLVERLVDRLRPEDPGHPAVGGRLVIGVPVPDGLLPALLDELIEEYGRRSNWQRGHLEDRDGFLAAVLDLLVRMRLMAPAGPVRAEGHGLPEGYGETVADDRSVTDVSQARGQGRTDGVWILLAAAARYATTVAVKPRTDQPPADDVSKESPR

SEQ ID NO: 38537 - protein, 1399 aa, Streptomyces avermitilis MA-4680 = NBRC 14893
MNRPPNPHRYRLHRAGIRNVWQYDEQEFAFGEGRLLLRGKNGAGKSKALEMLLPYLLDGDARALDATGTGRTTLAWLMLDGFEQTNRLGYLWLEFVRTDDEENDHHLTIGAAVRASRSTKTAKPIFFTTRLRVGKDVDLAPAGRPLPVDQLKSLVGPENVTDRAVEHRARVARELFGLTDSARYRNLLHLLHRLRRPTIGDRIDSGGLVSVLAETLPALDDEVVEQVARSLDDLDSVRAYLGRLERTDRALRTFLADYRGYLHGTLRRRTGRANGALEQLMEYRTFAGDATRNAEGLRERERELDARTEALEGEASAAETDLAALHAGAGYRGVKELAEKRATVTALHSAAAAAFKAVRQAHSNQEEAGRRLTDESGRFGEELVELSTLQGELVREAERSGVDPVHLGEPVGTPAAPVAPARTAELTAPEGDFHLVRHSEVLAVDIETCATALYAWDARLDAAQPVIRNRSRFVTELRALMGRSDEAQREAQAADAARERLEEQADHARSGAEQRRQETVHEGEAYAAAARAWTEQLRSLTGVPVDTAVSALAGHDPADGPLSAHAPDEVADAARSAVDPWLAELGEERDTLTLAARELQTERDRLRHRREEWERRTDPEPPPPSHRAAPRAPGTGAPLYRLVDFAHDLEPDARAGLEAALEASGLLDAWVRADGTVLDPATRDTLLVPAAPVPGETLARVLRPVDAPDSGVTAEQVERVLRAVALARGGIGAGEADTAGAAHTAIGVDGSWRLGVARGRHAKQVAEYVGAEVRAETRRRALAELDLRLTRVQDELAERQRSLRMLTQHRDQVGDLLRRPPSARGLTDAWARTAEAERTAESFAGQAATAAREAEQARAGAVVARREAEATASAQDLPADPAALETVRLALDRLGQGAQRLRRRVRAVLSAADGHRGSRTDYGRAESARREAESDYAEPLGRLEAARRTVRALEEAIGATEQEILDREAETMRRLDAVGRQLPRIRRDLADVHDLRVRAEEEERARREALADQEAEALACGRGLRKALALPGVLRGAGLDTDGDEVALKSPDPLHLDVRERIAALRLLVDAVRRGLDAERHDISDTTLLNRHTDLRDQLSGGYDATIEEHDGIKLCRLVDDHGLHDIAVVGERIAAEAAEARDRLTEREREVFQRFLAGELGDHLSSQVLAAGALVAALNTTLATVRTSHGLGVALDWKLADGVEADVKAAVDLLRSPSGLRTREQSEQLRDVLQRRIEDARRADPAAGYAAHLRTALDYRDWFAFTPWVVNDAAPGSRRRLSGRTGLSQGEQRVLSYLVLFAAAAAHFTSLADAAPHAPRLILLDDAFAKVDEPTHARLGRILVDLDLDFVLTSERLIGNWPDVPSLHIYECLRDPHVRGVATLHYTWNGRQRRLMSV

SEQ ID NO: 38538 - protein, 445 aa, Streptomyces avermitilis MA-4680 = NBRC 14893
MTGPERADVRPPDADALAFLTRPGLARLWTAVRTRLERNGLRPAGAIRLDQLDAREREALSLLLARPVTGLTVTMRLTDLDTRLRASAVGRGLVAMLEELGPPLTDRRAVRDAAAAERAHVWSTARSELEATLLSAQPWAAQWLEEIRRGGTLARQDSHTAITVITQAIQTLGALFPGTNQPPTPATWGRGELATRTTGSAHGLDDGTLLSRLVLRGIALARGVESPADAPARRALWRMASVTPDEVSSTVLTYGLRPTGGTWRERALRERADHHMETHLTLRELRALRLEVPPRTRVHVCENPRVVEAAADTGGGTEPLICTSGSATTVVLTLLDALAAAGCTFAYHGDFDWPGIALANRIRHRYAAEPWRMRAADYEYLATRAQLHGTPQIPLTGTPTDAEWDPELTPTMAALGIALHEEAALDLLLEDLGTSVGTHPSGDSP

SEQ ID NO: 38539 - protein, 496 aa, Geobacillus kaustophilus HTA426
MDATWLKPIVETKYLSTENAHRYRAILRYFYIQHERMRQYLFPEEVYAFLKQHEEFADYTEEELQQDLDQLVKWNNLIARQETSHVRTIEEFKKKRFRYQCSPYTVEIERMIRTLEQLGDSFGGSLEKTRFDRLYASLSRIEAIIASGFQEQRDEMYQVWEETFDYFKKIIQNSADYMAYLHSENVEERMTSESFLVYKEQFTAYLRDFIVALQKTSMQIEQLLENLPEDGVRQFIGHVVDYERSIPRFADAPPPRPMQIEEKWETWRSLCEWFLGRNGRESELLFLQYQTNEAIRRLTRVVQRLGERHHHFRSRKGDYLHLARWFSRLESIEEAHCLSAVVFGCFHTKHLVADTEATDNIYRDVWDEPPAEWVTKPRVRHYGEKKKPQAIEDKEREKEEARLRYLEEKAREEAELKQFVTDGKIVLADLPEVTPYVRKTLLGWIAKAMGREGQAMKTENGWVVNVVNKEGTICLRAEDGELVMPNYEIHVLSRGE

SEQ ID NO: 38540 - protein, 398 aa, Geobacillus kaustophilus HTA426
METAFDDKAKEALAALFEQFWIIRDKEPDLYQLVREREHVLKKYVEEKFGYRLIVHRYFAKLEKIPAEPEPWMGIESFQEPLDYALFCCLMAYLEGKAVEEKFLLSDVCEEIRAMYPGDLPVDWTNYSHRRALIRVLKTAEQIGLVRRMDGEIEAFAQHVEEEALYEVPVLARYFMRTYPKDLLQYESIDELLAEEWKASPQDYRRHRLYRKLFLSPAVHRTEGDEQDFYYLRNFRHRLRDDIEAHTPFRYELYKNAAMLTLPERQAPYTVFPDQKGTSEVILHFAALVRERLGEYPPDEYGRIRLTPEQFSAWLADCRRRYGAGWGKTYRDMSAAELVREVLAALNEWRMADVEHDTGMIVLYPLLGRMSGRYPDDFDAKEGGEHGESMGASSCGAD

SEQ ID NO: 38541 - protein, 1373 aa, Geobacillus kaustophilus HTA426
MANPWVLHRAGLINFWYYDEQYFHFADGKLLLRGSNGAGKSVTMQSLIPVLLDGKKTPDRLDPFGSRARRMEDYLLGEKDVVNRDERTGYLFLEYKRKESDQYVTTGIGLRAKRQKSLDFWGFVLFDNRRIGYDLQLYKQEKTGEKIPLTKRELATALGAGGTVVETQKDYMELVNKHVFRFESLEAFQELIELLIQLRSPKLSKDFKPTVIYEILESSLPPLTDDELRHLSDTIENMDQAKQQLEQLERDERALKRLCDQYRLYNEYMIAEKATEYVKAVKQAEQLAAAQHRLHDEEEQARKTLDELDESITRLRREEDVLRSREIDLAGHEVFQQAEKYEQLKSERERLQERWERHEQTIAEKERLERQHRRRLDESEARLDDLERKLEDELAQLRADAEEGAFSLHETNEDDFHRHRQKQQEFSFAAWKQEADRHIEQLEELARLWRRHDDVKRRYEEASTEAGERRREMDEWRHQQQKWEELLEQEKERFEQAVLAWVEQGGIDVSEADIQAFLRQMGALYELYSLDDLKRPFVQAYYDAVGKKKDEKWRLEHDIRLLEEKRAEREAELRQWREQRDPEPERDEQTTAARLALEREGIPFVPFYAAVEFVDDVPDDVRERIESALSHAGLLDALIAARDVDVDCDRVLIPKPVHMVHTLADYLRPDADAPVSAERIDEVLRSIVITDAEQEGGMTIDETGRYSLGLVRGHAPRRARAMFIGRAARERWRLENIAALEAEIAAVGQEIDRLRREHQAVGAAIQALADWLASFPADRDVRTAFEEGQEARRQAESKEREWKRQEEKAALLAREWKQIKQQLRDESAELDLAFTLDGCEQAQLAMKSYVRHLHELEVLYRETRHTEAMIAQQRERLAALETEIDEAKGERNRIRDEKERISLEIVEMERTLAQMGADDIRAEIARIQERLASLRREIPRLVNERARTEQQLMRLAEEREKEARREAFARELAAMWEKSFAREAALGLVDLDRSRSLLEQAKEAKQRYEAVLKETRSSLLARLNTVFFQESSNLTEYRASFEPLEEQTKPEWTAAAPDDEMAMKAADWREKQERHVIYLDYKGERATPFAVLAEVERDIVLQHEYMKEQDRELYEDVILKSVGRILRSRIQRAERWVNDMNKLMGGLDTSSGLVLSIQWKPKTAETEAELDTKELVRLLRLDPRLLREEDLQRVTNHFRSKIARARELLEERGQGSTLHQIIKEVLDYRKWFSFTLYYEKTNEPKRELTNHRFYQFSGGEKAMAMYIPLFAAAYSRYQEAGDDAPYIISLDEAFAGVDENNIRNLFGLVEQLGFNYIMNSQALWGDYDTVPALSICELVRPRNASFVTVIHYRWNGRVKQLMVDDKEWEMIKT

SEQ ID NO: 38542 - protein, 406 aa, Geobacillus kaustophilus HTA426
MSTVKEAAAFFRSEQGFKRLFVEMKRKYESLGRVGGAVSLQSFSKEERESIAAFFGKDVSRVFLSDFEKQLGQTRFAGVGLVELLEHYFGVPLMSNKERRQAEAEERERFFARLAEEHHWFAAVRGQRFVQTAYEADRGGLEAAVRLVGAALCRLPLSSYMRLPLFAQQVASDPHAFDLSTLPGRLLLSALQATTPGQWDVASVESVNELLQSVGLLREDILNFVTCANILAETEGGPHPVFSAASETNTALNMPLRDVLSLVGAHPARGKTVYIVENAGVFSTLLDTRAPLVSTNGQMNLATMKLLDLLAASGAKLYYSGDFDPEGLAMAERLLERYGQAVTLWRFSLDDYAAANPVVELTPERLAKLASVTSEPLRPVKEAIGRKKKAGYQEAIIGRLTGDING

SEQ ID NO: 38543 - protein, 536 aa, Nocardia farcinica IFM 10152
MPAPFTTLWTRCPIEQEVSAVAEEAGAPRPFAHVHAANADLYRAIMGSFAAAKRRFTVHLRPDDVLHALRAAQFPADEQSVAAALDQLCEWRNLRADPDTSRVTTVEDFRRARFLYQLTGEGEAAETALVTYDEALGRRGALQSVALTDIVTHLRALLRLVDDPVPDEGLVYASLTALAGRFADLADNAQAFMSSLQNVTDLQDAEIEAFLSYKDRLIDYLERFIKSLVTTGAEIAVLIRELDGHRVDRLLDLAAEREAADAAPDGTDDYRERAVIRHRTLWRERWDGFHSWFIGRDGRTEQAALLRGAARSAVPRVLAVVAALNDRRAGRSDRSADFRTLAVWFAQAPDDEARHALWRSAFGLHSARHLTIDADTVEARERQPVAPATSWTDAPPIEISPRLRATGSYERRGRANKVIDRSVERRYLAELAAKEAAQTRQALAELTAVAGHPVRLSAVGALNEKAFRLFLGLLGDALTAKSPGSAEVTTTTSDGSVTVHLTELQSGETAEIHTAAGVFRGPDHLLWIEVRGGGAA

SEQ ID NO: 38544 - protein, 410 aa, Nocardia farcinica IFM 10152
MSALTDALHADREAEQRRAARAVLRNPLLRSTGRSRELFGLVTRYQRELRAWFDRETGWQLTVTAETARLRKIATGPDPSYPALETAGSRLPFSRRRYVLLCLALAALERSEAQITLGRLAEQVLLGCADPALTATGLAFAMERREERADMVAVVRLLIELGILERVAGDEQSFVSTTGDVLYDVHRRTSSLLLAGPRGPSMLTAADDRCAALTWEAPPATDELRVRRIRHRITRILLDEPVLYYDRLTADELAYLTGQRTALCRRITELTGLLPEVRAEGIAMVDPFDDLTDVRMPEVGTNGHVTLLIAERLGRSIGTPAAIADLHAMVRELAVEFTHSRVWRADAADPGAETELVRTALTKLSALRLIEYDPTGDRVTPLPAIARYGVAAPTVAEPGTPARRPSRKRR

SEQ ID NO: 38545 - protein, 1382 aa, Nocardia farcinica IFM 10152
MSTDTTDSSPLITAPGLPRPTTRRWKPLRAGLADLFYYDNQEFRFRDGRLLLRGNNGAGKSKVLALLLPFLLDGELAPHRVEPDADSRKRMEWNLLLGGEHPHSERVGYTWLEFGRVEADGTELFCTIGCGLKAVASRGIAAHWYFVSSARMGVGLRVLDDQGYPVSRDRLGEQLVGNGERYDTAGAYRRAVDEALFGLGESRYGVLVDLLIRLRQPQLSKKPSEKVLSDALTESLPPIDQAILADVAEAFRSLQEDRDELADMQSALDGTRNFLTHYREYARTASRRRTTRLRQAHSRYERVGKDLGGAKDALATADDELRRLRADTRDAEDQRERLAEQRQALYDSSAAGAARELERARDQARDAQKLAADRAGDHTEAQQHYDAFRTRADEEQETLATTDTEFRAARQQAAHTAAQALLTTAHTADIDAALDRQPLGETAPLRRAADRIAALQSAAIKKLRTLIAAVDTAEQRLTATRARIDKLDTDAAGLAEAARLAEQAVDAEAARLTDSTSTYLRAATELALDDLPAVLDDLTAWARILTGESPVRVAVAARASALADELTRAESSLEHEESVLEEQCRAHRTELNRLREGGIEYPPTRHTRSALSDSDRDGTAFWQLTAFADRVPETDRAGLEAALEAAGILDARIGADGTLRAVTGEVILSPETVAPGRSLTGVLEPALDPADSRTATLTPAAVTAVLTSIGLGTGSTHHTWVDVSGDFQIGVLHGAWTKTDAQYIGAVARERFRLARITALEANLDTLARQLAELAAQRRALTERKRALRAEAAGLPDEEALRGAHRRITEVATQRRRLTAELADAAADAAREEAAVHTASTERDRYAGDAGLPVTPDALDDIAEALTDYRVHTAALWIATTRRTEAAGRAETARADAEQAHNRLLLRAEAAEAARIDALKADERHRTLDASVGAEVAELRAELARVATAIEDNKRRRGELATALETAVHAHGIAEGKLAELTEQLDIERADRDHEITAVHRFAETGLFEIALTDTAVPTADTWSAAAAISFARAAESELAEVAEDDKTLDRAARRIAEEHKTLTDLLSAQGNTTSMTPRDDGLVVDIVFRGRPVTVAGLAETLEQEVGDRNRLLTAREREVLENHLVDEVAAALQELILAAEDQVLRMNTELASRPTSTGMRLRLNWVLGDEAPTGARAALRQLRQTADLWNETDRAAVGEFLQQEIERVRAEHGVGTWLEHLTAAFDYRRWHKFVIELQQRGQWRPATGPASGGERVLAASVPLFAAASSHYSSAGNPHAPRLVMLDEAFAGVDDNARAKYFGLLAAFDLDVVMTSEREWGCYPEVPGLAIAQLARTDEVAAVLVTPWEWDGSDRHRMNYPEPAAAAAAGADAPADAAGLF

SEQ ID NO: 38546 - protein, 419 aa, Nocardia farcinica IFM 10152
MSIDEPRLRRILGGPETAWLMSRLRERIARGLPLTGSVRLQHPSPEQRAAVERLLGRRAGATAGISVPLDRLDEQLRRAGIHADGLEAAVRLLTGPVAVRSEAAAAADRAWSMAFAPGDRLALRHPELAGWWQRVKVSGTIRRLTGDPDAAAALLTTVGAALDALPVHREPLGVFAARVLGRAHALDAGEPVAAIVLSALRARASLGDDTDRRTVWRTAGLIVDELSSTVLTLGLTTAGRSPAEQMVNLARATGQPLVLTLRQIRDSMAAFDTADTGRYIVSVCENAAVVAAAADRLGPDCPPLVCTAGQPSAAVIGLLDLLTAAGGRLRYHGDFDWPGLTIAGGLYRRYRWQPWRFTAADYASCEPPVATAPLTGIPVQAEWDTELTVAMSRRGIQIEEELTLPQLLADLAAEYLAHT

SEQ ID NO: 38547 - protein, 523 aa, Nocardia farcinica IFM 10152
MRAVGAGGDRPATTLLPVTDSEDGPRGDELDERLRLFAFATAEKRADYLRVLRAFDSARAAYVVLLHADDVAEWIRRAGGAELPAAEIGPLLDQLHRWGVLERSYDGTRAATLAEYRNRHYVYQFTQPGFQAFRAVAGVLDARGEEASLSRLVLPELLADLGALAEANRRGDAELVYRTLRRLDAALTDMASRAAHFYLSLGDLVRTTEVTPEAFLAHKDTLLAHMREFSMDLARFAPRLAAAIAEIEQTGVAAMLERAARCDERVLLSPADREADWRARWQGLRGWFVAGESGATEADRLREATMSAIAAVLALLRRVTETRRGGVSRESALRHLAAWFTAAPSTESAHTLFDAVFGLGRPRHLAMEHPDADIVPASRSWWDAPPLEISRTLAETGRPPSAAAPGRIQRNDASMRRLRESQLAAQRSRAEAARSLAAADVYERVLDDRETDMLLRLLDAASTAWVPVSGRVAGTSGSDNGVTLTVSEHPGPTVVRTARGLLHLNNRKLEVRVRGPRTSGGAA

SEQ ID NO: 38548 - protein, 450 aa, Nocardia farcinica IFM 10152
MIHAHRIGSLELDNYQRAARVILANHVVTRSYPDRVALSLIRRWATELREDLAELFGYRLEVTETTARLFPVLDELDPGRPARTVTERVFDRRRYAYLALALAALGRAGDQITLSELAEQVSAYAAEIDGLELAPDRAADRDAFVDAVGWLATRGALTLADGDAGGWAADPEAGEALYDIDRPVVFALFRPPRALQHLHSVTGLFGEEPTTEAGTPAALARAVRRAVVERPVVYAADLGPDQRAVLAQERVIAEVEAFTGLRAERRAEGVALIDTSGRLSDVRFPGTGTVAQVALLLIAEIADLVLDIDNPLPQRAPGPDAGAELVAALDAAIPASTLFAPMVEDGDEPAAEPEAGPEPVRYPFVAADRVRETVGMLADRYGATFAAHWLADVPALTAEVVELLRRLRLVRPVADGVLVLPALARYRGAVVTVRTRRTEELFVGTGREGI

SEQ ID NO: 38549 - protein, 1402 aa, Nocardia farcinica IFM 10152
MSVIHGGVRFIPTRAGIINLWDYRDQEFCFADGRLVLRGPNGSGKTKALEVLFPFVLDGRIEPRRLNPFAGEERTMKSNLLYRKQDSAYSYVWMEFARGRWADPEVVTVGIGMRATRSSDKVTRWYFVADGRVGVDFSLIGPDDRPLTRKQLAEQIGTDAIVDRPMEYRAAIDARMFGLGAQRYDQLINLILTLRRPQLAKNLDPRGLSQALTDGLRPLDDQLILDAARSFSDMEEVGRTLEGLVHADTATRAFVDVYRKYLAVQAKTEVDQVRARLDAVTHASTALFAASALRQRREAERAAAQDRADDADRAYEQALTDRETLQRSSAYEGKQQLDDLADAVRRLESSAAVHRAKAVEAQQTVAQRAQELDRVRADVREAAAALSRGEDELRSAAEAAGIAWTTPSRDDALTTAVLARAEERDADVRAVRAVLARVEAAQAERTRAERLAERAGADRERAAADVAHAEAAVELARGRAAAALREWWDAHGETYGALGAELFEAVDAALGQAGSDEAATPAEVVAERTEPLLEELREARLAARTRAAAATARIADLEAERDAIAAQRDDAPPARHTRTDAPGDRRGAPLWRLVRFADDVPAETAAGIEAALDATGLLDARVGPGEPPAGYRSDQFLIPLPPDRRPTGRTLADVLVVEDDSPELAVPGTVVADILASIAVRDAAGSDEVPAHPALDVTGGYRHGVQVGRHHKPHAEYIGATARARRREERLAELDAALAAATEDRESAEAAAKQADATLAALTTAAKALPRAAAVTGALRAVAEAAGVVRSRTEAAAQAERELDQAVTEVTALEKKLRAAAAEHRTPRTAADLDALAAAVRHFESTGTALARLRADHERTLEREREGADRLDEARGLAEAFAEEAEAARAGYDEQQRKLATLREALGAGAAEIDAELARARERIDACRAEQKAARKAANAAIEAVGDAEAAYRTAHEALGTALTEVLAQVRALAPYAQPDLLALLGVSPELRWPSSDAAWSTPDQLLYRIAQSDPETEPRVLPDEVAALFEALSTATATVRAGEAARKSTRSAVTAALQEFDAALAASGRDYRLRWDAADGLTVVQVQDEHGLCPLADFATRVASARRDQELLLTDAERRILEDALLTGLAQQIHERTGDARELIAKMGAEMKQRRMSSGNTIGVHWVLADDLSDSARAMCKLLDRDAAALSAEDLAAIRAHFAAEIRAARAAHPERSYPEILAATLDYRRWRVFSFTLVGADGSEDKLTVARHSALSGGEQSVSLHLPLFAAAHVMLDSADPQAPRLLALDEAFAGVDDNGRSELLGLSVQFDLDLFMTGYDLWITYPHVPGCAHYDLAHSAAEHTVSATLLVWDSGDLLAEHSGSDLTAALGSPNRRRVPVGIEGGLTLDDMPGAPAPLA

SEQ ID NO: 38550 - protein, 493 aa, Symbiobacterium thermophilum IAM 14863
MPPRAVTAEMPEANYLIGHPDGKYYRLLMRCFYERSLSHITYVRTDDLVAFVQQYLPYDDATCRQHLDQMEKWGLVTLIPEQSKPANLMELRQKPRVYQASRIALRLEALRAELEQEEGAASLDPAALDLLVQRVRELADFIEQDGLHRDGAAPEAHRLWAGVYESFGAFSRRIREYLEDLPRHRPREVLDYEAFRAYRDLLIPYLQDYARRLFDRREQLRMRLRVLARSKELLATTAAVVEAQQVRADGSRPDFDRQKERFLREIDALIGYFGDQGDVDVLLERAQAWVSEITRHARRLSEQHLGGSVREQTLLDLARRFSECTSLEQAESLAQVVFAATLPLHWRGEAPPPADKDPWEAEPVTVPLYAVRRGQRPRQQPEATADRTSEALQKMLSAKAERDRAAQELAELFGDESELDLGDLTVREPRQRQLLLRLLYKALSQQGPVGVGYRNWSVTAEVKADAPLGRLSAADGTATLPHVILRLHKGGPR

SEQ ID NO: 38551 - protein, 420 aa, Symbiobacterium thermophilum IAM 14863
MATTGAAEQRQLALQDLMDRYLISQADEPEAYRRVALHEGYLKAWFHERPRWRILSGRGVYRLERMPSQVLFHRGLPRLRSPLSYACLCWVLWFAETLVTTARDWFVISELAQRIATVSEGRFTLAERSHREALVQALQFLIDLGGLLLRDGDADRWVAGQDYLGEPPEVMYEFTEMAPRLLANFSYESLAVAVTADHGRRTAPPTGEEAPPLTRAWRALLLGPVFWKADDPEAFAALEANYEAVYRDLEASLGWQVELTSSFARIWRTTTARHAGAVLLDLYPDPGEEAEERHTRYLFHPILLLLGRCQEGVAAGRWSADADGAVAISAGELEDLLTELRSQHRPSWGAALGALSIAELVTVVLSEMRRMGLLRGPDRFGRCWLLPAAAGIRGRYVTRETGARRAPEPEQPQAQQIRLF

SEQ ID NO: 38552 - protein, 1401 aa, Symbiobacterium thermophilum IAM 14863
MALWQRLELDLEEERRAIPGGPQGWRPERLILRDWWHWRDQEFGFAHGRLALTGQNAGGKSSLLALAIPVLLDGRTEPARLDPAQSRDRFLHYYLLGADGAEAGNPDVFRYEARTGYIALEFYHTVDQRFLTIGMGVSASRSSPRRITDWWGFLLVKGQRLGRDFDVRGADGTCLGRREFARLVGDGGIVVTEKAEYQRLVNDYLFGFEGDDFDALIAMLLQARRPKLGEQAGPDKVCDLLRRSLPGISPDRLSRVGEVVNNIEEYRRNLADVTEKAEAVGRVDAALYALAEVLVQEAAVQYQSVQGSLGGVVGRLKEARASLAAAEEGLAALEEQGQNRAREQAALEAEVEELRQGEGADLQDRLRDAKERAFQAAGRAAELEGRLREQREHLEEAEARRRQTAAEFDDRRRAMAAEVENLAREAEGLGWHEAAGELREARKAIVVLAVDDPPAVVEGAWPDSRLVVEAEDLQRGFADAARARRALDEAELAFAVAQERIADLRGRAGLAADALEAAKDRAEAERESLILQIAAWQQESRVLAPSDTDVARLTARVQALEAPPAGGVHELVEPIRDLAAYRKRQLEARVASLEDELRAAQLRVDRLAERRAEVEADAGDPPRSEVRARARQGAPDLRPLFRWARFRPGVPQDVQARVETAILEAGWLDLLVLPGAESGAGETHAGQARPTDARVADAVILPRPVAGPSLLEVLEPEPGAPATVLATLASIGWGEGTGDRWVSPDGRWRNGVAEGQVGPWVQEEAGYLGEENRIRRRERRLREVDAALQEAQAALAAVEARRREAADAVKVVDAELEALYRLPWQALFRALDDVLRREEEAQQARQAVEDEQPKVAQAEAEVRRRTVAFHQVAADLPQAAGLDYEGLMQRRQDFAAMGARIGRLTAHAEALVRCAADYRSQTEQLQRDQQSLAALERDMERIRQEQAAAAAAVKALEQRLADPDLRARQQRLERALERLRALQAEAKQASEQRGRLEAQRESAQGRIAELEPQEEAFRRELGLRLEQVRRRLGLHPLLTPYLEALDREGVVSTMHRLARLVETEDLEQVKSLRQGELNEVVHACRDLLRDYVPTWNPERTSLSFRHERVPMTATQLRERLEARAREYAELMEEEQRKLYEDIIYQGILDELRRLIRAAREFTRRTNEKLKGLQLSNGEQLSLRLSLLPSDQMPGARIAHELEQMEQGSRWLDDQKREVLLNTIKEEVERVREAARAGGEEIGYQEAVARALDYRNWYEYQLLSRMPGASAPVPIRTRGFGQRSTSAKAWALAVPVLAGVAARYDASPRTDLPRLVALDEAFAGFDANNQKNYLDFLSQLGFCWIITAPDELPYSESLSAAMTYRMSLEGTLHTAFPILWNGSVAREPLADLGPEPGEGAEP

SEQ ID NO: 38553 - protein, 435 aa, Symbiobacterium thermophilum IAM 14863
MSAREAFAAMREAGLEPVLAAARQKVYEADGLRGRVRLTLGAAQLDELANLLGRVSVRDGQVLVPLQDLDAALTRSRFRTGLLDVLEAGYGPIVTRRQEREAAASRWASWLKQVGDALPPVDGVRAWFERVVAGESPSARWVRRVYRTDAEQAARAVAAVGTALARLPVDRGEHELLAVFAASLAGDPHAFDEKEPAGALLEHALRERFGPPPEELRPHEARAFLLDQAGLGADQVSSTVLVAHLAGARWAPAPGASHPMVAAMTACTGAWAVTLGELRRWSAARAHRGRAYVVENPPVFEWLLRRLAGAPPERRATLICTGGFLSAAGFRLLDLLAAEGTEIWYGGDFDRSGITIAVGLAARYGGLFRLWRFGPEDYRAAALGPGGQPLSEADRAALLSVTGPLAPTARAVATGGVTAYQERLVEVLAQDLMEQ

SEQ ID NO: 38554 - protein, 511 aa, Desulfitobacterium hafniense Y51
MSKNPNLQSLRSVKELKYVNADNVTRYRAIMRYLYQQYQKLNYWLKPEQIYNGLMAWNLLKTYTLEQCQIDLDQLVEWGNLNSRHDGGRAVTVEEYLRKKSQYLITPYSIEIERLLGNLETVRGYGGSLEPTLFDTIGNILSIIREKAGLYTAGEALELWNNLFESFQKLHEASVDYIASLQTGTAEELMATDAFLLYKDSITRYLQDFVQALQRRSYKIEGALKQMTDEETQRFFQAVIDDEGRIPKLDEQVSPEQQFDELADKWDGLYRWFVGKGDSGSELMMLERASKDAIMKIVRSVVRIQERKRSGISRRKELDYLGQWFYRLDKLNEAHKLAAYAFGLFSARHLQGEDNRESDSQEQSMWKEVPIPRTLRSRSRKKNERQDTEAVIDRSRQKEAMREAFRLQHRRELEFLIKMVAAEEVRISQLDVISTETRLQILYWIGRCNASSTSSFQTPEGIEIQLHQPAQGERAILLSEDGRLELLDYRFNFRVVNESAWGDLLIGLEAS

SEQ ID NO: 38555 - protein, 416 aa, Desulfitobacterium hafniense Y51
MNGGAAVEKIKVGKLYSARRRRSTVVDQKESTNRIKVCMKALLNRPWIGKESDPQLYYWIKEQSDSIREWFMYHTGYSLIINRKLAKLDKVPVIAFPWMGFQEFREALDYALFTYSLWFLEGKTEGEQFLLTDLVKEIKEYMTEQGMTIDWKNYFQRLSMARALKKLKSLNIVQAIDGKEADWAMDQEAYNVLYECTAYSRYVLRNFPRDLTSYTTMDEMGEIPDAGDKQEEINRVRRYRLYRRFLLEPVVWDKDWKDDLLYYHGQKNYLIRQFKEMFGWEGSRYREGVLFFEPEAGAEAELFPTLSSLSDLSMLVCGKIRQDVNNPELENLKAELDGSVRVTKSEVERILIQLKEDHSKYWISDHQKMQSSALAEEVCGHLIEWGFARWAEGGFLILHAAAGRWLAQYGSMELDE

SEQ ID NO: 38556 - protein, 1362 aa, Desulfitobacterium hafniense Y51
MGRWQMKRAGVLNFWYYDEEEFLFEEGRLILRGTNGSGKSVTMQSFIPLVLDGDKRPERLDPFGSRDRRLEYYLLGEADQGHTDRTGYLWLEFYHPEKELYKSVGIGLRARRGVPQLGFWGFLIDDGRRIGQDFHLYDYPLWLEQGKKVPLNRKNLEEKIASGGQVVQEQAAYRDLVNKALFGFRESESYKDLLKLLLELRSPKLSKDFKPSSIYEILTNALPPLLEEELGSLSDLLEDMDQITDHLEELQDHLKELQKIEKVYDTYNRFLLKKHSAQVLELGDKYDHFTNQVSVYETKLAELEKQQQDIQQLLETSKQRLTTVEAELEILNRSEAMEKQRELELLEDQVKGIDKRLIGMKERIESSQQRLIKMGQEIAATEERLKMLTLEQIETLSRLEDSARIMEFREHDIYHGIWLRGIPQEGQWSKPWLQDLDTHRQKLAAAYQTAQEEGEAARAAAEAELKWGEICKERASVEVEQEVQRENLEAIKETMRENLVQWQRNLEQIVINGEQLREILQALTEISAKNRFYEPVRRPALQAYEQKKQSFMEQALHWQQQRQSLLDERRSLEKELEEWEQTREPEPRRTEGRSLSRQGRAKGTGAPLFAVCEFASSLDEKGQAQLEETLEQAGLLDAWIFPGGQVTILDQEQGEEIWIEPEYVVQGETLASVLSPTPSQESGLNEEDIRRALNCFGWLSSGKSSSEKRKASSIYLTGEGYYQLGPLAGVNSSKPRAEYIGKETRLRTKQLMIARIEGEIKGLIKEIAEVDENIAALNQQRQVMEKEMATFPHDKDLQAQLDVLLEWSYRLNEIMNQEQKVETWYKQRVGLWRDLQVRLVEQTVEWSGLKKERQLREAVELCGSYRSDVSELSSLWARYQETSKYMENQKQQHLDLQGMVEEDEEERLELEEQKGKHSIQINQLLKLMAEMDIEEVHRQIKEGKAEKVSLNKAIEELYKEQTEQGKELGRVITELSNNRVSLTDSSKNLDEEIKRWREETQLGLIPQWKEAFAFAVDDRLIRQVCKQIMKELSSLFQNTKEEQINRNLYEEFNKSQANLRDYMLEIDNLDSGRLIITSKRDRLNPLPPSKLLDELTELENEQRILLTARDRELYEEIIIGSVGKAIRNRIHRARDWTARMDGLMKQRNTSSGLKLSLKWIPLGQKTEKELDTQTLIELLMRDAERMDDEEFEKILTHFRTRILRAKQEAQDEKESLRRYIYQMLDYRAWFEFKLEHRKGEQSNYTELTDSKFNVLSGGEKAMAMYIPLFAAAYSRYSDAAPEAPKIISLDEAFAGVDDANMRDMFQLLTDMGFDYMMTSQVLWGCYDTVPSLAIYEIYRPRDTDVITLFHYRWNGKTRSLIE

SEQ ID NO: 38557 - protein, 475 aa, Desulfitobacterium hafniense Y51
MVMELISRKTARQYYGDPLLGNLIDAVFKKYQGQNGVRGNAKICVSSSEEAQRLQDYFGNRLKHLIRPGSEVEVPLKVFAEELQLGYRLSIPDLYEVLKGEMLLTKLEQRQLKEEAWAQIFMQVRMELREKAEIDLDNEVFRAETFDWLKRLEGGEASGYHVLRSAMNKGEDAVDALFCCLKGLWYLLVDKEKIKDKIGKNVKEIRIPIFAVHVTSDKDSHGFDWTKTAGRLLWYALYDIDIQRIKAGKKMASEKLIVPEYMQKRQIYRNFGLKDDDISSFSHVFAPHFVSGTSPRTLNLREIQSYGKFPMYSALYVFENPAVLSHIIDELIHFLDMNGLSLEQIPKKFPALLCTSGQPRSAALEFITKCLEANPNCLIRYSGDLDLPGVQMMQGIQGQFTFRFEAFRMDDKTYRNYSDANHLRLSFQDKTVLKRMGDELSKVMVELGVKIYQEEFVKDLAEDVLETIRQEKEIE

SEQ ID NO: 38558 - protein, 501 aa, Rhodococcus erythropolis PR4
MVEETSAPDYAAYADTNRLKLFSFTIAEKRAEYLWVLRAFDHARANYTVLLHAGAVAQILEKIGGSDPAADLSAAEVTPLLDQLHVWEILERSYDGTRAATLAEYRNRHFVYQFGQAGYQVYRSVEDVLAARLDSASLSRLALPDLLADMSELAEANRSSDGDLIFRKLKRLDSTLSDMADRAAHFYLTLGDLVRTTEITPQAFLTHKDALLTHMREFSSDLARYAPKLKEAIEHVESTGVDRMIRLAAASDERVFVPITEREDDWAARWRGLTAWFVSAESGISESERLREGTMSAIAAVLALLRRVTETRRGGVSRESQLRHLAGWFAATPSEDAAHALFQAVFDLGRPRHLSMVHPDADIISHSRSWWEAPPVEIARTLAETGRPPSPGLPSKVARNDGSIRRLREEQLAAQRTRSAAAQSLASNGVYQRELNEQETEVLLSLLNAALTARVPVVGRVKSSTGSENGVKLTLSPSDGSTTIKTARGRMHLDGIEVSVR

SEQ ID NO: 38559 - protein, 480 aa, Rhodococcus erythropolis PR4
MRAREITPLALDSYQRAARVILSNHLITSTYPDRIALPLLRRWATELRDDLLELFGYRLEVTETTARLFTVSDRLNPSAPARTASERTFDRTRYAYLALCLAALGRAGNQITLSELADHVAADAAQVDGVELSTDRASDRDAFVDAVGWLGVRGAIALADGDANGWASNPEAGEALYDIDRSVVVALFRPPRALQHLHSIRGLLATETSSAAEDDGIPVDAKEIGRRVRRALVERPVVLAGELDQHELIALAQPKTASEVELLTGLVAERRAEGIAMIDPTGRLSDVRFPSTGTIAQVALLLAGEIADRVLDVDAPELPKLPIPHVSDDHLIEQLDAAIPEAGIFEDLADEDDDFVLPAGEPAEPPEPVTYPMIDDDWLADKVSELVDQFGRTFAAQWQADHNGLRKQALGLLQRLRLTHAVDGGVLVLPVLARYRDVVVSVRERDPQIDFAVDNSAPDPVDEFGPESSTNGELSEVENV

SEQ ID NO: 38560 - protein, 1391 aa, Rhodococcus erythropolis PR4
MSNARFRPTRAGIINLWDYRDQEFSFADGRLVLRGPNGSGKTKALEVLFPFVFDGRIEPRRLNPFAGEERTMKSNLLYRGQDSAHSYVWMEFCRGSLEDPESVTVGIGMRATRTNDKVTRWYFVADGRVGVDFSLIGNDDRPLTKKQLAEQLGSDSITDRPLDYRTAIDARMFGLGVQRYDQLINLILTLRRPQLAKNLDPKGLSQALTDGLRPLDDQLVLEAARSFSDMEEVGRALEGLAAADQAAQSFIGVYTKYLRQQSRGEIEQVSTRLAAVTRGVAAMDESSLAQTRSREARAAAEERFNQAEQALENARANVEALQRSSAYEGKQQLDDLAQAVSTLKLSTEQQADKSRKAQAALAQRGDEADKAASSVKRAAEALSRAEDELQAAAEDAGIVWTPLPDGSRSDQITAAVRGHAEERDGDVRVVRTALATVEKAATERTRAENSSRRGQELLEASKAAVLEGEAAVELARSQCASGLRAWWTDHSSLFSAVGADTSLFEALDAALAEVGDEDAPALSAVLTEHTEAGTETLRERRREAEAEISASHASIAALKSERKAVSAEHDDAPPAFHARTDNRSDLGGAPLWQLVRFADSVEPDVATGIESALQAANLLDGWVCPDETIPDHVSEQFLTALPVKQRPKGRTLADVLEVEGNADVPDARVQDILASISLVEAPGDSDASVAIGVDGRFWHGVARGRHVKADAEYIGTTARARRREARITEIDAALEELAAAVDAAKALVTQTNEQLSRINSAAKELPKTGSILRALKTVTESAGALRTRSEATETAQRELDAAIADLAAKEKQLRATASQHRTPHIGRELDSLAAAIRHFEKQGELALRCRREHAKEVELERESRDRLDESRANAEEFAEEAAIAEESLLQQVQRLETLRDTLGASAEQIDLDLAKARAKIEECKVEQRAARKAYDAAVLQIGTAEGAYNTAVETLRHTLTETRSDAERLAPYARPDLLELLGVKEHLSWPASSAAWMSPDQLVYRIQNEDRSEDAAHPPVLPEDVDKLYRALEAATSAVRVTDGARKATRTALTSALQDFDAQLAAAGQDYRLQWDAPDGLTVVRVQDDQGYSSIGEFATRIHDARGDQEQLLTESERRILEDALLTGLAQQIHERTVDARVLIAQMGTEMRERRMSSGNTIGVHWVLADNLDDSSRAISKLLDRDASALGVDELATLRAHFATQIRTARAAHPERSYPEILSSALDYRQWRVFSFTLISGEGKEDRLTVARHSALSGGEQSVSLHLPLFAAAHVMLDSADPHAPRLLALDEAFAGVDDNGRSELLGLSVQFDLDLFMTGYDLWITYADVPGCAHYDLAHSTAEQAVSAALLVWSNGELLAEHDGTDLARALGSPLRRRVPTPAEGALDYA

SEQ ID NO: 38561 - protein, 513 aa, Rhodococcus opacus B4
MSESGSDPGRSPSGLRAARPAVAPPLRDDRLKLFSFATAEKRAEYLWVLRAFDHARANYIVLLHAGDVARILDGLAGDDPAGQLGAGDVTPLLEQLHVWEVLERSYDGTRAATLAEYLNRHFVYQFSQAGYQVFRAVEDALAARLDDASLSRLALPDLLADMNDLAAANRAADNDLVYRKLNRLDATLSDMAGRAAQFYLTLGDLVRTTEITPETFMSHKDALLTHMREFSSDLSRYAPKLAAAIALVEDSGVEAMVARAAASDERVFLDVEEREADWRSRWAGVTHWFVGSEAGPSESERLREGTMSAIAAVLSLLRRVTETRKGGVSRESQLRHLAGWFAATPNEDAAHALFRAVFDLGRPRHLSMVHPDADIIPDTRSWWEAQPVEISRTLAETGRPPSPGLPARVQRNEGSVRRLREEQLTAQRLRAAAAQSLARGGVYERELDEAETDVLLSLLNAALTARVPVSGRVKSSTGSENGVKLTLSPHGESTVVRTARGRLHLDGLQVSVR

SEQ ID NO: 38562 - protein, 462 aa, Rhodococcus opacus B4
MKAREISPLALDSYQRAARVILSNHLVTQTYPDRIALPLLRRWATELREDLMTLFGYRLEVTETTARLFTVSDRLDAGTPAKTATDRTFDRYRYAYLALALAALGRAGNQITLSELADHVAADAAQVEGVDLSTERASDRDAFVDAVGWLAARGAIALADGDAGGWAANPDAGEALYDIDRSVVIALFRPPRALQHLRSIRGLLAGADSVTDEDTAETSRTVDVKETTRRVRRALVERPVVYAADLDDHELVQLALPRTAADVELLTGLVAERREEGVAMIDSSGRLSDVRFPGTGTVAQVALLLAGEIADRVLDPDAAETARMPLPRGRSEDLVEQVDGAIPQSGIFDSLAGHDGVEPAEPAPADRLFPVVEDQWITDTVRTLTERFGRTFAAGWQADPDGLGRAALALLERLRLTASVPGGVLALPALARYRGVVVTIRDRTPEIDLFQSSANDSEDITA

SEQ ID NO: 38563 - protein, 1385 aa, Rhodococcus opacus B4
MTSARFRPTRAGIINLWDYRDQEFSFADGRLVLRGPNGSGKTKALEVLFPFVFDGRIEPRRLNPFAGEERTMKSNLLYRGQESAYSYVWMEFCRGAKDDPEAVTVGIGMRASRTNDKVTRWYFVADGRVGVDFSLLGTDDRPLTKKQLGEQIGTDSITDRPLDYRAAIDARMFGLGVQRYDQLINLILTLRRPQLAKNLDPKGLSQALTDGLRPLDEQLVLEAARSFSDMEEVGRALEGLAAADQAAQSFVGVYAKYLRQQARTDVDQLATRLDAVRSGITALHGAAADRARSQESREAAEERFTVAERALDQANATLDALKRSTAYEGRTQLDDLAQAVSTLEKSTALQAEKARKAKATLEQRSEEHEKAGDAVTRAVEALAHAEDELHVAAEDAGITWTALPDTARADQLTAALRGHAEERDGDLRAVRAALATVERAATERTRADDAARRGQEQLDTAKVAVLEAETAVESARSRCATELRSWWTEQSSLYAEIEAPAALFDALDTALRGIGDEDAATLSETLTEQTRDAVDALRMRRQQYDRDAAAAAEAIAEYESVRAAIESEHDDAPPLPAGRHDTRSGLTGAPLWRLVRFADGVDAAVAAGIEAALEAANLLDGWVPVDDALPDVESEQFLVALPAGDRPTGRTLADVLEVEQDTGVPDDRVRGILESIALESLDPAEGPVGVAQDGGYRQGIQRGRHTKSDAEYIGTTARARRRAARLVELDRTLAETRATLDDTRASAEAVAELLTRTTAAARALPRTGSILTALKKVTESAGALRSRTDTATAVGRELDQAIADLSAKEKQLRATASTHRTPHVAREIDSLAAAVRHFEKQGEMVQRCRREHGKEVEHTRQSEDRLHEARGNAEEYAEEAAVAEEVLAQQIQRLGTLRDTLGAGAEELDRQLEEAHARIEACKKEQRDARKADKDAGEAIGKAEGAYNTAVQTLRLALTETHADAAHLAPYARRDLLELLGVDGGHTWPASAAAWMSAEQLVYRIQNAGQDIPILPPEVDALFRALDSATDSVRVSDSARKSTRTALTTALQDFDAQLAAAGQDYRLQWDAPDGLTVVQVQDDEGYSSIGEFAARIASARSDQELLLTESERRILEDALLTGLAQQIHERTVDARELIARMGTEMRERRMSSGNTIGVHWVLADNLDDSAKAISKLLERDTSALGPDELATMRAHFAHQIRTARAAHPERSYPEILASALDYRRWRVFSFTLISGNGTEDRLTVARHSALSGGEQSVSLHLPLFAAAHVMLDSADPHAPRLLALDEAFAGVDDNGRAELLGLSVQFDLDLFMTGFDLWITYGGVPGCAHYDLAHSTAEQSVSATLLVWSDGELLAEHDGTDLAQALGSPLRRRVPTPAEGALEFA

SEQ ID NO: 38564 - protein, 235 aa, Thermobifida fusca YX
MIREPADRRAKPPYGRAAVLRLASWFDQADAATAHRLFTAAFSLYPARHLSGSTEETIAVAASWWDVPPADTSAVRPARGGALAPAEDHSAQQVRLRDTAEAAAHWRRSAAEEVRSRLAELTPRTGRITLSQAALGVLVELLTRALGSGDATAAPVSAGDLELDIRLHVRHDADAVLVLSEDGGDLTLTGLRLCATPYARTEPEHGSDAVADTDTEPHTPVPAMSGSDDADNLAV

SEQ ID NO: 38565 - protein, 402 aa, Thermobifida fusca YX
MAAKEDIALTIERQAAARRLLADPLITVHSHPEDFALVQAHSDWLVRQFRRVLGYELLIADDHARLVKTGLVHTVTTPLLRDSGAPFTPRAYTYMALTLAALPDAGPRTTVAELAAGVRAAAEEAGLALDPEARLGERRAFVAGLTRLVGWGVLTETGGRLADYARDGTCEVALAVNHGIAAHLLAHIPHTATPEEFVNLVQRDSVSSDEKAAELTLRRLLAETPVVYREELSTVHRVQLARHQWRAAAELADLLGCDLEIRAEGVALIMPAEAMDDPREAVHPTTFPGKGLVSYSALVLLSRLVTMLAPPPFSHGIPIPAELLDTELAAVVDNVHQWSHTAHSHVPDPDDLAERILTLLHDSRLLDRVTTDDAPQRLTEGWRLLAAAARYRDAAFARSDAE

SEQ ID NO: 38566 - protein, 1448 aa, Thermobifida fusca YX
MRQDTTLPKRYRLERAGIHNVWQYDNHIFEFGDGRLLLRGRNGAGKSKALEMLLPFLLDGDARRLDTTGTSRTSLRWLMLEGRTATETGETTATQTDTTTLGYLWVEFARRGDDGQPQRRTLGAAVLAVPDQPDARPIFFVTDRRVGDDLTLIEGGRPLPIERLRAAVGPDNCYDTALGYRTRVMRDLFGLDDPMRYRNLIHLLYRLRRPTVGERLEAGELVSVLSEALPPMDDAVLDEVARNIADLESARARLTALRTAHEHATAFLTDYRGYLHGVLRQQAAAVREQITAFEERDAELARLEAELDTLVSAESKAQEERDRLRRTRDTAHSDAATLTASAAHPRQALSRGEREARYAAVAAYIRAAEAAWVASEHARSAESQAHHRIDRDCAAIERGIGGLRRLHFGLRDAARASGIDPARLGEVPQPVRVTLAPRESVTQVNLEGLEQAVERPPVQGLEIDALRRRLADLHDRLTHTDAAAAERETLVDDLYQRALELEAAERREADLTSEAEWADSHVEQARERERSAIDQVREASDDYAAAVREWCNALRAAAPDDVDIEGALDALEQRVEPPLDEDLRVLSADLPETVLHEAHAVVEPLLAQVRHTRDAALSEEHDLAAELAELAERRADETAPVTAPRPAWATAPRDADAGVPLYRAVDFADHLSPEERAGLEAALEASGLLVGLITPEGTVVDHDTRDLLLSPTAALSGRTLADALVPVEDESVKVDRAAVTALLSSIRLLGDEESPAPSGDGSSWFQPADASSGAENYVSLDGRWRLGVAWGRHHKATAEYIGEEARAQALERHRAKAERRIEMAEALLAEAQERRAEIDNRYESLVRINRSVPSGADLAAAWAVLDEARTWLAATVRAHAAARAAADAARSAALEQRASLAELALKHQLPAHYEELARIRGALGALRVQISAAHRDLEILAGRLEDYRRHVADWKRAREARIVAEDAASAAINDMITVRRETELTDRASAADPAQIENAIEQVRSRAHTADEALPAVERDAQRIRDERVAVETRHSAATVERAEQAHRALAAGARLRAMLATPTGEVDQGLLAAAGLRELAEPEGALAAYDAAESDPERSDDLTKRIRVLDTLISAIESGLDQSDTDVDDSGILRGHEELHRGLAAIPAVAARTELTEPAGVKRVTVHDDHGTHDIVDYAERLRTRITEAEETVAAREEEAYERHLLGELAGHLSRQISEARELIDAMNSVLGEVTTSQGLGVRLEWTLAPDADEDIHAVVPLLERPAEERTRVETTRLRDALRRCIEAIRRLDPTATGSAQLRAALDYRSWFAFTVYVTDAAHPERERRLTHRTALSQGEQRVIAYLVLFAAAAAQFSALAVHAPQTPRLILLDDAFAKVDEPTHGRLLGMLVELDLDFMLTSERVWGCFPNVPKLNIYECLRDPAEPGIATLHFTWDGKRRRLNGV

SEQ ID NO: 38567 - protein, 671 aa, Frankia sp. CcI3
MLVQACQTRPSLQPPTTPQTPVFPSSVTGSRSPAVHAVAWWAILGGVTSDGQTGPAAGGDAPPRQPFAHLSAPNADVYREVLTTFARARDRFIVHMRPEDVIADLGRPGQTESIVAALDKLVEWGNLRADPDTGRVTTVADFHRARYLYQLTPAGQAAEEAIAVYEVAIGRRGALQSVALEDIAAQLRALVEMTAGDAADLDPAKVHLLLLGLAERFTGLADNAQAFMTSLRRVIDFSDGDVDAFLAYKQRLIDYINRFIAELANRGAEIATLLGQVEGAGVERLLLLAARREATDAVPDVPEVSGSGASGSGASGSGASGSGASGSGASDSGRTGAGRTDAERIRTAYDAAVAAALDGWRNRWRGLHDWFVSADSRRPSQARLLRGAAITAITQLIDTVAALNERRTGRSDRSADFRTLARWFAEAPDDAAAHRLWRAAFGLASARHLTVSQETVAAWQEDEPTPNTPWQDAPPMRISPQLRRTGSYERRGTPNRVTDRARQRRLLAEQAAREAEQAASARARLATDGPVLLSQLGVLDRQAFRLFLGLLGDALAARLAGDTEVETTSSDGTVLIRLTLVPGGGVARIETEDGVLDGPEHTVEIVDLAGAASRPAAWNDLNDLNDWSDSNDRNDRNRQNDLNGRMDGLAPVVLAGGPDRLELLETGRVSG

SEQ ID NO: 38568 - protein, 422 aa, Frankia sp. CcI3
MTADSVAEENRAARRRALRALLAGPLRTAGADDEVLRLVRRHASELREWLAAETGWRLVVDAESARLFKTAATIQDDTHPAREGKGRAPFGRRRYVLLCLALSVLEGADTQITLGRLAEGVLVAASDPELARTGVTFTLSRRDERSDLVAVVRLLLTLGVLDRVAGEEDAYLRDSGDALYDVRRRVLASLLTGTRGPSTIDADDIGARLAELTHEPVPDTDDLRNRSLRRRLTRRLLDDPVVYYDELAEDERAYLISQRRAITRRIEDATGLIAEMRAEGIAMVDPDDELTDVRMPEQRTDGHVTLLVAEYLATRPDPAEPVPVGRLRGYVRKMAAEHSTYWRRGVTEPGADAELLAMALDKLRALRLVTDVPGRAGEPPAVLARPAIARYAVEAPTIHDGRAGGAGPVRSGPARRKKTSRR

SEQ ID NO: 38569 - protein, 1443 aa, Frankia sp. CcI3
MSTSTRMPATPAPASIPAPAPASASIPVPAREDRWQPLRAGLVDLFYYDVEEFHFHDGRLLLRGNNGTGKSKVLALTLPFLLDGELAAHRVEPDGDRNKRMEWNLLLGGRHPHPERLGYTWLEFGRLGGDGIPEYRTIGAGLKAVSGRGIVRHWFFVTRQRIGPQLSLVSPTRVPLTRDKLKEAVDGHGAVYDTASDYRRAVDEALFGLGGHRYEALVNLLIQLRQPQLSKKPDEKLLSRALTEALPPLDPALVVIVAEAFRGLDEERETLRALAEAETAAQAFLTHYRRYARVAAKRYAAPPRQAHSRYEQHGRDLAEADAAHQAAVEALTAAQQALTEVEEAKATLTARRDALRDSPEMRDAAALRGAEEDAGRLARFAAQRERDSRAAAEAAGDRKRRLTGAERTVQADAAGFDAAVRAAGLAAEAALVTGRHAAVLTELDGGEPPYRDARRSAEALVGQQGTAVNRLDGLLRAAADAGVALRAARDDLDRITAEQQAAAERIAAAEDLTAQRGAGLVVACTAYLAGCAYLRPADPDAALAALAGWVDTLDGSNPVATAVDGAARLATADLGRRQAVLDGEQTAARRELERLAEEIERLAAGGHDSPPAPHTRDEHGRDGRDGAPLWKVVDFVDGVPDEHRAGIEAALEAAGILDAWVGPDGRLHDPVSDDVLVTPGRPAPGGGLAAVLTPAIDRDDARAARLSDTAVAAVLATIGLRGGPGPAGGSLVHGPAANGTTANGTTANRTSGTETWVTVDGRFGNGVLTGGWRKETAGYIGEGAREAARRVRLDHLRADATRIELRLEELAAAAAELADRQLSLAAEHGARPSDGDLREAHAQLATEHKAKRRIDAQHQEAAAVAARRQQAAGEARAAAEEFAGDVRLPAEPAALADVRDALGDYRAELAALWPAAESLDRSRRAATEAEHELTLALERQEQTAEAVAEAQTQADAAAERHRVLVETAGAAVDELFRKLAAVDTELDRCGQREKQARAAERDALDARGRAHGRRETLREAITTAAAEREAAVARLRAFAATGLLAVAVPDLEIPDPAAGWAPYPAITLARAVNAALDDVDDTDRRWELAQQRVSAEHKVLTDALSRHGHSVGMVVSDGVIVVDVLFQGRKQDIPALVAALETETGQRAMLLSAKEREILENHLVNEVAGALQELISDAEGQVRRINTDLAQRPTSTGMRLRLQWRVARSAPEGLGAVRDRLLRQTADAWSPAERTAVGAFLQEEINREHSADTTGGWAEQLTRALDYRDWHEFAVQRFQDGQWRPASGPASGGERVLAASVPLFAAASSFYDSSGNRHAPRLVALDEAFAGVDDDSRAKCLGLLAAFDLDVVMTSEREWGCYPQVPGLAIAQLSRRDGIDAVLVTPWRWDGHERTRVDRPVPYQPERPDQPDQPQLLDQPDQPDQPQPLRPAQSGNTEPLPFE

SEQ ID NO: 38570 - protein, 434 aa, Frankia sp. CcI3
MSASSTGASRGTEAARDVERLRRLLGGEHTAWLLDRVRRRIELGRPLTGTVTLGRASADQRRGVERLLGRRAGTGASLSVSLDEVDAVLRSSGAAPDGLAAAVRQLTGDVTERAELAAAQSRAWAQAHQPLDDLLARRPELTPWRSWLDSTGLLRRLAGTPDAAGPLAADLLRVLDALPSPGVALGRLAATSTGDAHALDDGRPLATLALAAARVLGGSHPAGDGSAAGRRAAWAAVGVHRDELSSTVLCLGLPGGADSPTGRILAICREAGEPCVLTLRQVGPGQDRGDLGVGLGVVYLCENPIVLASAADELAGRTPPLVCVNGQPSAAVISLLAALAGQGARFAYHGDFDWGGIRIANGLRERIGWRPWRFDARSYQAALTTVTGGELVGRPVDAAWDPDLRPALEHHAIRVDEELVLAELINDLGAPHAW

SEQ ID NO: 38571 - protein, 530 aa, Anaeromyxobacter dehalogenans 2CP-C
MPIGSIPSDPLSREPRLLDAVSVFRYVAAAENAPNYRAIIEVFARAREHYQIELRPADVRDGIARLALFFERPADADRERHLDAHLEQLVAWGNLQRSHDTGAVARVEDFYRRRFLYRLTPAGEAAHRAVVEVEETVGRSGSLQTAMLTEVRDALEALATGVEAGDAAAIVRALHRLRAGFESLTAEADLFLSELDRQATVERLDSDEFLGHKHALLGYLGRFIGDLRRLRPEIDLRFRSAEAVGTERFLDLASTAADLPPGAPGEDPRERWIADQCSHWDGIRAWFQPAGAARPRVDRLHDAARGAVVKLTRSLERLVEHRARAVDRAASFRTLARWFATCSSDDEAHTLWATAFGLYPARHFALAEEDPERVRPDASWWDAEPVEVPIRLRTHGAVSRSGRTPAALDFSDGRAWIAAVRRREREELDAALSRFAGRGAQRLSAVGVLSENELAQLLALLEEALVAPRHASGVRRARSADGRHDIVLTPPPDEAWVLVDTAAGRLRCLDYALQVVPVVARRTATSGEGT

SEQ ID NO: 38572 - protein, 402 aa, Anaeromyxobacter dehalogenans 2CP-C
MTPVCLRDERALAERRSALRVLLARPLLVADQDPETFASVVRHRGELARWFADHAGWTLVVDAGGRHARLLKRPVRPDPTRPAGAPGKGPFDRRRYVLFSLALAALDGEGAQVTLARLAERVRELSLEDVALAPFDPESSTERHAFVDVLRLLGELGVVVFKDGDAERYVRDRASGDALYDVRERLLARLLSAPRPPALAANAAHMAEEERAGTEEGDRAAGRHEVFRRLLDDPVAYRDDLSPRAREWLAAGSGFLYERLERDAGLVVERRAEGLAAIDTSGALADTAFPDGGSTVKHAALLLCEWLADEAREGRRLHPAQPPPGVLWRAVVARIQVLQAEHAGRWSKEFDRSDAGAEALAREAVRLLVGFGLAAMLPDGGVVARPAAARFAPRETMTGGRP

SEQ ID NO: 38573 - protein, 1347 aa, Anaeromyxobacter dehalogenans 2CP-C
MTRAARPELLPLPAGARWTFLRGGIQNVWEYDDRRFVFERGRILLRGQNEAGKTKAMELLFPFLLDADLAPQRLDPFGSTARPMRWNLLNEADPEQQSRTGYVWLELGRQADPGAIEFLTLGCGLRARRSSPDVDPWFFTTSLRVDDPLTLVVEGTPLTRAQLVEALGAAGQVFERGSDYRRTVNARLFGIPDEQYDALVETLLQLRRPQLSKMLDLEQLSRFLSASLPPLDRTVIGPIAEGFERLDHHRSDLESREVLLESLRGFENVHRAHARAAARGRALELTRAESAYHAARAEAREKASARDEAAAHCAELEDRLRKLSEQRQELEERRRALEGSDAYRAVQDLDRAEADAAAALERERSAARRLDEDVQSERTARQTAADSATEVNRLALVFELARTSGLERAREAALAAAHGAVDALAAKGDVAEAGGALGAAREAREDVLGRLRQLSAAHHDALSTARRADARARDLAALLEDARERLRKAEEARDAAEAEWVHDVGRWTASLEVLSREALPQPRSDDGGAAPEALRVAVEAVAAPRRRQIEEERAGVVSRRDVLVGDAGRLRAERDALAARPHVDPAPPNWREPRPVQRPGAPLYLLCDFAPAVETSDERAGLEAALEASGLLDAWVEPDGVLLDARTHDTILRPGPAHVRTSRTLADVLVPTPAGGVDARRVAEVLAAVALVGAADPDPGPDTAAWVSPDGRWRLGPAAGAYAKEVTDWVGETSRELARARRLDELTGKIVALDAHIGAFDQAVTAIAQRADRLAREVASLPGGELAVTARLRVDTSAEAVATARGRHIEGEQTAAAATRAAEDAASRLDRAGAEYGLAAWARDPEALARLTEAWSHAAEQLVRAAGDLWKARAAGDRAARFVEEASQRAERSRREADGASSEATGAAARVKALRETVGKDRDGLLAALADTRGRLQAVDTERATAERALPGAHEARGAFRTAAESAEKVVSTRDGARQEAARAFEALARVGLLTAAALDAPADLSSFTVTLETARVVDARVADGATPEEREKAEDRLVKRANELMYQLPPDVRLVSAKLDGVLAYVFATGGREWPARAMVEDVESDVASRRDLLAEDERTLLERFLSGEAHDHLATRLREAAALVARMNEALLPRTTAAGSQVRLAWHVDELAQEDAREAVPLFLKSGTLLSERNREALRVFLETRLAAAREGEGTRSLQDRLIEVLDYRSWHRFHVEHHAPGEPWVKLTKKMHAAGSGGKKAVMLHLPLFAAAAAFYDSAGPTAPRAIALDEAFAGIDRPTRGKLMGLLAEFDLDFVMTSFEEWGCYEELDGLSTYHLSRVPGQRGVFAEWFLWNGRERVLVDAS

SEQ ID NO: 38574 - protein, 483 aa, Rhodococcus jostii RHA1
MKLFAFTTAEKRAEYLWVLRAFDHARANYVVLLHAGDVARILDGLAVGDPAGQLGAGDVTPLLEQLHVWEVLERSYDGTRAATLAEYRNRHFVYQFSQAGYQVFRAVEDALAARLDDASLSRLALPDLLADMNDLAAANRAADNDLVYRKLNRLDATLSDMAGRAAQFYLTLGDLVRTTEITPETFMSHKDALLTHMREFSSDLSRYAPKLAAAIALVEDTGVETMVARAAASDERVFLCIEEREADWRARWAGLTHWFVGSEAGLSESERLREGTMSAIAAVLSLLRRVTETRKGGVSRESQLRHLAGWFAATPTEDAAHALFQAVFDLGRPRHLSMVHPDADIIPDTRSWWEAQPVEISRTLAETGRPPSPGLPARVHRNEGSVRRLREEQLTAQRLRAAAAQSLARGGVYERELDEAETDVLLSLLNAALTARVPVSGRVKSSTGSENGVKLTLSPHSESTVVRTARGRLHLDGLQVSVR

SEQ ID NO: 38575 - protein, 464 aa, Rhodococcus jostii RHA1
MKAREISPLALDSYQRAARVILSNHLVTQTYPDRIALPLLRRWATELRDDLMTLFGYRLEVTETTARLFTVSDRLDAGTPAKTATDRTFDRYRYAYLALALAALGRAGNQITLSELADHVAADAAQVDGVDLSTERASDRDAFVDAVGWLAARGAIALADGDAGGWAANPDAGEALYDIDRSVVIALFRPPRALQHLRSIRGLLAGADAVTEDDTSEFGTARPVDVKETARQVRRALVERPVVYAADLDDDELMQLALPRTAADVELLTGLVAERREEGVAMIDSSGRLSDVRFPGTGTVAQVALLLAGEIADRVLDPDAPETARMPLPRARFDDLIEQVDSAIPQSGIFDSLAGHDGFEPADPAPEDRLFPVIEDDWIAGTVRTLTERFGRTFAAGWQADPDGLGRAALALLERLRLTAAVPGGVLALPALARYRGVVVTIRDRTPEIDLFQSSANDSEEVTA

SEQ ID NO: 38576 - protein, 1385 aa, Rhodococcus jostii RHA1
MTSARFRPTRAGIINLWDYRDQEFSFADGRLVLRGPNGSGKTKALEVLFPFVFDGRIEPRRLNPFAGEERTMKSNLLYRGQESAYSYVWMEFCRGAKDDPEAVTVGIGMRATRTNDKVTRWYFVADGRVGVDFSLLGSDDRPLTKKQLGEQIGTDSITDRPLDYRAAIDARMFGLGVQRYDQLINLILTLRRPQLAKNLDPKGLSQALTDGLRPLDEQLVLEAARSFSDMEEVGRALEGLAAADQAAQSFVGVYAKYLRQQARTDVDHLATRLEAVRSGIAALHGAAADRARSQESRAAAEERFTAAERALDQANATLDALKRSTAYEGRTQLDDLAQAVSTLEKSTELQAEKARKAKVTLEQRSEEHDKAGDAVARAVEALTHAEDELHLAAEDAGITWTALPENARTDQLTAALRGHTEERDGDIRAVRAALATVERAVTERTRADEAARRGQEQLDTATVAVLEAETAVESARSRCAGELRSWWTEQSALYAEIDAPASLFDVLDAALGRIGDDDTATLSETLTEQTTDAVDALRLRRQQYDRDAAAAEEVIAAHESARAAIESEHDDAPPLSTARQDARSRLTGAPLWRLVRFADSVDAAAAAGIEAALQAANLLDGWVPVDDALPDVESEQFLVALPAGDRPTGTTLADVLEVEQDTGVPNDRVRGILESIALESLDLSEGPVGVAEDGAYRQGIQRGRHTKSDAEYIGTTARARRRAVRIAELDRILEETRATLDEARASADAAAALLSRTTAAAQALPRTGSILTALKKVTESAGALRSRSDTATAVGRELDQAIADLSAKEKQLRATASTHRTPHVAREIDSLAAAVRHFEKQGEMVQRCRREHAKEMEHTRESEDRLHEARGSAEEFAEEAAIAEEVLAQQVQRLETLRDTLGSGAEQLDRQLEEAHARIEACKKEQRDARKADKDAGEAIGKAEGAYNTAVQTLRLALTETHADAARLAPYARRDLLELLGVDGGHTWPASSAAWMSAEQLVYRIQNADDDTQILPPEVDALFRALDGATESVRVSDSARKSTRTALTTALQDFDAQLAAAGQDYRLQWDAPDGVTVVQVQDDEGYSSIGEFAARIASARSDQELLLTESERRILEDALLTGLAQQIHERTVDARELIARMGTEMRERRMSSGNTIGVHWVLADNLDDSAKAISKLLERDISALGPDELATMRAHFAHQIRTARAAHPERSYPEILASALDYRRWRVFSFTLISGNGNEDRLTVARHSALSGGEQSVSLHLPLFAAAHVMLDSADPHAPRLLALDEAFAGVDDNGRAELLGLSVQFDLDLFMTGFDLWITYGGVPGCAHYDLAHSTAEQSVSATLLVWSDGELLAEHDGTDLAQALGSPLRRRVPTPAEGALEFA

SEQ ID NO: 38577 - protein, 521 aa, Anaeromyxobacter sp. Fw109-5
MAPRCTLARMAIRDDTTTESLVASVTDARTALVYLVVRESDQYVAVMDALESSITDLTPREVGSRVRAATGLALEDAVVEARLDKLRDWGAVSARTDASRILRHADLLARNWRYTATPVGRQVQRFYREVLAGTPTVREIPLSSLARVVETAEALVGSTQLGPDTAGLVGQLFVNHDDLDSALVGAEDNLAALVDRFDLDEESTAELKSLLVGYATHVAVELGRGSARAHRALVALRGRFPELAAAAVRASDARALIERGAIGASRGGTVEDWSALLAWLDPDSGRSERFALRLVRALPGMHVNLRRLHTSSGTATNRSRALALARACAHPTLGTAVLLAALGDHPWRKLYAEAPDADLPRVRSWRDSPRVDVPELLRLTGRAGARGRAPAARDDAAARSAVAQARAKRMAEHAAAIEEVLIAGAGASLSERAARVALAALTAAARARSDGGRRVAVHDGLGCTLFHTGAGLGCVVAPTWRVLTPGRVPVFHLPTETARAPEVAVRHEDDQPRIVLAGGAT

SEQ ID NO: 38578 - protein, 435 aa, Anaeromyxobacter sp. Fw109-5
MSESDRLDVAGGANGGPDDEPRSSEHSRRRRWAPEASTETAAVLRLLAVRPWLVSGRDDEGIAAVRRNLPAVRDALSRLGWVLVVERDLVRLRKSPPARLGAWAADGPTPLQASWFFLLVAGAESVAPRVGLAQLVAAARAAAAEAGLPVTHDIAERRAIVRALRMLDERAVVVQVDGELDGFIEDEDAPVLLAVHHARLAHVIANFGPGDPAEDPAAWLERVEREPDPARRMRRRLVDDAVVHVVDLDPAESDWLSRRVRGDDGAPLAMAFGLRVERRAEGAAFVVPEEAFRHLHELGPVAFPAPGTVPHAALLLSQAASLKGALGSTTEGPGPGWRGLREDDVVEELRRLAGSRADGRGGWRRELADDPRRLAEAVQGLLWALDLVRLGANGGGGTWWWFSPATARWSAPPDPKASKRAEALAFDFDTDGSSE

SEQ ID NO: 38579 - protein, 1387 aa, Anaeromyxobacter sp. Fw109-5
MNAAPQMPEVAAPKGQAGAPDRFGRRWRLVGAGLSNVWRFGDLELPAASGRLLLRGLNGTGKTTALEALWPYLLDLNATRLAAGKARPTSLSSLMREGAAGKRRFGYAWLTLCGPGDEGVWSYGVRLQFSEGGSPPVRVVPFAVPGRPLHDLALYVEGRTPLTAEQFEHEVIRCRGQVFADEDAYVAHLSARLFAVANTEPVITLATRLRQVRNPTLLGEVSPQAAADALRESLPGVADEVVAATAEALAESESTRQAFAKDREASELLGEFGAAWCAHAAEVVTGAHSAALEAAKKVRACQGQLKTRGTEHEKAHAELETAASAVRRLEGAVADAEAEVRALEAHQAYQDAGRLADLRTTLDVRARASDAAARAMQGAARAAVSRGESLRRELDNLIEDVNECVADAVEGGSTRRPPILSWTDAPRPVLRAGAVTADAGPELVIHGTPDLLKTTAASWNETADARARESDAAALALSDRRTAQVAEAAAVEADRAAREAAATADAAVARAERAGAAAREESAALLTAVAAWTQANSRLAMPAGIAGGEERPEEAQDEGWLRSDVDELATAEPGQVLATCEGWQREAQQRAEAMAAELRSRSQAEAGAARDLRRDAAALRAEARELRQGRLLPLPRPEWAGAGDDEVALGSALEWQPTFGDERERALLEEVFASAGLLGATLSPGGASSPAWRVDALGREVAPSLANVVAVDPEHPLSGAAAAVLARIALAPTADVPSCDEAGLIVGRDGTFRAGVLHGRVPGAADPAKLVSSRHVGARRRRAAALRKAEELDAQAVEIERQAAEREGRSTQLRAEADGISTSSRRFPPTAHLRAAESKRAALVSAAREAQDHASEARTRGDEAHANARQELAAWVERTRAVGLPAELPRLERMRDGGAAAASRLRLGATRLAKLADRLAGVIARRPVGEVEDLERFEAVACEAFREAADTRTAVEVLEQTAGAAIADVLARHEAAQKRLAPLRLELNPARKTQLEAVQRETAARHALDEAGRKLRDAEPGAAEALGALRALLEVPGVADAVLDGEPPRNDESLLRQVESKLRDRRTITKKTLRERADTVRAGLAGTWSLDPGEDHGELLTWVLTHRDESYTPTQAAAHAATLRRRAEQALQATEERALREFVLGRLPGAIGTAWTRLHDWVSEVNRKMRSASASSGVGVQVRVPRRGGDDLSAASKTVLELACEVSDAERTPDQQRCLGEALQALLAAAPGETMQQRVASAVDVREWVDLEYEITRPGGKSQRWNSKTGLSGGERRLVVLAPMLAAIAAAYDRFGPQVLRIVPLDEVPAEVDERGREGLARYIAALDLDLVCTSYLWDGCPGAWDGIDAHDLEAGPDGTVVAFPMLVRGLAAIPELGRTPAPERRS

SEQ ID NO: 38580 - protein, 446 aa, Anaeromyxobacter sp. Fw109-5
MNGCRLCGGACVGADLGPLLVPRLAWLWEQVAAAADRRGDPALASGILDIRAPTEPDPRAAAGGLLGGRGLRAGQSRRVDLSDLADRLRVRGPLLTPGAVAAHAMGRALATRARAEADRTDGERRLYEAFVETLSAKSPRVAGGLDREVVWAALRRNGWVARLLSAPDASSLLQRVNGVLAALPPDTACVDRRRLASDVTGDPHGLDGGTPLAGLTLAILAASGTIMPRQRPRSAWAEIGVECDDVTGGLVAVGMIPEGWNVPAGAAITLSPRVLSRCEWPRTGEGERWVFVTENPSVAAAAADLADDCDVRLLCTDGTPSRREIDAIARLAAAGWRVAVRADFDEAGLGHVAAVLAAVPAATPWRMAAGDYLSSVPADVAAGTRLDVDRLPEAPWDARLTETMRATGAAAYEEALLPLLMQDLRVGAPPAMDGAEAPAITAAPTP

SEQ ID NO: 38581 - protein, 565 aa, Frankia sp. EAN1pec
MAGVAASERAGGRDRPANVSRFGPFAHVTVEKAPLYRAIMRTFVRAKRRFNVHLRPEDVLEMLAREPGQDGDGLDGLDLGGITDVSAELRSLVDWGNLRGDPDTSRVTSVEDFNRPRFLYQLTPAGEATETALEAFDEALGRRGELQAVALSDIHSQLRALLALLPEPEIDAAKAHQLLRDLAGVFRGLADNAQAFMGSLQRTIDLHDADLDVFLAYKEQLIDYLQRFIRDLVVTSARIVDVLREIEEHDLSRLLRAVAEREARDAAPDLDHPPPPTPSQPALTSQPELTQGEPAEPLASGVVGDRLALWTERWEGLRHWFVGDRTHPPQSRLLRERARAAVPALLSVVLVLNERRSGRSDRSADFRALALWFAQAPNDDDAHRLWRVCFGLAPARHLTVDAATVEARDAEPVPASTPWSEAPPILVDIRLRRTGRYERRGAPNRVRDRAAERRLLAERLAAEEDVVRAARRQLATGEPVRLSELAELDDPTFRLFLTVLGDALARRRPGELSVVTSSADGTLSISLTPTDDGVIATVPTSAGLFTGPDHLLEIHDLLTATAVTA

SEQ ID NO: 38582 - protein, 427 aa, Frankia sp. EAN1pec
MTTQRRNIPRGSRPGSSSTAVIDALDAQRAAERRRAMRAILRRPLLVAHGPDADAFRLVRRHQTWLRDWFTRETGWSLRVDPEVARLAKIPADLTDGTRPATAGSAQQPFGRRRYVLLCLALAGLERADNQITLGSLADDVMMGCAAPELAEAGVSFSLDSRDERADLVAAVRVLLDLGVLRRVAGDETTFTTGTGDALYDLDRRALAGMLVTRRGPSTVRDIPGPADVEGRLAAVVEELTADTDDARNLARRHALTRRLLDDPVVYYVDLDEGERAYLTSQRAVLTRRITEATGLVAEVRAEGIAMVDPDGDLTDTRMPEDGTDGHATLLLAEHLAREGTRLGPGEPIAVADLDAHMRELIAQHQKHWRKGVTEPDAEAELVDRALSRMRALGLLRRRGDDVFALPALARFALGDLRDGGGQESLA

SEQ ID NO: 38583 - protein, 1411 aa, Frankia sp. EAN1pec
MTEPTTERWQPLRAGLVDVFLYDEEEFHFHEGNLLLRGNNGTGKSKVLAMLLPFLLDGEVSAHRVEPDGDPKKRMDWNLLMGGRHPYPERLGYSWLEFGRLDTSGAAEYRTIGAGLKAVAGRGSVTTWFFIADARVGVDLDLVGPTRTALTKERLRDALGPRGNVYEQASRYRRALDEAFFGLGEERYDALVNLLIALRQPQLSKKPDERALSAALTEALTPLDQAVIADAAEAFRGLEQEQSDLQGFEEAHEAATAFLGHYRRYARISARRRAREPRATQAAYESASRQLNDVRAERERVEAEAIRVDGEDKENEERITALTAERDTLAARPEMDQARELVRLQQRMSDLERVANRAGAELAAVTTRRDGLARRTADARWRVEATVAALERAADAAGTGAEHAGVGAEHQALLAPLHIPDGPPVERVEEASSAARRAAEDVTRRREDAVKLVAGLITADRRAQERAADRRRERDEARSVLDGATEAVAGAEAARETAAAAFVDAARRHLEGAEQLRLTTLDDVLAAVAYWLDGFDGDSPLVAAVTGRARELENEFGAADQRLRTAVGEAQARVGILTTERRALAEGARLSPPAPPTRAADRDGRPGAPLWQLIEPREAGPTPAPALSASPPLGPAEIAGLEAALEASGLLDAWLCPDGRLLAPGTHDVAIVADGAGAGRVGDHHLGAVLCPAVDRSDPAAAAVPDAIVAAVLARVGYVPADTSGVVDPDAVDRVGDTWVAADGRFRVGRLRGSWTKPAACYLGHAARELARRNRLTDIDTELAALDREIAEHGAARTALRQRRATLNDEVAGLPADTPARHTFATARQADRDRRMADASHQTAVRAAEQAEDAFRQARAERDETAAQLGLPVATDELEETREALVAYRVALSALWPAVRERISAAAQLAQTEQDLADAQEQVEQREIQHSGARSEYLSARTAFETMERTVGTAVAEVQRQLAAAQRGLDSATVRRRELGQLRLTIAEAVGQARGQESGLTSRVADLGEQRRDAAGRLRRFAAGGLLAIALPELTFPDTGREWAPDPAVRLARQIEAAVGEVDDSDAGWDRVQKLIAAEHGTLREVMSRHGHHAAATLTDDGWVVEATFRTRVMSPAELADALGVEVTDRRRLLTERERAILENHLVSEVASHLQDLISDAEHQVERMNAELDERPNSTGMKLRFQWRPGPDAPPGLGPARDRLLRQVSDAWSPADREAVGAFLQAQIKAERDQDAGGTWLEHLGRALDYRRWHVFAVQRFSDGQWRSASGPASGGERALAVTIPLFAAASGHYRSAGNPHAPRLVMLDEAFAGVDDDARASCLGLLAVFDMDVVMTSEREWGCYPTVPGLAISQLSRRDGIDAVLVTRWRWDGRQRLPAGVKRPAGVATVAGAREPGATAPAENTLWDEP

SEQ ID NO: 38584 - protein, 474 aa, Frankia sp. EAN1pec
MGRAVSTEPVIYNNVTGSDLTEVGTAVSGTVDIERLGRLFGPPTQWIITRARSRLERGGSLTGELTLPDPSEQQRVALAGLLGRRPRSGRSLRVDVDDLDTVVRRSGCAPSLAAAVVALTGPIVDRAALAAETARGWRAVFALADPLVDARPVLGAWRDRLGTTGLLRRLAGSLEEGQALMAAAVSVLGALPADGAPISVFAARVLGDGHGLDADRPLSTLVLDAVALLGRSISADADDAGAGPDELAGRTARSTEWRREAWAAVGVLVSELALPVLTLGLPGDRHSVTGRVLDLWRAAGEPVHLSLRQLVRDPPILDALAGVAVFVCENPAVVSAAADRLEAGCRPLVCVGGMPAAAAASLLRLLADAGAVLRYHGDFDWGGLAIANTVTTRFGAVPWRYDRAHYERALRPGLAGLTGRPVDARFDPDLSDALSEHRYRVEEEAVLDDLLADLISDPPADPGSAPSVASSDPH

SEQ ID NO: 38585 - protein, 540 aa, Candidatus Desulforudis audaxviator MP104C
MDEQVLKPIAEVSYLTVGNAWRYRAILRYFYDQHERLRHYLFPEEVLEHLRRSPYFHDYTEEQLQQDLAQLVEWKNLVPRQDTGRVTSIEEFKKKRFRYQATPYTIEIERMVQQLEQMGESFGGSLEKTLFDRLLASLKRLVAEDESARPARAVDGIAAGGAQARDLDSGPGHGGDGSGSYRTHGRDGSGRAYAADGFTGEELNALWRDTYESFRKLTENATDYLAHLQSERVEELMMTEAFLTYKEAITQYLRDFMTVLQRTSLQIETVLRGTPPSLIERVAGRLADYHLSIPRLEETRTREELAQRHLVQWQALRDWFLGGAGRESDLVYLQNATNETIRRITRFAQRLGERHHTFRSRKRDYLHIAGWFAACADLRAAHELSAVVFGAFHTRHLYAAPKETEDIYAEIWDQPSMEITLRPRVRAYREKTRPNAAASHTDEKARVAAEYLREREAERALIDRLMSGDRIVVGELPVIEPHVRKTLLYWITKCMGSRDRVGKTETGRSFRLEKIDDREIVLRSRDGSLTMPNYVLQFYG

SEQ ID NO: 38586 - protein, 403 aa, Candidatus Desulforudis audaxviator MP104C
MGREQEQPKADFDHLAREAAEHLLEQFWILRDEEPDKYQAVREREQVLRAYFLDKPGFRLILHRHFAKLEKIPAEPEPWMGIQEFQQPRDYAVFCCLLAYLEGKAVDEQFLLSDLCEELRAVYPGEDALDWTHYEHRKSLVRVLRKAAELGIVKVVDGTIEGFNHVEDNEVLYEVPVVSRYFMRSYPKDLFQFAGKEEMLAADWPEGTDEGLRRRHRVYRRLLLSPVVYAKDVPEADFQYLRNYRHRIREDVERHTGFCFELYKNAALLTLPEQRARFTLFPDSKAVSDIATQFAALARERRAKDDIPLQFDGSLCLTAPQFRDWVRICRERWGTGWSKQYREAGIAQTARDLLAFLEEWKMAERDPETGAVCLRPLLARTTGRYPADFDPGTLQEGENGVEE

SEQ ID NO: 38587 - protein, 1404 aa, Candidatus Desulforudis audaxviator MP104C
MSRNKWQLHRAGIFNFWYYDDEELDFAGGKLLLRGSNGSGKSVTMQSLIPLLLDGRKSPDRLDPFGSRARRIEDYLLGEKGVVDRDERTGYLYLEYKRQRTDQYLTTGIGLRAKRESNLEFWGFLILDNRRIGRDLTLYKTEYSLQDGKEQKIPLVRRELEHRLGPGGRVVRTQKEYVELVNKHIFGFESLDAFEDLIKLLIQLRSPKLSKDFKPTIIYEILNDSLPGLSDDELRPLSETIENMDQTKQQLDQLLRDQRSLKRLCRQYDVYNRFVRWEKAEGYLRAHRRGERLESRERELRRLLEQHREDRARFSAEWERLKREQTVLKEEEAALREHDVFKAEAEKVQVERTIAALQESIRAKTKGLEQKRRTEVRLRREIDAEENKTTEAETVMKGLLERLTAEADQALFAGHHVAAAEFRKKYAEEFTFDLWRLETGEYLARLDGVLKVLKEQTRAREKYEDADRDRAEAQRLLDRAEHEASRAGVFFDEERDRYLGAFHAWVKQNRELLLSEDEIRRTSERALQMFEPYRLEEVREPAAEAYHRHSERLREELADLGQQIRQKERAILEKNRELDDWKKKKDPEPERHPDTEAARAGLDAAGIPYLPFFAAVEFREGITEEMRERIEAAITQMGLLDALIVPERFLARVDRYDRVLEPAPQFFAHTLADFLVPAPAENSAVTVQDIDNVLRSVLIDDTGEHQARALVREDGRYRMALLKGHAPRQDRSIYIGRETRRRYRREVINGLKAELETLEEERAALQQAERQLQGRLRRLREEYQSFPADADVAEAHRMREEARQQVKLRGREVQKKDELLKKAMERLQDVRAQLRGLTEGLALPGTEEAYDTALRHMRGYRDYLHKLELIHKDFANCRSRIVHYRLSLDEAVADAGVLQGELAAFSGELDTNKLRLVQIARRLEELGADEIRARIEDVLRRLAGLPEAIDAAKTKIMEAEHKIESTGKEIRDTLGKRETARFLQGLWKRTFLDDLKLGLPGSVEVGADPADDEVAGIARAILRQDGPASGEQLDRAKVTDRLNEAFYREQAVLVEYRPAQETVLALEDSAVREVEQGDEEPAVLLDELRQKARRVQLLMEYDGKRVSPFYVLDRMEKDIETQRAILTEKDRELYEEVIMHSVGRIIRGRINRAERWVEKINRLMEDRNTSSGLTFSIRWRPRTAEHENEMDTKDLVELLQRDPRLYKDEDVRRVTEHFRSRVDRARAALEDKGYGETFHQIVKEILDYRKWFAFTLYYRRAGEQRKELTNNVFYKFSGGEKAMAMYIPLFSAAYSRYLDARDDAPYIISLDEAFAGVDEHNVRDMFDLMENLGFNYIINSQVLWGDYDTVSALSICELVRPRNEPYVTVIHYRWDGKVRRLLSWEGGDRRFGAEEDKEARTGTP

SEQ ID NO: 38588 - protein, 447 aa, Candidatus Desulforudis audaxviator MP104C
MRYFRENRGFHRLFSLMIKKYQGLGRAGGSVTLKNLTAQEQEALSLFLGRDCTGRASVTVSLSAFIEAMNKTKYAGIGFKELLDGYVGRDVLTRSEELEDRRNRKALFFRNLAEKHDSPYGRLWLEHIRRAGPGTRGIHLAFEKHPDVLAGQLKNVLAALCRLTRMRRAGKTAAYVRLPVFADRTVHDPHGFDLDTEQGRYLISALQLIRSHEDQGYTVSSRLAAEEVTELLGHFGIIRDDLLNFVTCAGLLAVREDGTPVAWWRAAWDDGAVLNVPLREMAGVGAVVPAASFGRVDRPKVVFVVENSGVFSEILDGFGWTRLPPLVCTNGQLKLACLLLLDKLVADNTTVHYSGDFDPEGLQLAHRLLQRYPDRLVPWCYTVNDYERCVSEVALPESRLRKLDAVGHPLLAPVREKMRSVRKAGYQEGLVKTLVDDIKRILPDMND

SEQ ID NO: 38589 - protein, 500 aa, Anoxybacillus flavithermus WK1
MIEGEHKMDTSWLKPITEAKYLVVDNAYRYRAILRYFYTQHERMRQYLFPEEVYAFLKQFDEFQDYTEEELQQDLEQLVKWKNLIARQETGHIRTIEEFKKKRFRYQCSPYTVEIERMIRTLEQLGDTFGGSLEKTRFDRLYASLVRMEAIIHAGFVEKREEMNQVWEETFDYFRKIIQNSADYIAYLNGENMEERMMSDSFLVYKEQFTAYLRDFIVALQKTSMQIEKLLEDLPADGVRRFIEEVVAYQLAIPRFEGAVLSREQLTEEKLDTWRSLKEWFLGRNGHESELSFLQKQTNEAIRRMTRVVQRLGERHHHFRSRKKDYLHLAKWFSSLETVEEAHKLSAVVFGCFHTKHIVAENDATENMYRDIWEEQPTEWLVKPRVRHYREKKKPEAMTDRRKEKEEAMTAYLAAKQQEEEALAQLITDGKIVLQELPVVASHIRKTLLGWIAKAMGREDRIVQTENGWKVKVVQREGTITLKAEDGMLMMPNYEIHLLD

SEQ ID NO: 38590 - protein, 388 aa, Anoxybacillus flavithermus WK1
MEKEFDEKAKEALTALFEHFWIVREKEPELFQKIREREKVLKRYVQEKFGYRLIVHRYFAKLEKIPAEPEAWMGIESFQEPLDYALFCCLLAYLEGKAVEEKFLLSDVCEEIKAMYPGETVLDWTNYQHRRALIRVLKTAEQIGIVHHVDGELEAFANQEDEEALYEVPVLSRYFMRSYPKDFIQYETMEQLLEEEWKVSPDDYRRHSIYRQLFLSPVVYRRQKDDPNFYYLRNFRHRLRDDIEAHTDFRYELYKNAALLTIPERQHVYTLFPDQKGTSDMILHLAAVVRAHLDKYPPDEYGQIHVTMSDFHQLLNHCMEQYGEGWSKTYREMTTAQLASELLSALKAWKMAEHEQETGMVTLYPLLGRLVGRYPDDFTMKGRDDDDE

SEQ ID NO: 38591 - protein, 1379 aa, Anoxybacillus flavithermus WK1
MMTNKWVLHRAGLINFWYYDEQYFEFADGKLLLRGTNGSGKSVTMQSLLPVLLDGKKTPDRLDPFGSRARRMEDYLLGEKEIVDRDERTGYLFLEYKRKQTEQYVTTGIGLRAKRQKNMDFWGFVIFDNRRIGHDLFLYKTEKSANGTEKIPLTKRELTNLLGNGGTVVDSQKEYMELVNKHVFRFESMEAFQELIELLIQLRSPKLSKDFKPTVIYEILESSLPALTDDELRHLSETIENMDQTKQQLEQLERDEQSLKRLCTQYRAYNEYMIAEKASEWLKADKQVKRLAEEEKQWIAEKAEKQTHLVDLNEYIQTLASEQDVLHQRELELASHEVFQAAKEYERVQQEIRDIHEKQQKLLRQIDEKEQLERRYKRQLEEDEDRRYQVEKQLAQQLEDLRHDAMESSFSAHDLNEADFSRQRQTKFDFTVWKREGQEYVEKLEQIIALWRRHDEKKARYEETSKEVGDLQREVDGLRHEEAKWLELLENEKSRFQQEVFRWLEQCQDVSVQEASVQLFLQRLHELYETYHVDEMKQPFAEAYYDALNRKNEEKMKQKHACTLLEEKIAAKEAEWSQWKTQKDPELARDEQTMAARAELDEKGIAFVPFYAGVEFQDHVPEPLRERIESALYHAGLLDALITETNVDIKCDRVIVPRPVELAHTLADYLQPDVEEGCKVSTTRIKEVLQSIVFADGAMEGTFTLNEEGHYTLGVVKGHAPTREKALFIGRAARKRWRLEKIAALEAELLELRAQLHKQTDMLKQLEQTIAQINSWFRAFPTDRDMRAAFEEWEKTKRYIISKQQERERKNEKLAQLARDWQQAKQTLREQTEGLDLEFSKDGYEQALLLMKSYMRRLHELQMTHREFLHLLDMIHHRTEQLETLQQEIDETKGERYVLAKEQQKIELKRQEIERTLQLMGAEEIQAEIQRVRDRLAFLQREIPAKMNERIALEHALKTIREKCAQLSVKEAFAKRLAAAWKQSFEREVALELVELHGADLLEKAKEAMQRYGALAKETRTSLVNRLNSIFFQESASLTEYRLSQEPVAIEGTNPFADIELDEEMELKVAGWREKQDRIVLLLDYKGQRVSPFYVLHEIEHDIFLQREYMKEQDRELYEEIILKTIGRILRSRIQRAERWVKDMNERMQQLDTSSGLVLFIQWKPRTAETEEEMDTKELVELLRMNSRLLKDEDLQRVTKHFRSKINRARELLEERGQGNTLHQIIKEVLDYRKWFSFTLYYQKTNEPKRELTNQRFYQFSGGEKAMAMYIPLFAATYSRYQEAADDAPYIISLDEAFAGVDENNIRNMFGLVEQLGFNYVMNSQALWGDYDTVPALSICELVRPKNASFVTVIRYYWNGKVKQLITEARKDELIEPVR

SEQ ID NO: 38592 - protein, 414 aa, Anoxybacillus flavithermus WK1
MSSLNRLDEAVQFFRGERSFHRLFCEMKKKYESLGRVGGTISVTSFSAEEKEAIASFFGKEMSRVSLAAFEQQLGNTKFAGISLVELLACYFGEPLVTKKEQQQEIAREKEAYFARLMNTYRAPRDWLVAVENQRFVQLAYQQNPQALETAISIVCRALEQLPSTYVRLPVFAQQVANDPHALDLHTLAGKLLLSALQFYAEKEYDLSSVEDVNELLQSYRLLREDVLNFVTCAGVLADTDKGRHPVFVAACETNTALNVPLREVMPLVRAYPYLGSVIFVVENAGVFSTLLEANVPLVSTNGQLNLATIWLLDLLVKEGTTLYYSGDFDPEGLKMAQRLVDRYGSSVRLWHYDKFDYLATNPTVPLSGERLAKLQSVTLRDLQPVKQEMIRQKKAGYQEAIVEELKRDTYLGG

SEQ ID NO: 38593 - protein, 495 aa, Thermoanaerobacter sp. X514
MENKLDLNVIKPIEEVKYLSAENASRYRLIMRYFYEQYQKFKYWLYKEDVYEYVSQFDMFADYTMEKCEQDLKALTEWKNLIATQDTSKASTIDEFKNKKFRYQLSPYSIEIERMTIRLESIVGYGGSLQPSLFERIYRNLIKINEMAKKEDLQEINRWWEDLNTDFENIYHNATDYIASLQSSNADELMKSEQFIIYKDKLIEYLRDFIKDLQRFSVAIESFLKKVSPEIVNSVVDKLCQYEMSIPRIDRVLNEEEVKEDLMDKWNNISFWFTGHNFEDSEAVRLLNISNEIIRKITMYAARIAENRMKAASRKNEYIALSKMFAKASNIKEAHLLSAAVFGCFYTRHIKGDFERKTESVNQSVWEEPPFKVIIKPKTRSYSNSVKTNAIIDRSADKTEMLMDYLNQKNIEDEIIASCIVGNRIRIKDLPVVKPFVRATILKWIGKAMARNGFIGKTEDGRTYKLHMPKNGERAILKCTDGNLDMPDIVIEFVD

SEQ ID NO: 38594 - protein, 383 aa, Thermoanaerobacter sp. X514
MEELQMLLENFWILREDRENFNKIRDAENKIKPFVEEKLGYRLIINPYIIKLEKVPSDVEEWMGIDAFQMPMDYAFLCLLLAFLEDKGPEDQFVLSNITEYIEAQYDGPDKVDWTLFQHRKSLVRVLNFAVDIGIIKIDDGDHERFSESEDTEVLYENTGISRYFLRSFNREITEDMKIEDFLQEDLNLSNSKDAVIQRRHRAYRKHILSPAVYSEGPDDQDFMYIKNYRNTIAKDLEEYLGAKLHLHKTSAFVLFNDNKYLRSYFPDKNKNISDIMLQVSKIIREMIEEGKLAYNPDDTIDITEAEFINIILKVKERFSDGWYKSYREMNEKQLIEEVIENMESFKMIKRVEELHSIKILPMAAKLIGEYPPDFEKGEGADE

SEQ ID NO: 38595 - protein, 1388 aa, Thermoanaerobacter sp. X514
MSEKLAERWMINRIGLLNFWYYDDEIFEFADGRLLLRGANGSGKSVTMQSFIPLVLDGNKSPERLDPFGSKARKLEDYLLGEEEVSGLDERTGYLFMEFKKEKKDSYITIGIGLKAKRHQNMDFWGFVILDGRRIGIDFFLYKMEIGDDGKRAKVPLTKKELKNRIGEGGEVVESQKEYMEMVNKYIFGFSSIEEYDELIKLLIQLRSPKLSKDFRPTVIYEIMKASLPSLTDDDLRPLSETIENMDQIKMHLDVLYRNMAAVKKLKNEYDNYNRYILYEKAGDLVKAYSDLYASKKEYDNLTKDIENYRSTIANLGNDIISLESEREALKKKEEQLSSGDAKRTQKELLEEEDRYKQYLEDKSKKEEELRNKQDKYYGLERKIKNTEEQKYKLDKELQDKLEDISSIAQDIDFMEHEFSVSELKKVYGKEFDFTYWKNELKKHKDKIKRAMSALREEIEANKRYDAALKEQERLKKEREDRAKKLNEAERLFDEQKREYVERVYSWSQGNAELKLLSSQLEGLSRVILAYGEDKGFDDILAFVRKPYEEILNGIQQEILRLQNQREVKENQLHEKEKLLEEWKNKKDPEPERDEQVINNRKRLKEAGIPYIPLYMAIDFKEDVDEETRGNIEAAIEDMGLLDALIVPKEYFEKALQMDSNMADKYVMPGSFNMMLNVSQYFKVVDNEEGVSPEDISDALSNIFVSEESGTTYIDSNGTYGIGVIKGKARDKVKSKYIGSESRKRYREELIKSIQEEIQAIKAEISAIDEEINAKKSRIQRLDYEYSAFPGKEDIEEAYRYLKTAKADYEYTSHKLDEQLFTVKNCFEDLQKKKAVVRELTSGINIHPDIDTYSSAYEYAEEYASGLNEVEILYNKYVLHISNEEMLLQQKQDLEYDIDNLKYEIDVLENKIQSSVKKIEMLKETLKELGLEEIEKELEFCLKRLEEIPKEITNKSAEKAKLEERLQRSLKDLLNIEEEIHLKEEIYNIVEEGLKKELALGFVKQDVEMEDMLKLSKSILSEYKGFFDKAGFDREKFTERLQNVYFETRNELLEYGLSIGNIFDEACEGDNERIKEAKSKQRRLNITANINGKVVSLYTLYSNIEEDIMANESLLRETDKILFEEIIMHNVGIKIRAKIFKAEEWVKKMNKLMSERDTSSGLKFSIEWRSIPASNEEELDTKELVDILKSDADMLKKEVFDKVVNHFRSKVERARRAMEEKNNTETFHKIMKEILDYRDWFEFKLYYRKEGESRKELTDNAFNKLSGGEKAMAMYIPLFSAVYSRYEGAPPTAPRIISLDEAFAGVDDTNIRDMFKLIEDLRFNYIMNSQVLWGDYDTVPKLSIYELIRPKNAKAVLVMKYLWDGKVKHLILPEKEEVAALEVGAVNE

SEQ ID NO: 38596 - protein, 431 aa, Thermoanaerobacter sp. X514
MNKEELKYFKEKKGYKRIFKGIREKYRSLGRLGGVVKLDNLTEDEKEVLTNHFKKDYRTKKSASIDVAKFEESLKNTRFEEYTLKDILEYYFGEKLTSKKEDMEILAKEREEFFKELFSKYQECKCIDWLKSLYEGTAVGVRTVNQRYLNDRNGLKKDIMYVCDAINNLPVYKGEKKRLPVFSSQIARNPHYFDSNTEAGSMFINALCTLMGLNEVKGSEEISELYYNVGILIDEISNYVTLSGLLAYEGDTENQVFKAAYESNQVLQVPLLNLSKIERVISPSKKVYVVENPSVFTSLIDATSKVFPLVCTYGQPKLSSLLLLDMLYKEGTEIYYSGDFDPEGLMIADRLYKRYKDKFHFLRYGVEDYLKSLSNEVINDVRLSKLNKIESPLLFDVAKEMKIIKKAGYQELIIDDIINDIKLIEEGKGEW

SEQ ID NO: 38597 - protein, 495 aa, Thermoanaerobacter pseudethanolicus ATCC 33223
MEDKLDLNVIKPIEEVKYLSAENASRYRLIMRYFYEQYQKFKYWLYKEDVYEYVSQFDVFSDYTMEKCEQDLKALTEWKNLIATQDTSKASTIDEFKNKKFRYQLSPYSIEIERMTIRLESIVGYGGSLQPSLFERIYRNLIKINEMAKKEDLQEINRWWEDLNTDFENIYHNATDYIASLQSSNADELMKSEQFIIYKDKLIEYLRDFIKDLQRFSVAIESFLKKVSPEIVNSVVDKLCQYEMSIPRIDRVLNEEEVKEDLMDKWNNISFWFTGHNFEDSEAVRLLNISNEIIRKITMYAARIAENRMKAASRKNEYIALSKMFAKASNIKEAHLLSAAVFGCFYTRHIKGDFERKTESVNQSVWEEPPFKVIIKPKTRSYSNSVKTNAIIDRSADKTEMLMDYLNQKNIEDEIIASCIVGNRIRIKDLPVVKPFVRATILKWIGKAMARNGFIGKTEDGRTYKLHMPKNGERAILKCTDGNLDMPDIVIEFVD

SEQ ID NO: 38598 - protein, 383 aa, Thermoanaerobacter pseudethanolicus ATCC 33223
MEELQMLLENFWILREDRENFNKIRDAENKIKPFAEEKLGYRLIINPYIIKLEKVPSDVEEWMGIAAFQMPMDYAFLCLLLAFLEDKGPEDQFVLSNITEYIEAQYDGPDKVDWTLFQHRKSLVRVLNFAVDIGIIKIDDGDHERFSESEDTEVLYENTGISRYFLRSFNREITEDMKIEDFLQEDLNLSNPKDAVIQRRHRAYRKLILSPAVYSEGPDDQDFMYIKNYRNTIAKDLEEYLDAKLHLHKTSAFVLFNDNKYLKSYFPDKNKNISDIMLQVSKIIRQMIEDGKLAYNPDDTIDITEAEFINIILKVKERFSDGWYKSYREMSEKQLIEEVIENMESFKMIKRVEELHSIKILPMAAKLIGEYPPDFEKGEGADE

SEQ ID NO: 38599 - protein, 1388 aa, Thermoanaerobacter pseudethanolicus ATCC 33223
MSEKLAERWMINRIGLLNFWYYDDEIFEFADGRLLLRGANGSGKSVTMQSFIPLVLDGNKSPERLDPFGSKARKLEDYLLGEEEVSGLDERTGYLFMEFKKEKKDSYITIGIGLKAKRHQNMDFWGFVILDGRRIGIDFFLYKMEIGDDGKRAKVPLTKKELKNRIGEGGEVVESQKEYMEMVNKYIFGFSSIEEYDELIKLLIQLRSPKLSKDFRPTVIYEIMKASLPSLTDDDLRPLSETIENMDQIKMHLDVLYRNMAAVKKLKNEYDNYNRYILYEKAGDLVKAYSDLYASKKEYDNLTKDIENYRSTIANLGNDIISLESEREALKKKEEQLSSGDAKRTQKELLEEEDRYKQYLEDKSKKEEELRNKQDKYYGLERKIKNTEEQKYKLDKELQDKLENISSIAQDIDFMEHEFSVSELKKVYGKEFDFTYWKNELKKHKDKIKRAMSALREEIEANKRYDAALKEQERLKKEREDRAKKLNEAERLFDEQKREYVERVYSWSQGNAELKLLSSQLEGLSRVILAYGEDKGFDDILAFVRKPYEEILNGIQQEILRLQNQREVKENQLHEKEKLLEEWKNKKDPEPERDEQVINNRKRLKEAGIPYIPLYMAIDFKEDVDEETRGNIEAAIEDMGLLDALIVPKEYFEKALQMDSNMADKYVMPGSFNMMLNVSQYFKVVDNEEGVSPEDISDALSNIFVSEESGTTYIDSNGTYGIGVIKGKARDKVKSKYIGSESRKRYREELIKSIQEEIQAIKAEISAIDEEINAKKSRIQRLDYEYSAFPGKEDIEEAYRYLKTAKADYEYTSHKLDEQLFTVKNCFEDLQKKKAVVRELTSGINIHPDIDTYSSAYEYAEEYASGLNEVEILYNKYVLHISNEEMLLQQKQDLEYDIDNLKYEIDVLENKIQSSVKKIEMLKETLKELGLEEIEKELEFCLKRLEEIPKEITNKSAEKAKLEERLQRSLKDLLNIEEEIHLKEEIYNIVEEGLKKELALGFVKQDVEMEDMLKLSKSILSEYKGFFDKAGFDREKFTERLQNVYFETRNELLEYGLSIGNIFDEACEGDNERIKEAKSKQRRLNITANINGKVVSLYTLYSNIEEDIMANESLLRETDKILFEEIIMHNVGIKIRAKIFKAEEWVKKMNKLMSERDTSSGLMFSIEWRSIPASNEEELDTKELVDILKSDADMLKKEVFDKVVNHFRSKVERARRAMEEKNNTETFHKIMKEILDYRDWFEFKLYYRKEGESRKELTDNAFNKLSGGEKAMAMYIPLFSAVYSRYEGAPPTAPRIISLDEAFAGVDDTNIRDMFKLIEDLRFNYIMNSQVLWGDYDTVPKLSIYELIRPKNAKAVLVMKYLWDGKVKHLILPEKEEVAALEVGAVNE

SEQ ID NO: 38600 - protein, 431 aa, Thermoanaerobacter pseudethanolicus ATCC 33223; identical to SEQ ID NO: 38596

SEQ ID NO: 38601 - protein, 495 aa, Thermoanaerobacter pseudethanolicus ATCC 33223; identical to SEQ ID NO: 38597

SEQ ID NO: 38602 - protein, 383 aa, Thermoanaerobacter pseudethanolicus ATCC 33223
MEELQMLLENFWILREDRENFNKIRDAENKIKPFAEEKLGYRLIINPYIIKLEKVPSDVEEWMGIDAFQMPMDYAFLCLLLAFLEDKGPEDQFVLSNITEYIEAQYDGPDKVDWTLFQHRKSLVRVLNFAVDIGIIKIDDGDHERFSESEDTEVLYENTGISRYFLRSFNREITEDMKIEDFLQEDLNLSNPKDAVIQRRHRAYRKLILSPAVYSEGPDDQDFMYIKNYRNTIAKDLEEYLDAKLHLHKTSAFVLFNDNKYLKSYFPDKNKNISDIMLQVSKIIRQMIEDGKLAYNPDDTIDITEAEFINIILKVKERFSDGWYKSYREMSEKQLIEEVIENMESFKMIKRVEELHSIKILPMAAKLIGEYPPDFEKGEGADE

SEQ ID NO: 38603 - protein, 1388 aa, Thermoanaerobacter pseudethanolicus ATCC 33223
MSEKLAERWMINRIGLLNFWYYDDEIFEFADGRLLLRGANGSGKSVTMQSFIPLVLDGNKSPERLDPFGSKARKLEDYLLGEEEVSGLDERTGYLFMEFKKEKKDSYITIGIGLKAKRHQNMDFWGFVILDGRRIGIDFFLYKMEIGDDGKRAKVPLTKKELKNRIGEGGEVVESQKEYMEMVNKYIFGFSSIEEYDELIKLLIQLRSPKLSKDFRPTVIYEIMKASLPSLTDDDLRPLSETIENMDQIKMHLDVLYRNMAAVKKLKNEYDNYNRYILYEKAGDLVKAYSDLYASKKEYDNLTKDIENYRSTIANLGNDIISLESEREALKKKEEQLSSGDAKRTQKELLEEEDRYKQYLEDKSKKEGELRNKQDKYYGLERKIKNIEEQKYKLDKELQDKLEDISSIAQDIDFMEHEFSVSELKKVYGKEFDFTYWKNELKKHKDKIKRAMSALREEIEANKRYDAALKEQERLKKEREDRAKKLNEAERLFDEQKREYVERVYSWSQGNAELKLLSSQLEGLSRVILAYGEDKGFDDILAFVRKPYEEILNGIQQEILRLQNQREVKENQLHEKEKLLEEWKNKKDPEPERDEQVINNRKRLKEAGIPYIPLYMAIDFKEDVDEETRGNIEAAIEDMGLLDALIVPKEYFEKALQMDSNMADKYVMPGSFNMMLNVSQYFKVVDNEEGVSPEDISDALSNIFVSEESGTTYIDSNGTYGIGVIKGKARDKVKSKYIGSESRKRYREELIKSIQEEIQAIKAEISAIDEEINAKKSRIQRLDYEYSAFPGKEDIEEAYRYLKTAKADYEYTSHKLDEQLFTVKNCFEDLQKKKAVVRELTSGINIHPDIDTYSSAYEYAEEYASGLNEVEILYNKYVLHISNEEMLLQQKQDLEYDIDNLKYEIDVLENKIQSSVKKIEMLKETLKELGLEEIEKELEFCLKRLEEIPKEITNKSAEKAKLEERLQRSLKDLLNIEEEIHLKEEIYNIVEEGLKKELALGFVKQDVEMEDMLKLSKSILSEYKGFFDKAGFDREKFTERLQNVYFETRNELLEYGLSIGNIFDEACEGDNERIKEAKSKQRRLNITANINGKVVSLYTLYSNIEEDIMANESLLRETDKILFEEIIMHNVGIKIRAKIFKAEEWVKKMNKLMSERDTSSGLKFSIEWRSIPASNEEELDTKELVDILKSDADMLKKEVFDKVVNHFRSKVERARRAMEEKNNTETFHKIMKEILDYRDWFEFKLYYRKEGESRKELTDNAFNKLSGGEKAMAMYIPLFSAVYSRYEGAPPTAPRIISLDEAFAGVDDTNIRDMFKLIEDLRFNYIMNSQVLWGDYDTVPKLSIYELIRPKNAKAVLVMKYLWDGKVKHLILPEKEEVAALEVGAVNE

SEQ ID NO: 38604 - protein, 431 aa, Thermoanaerobacter pseudethanolicus ATCC 33223; identical to SEQ ID NO: 38596

SEQ ID NO: 38605 - protein, 532 aa, Opitutus terrae PB90-1
MNQAEPQRDDLECPPGGYQTFHHLAAPKVDFYRAILRVFGQAKEHFEISLRPAEVADRLVNGSALPDVEELSLALEQLHKWGNLDASQDNSEVQTVEEFKRPRFLYQFTMAGEATEQALTAFDLHFLRPGELQTTALRSIQETLDELQRLLANGDLDTAKAVRALRELADRFHQLVTRAQSFMRTVQRSIDAPSSELDLFLQHKEALLSYLERFVGELVLATFRVSTSLRHIEAGGIDRALDAAAEADLVDALQPDERQRAAAREQWQLRWQGLRRWFLGELEAPSQAEILRGRARAAIPALLETVRRLNDQRASRTDRATDFITLARWFAACPANDDLHRLWRAAFGLTPARHLRVNEDTLAAWESEGANSRTSWTEAPPFYLTPRLRAVGRSTPRGPVRAVIDRSAERARLAQLATEEEELAAAARRTLATGQPRRLSALPVLKERELDLLLDLLGEANASVSKPGESVEATSEDGSLVIVLETPATGTPLATVETEVGTLRGPDFLVTITDLNAPAATDVVGQTVALSA

SEQ ID NO: 38606 - protein, 412 aa, Opitutus terrae PB90-1
MSVATPPPGEAAVLDHLRVEDRRRALRALLRKPLLLAEDPADATEFTRVRRHADDLREWFSRQAGWSLDVTADFARLRKTPADLADASRPAQDDRSNEPFTRRRYVLLCLALAVLVREERQTTLGRVADQVVNLWNQDTTLVAAGMAFRMESPDERRDLVQVVRLLLAWQVLRRLDGAEDRFVYDRAADVLYNVRHIVLSRLFAGRRAPSLVPAETLDEQLAALVEEPLIDTDEQRNRRIRLGLVRRLLDDPVIYYRELPAEEQAYLLRQRWHLVGQLAEATGFVPEERAEGFALTDPFGDCSDVGMPEEGTDGHATILVAEFLAARRSESEGSVVPMPAIADFVAAKAVEHRSRWRREATVAGHEHEFAREIVARLAGLGLVRIIRDGVVPMPAIHRFRLRAPLETAHSVA

SEQ ID NO: 38607 - protein, 1367 aa, Opitutus terrae PB90-1
MLPEPTSERFKPLRSGLINLYKYEDQEFWFDHGRLLLRGNNGTGKSRVLALQLPFLFDGEISSHRVEPDGDPARAMAWHLLMNDYDDRLGYTWIEFGRRKADGTAEFVTLGCGMRAIRGVDGLPNRWYFATHLRVGKDFRLLTDQRQPLSRDQLELALGETSLFRRVEDYRKRVDELLFGLKLRYDSLIELLIRLRAPQLARKLDEDRLSAALSDALPPLGETLVKDVAESFRNLDSIRADLQTHRDIHAEVGKFLQDYQRYLQVAVRRRAEGVRTQHSRYEETNRGIADQTRQKEQAEGRITEAEAKKTAADLAKQEATSQMEALRDSPFQRDAIALENARSQAASWKEQLVTRTADKMSRETRLSVTETEHTRQEKRAEDTRIQISAVLQSADIAAKAAAFLEDHERHVPDLTTWPSQAGWLAHAEKALGDRVQHRDRAVAQLEVLQAACLKAQAELAQAQERENHAETRVSGERENERMLDAELANAGETLLKEYARWKTALTWLRPPDVAALNDALGRWLETGDPSDRTLPAVMEAASAEAEGERCGELAGVEQEIDRLKQQLAGLALERTELEGGRHLPPPMPVTRDPNVRSQIAGAPLWEVCDFQENLTGEERARLEAALESAVLLDALITPTGRLVPQEACDSFIGSGNGVPLGPTLTQWLRAAVPVNRSDVLTADAVESALQQISAGRDTGEHWVSLDGSWRLGPIHGRGQKVAAQHLGQGAREAERQRRLAEIATETATLTAQNELAAAKRAELVTTRVEAIRAERLGAPTDTAIADALVRRAGARDRLSLARKEYADAQEVTEVARRKTQEASTQRNSAAADLGLTAWQDKPETLRVVWQEYRLKLAEFWPTARLWNEAREQVELAACEVIRAREELEAAEQRRAETEKESVQAQARFNTLHENVGASVEALQTKIATANIAHAAAEKAATEANDALVDARTDAKLAIQQLQQLNAQLNDIVRDRAAAIDKVRLFAHHGLFGDAHPTFAPIEADAWSVTRSVEIARDIERTLRDIAADDNAWRNRQTALLQHFTELQTSLGGRGYQPQMQYADDSLGVVTCAFHGGPMRLGQLHAAVATEIATQERVLTEREREVIDNHLIGEVATALQDLIRNAESRVADMNAEIVRCSTSTGLSMRLKWEPRTEDVPEGLEEARKLLLSDPELWTPDERAQLGQFLHGLIKDARNSNPLGLWADHLRQALDYRTWHRFSVERRQNEKWDKLTKRRYGTGSGGEKALMLTVPQMAAAAAHYRSAAPHAPRLILLDEVFVGIDSKVRAKCMGLLEAFDLDFVMTSEREWGAYSTVKGLAIYQLTTHPGIDAVGATRWVWNGRQKVLANPPDYAAGGHNGSTPHVTPT

SEQ ID NO: 38608 - protein, 417 aa, Opitutus terrae PB90-1
MSPQRERLQALFGRPELRRLIERLNERRELGRPLTGTLTLDTPSVEERRAVDQLLRRATSTGASLSVSPEALLIQLRTAGLANTWEEVLEAVCGQPDPTRALAAANAQAWEDLWKRVKGTVGPSLHIWLDQLRRDGLLKRLSEGNADIAGHWVDQAVAVLRQMPFEDEPIASVAARLAGNSHALDPGSPLATIILRGVSVVHQCAMPLNAAERRELWSKAGVVCDELSAPVLVFNLVLPGASPLEEILAAAHAATIPIHVTTRLLLATSWTQVVAPPRVYVCENPSIVALAARQLGAGSAPIICVDGEPKTAAWNLLGHLRRAGTEIWYHGDFDWKGLAIASRVIARLNARPWRYSEHDYNSAIGTEDLTGAVFNAPWAPELTTAMQKRNKLVHEEAVADLLLSDLEIVSDRSHRLS

SEQ ID NO: 38609 - protein, 499 aa, Desulfitobacterium hafniense DCB-2
MYSLYDKIEETKYLSEGKAGIYRPICHLLFQKTAQEFQGSMYTVGEILADLKRRPEFEDRFMDLTDRDLDEALKSLEKWGNVIGHQDTSKAKRIEELKNRRSLYSITDITIELERMIEGLQNSLQSIRGIEFERHIPDRMIEELVKLKTWHEGQTYDLRIVWKELMDRFKSLQTESSNFFAQISRASSNEELMRTASFLAYKEKFVQMLRNFVLVIMEKQEKVKHYFLDIPDDAIQRIVDHIVTKEAGSDLTGDFSAEESRAARLLEWQGLKGWFVEINGKKPGVRFLIDQAKNTIVRVVKIAEQVTDRYNHFKSRKNDCLQLARLFASARTIEECHRLSAYVFGVQQTFHLYTVPKRSDDYHDTVWEYDPHEITISKNRPGRREGKIKQALDENPLKEYELLKQHQELQTIIRRYFDELSADRKIVFEELPILHPIIRNTLLDLIGQANASSKKTARTDNGIKFCLKERSDRWIKVRFKDGTLMMKDLELERIGGGNT

SEQ ID NO: 38610 - protein, 384 aa, Desulfitobacterium hafniense DCB-2
MNEVIPFQDCVRALFDHYWIRQEDDPEMFYAIKKQERDLEAYFRTQFRYHLIVEATFAKLEKIPFKAQPSMGIFEFEREKSYIFFACLLAYFEDKGEDQQFLLQDACEAIRNYAPEEAGPIRWEDRSTRKAFVEALKFCRDQHIIEEIDQQIEGFRDQMEHEVLLQTTPLFRRILTLYFSDLSQIQTVQEFEDAVKREIGEATTPKQRIMRTWFLESALRHEDLTPEERDALNCGFESWQAEIEGRFDFMHVERYKSMSMIVHSEYQYGEYYPDARNNQTMRTAIQWATEVLNQVRRGEVIPDLYGRIRMHEREAFQVFLTVKEKFQYGWNKEFTQIKSPEAAWKMVLEALKQFSIVKSIGDKQLYCFDIAGRIAGQYQEEGNQ

SEQ ID NO: 38611 - protein, 1370 aa, Desulfitobacterium hafniense DCB-2
MTVHRYQPNRLGLFNFWYHTDSVLEFVDGKLFVRGANGSGKSVTTTMAVPILLDGDKSPSRLDPFGGKSRLMVDLLLGEKNISQKEEATGYLYFEFKKGDSYLTFGIGMYGNRKEQRSPDYWYFMINDGRRIGYDFLLYDEENIRGEIRKFPLTKAQLEEKIGWGGEFTTSQASYTEMVNEHLFGFNSVKTFKELIHILIQLRSPKLSRDTKPTDVSNLLSDSLPELTDDELLPMILTIGTIDAHQEKLEELEKSLSYLRALESAYQTYNEYRLYEIAKENTKIQKQIHESNHLLGIDHRQLEQYETEFAELPEQLAILETEKQTLDMEERQLRGHEIFGLRQQQTQLEEDVTKFDKSFKSLEEQYNNKRIKIDRLTHDRTANDYEKEKTKNAIDEIAEELGDLAKRTLFSSHDQYLLHLEQNPNAELTIFHKNWEEDLLNHRKELSLIRQLAQEVETCRLREKDAEEAVDRVEQQLEIVKKRRTELQKTAEYIYGDLGESMETWQTQVQVFVLGQNAKQQLIGLFESFLYEEIEDASREIEIWCSDQKQIYENSIIKEMEGQRFVIAQEKSRQTIWKEQIEDIQSQPEIEPVYSKDEQARRNSLREQNVMFRNFYEAVEFRPELDAKARENLEAAISRAGLLTALLVSEEDEERILELPILRTQQIKTHNLMQYLVAVPDETISRAKIERLLQGISISKLDESYILDTGEFQNGFIYGNAPFQEEQFIGKAAREATRAKRILSLQDEIQSSQNRIEEADDQISFLENQKRRLNTEFSTFPSLEPIREMERQRKGLDTEEKLANSQVEQQKVNFQALKQSNQPIINEFLLKSAPYHRIEGTSAAYQNILDELNEYRNQLKNFFYFMLQRKTLEDKVDDASNRIDDLENDLIDLKEKQMEAQRDLNSSKAKRDMILNLIMNQSDEQNILARIDKIALMKEKNEGALREKIQRQSDLRSDISKLKPQIEAQGLDILNLEELKQAWESLFQEEKSFGFIDAHWTAPLAVNNLELTYKESKISEIQERLNRTSYDAERELIEQNMKQTQHTLKIRKMGKGREWEQLQHWVDRRFITFTPSYIEMKPVQLLRELQETRDETALAIQEKERQLYEKVLIDDIGSTIRELIKKAREWVEEANHFLSSIDTTIRMQLKWRPLPAKEQGELSTDKLVELLSKETRWLNNHDLERIAEHFKTKVDQARAMAKADTRFSLTDKMKELLDYRKWYRFVLYYQKEGQTDFDEFSNKEFEKMSGGEKGISMYSPLFAAAAAKYAHAASHSPRLFSLDEAFAGIDHDNIENIFGLISQFDFDYLMNSQILWGTYETVNKLSIVEILRRVHEKTLVLGRYYWDGENKHDLPIGHLIEEYFAEKLSR

SEQ ID NO: 38612 - protein, 709 aa, Desulfitobacterium hafniense DCB-2
MESSLQELVQVFRNEKGFNTLFSLFREKYRSYGRISKGTKVIITNPSVHELQTLAGFFGEAYKGNNAIMVTAAKFERAIMKSKYKELFQGHDVNDLLQLYFGGYLTSKGEDRCNFDRKKEQFFQLFLSQSKSGSFFYNFISFITHYKNAPFIHLMYKKDSDVLRQLLLLINKLFDQLPLNSDVFLPMLSYKLTDNFHALAPKSDSGRMILFALQVLNHLDNGADIISKPDEDQITDILQGYHIRFCPDSNKLAHRLWISESTNNGDYRYQLIPLIKIGTGGFAEVYMVFDPIAKKEMACKVLYEKAVFLQWYGKEGEDYLQRFKREVKLLREKISHQNIIEIDKMQLEHDPAFFTMPLAETSLEKWLELNPSLSEETKLSIFKDILNGVFYLHDYKISHRDLAPHNILLFPQSDETRLAKVADFGLAKDHRSLSSITRHSNMSYGRGAFTAPEQRKSLKNADFLSDVYSLGALLFYIYSGKSPEQRFTSFIRYQHIVGKAMEEERSKRYQSVQELMDDIDQTIYNSAQNSYSFNSLLTYEFRNVCGDVDHVLKCLPTVNVESPSQVCGKFVRPFIAIPTEVLTECAKNETVMIPFLHIAKENISRAKDCSEAEWNHVSLRFNGIYEGTEKLGLKMYSLNLILITALEKKNLLAQTILVSILGSLESQGRLSQQIAHMIEKEFPVYHELLISLLQETNYPLDIRDALNDY

SEQ ID NO: 38613 - protein, 487 aa, Caldicellulosiruptor bescii DSM 6725
MINSFQAPLLGKLKYFEYLTAPNSERYRTIMRYCFLCHLEYKNRLTKEEIFTFLKGFPQFADYTEQMCEQDLKSLVEWGNLNSIQDTSKTRTVEEFKNKRFLYELTHIGLKIERFLFELETQEDTKAELNPKHIEKIFLLLQQVDSILQEPQKRAVDWWDELTRSFEEIENSYSEYISMLKSYEAENLMIKENFLEYKSKLVQYLYNFYIVFQNYLPKIRSIFLQLKNSEVEKLLKYIIAQEKEHPKNIFKDPESIERNIKARFDNIKLWFVAPHGQAEKLSDQIQGLIKKVSDLAARLSEMSSVKVNRQEEYKHLAKIFSNLDLATCHKLSAVVFGVLLPRYIATEEKRQSELASLSILDVPPMKSLLHSRGRLVREKSKVLPASEFSEDKKKRFEEYKKKIEEEEKLVAELIKDGKIEFENLPVLTPQVRKKLLVWLSRGLSTGFGNTDSGKRFKVVKPKDGRYCVLKSIDGELEMPAYVIEFVE

SEQ ID NO: 38614 - protein, 410 aa, Caldicellulosiruptor bescii DSM 6725
MKSALLKLLENFWILKEKEVENYYECKNIGKELKDFIVTKLGLKFYATSDIVRLEKIPLVPREYMGILEFEEPKDYVFFCLVLAFLEDKGKDTQFLLEDITQYIRSNYPYEEIDWTMYSDRRSLIRVLKFCEKMGLIKIDDGNQELFVERADVDVLYESTGLSKYFMRTFPKSLVEYSSVEEILNSEFEFTNGLSDQITDIKRIKAYRGLLIDGIVDFENEAPLYYIKKQKTTISQDLEKFVPELELHLFKSFAYISVEGDYRYTYPDNSNICDVLLLCSKEIFERVEKGELRLSPPHEMLEISLDHFKLIVENVKKKYGNFWNKEWREKSTEKIFEELLEFLQLHNFAKTNEDGYLVISPIFLRVVGEYQDYEINNQLSVKNESTVRSFEDIEDINVDGGLYFEDEQGK

SEQ ID NO: 38615 - protein, 1350 aa, Caldicellulosiruptor bescii DSM 6725
MSKENRWVLSRAGVFNYWYYDEEYFDFFDGRMLIRGANASGKSVTMQSFITLLLDGNYHPSRLDSFGSNARKLEDYVLGDQGPGQKNEAIAYLFLEFKKQNVFVSIGMGIRAKRGTNPDTWYFVLTDGRRFGIDIFFYEKIGDQKIPLTKKKFENLLGDGGKVFSARKDYMEEVNKILFGFEDTEEFENLIELIVRIRAPKLSKDIKPDSVYKMLQESLPALSESDLRSLSDSIENMDRIQTELKNLEIIKDVLEKLKKVYDEYNKLLLAQSILNVLEKSKEYFSLKIDLEKAQAEVEKNKEEKLKIEEKIGELKKEQESLTLRLESIKENDIFKLQKELLNIKEELKEVDEQKNKKLSQINSASQKLEKERQQLIALEEELEKYKRKIKDSVEEGKLLIESIGFQRFLETLDMYLFGQGSLDILKDEISSFLYQVEIVLKNYEKLAEIKKDLDGFYKNLDMNKAEAQKIEEDIQNLLLQLEEIKNSLKNAISIYFEQNEVFKALDEQRTAIFQAINSCEKKGDYVRIYSILDDIYKFHYLAISDTIRRLEFEIETLNNKIKAKKEEIEKIKSQKDDEIILSPQQKKVRDRLLQKGVPFIPFYMAVDFKDGVDEKKKAIIEDALNCLGILNALIVPEKYRDVLSELMDDEKEMILISKPAYFSHTLNEFLEVANFDGPAELKQEVAAVIDSIFATEKDDGIYICEDGRFGNSILKGRTTTCENARFIGIENRRRYRQMLISQLEDEIAKLSVEVDNKKQERNAQKVLLEKLQNERDSFPSLIDLDTAFEMIEEREDRKSDIQKEIEFLEKKIRELLTKENNLKHEISVIATKLSVTAAKDNFLKLSKDAQKLKSLLVDLENQVEKEKLVSRTLDLRKDQILQIEENIQNLSFDLQVLKTRWEGLELKKIEIEKRLSSDDAQKLFEEQQKAIERLDSIPKEIENFNKDLQDKVAKISRYEAQIETKASQLEKAKMEYTNSLEVLKIELSFGFVCREENLEDESRLLEFAKEKSSFANEYKSKDLNQVLQKLIATHYEAQVQLAEFGANLFLKEDEKTRYLRYLWTAKKDGRLLSLYEFLERIDSEIIEKKNLITQQERELFEEVLAKDIGFKISRKIMLAQDWVKRMNELMDGMDLSGNLKFRLSWEQKKQELEDELSTSELVKLISKDPATTSDTDRQKIVKHFRARIERAKRLHDSPESFRSLYEIMKEILDYRQWFEFRLYFQRGEDNRRELTNNAYDKFSGGEKALSIYVPLLAALCAKYQSAASYAPRIIALDEAFAGVDENNIEKMFELIENLEFDYIMNSQILWGDYKTVPGLCIYELISDRSKGCVLKVKYIWNGYKKVLVEI

SEQ ID NO: 38616 - protein, 422 aa, Caldicellulosiruptor bescii DSM 6725
MTKDKIFDECVEYFSKPGFKRALKLIHSKYRSLGRFSGKIILENPSEEEKETLSRYLRRVLRGEKVVIDVKDFTVTKFQDTKFSGLDFKSILSAVLRKEVITKKEEKELKSGRILKFFKSLSAHFEGDENAAEVLNAFKENFKSFESFYKKYSQEEFLEIMKKVIEAILKKPQSPETLAIFATRVTGNPHFFDDEQDAGKIFLKLLSIINGREFPQNAEEKSELLFGNNILIDELSNWCLLYNIGGYIEDGKEDEGLKYFSNQKKPIILPLYTIKDYKGFFAYSNKLVVVENPAVFSAIVQRVPAISAVCTNGHLRLSSKIIIGSIAKTNISLLYSGDFDPEGLLIADRVIQNFGAMPLCMDEVHYFLALSENKIDERRLEMLKNVKSAQLQSVCKKMKELQLAGYQERIVDRIVEKLKVNI

SEQ ID NO: 38617 - protein, 492 aa, Actinosynnema mirum DSM 43827
MEPARLKLYAYLDAREHQRTYLAIMRLFTSTLLADLSAGEVAGALAGAEREGRVDHGESRIENVINRLKQLVEWGNLVQGRREVVASSIAEFQHGSVRYQVSKLAVRVQRDVDELLRVPEGAREVSRELLPAVERGLGQLGRTLSEALLTGGRGPREALAEQVTTLFLQHAELAATVRDFYAYLGQVVTRHHLAADEISGFRDLLVEYIQRVVEDVLRHTPAIAAALANLAGARPELLRLLGASGLGERVERARGRSAEDWRELTDWFVDRPGRPSQVTALRDATARAIGSLLASVKRATSGGGLLPGRRAELLKLAAWFDGGTREQAHELYAAAFGLYGARHLSPAPEHDGDDERTPWATGPAADVPVSVRSRSDRSARGRTSRILDDPMTEQSLLAEARHADERRAASVAELAAAAPRLAEAELSGEALGVLCELLTLAMAQRDSAVDPGSAADPVRGLRVTVEHVAGRAAVIRSKAGTLTLHDSTLVLD

SEQ ID NO: 38618 - protein, 389 aa, Actinosynnema mirum DSM 43827
MFDDLSEIDSAIVVRCARTLLRRPLLRADGPDGELLGAVYRHRFALQDLFAGLLGYRLVVERRFARLYKAGPGHDDSRGAGLTPRGYAYLALVLAVLTGVGRQVLLSRLVADARAAAAEAGIAVVDDVVDRRALTSALRHLVALGVLHETEGSVDAQAEALITVDTDLLGQLLTGPVGEADGARRLVELAARPGPRGVEHAVRRRLVENPVVLYADLPPEQADWLRRNQRKESALLETAFGLRTECRAEGVLASDPEDYLTDLYFPGTSTVARIALLALPELLESRPVAGGRHPVDPARAREVCAELVADYPAAWSKQYVEDLGGLTAEVLELLRRTGLAAPDAEGPGWTLAPTAHRWVPVPDGAPEREVEVVAAPEPQSWSLFDEESA

SEQ ID NO: 38619 - protein, 1354 aa, Actinosynnema mirum DSM 43827
MSDRWRLHRGGIVNIWQYAEQVFDFSGGRAIFQGTNGSGKSRTLELLLPLCLDGDLRQVGSKGFDTVSLRRLMLDDYDGGPNRIGYAWVELRRGEDEYLTCGLGVKASKTSQAITDSWRFITPLRVGRQLQLVGAERTPLGPAHLREAIGADCVLEEAAFRARVAEEVYGVPAARYGDLLHLQRTLRNPDVGLKVLEGQLEQILSDALPPLDQAMVEQLATSFDDLESIRENITRLSTADSALGTFLKTYSDYALGGLRSSAERLGAAEDGVRKLEREGARLTAALERTRAERADAERSQSDLEAGEQRAEERIGALKELPAFRGLEDLRTRERLVEEKRSSARVALEVAAKQRAQEDGAVDGVLRLLRRLAEDLGTARELAEPLRGRLLAAGLELELPQVPPVASAEPVVRAESVRAKPDPEAEPQPIERRVPPAAPVVPVEAAADRVAEVAAEAGRRGALVLALHQRSVELDSAARALESLEGAVGDAARAASEAVARRDREAGELAGTGREWLGAVAAWRDAEPFAGVALRLPEAVDPARARALAAKARDGARPLVSAAREAERGAADRVAGLRASIDERDVELTGLRGGSERAPDAARFTGGGRDSGAGAPFYRLVDFRAGVDDAGRAGLEASLEASGLLDAWVPGDPALAAVDGARSEVFAVPGEAVGGASLADVLEPAVEPGSPVSAELVGALLASVSLASVSLASPAGTPGSGAVSADVDGGWRAGVLVGRWGKPAAEFIGAGAREGARRRRIAELEERLAGLREELGAAEAEAVAAREQVRRWESHLERFPADRDLVARHGRVQAAQEGAERAGRRVGELEEELGRARARDAAARAEVVQEAAAAGLVAETEALRQAQQAASDAQRTADRLADVLRRQCGGTLADLADAAHRYRVAEQDRVAAEQDAEERCSDYAAQAATLTELAGAVGGEARKVADQLAALEAGRRTTREDLREMREQVAEAREKAAKLEAQLDASAEQLAGAREGAGRAEEQFLAAVRAPGVLVAALPDAGPEWEPARVREALAGIDRRGAGEATVITKLQALQTSLAGSHDIAAEQHAGLLTVTVTGEEGARPVALAARQVTARLAEQRGFLDERYQTIFADYLIRDLAEWLRGQVAVAEDLCRRMNEVLGKARSSQGVHVKLAWKPSAALDEGTRDALALVRLPYAERDPEQDATLRRVFTERIEQERDAHSGSYAEVLSRALDYRTWHQFTVTVADTGPDGGPRERRLRQLSSGETRLISYVTLFAAGAAFYDAVSGEFSPLRLVLLDEAFERLDDPTIARMLGLLVDLDMDWVITWPSGWGVSDKIPRMHIYDVLRPKNGRGVACTQTTWDGAGLDRVDP

SEQ ID NO: 38620 - protein, 498 aa, Geobacillus sp. WCH70
MDASWLKPISEVKYLAVDNAYRYRAILRYFYTQHERMRQYLFPEEVYAFLKQHDEFRDYTEDDLQQDLDQLVKWKNLIARQETTHIRTIEEFKKKRFRYQCSPYTVEIERMIRALEQLGDSFGGSLEKTRFDRLYTSLVRIETIIKNGFAEKRDEMNQVWEETFDYFKKIIQNSADYIAYLNSENMEEQMMSEAFLVYKEKFTTYLRDFIVALQKTSMQIEKLLEDLQEEEVRQFVHHVVDYQMTIPRWEDLSLSREQMVEERMETWRSLKEWFLGRNGHDSELAFLQKQTNEAIRRITRVVQRLGERHHHFRSRKKDYLYLAQWFSKLDSLEDAHKLSSVVFGCFHTKHVVTDNDATEDMYRDIWEEAPSEWTVKPRVRHYQEKKKPQAIVDNENKKKQTMVEFLQQKQREEEELKQLVQDGKIILRELPVVAPHVRKTLLSWIAKAMAREDRVVKTEIGWKVKIVKKDDSFIELHAEDGTMIMPNYEIHFLEDRED

SEQ ID NO: 38621 - protein, 388 aa, Geobacillus sp. WCH70
MERDFDEKAKIALKVLLENFWITRERDPELFQLIRERENIVKRYVQEKFGYRLIVHRYFAKLEKIPAEPEAWMGIESFQEPLDYALFCCLMAYLEGKEVEEKFLLSDVCEEIKAMYPGEVPLDWTNYQQRRALIRVLKTAEELGVVKRVDGEIEGFAQREDHEALYEVPVLSRYFMRSYPKDLTQYKTMEELLEEEWKTAPQDYRRHRIYRQLFLSPVVYRQQKDDPDFYYLRNFRHRLREDIEAHSDFRYELYKNAALLTLPERENVYTLFPNQKGTSDIILHFASIVREHLLDYPPDEYGKIRMTQADFQRLLTICKERYGEGWGKTYRDMTPAQLTSVLLEELKQWKMADVEKETGMIMLYPLLGRIVGHYPPDFMKKGMDDDDE

SEQ ID NO: 38622 - protein, 1376 aa, Geobacillus sp. WCH70
MTNKWVLHRAGLLNFWYYDEEYFHFADGRLFLRGSNGSGKSVTMQSLIPVLLDGKKTPDRLDPFGSRARRMEDYLLGEKELVDRDERTGYLFLEYKRKHSDHYITTGIGLRAKRQKGMDFWGFVIFDNRRIGKDITLYKKEKTGEKIPLTKRELITVLGDGGTVVDTQKEYMELVNKYIFRFESLEAFQELIELLIQLRSPKLSKDFKPTVIYEILESSLPALTDDELRHLSETIENMDQAKQQLEQLERDEASLRRLCQHYQQYNEYMIWEKANEWLKAAKQEEKLTEEREQCLRDQERYAARKEELATEIQGLQNEQAVLRKRELDLASHEVFRAEEKYRETKQRLANVQDQIMKKERYLDDKQQQERKLKQEIAKSEDVLHQSAQTIDEQLEELRYAALESAFASHELNEEDFQRHRNEPFDFTLWRKEAEAYEKRLEEILSLWTRHDDLKRRYEDAYHELGEQQRLLDNLHNDAKKWHELLEMEKSRLQEAVFAWKEAHPDIPIDEETIQSFLRYLNELYERYHFEDVKKPFADRYYEALDQKKAEKVRWEHEIELVKREIAETEEELRRWKEQKDPELEHDEQTAQARAALQARGVAYVPFYASVEFYDHVPESLRERIESSLYHAGLLDALVTETDVSIVHDRILKPNPVEMAHTLAEYLRPDVDEDLGVSAERIESVLRSILISDEAQEGRFAMDESGHYSFGLLQGHAPKREQAIFIGRNARKRWRLSQIAQIEEKLQQLDELLQQKKEQLARVEATIASIHEAFQTFPSDRDVRAAFDEWDRTKRAIISKQQEVERKSEKLNSIARDWQQVKQTLREKAEGLDLEFTKERYEEARRWMKLYTGHLTELVLEHRSFLHQLQVSRYHQDQLETVQAEIDEAKGEINILASEQQRLLLEIQHMEQMLKQMGADDIRAEISRVRDRLEWVNKALPEKINEQAHIEQTIKSTHRQLEDLERKLQFASTLAAVWKRSFIAEVERGLVEVAENVDPHEQAKDVVRRYGSIGKEQTRSSVIAKLNSVFFQESANLVEYRLSQEPVALEEENPFAGIDLDEEMELKVSDWKEKRDRIILLLDYKGQRVTPFYLLKEMEKDILLQREYINEQDRELYEDIILKTVGRILRSRIQRAERWVKDMNALMQQRDASSGLLLSIQWKPKTAETEEEMDTKELVELLRMNSRLLKEEDLQRVTMHFRSKINRAREMLEEKGQGNTLHQVIKEVLDYRKWFTFTLYYQKTNEPKRELTNQRFYQFSGGEKAMAMYIPLFAAAYARYQEASEEAPYIISLDEAFAGVDENNIRDMFDLVESLGFNYIMNSQALWGDYDTVPSLSICELVRPKNASHVTVIRYYWNGTMKRLVTDWDEQEMVVKQ

SEQ ID NO: 38623 - protein, 425 aa, Geobacillus sp. WCH70
MKSLPEPAAEAAQFFRGEAGFRRLFCEMKKKYESLGRIGGTISLTNFTKEEKEAIAAFFGKEMARVSLQAFAKQLDKTRFAGISLEELLVHYFGEPLVANKERREAEQQEKAAFFQRLIAAYPSGAEWLTAALEHPNEYRLLHQAYAQQRDELYASICAVCEALRQLPKQGTYERLPLFAQKVTGDPHAFDLHTFQGKLLLSALEFYSRKKYQLSSVEEVNELLQSFGILREDILNFVTCAGILAETKEGIHPVFSAACETNMALNVPLREIVALTRAYPAKGNAVFVVENAGVFSELLDEAMPLVSTNGQLNLATLLLLDLLVESGARLYYSGDFDPEGLKMADRLAGRYGENLSLWHFTCEDYFASMPSVSLSEERLAKLQSISSPKLQPVKQEIERCKKAGYQEAILPVLRKDIEKEKAELS

SEQ ID NO: 38624 - protein, 500 aa, Paenibacillus sp. JDR-2
MSFVLNSVKEATYLSVTKAERYRPICYVFYQKYRQEYNSYMFLDDVYRELITSEQFGPHFKDYSEKELEEDLKALVRWNNLIVHQDESHAQRIEDFYKRKNYYEVTQYTISLERTLEEMQHNLQAIRGGSFERVLTDHILEDLTKLRKWSPSNNGTLGDIRNIWRDLMSRFESLRNGTADFLSHVNSEPYERLVRTESFLPYKEKFVRLLSDFVVGIMEKKDLIEERLGFIDESEIEHIISVIVSYEAEQQIDETFEAELASDRRRAEWLGFRGWFVEINGRKASSRFLIEQTRGTIQKIVRIADQISDKFNYFKSRKNDYLELARIFANTSDLRDCHVIAGAMFGASTAKHFLVPRKSEDDTTKHVWECDPFEVSLNKKTPGNRSGRTKVPVYEDPLAQMLLVQEHVEKTRMIREQFNSLIKEGKITLDEIGVVYPEVRDLLLELLGQAMITKSLKSRTEDGRRFYVKLRSSKRIRLRSTDGTLTMNDYEFVFMEDQNG

SEQ ID NO: 38625 - protein, 380 aa, Paenibacillus sp. JDR-2
MDKDRLVLQECIEALFHYHWIHRDTQADLYFQILARKADIAEIVREYFGYRLLLRNEFIKLEKIPVTSKSFMGVGDFTTSLHYMFFCCFLAFLEDNGEDQQFTLQNACDAIRMYYPEEAVPFAWEERSHRRAFADVLHHCVKLRLVYVVDREIDGFRDNERHDVLLQTTPYFRHFALLYFFDLSKIQNLRQLEEHISKEIVHITTTRQRLLRRLFLESVVYDDELSAEEAKLLEDWEEFEKVNAMISELFEYWHLERYHRTTMLTHAESRYGDYYPKDDQISNAAVQYATLIWDKVNGQEVALDHKGHVLCSKYEAIVWFQEIKDLHGHGWTKSFTERSLTVIWEEVIGFMSDFHMADALADDQVVFYSAAGRVTGEYVS

SEQ ID NO: 38626 - protein, 1367 aa, Paenibacillus sp. JDR-2
MSSFHLNRFGLINFWYHGDTVFEFSNGRLFVRGANGSGKSVSTTMAVPLLLDGDKRPSRLDPFGSQDRRMIDLLLGNKHVSKREEGTGYLYMEYRKGNNFMTVGIGLNGKRRESDNTMRTWYFILRNKRIGYDIELYDEKIINGEPKKFPLTMGDLADRIGRDGEVTDSQQRYVELVNQEIYGFRTTQEFKELIGVLLQLRSPKLSNAVKASEVSNVLADALPELSQHELLPLSSSLESMDSLQEKKNRLEKELGFLTKLVEAYNVYNQLSLYEKAKHLLFSEKRFNESMKRIKDCKAAEVEVSAAKTELERKQEEQINIKETMQKKIASLQGHPIFTLEQELGQVRQTLRDSGEKLQGKTEAIEKNENQQRQVEDRIKQIEGNKYKAVQSREEALSELDSLADESCFSPHGTLRNHFKSCLESFSDAAFKNWQETLQEYRSKVQKIADQLLSLKSRLEHEDQMQRNVATEEERANQIEVEIGILVKEISVCSTSVEHTVAEWAESAQQFQIQPAELLEVKEILQGIGDLLDDVSPAAVTEWLSSLYDKRFRALQEQHANLAASIRLILEQIEETERKAEALSAQKEMEPALTASEAGEMERLRIQNVRVAYFYETFEFLEHIQPIVKEAIEDAITRAGLLTALVVPESDRSMVAASMAVVQVGSYKRENLLTYVRPTPTNGLTEEDINTVLQTISIVPHEEGYVLENGEFRSGMVGGLAPQYEDKYIGKSAREQIRLRKLKELQSQCDELTHQKDSLESEQLSIEKQQHLLVIEREVFPSLKGLEESLRRHETKRHECATQLSVVERLQDALRVYRNETQVLRNALYYATQQLELPLKLASYQKALSDLTLYKDTLVDLRMAHNAWLAANQSLSDLASEKERLTGDYDYLTEEKTDLERDIAKNKSYETMFLERIQDLGDTDVKQEIEAARNTAQSADGWLESYRKQINEAEIKIRGLIETQTKEKPVMEERLRLLNGWMKLYQEELSLGFVCPPRSASETVMALEESCKGLSFDVVLSALKEAEGYAQHELVDYNLKPSRRTISLEIQTEDMENPSWQILVQNCSRQFLVFSPQHVENTPLEVHRDVNDQLERISGHIREEEQKLFEKVLIDVVGTTIHEKVRAAKRWEQDANVMLRRVTGTIQMRLEWIPLTSKEEDQISTTELLSYLSKESIYLTPSQKEKVRQHFMSKINEARKKYKDDASFSMFEEMKKALDYRKWFRFDMFITRKGIPEERFTNKVFGELSGGEKAMSIYSPLFAAIAAKYSYAAPDAPRVISLDEAFAGIDNENIAQMFQLVHDFEFDYIMNSQVLWGCYETVDELSIAQILRPVDSPVLAVARYYWDGKEKHLLSLEQLIEERSRNAG

SEQ ID NO: 38627 - protein, 476 aa, Paenibacillus sp. JDR-2
MQDNRQLVEIFRQSGGFGRLFDLYRKKFESYGAFGTVPMRPTEEEEKALRGFLGIRYKGPRFPAADFEKAAIEAGYSVSLLELLELYYGHQLSTKRQQKESKLFAWANLFIQVELDFITRFNISNTELEIFIQKTFNFFQRLKEGDAKGYRVLRTVFDRDINVYPELLTCLSALWHLLMRKDEMFKKCGISTGKIRLPMFAAYVTEDSHAFDKKNAKGRLLWSALNDINSQSLNQSGNIDNHKTVIPEYLFERQIYRNFDVLDDDLSSISHVFVPHLVKGTSPRTLNLREIEEMQQLPKYSSIYIIENPSVISYLVDETIHFLNLNEFSLKQLPPDFPVLLCTIGQARTASKVFIEKCIEANPSCIIYYSGDLDVPGIQMLNNMKEQFSAEFYAWRMETSIYRNHVATKSKSLSDADLKILQELEGGLAKEMIQIKAKVYQELFGKELRSDWIKEVSSEISKNQVDNEQKERWKYS

SEQ ID NO: 38628 - protein, 540 aa, Catenulispora acidiphila DSM 44928
MADVTDAPAPQPFAYLGTPNAPLYTGILDVFALAKQRFTVHLRPEDVLADWPGARAGDRADAVRPAAEHLVQALDRLVEWGNLRSDADTGRVTTVEDFNRARRIYQLTRHGQAALAAIEHYEQTLGQRGRLQTVALADIAEQLSALAVHAEAAEAPDQATVGLLLFALTERFTGLADNAEAFMSSLRRTVDFSDGDGDEEAFLAYKDRLIEYIDKFIADLANRGAQIAGLIERIETAGIARILDAAACREAVDALPDVDRADVADAPDVYTAAVQAVTRDWENRWRGLREWFVSSGSRRPSQARLLRNAAVSGITNLVNTVAALNERRGGRSDRSADLRALARFFAQAPDDAAAHRLWRAAFALSPARHLTVDADTEDAWEQAEYPPGTPWAAAASLQISPRLRETGSYERRGAPNRAVDREAGRRQLAERAEREAAEIAEARRLLATDGPVLLSELAGDAGLDPRAFRLFLSVLGDALAARRPGIATTTATSGDGTMEIRLKLVDAGQIVTIPTEDGVLSGPEHVVEIIDLTARPAAVR

SEQ ID NO: 38629 - protein, 427 aa, Catenulispora acidiphila DSM 44928
MSAVDTAAGQPDPAAFGHTVSDETVTGQTSPHQPSDHHVERRRAARALLASPLLTARDDDFRLVRKHAAELAGWFADQAGWRLTVDAETARLFKKPAALDDATRPAHAPKSKVPFTRRRYVLLCLALAVLERSESQTTLGRLAEGVLTGAADPALTEAGITFAMERREERADLVAVVRLLLAWGVLTRVQGDEDAFVADSGNDVLYDLDRRVTGGLLATSRSASTVTATAFEQRLTTLAAEPIPDTDDLRLRSLRHAMTRRLLDDPVVYYADLTEPERAYLAGQRVAITRRITDLTGLIPEMRAEGIAMVDPDDALTDVRMPEQGTDGHVTLLIATKLATDGMAPTVPELIRFVQAQARLHVSYWRKTAAEPAAAADLAEQAVAKLEALNLVIRVPDDHGDVRIHPRSALMRFTMTDPTIKKAGARA

SEQ ID NO: 38630 - protein, 1406 aa, Catenulispora acidiphila DSM 44928
MTTMTADPTDLPCPSRDRWQPLRAGLVDVFYYDAEEFRFYDGRLLLRGNNGTGKSKVLALTLPFLLDGELTPSRVEPDGDRAKRMEWNLLLGGKHPNDERLGYTWLEFGRLDENGVPQYRTVGCGLKAVKGRGIADHWFFVTDERVGPGLPLRNEHRVSYSRKALEEKIGAHAVFTTAKAYRRAVDEALFGLGAERYEALVNLLIQLRQPQLSKKPDEKLLSKALTEALPPLADGLVGEIAEAFRGLQDERDALAALIEAHGAANAFLAHYRRYAQVAAKRIAAGVRQSHSRYEQLGRDLGAATAAREQAHAAFTTAEGELTELDERQTLLTAQKDAYNRDPAMGTAREIDRLAKAAETLAAVARTRAEDRHRAVRDADSWMHRSEQARQRAQSDAADVDGRHREADAAGQAAGIDHGTLRSVIAAASAQADPPAPPIPSREASEDSIAAVEAAVAVARRSSDALIRDRQQAISGLRNLHQASETAARALAAARAAAERAAQRATASAEHAAASSGAVAARGESLVAAWESWNSHCVETVLPDRDAAGSELELWVRTLDGPNPFARRAEEAGRVHAAHLNRRVADVDGRRTRAEAERSALAAEIARLEQGGHNAPPAPRTRAADARSDRPGAPLWKVVDYQDHVTAADRAGLEAALEASGLLDAWLAPDGRLLDDVTGDVVLAPTAAAPDVGLAAVLRPAIDTADPQAAALEETAVAAVLAAIGGVPVGAAEPGHHTWISPDGRFRVGVLRGAWRKESAHYIGERARETARRARLAELAGQTARLAAEIAALTGEARTVTARLDALAAELREQPSDAALREANTLAAAHADAAREAVAARDEALAAVEPAAEAAAEAVAATLTFAEDTRLPAEAAALEAVAEALADYRHSLSGLWPAVTAAARAAAEAAMAEHERRVATARLAEADEAGLAARHDAEAAAEEHRALVATSGAAVEELYRRLEAVRVELAAASAAATAVRARREQALKDRERAEGRRLQLESDIAEVAGLRDEAITVLRRFTATGLLAAALPDLEHPDPAEAWVPAPAVTLARAIDAALAAVDEADGAWERVQARVVREQQELSGALARHGHQVGMTLQDGLMVVDVLFAGRTQDIPALTSALDAEVAQRTRLLSAKERELLENHLVGEVAGALQELITEAEATVQAMNDDLEARPTSTGMALRLVWRTAKGAPEGLEAIRTRLLRKAVDAWSPADRAAVGDFLARRITDDRAANPADTWHDQLTRAFDYRAWHEFGIQRRTDGAWTSASGPASGGERVLAASVPLFAAASSHYSSGHPHAPRLIALDEAFAGVDDDSRAKCLGLLAAFDLDVVMTSEREWACYPTVPGIGIAQLARAEGVDAVLVTPWRWDGRDRLRLTRPEPYLPPQRARDTPVPTDFEPSLFDD

SEQ ID NO: 38631 - protein, 436 aa, Catenulispora acidiphila DSM 44928
MAGPDVPTDRVDHNRLRRLLGAPELAWLVDRVVERLAAGTTAADGAVALTDPSPEQRRAVERLLGRPPGRGRTLTIRLGDVEAVLRDAEISPDGLAAAVTALRGPIPVRHETAAAERTAWDSAHEPLEHLVAVRPDLAPWLRHVRATGLLKRHAPTSGTALDLAGQAARVLAALPHPGTVRPILAAGAVGDAHALDDGRPLTALVLSAIRSLSGLAAADTTHAEGRRAAWAGVGVATDHLSSRVLVLNVPPPPGDDSTLSRLLRLMATDGEPVTLTLRQLRALPAGHADLAGQTVSVCENPAVISAAADALGAACPPLLCLEGTPSVAAISLLRWILGRGARVRYHGDFDSGGIRIAVQVFALAARAGVPAVPWRYDSAAYLDAVALGLGSPLSAPVSPDAPWDPDLRHHLETNAVRVEEEHVVDMLLGDLACGDC

SEQ ID NO: 38632 - protein, 529 aa, Catenulispora acidiphila DSM 44928
MPEPDNSAQSSVQAAAFGLDALAVGDRFKLFNFTRRGDHYLWILRAMDRLREVRVPQAHSDDVARALVELSVDYPDAPRTVDNLRACLDQLADENEDRVLHRLEDAARTGSLAGYRNRQSVYQFSDLGYSAYLAVEAVLGARFEDANLSRLIVSDILRDLNDLAKANREGNGPEVARRLRSLDAAVEDMARRSARFHLALGEIMRSSDASPEKFLEFKRALLVHMNDFMAELDRYLPRLSEAVAAVEATGIATLLNRAAEADDRPFMRIDALIEDWRRRWFAARAWFAPDEAGRVPRTEQLREVTGTAVSSVLALLRQITETQRRGVNRGTELRHLAAWVFDCPDDQAAHALMAAAFNVRSARHLGGVHEDEELIPDASTWWQAPGVEVSVSLFRKGRAPKASPPQKVAERNAVRAALREKQRADRAAERAATERLVAEGPHDIALDEEQVGVLLKLLTRALESRTVVAGRLVGSSCATDVAVLRLSPSPTGSTVRTPTGTLYLAGFQVEIKPARDGRILGANVTEGSV

SEQ ID NO: 38633 - protein, 465 aa, Catenulispora acidiphila DSM 44928
MAEHLAAAGVIPSDLGSFQHAVRLVLTNDLITADRPRSGSLDVVLRWADRISVDMQELFAYTLIATARQVRLVRRNDVLDPTQHLIFTSRSGRQFDRRRLAYLCLVLAGFQRSRIEVSLVDIVKAVTPLANAQPSLGFEPTITEHRRAVVDVLDWLTDRGALRLSDGSLDAWAGGDREGDALYDIDHDVCGALFRPPAALQHVASAAQLMEGADGPNKSARREAATRRARRLLIEQPVVYFERCESAVAAALRSPDLAENLARLTGLVVERRAEGVMLADPSGRFTDRIFPLKGGAVNRTAGLILGAIANLLEDPNEARRLPRLPVPTLTEETADLVTRIDSARPLRDDDRPGRPQASVTDAEPNQLGLNAPFLSTAQVATIVDELYVEFGASSFTAIWQGDPTGLARAATRFLADLGLVHEIPGGLLVLPAAARYRNIQGVLPQPAPDGLFPLDFTENKDGTDG

SEQ ID NO: 38634 - protein, 1425 aa, Catenulispora acidiphila DSM 44928
MTAAIATETGQTGPRLKPTRAGIINLWDYLDEEFVFADGRLVLRGHNGSGKTKALEVLFPFVLDGSLDAKRLDPFSGQNRTMKSNLLYRGQDSEHGYVWMEFARTLGGVAETVTLVIGLVQHKDKDRPQTSFYVTDKRLGVDFGLLGADSRPLTRKQLTGRLGRANRLDSKAEYQDAVDAQLFGLGRERYSQLLDLLISLRRPLLAKDLDPAKVSATLSAGLSPVDEALVDQAARDFDNLKAVQDEYAKLAAADKAVGEFVGEYRTYLRRYVRRQVDLTRDRMAKAAAAVDTVSEATTAELAARNAQDTAKLASEEAKNQVIVLEGRLGALKGKFEGYKDLIREAEQLAKEAKRLDIDEQRIGRAQLDLEQLRQEAEDVQEAVDEELDAAERFGADLAAAARRAFPDTGDSIDDGDDLELSAKALIAARTTEVREVRTLIAGVESAGRVRETAQENAETAQTEVEQAEAQLAAAGVAAEAERDAVRALLTTWAADWSGDDEHVVFGADDNLVLAEAVAELDMTAGNLIAEAYDRLTGDRRTAAVTSVVIASNAVTAIETTITTVTAERDAIAAQQDEAPAASDLRLAERAGRPGAPLWELVRFADHVDDDTAAGIEGALYGAGLLTAWIHPDAALTAQALLDHEADGYLTEGTYPGPGVRTALDVLVPEDHPVVATDRISSILAGIALVDEMNGSDSPRHTAVTARGGFAVGTLTGSRPKATPEFIGATNRTRRREQRLAELIEQLTQLDEQLATARSKLTAAEEFVRDFTRARDALPTTKRLTDLFSKVQTAASLVTAAKNQLSKAEHQLNKAISAVATAERELRRAAAQRSLPTTTELLDAVSQAVEDVSGAVTKLVSARTNARTLEGQLAERTQRNIRRQQEIEGELEELQIARSEHLTQTGEYEARRAVEGVGFEQVQSELADVGQRLTEAKSRRREAEASAQTAHDECITAAATQQHARSQAGEAFSELIVRLSEFEAAANPDLRPLLGVAENSLWPASPTADELSKALLSPQAGGSEPTAGLDRLRTVLQNACIALLDAYHLALPGGRVGEAAVATAAERVWESFRDLELALKSGEDGYQAEISPHAPFAVHIDSGDGRAPVGSAAKKIAEDLEAQAVLLEDRERAVLEDALLTGIARQIHDRVRRARDLVRAMDADTKSKPMSSGTKIGIGWLRSEKADEHQIAASEILKSDPLGPDDNVQLRTLIRTMLRNHLDRHPRDTYREALAVVLDYRTWYSFQLTLFRPGGPKDGEKLTSKKHSEMSGGEKSAAIHLPLFAAANALYTSSHRPSPRMIALDEAFSGIDGNFTPELLELTVKFDLDLFMTGHDLWVSDAAVPMASHYDMHHDEASHTVSSLMLIWDGQQIIDAGAGFAGNHELEAEILGFRPTRHVQPDSGGDGLAFDDSTDADDDEDGDDES

SEQ ID NO: 38635 - protein, 408 aa, Catenulispora acidiphila DSM 44928
MTGLDRYHNPEYRRLWKAARGSLERSGGVLTGSVSIVSPSEDERAAVIGLTRSHRSANSARVTVRMTELDEAVRRTTRLSLAEALTILGGPLRNKPAERDTDLAAREAVLAKMRSSPLHDQHEWFSQWAAELESGGALAKAIRQNGTHRILDAVRVLEHIEERAGTATIVLLPELADKITSDTKALNRGTPTATLVLKALARRAQLPLPTDAEGIRELWESADVVVDDLASRVLVLNLPAAGPGLGEWLTGAAAYGTPFQVTLNQLSRHLVRTDVVEVFVCENPAVLRRASEALGPKSRPLICTEGRPSAAFHRLAQIIRDGGGRLRYHGDFDWPGVSIARQVIERHQAAAWHFGASDYRMAVDGGERLPLKGAAQPTPWDDRLSLAMQSLGCAVYEESVSDVLLRDL

SEQ ID NO: 38636 - protein, 513 aa, Alicyclobacillus acidocaldarius subsp. acidocaldarius DSM 446
MRQGYSTGVRLSGGELLPNIGPEHLKPLSEFKYLHAENVSRYRLIMRIFYENHMKLRYWLRPLDVHGAVLETGLIQGYTIEQCEQDLQMLHEWGNLECQQDKAKSTSIEEFKKKRFRYQMTAVAVEIERLLDALEQVQGYGGELDAGPLEIIARLLRDIYHRAGEMRPAEDFALWKELQDRFRRLHENAVDYYAQISSTKAEALMQTAAFLTFKEDLRRYLQRFALGLQQFGAQIEGMLRALSPAAVEGFLSSVTQGEMEVPNLEDRRGFDERMAAHREEWASLAAWFMGSDGDESEVVKLERATKEAIGRVVRQALALQEQARAGVSRRRDLSYLARWFMRLQSIEEAHRLGAAVFGLYAPRHFQGEPPRSTDSADCSMWEEAPILRALSPKTRGPRQRLAVSPVKDRATQKAKAMEAWRQAQASARDIERRWLREGTFAIADFDELTVEDRGLLLQWVSRALSKADRRFRDPEGYQIRVEVPQNGERHRISFPDGVMEMPNFRFHIRREGR

SEQ ID NO: 38637 - protein, 414 aa, Alicyclobacillus acidocaldarius subsp. acidocaldarius DSM 446
MRRGRLRDERAELQEAARILLSRPWITKENHPDEYRLIHRHQDALRNWFQRMAGWALVVTSEIAKLEKQPAVHQPWMRIDEFLYPRDYALFAYALWFLEGLQREEQFLLSDLIDAIGEEALRNGDHLDWTSYDHRLSMVRALKKLRDLGVLQAVDGEEMGWARDDSQNVLYEATRVSRYVMNRFPRDFASYQTIDDLYEADTFIGMDGSAEFESWATAHRRHRVIRRFLVEPVVYDADFSEEERRYVQTQRSFLVDRIEQATGLVGRRFREGLLFAWPEPTSDFELFPGDSTLSDVCLLVANALVQRIRAKYASIAPAHDGRYHMPLAELEAVVLELRELYALRWSKELREKGVAALTRDVLAVMSEWRLAAWEGADVWLLPALSRYIGAYDGDLDQEEGSNGGAIPAVPRGAV

SEQ ID NO: 38638 - protein, 1365 aa, Alicyclobacillus acidocaldarius subsp. acidocaldarius DSM 446
MAERYRLSRAGLFNFWLYDEEILEFDHGRLLLRGPNGAGKSVTMQSLLPLVLDGDKRPVRLDPFGSRDRKIEFYLLGDDQSGVQDRIGYLWMEFARGEGSQASHVTVGIGLRATRGRSSVQFWGFAITDGRRVGKDLVLYDETLYLKEGQKYPLDHAKLAEVLGPGGQVVRSQEEYQALVNRLLFGYRDIGAYEDLLNLMIQVRSPKLSKEFKPSTMYETLYSALPPVGEEELASLANMLEDLDEHAAHLEETVQHRTHAERLHRAYDRYNRVVLFQRARAAHEALKAEDEAQDNVRGAEKEFDDLARGLGELEREMCEVKADADRTEAELEALEHSEAMGIQRELDGIQRQVEFLSGEEARAREALREAEQDIERREEGLRQVEDRRAECERRMASRREALERLADAAEFAGHSVYARPEVDAVYPDDVFERWFADVDLHAERLHNAISLGQEELRARERMSDAERAMGEAAKRRDAEEANLRTAESRLEQEVEAQEDAIFRWYQGLSAIPATDDMWREALYALREYPATTYDDVMRSFRKAHEEALLEAVQREHELRAAVEHRAEEKRALEQELAEWRDRRDPEPPRSEARAASRRRRQSAGGVGAPLYMACEFRDGVDPRTQAALERALEAAGLIDAWISPSPPAVEPGEEEVWIAPRPALWGYTLADFLRPTVPEGSGLMAVDIEDALRTIVIGDEAEAGQAAVAPDGRYRIGPLAGHTDEKPQAEWIGYEARRRTKLARIEALEAAIAAAEAEIARLAADIEETRRHRTQLDEEMRAFPPEDPLRRARDDVDRARLRLEEAVLSLRRQTEAYQEARANWRDREEAWLAERSAWARLSRLEDFVEAREQLQRYRDGLHDLRRFHAEYTHLSREAAQLAEDIERDRARADAERRRSVELRQERDRLRMSAEALREQLRALGVIDLYERQRELRARREALRKRREELERRRHAFDEKIGMAKERLEQAQRALQAKEAEAECALEALAREWALGLVDGMAEDLRQPSGRQALSRLAHIVHRELRGPYGSEHEGSARHRLMEELQVVRNVLVDYAIEGTYDEALGRTIVRSVRDRNRPLTPFALWQELVRMEEEQRLYIEERERELYEEIFMRSVGRAIRDKINRAEAWVRQMNRFMSQRDTSNGFALSLEWRPRPAQDEGEMSAERLVALLRKSPELMLPQEMDDMIRHFRTRIDYARQEAESGGSFREWIYQLLDYRQWFEFRLYYRKAGMASRRELTDSQFNVLSGGEKAMAMYIPLFAAVDARLSDAREDAPRIICLDEAFAGVDDDNVRDMFALIVSLDYDFIMTSQQLWGCYDTVPSLSIVEVHRPQDADVVTLIRFRWNGQVRILIAPDEAKEAVRLP

SEQ ID NO: 38639 - protein, 430 aa, Alicyclobacillus acidocaldarius subsp. acidocaldarius DSM 446
MSDVNSAIRAALMKPGLARLWEAVRAKYQSLGRAGGTVVLLDATPEEQEAIGALLGINLFGETRIKVPLARLEAALLQSRFAITLGDALGALFGRVATRDDVRAERDRAERAFWAYLEEVAGDFRPWLEAMWEGRAPGRGLVAEWRRLFAETGRVPPLEAALGVLRALDPPPDPPVRLPILAARHLGDPHALDRTSPAGRALFAWLAWRYGGLDADEPDSAEIADGAAQDEGTSEAARAWYLRAGIRIDDVSPVVHVANWPGMSTSPMAFTLASLDGAPARRLPPRILVVENPAVFAELAERSPAPVVCSYGWPNAAVLRLLDLVTSAGSDLWYSGDFDLGGLRIGRSLWRRYGPRFVPWRFDRAMYDSFAQFGRVSLSEEERTHLTRLQEALWDSDLAVSMQAFGVKVFQEQFVDTLVEDAICMEMARP

SEQ ID NO: 38640 - protein, 517 aa, Nakamurella multipartita DSM 44233
MSEPDAIPATFNPGFTDSERLRLFAFTTAEKSISYLWVLRAMERSRANYVVLQHAAEVSASLASLAQDHPSGAVPALAPDEVNPLLDQLYGWQVLDRSYDGARAATLAEYRNRHYVYQFNQAGYRAYRAVEDVLGARLDDATLSRLVLPELLTDLLDLAAANRAGDADLVYRKLNRLDSVLGEMAERAARFYLMLSDLSKSTDSSAELFLTHKDALIAHLREFSTELARFAPRLTAAVQAVRDSGVDRLVELAAEADERIFRSPADRLQDWRQRWDGLVHWFVAVPGETHRSEADRLQDATISAVAAVLALLRRVTEARLGGVNRESQLRHLAAWFAATTDLPSAHALFVAAFDLSRPRHVSVVHPDPELIPTRRTWWEADPVELSRTLVESGKQGSPGPPARLDRNEAGRRRLRATQLADRSARTGAAGSLTSSPLAGRILSEPETALLFSLLDVALGARVPVSGRVPATGSTLGVRLTLVPQEQSTAVETVRGVLRLDRMALTVSASGPDRVGSR

SEQ ID NO: 38641 - protein, 466 aa, Nakamurella multipartita DSM 44233
MNSPLDQPSGAAVTLLERAAYQRAARVLLTWPLITASYPNAEALPLVRRWAVPLRTELADLFGYRLELTSTTARLSRVRDAFDASQPALAGAQLDRPFDRRRYAYLCLALAVLGRAGTQIALSELAERVAAEAERIDGLELSLDRHPDRSGFVDAAGWLEARGAIRLADGSARRWVDDPSVGEALYDIDRDVLRALYRPSPVLQHIGTARALLHRPQGVSRDTRRRESAQRVRRALVEQPVVYYADLDAADRGMLRAPGPTAEVAEMTGLSIERRSEGVALLDVSGMFSDRRFPGSGTRAQMALLLANRIADRVVDPDQAPLTELTADTARSERWVNSLDAALPRANLVAQLAEDGDDREPDGVESDDNDDENDHAAPTAYPFLEDGWLRAAVGDLIGTYGTALSAAFVADPDRLLQTALELLAELEMVIRVPGGVLARPLLARYRNAVVTVRPTDRPAGLFDLED

SEQ ID NO: 38642 - protein, 1409 aa, Nakamurella multipartita DSM 44233
MTDSGATEPRTDRFRPTRCGVVNLWDYRDDEFVFADGRLVLRGPNGSGKTKALEVLFPFVLDGRIEPRRLNPFAGDERTMKANLLYRGQEAAYGYVWMEFRRAGNPAGEVVTIGAGLRAQRHHERVSRWYFVVDGQVGVDFSLIGEDDRPLTKRQLEAEVDHLPATMAERPLAHRTAVDARLFGLGIGRYEQMLTLLLTLRRPQLAKNLDPKGLSRALADGLRPLDEHLVDEAAHSFSDMENVQRTLSGLVQADAAAAAFLVGYTTYLRTHARAEADRLTVRLEAIDAARVSLTAALAARDRAAAARDAAQQHLSATRDRLQEATSRLDSLKASSAYRDREQLNRLADATADLGRAANRDAQARDQAEADSAQRERTRAGTAAAYEDALSAVSRRAAELSEAARDAGIDWDTNDQVDDEHLDQRVAARITAREDDVAAVRVAMAGVAEAARERDLAQRRLDRAQERLEAVESALMAAQAAVVAERDRVQLVLADWISSRGPLLDSLAGAPRLADTVHAALVDSVDRAGESGSTPLSAVLDAQIADARQTRRDEVRRLGDTLNLLGDQLAAIRADRTRVAEEQDQAPPAFAARTGRRDGRVGAPLWALIDFAPGIDDDTAAAVEAALEAANLLDAWIGPDGSADPGESDAVLLPLPAEQRPRVSPLGTLLVAETDGALGISTIEAVLASIAVGEPSGSGPGAAPTIDRLGRFRQGLQLGAHRKAHAEYIGATARSRRRAQRLAALDRQIADVLAQVDATGAAIGALQAMLDAVDQARSALPTTGPLTTAIRRVERESAAARAVHGEVDNARSDLDQAIAAHHHRHHALLGLAAARSMPAEPDLVDGIAAAVALFGRAGAELGGARTTATERRRARDTAVEELIRARDRLAEAAEQAELSRTGHRAREEELRTLRAAVGVAVDELDGQIDRATAEHRDARTAERVAEQAHGDARDAAGERRGAAQGAVDSLANAVVEAQRDCLRLRPYCRPDVADVLRLSTTPAWPTAREQWPDPTALVATATDALPADADHIIDALPAAVTTLLREVLAATGDLRPNESSLKSSRTRVAASLTLLQDQLASAGHDFRPDWEPVEDVIVVKVSDEQGYTSIGDFARRIAAARREQEALLSESEQRILEDALLGRLAQQIHERTTEARDLVAEMNREMRGRRMSSGATVGISWAQADNLDPAQREVARLLEREASALSVDELAIMRAHFAGRIKDLRAQREDRPYPDILAEALDYRGWRTFVLTLVGPDGQEDRLTQARHSTLSGGEQSVSLHLPLFAAAHVMLSSAEPHCPRLLALDEAFAGIDDAGRSELLGLTTQFDLDLFMTGYDLWATYPTVPGCAHHDLAHSALEHAVSSLLLVWDGSEILSDAGITEAGDDLAAALGSPGSRRRPSDGSGLLGPD

SEQ ID NO: 38643 - protein, 419 aa, Nakamurella multipartita DSM 44233
MSAPSPEPVVALREPPWPRILRLARARLERTGGALTGSLTVKDPTEAERKLVIGLTGSHRPPGVRSVRLPLAALDAALHRAFALSLTDAVIAVDGPLRDRPAERDQDAAARQTAVRQARERAGRLLDQPWFEPWLDDLIADGTVTRLVHRGDAGHLAQAVDVLALLPATGVALPVLAERATGHTKALSGSPVAGLVLRALARAHGVDAPTTAAQRRARWQAAGVIVDDLASQVLVLGVRPLEHHAVASWLHGAAELGIPFRLTLHQLTAAPVTLTAPRVFVCENPAVLRAAVGEWSPAHPPLICSEGVPSAACHRLVAGATGVVHWRGDFDWTGLRTTAEAITRYRARPWRMSSDDYQRGLAATGLPTEPLRGAPAASPWDPALESLMATTGRAVMEERMVDILLADLAECGREKPLSG

SEQ ID NO: 38644 - protein, 505 aa, Thermomonospora curvata DSM 43183
MKGQGPRPFAHLDSPSAPLYRRVMRAFMDNKRRFVVHLRPEDVVEALRQDGGPPVSAEAIGDALARLAEWGNLRADPDTGRVTTVEDFYRARYLYQLSREGEAAERALEVYEKEIGRRGELQAVALEDLRVRLRSLRELAERSDPDPAIVHSLLLEISGRLDSLAANASAFMGSLQRTIDLQDIDEEAFLAYKDRLITYLERFVSELVVKAHDIAATLRELTDVTALLRLAAEREAADVAPGADDDPSADPAADKLRQWQERWTGLRSWFLGDRAHPSQAALLRQRTRQAILDLLAAVGVLVERRAGRSDRSADFRELARWFAQAPTEEDAHRLWRAAFGLSPARHHTAPSDAESVPAATRWADAPPVEIAPRLRATGHYQRRGRAARVRDRSIEKAYLARQLAAERAQAEAARRRLATGRPVLLSELGALDREEFGLFLRLLGEALSAGPPGADGVIRTQTADGALELVLRPVGGGRTAAIATEDGTMYGPDHELTIINRAAAS

SEQ ID NO: 38645 - protein, 398 aa, Thermomonospora curvata DSM 43183
MTVLADVLDSQQEEERQRAARALLRHPLLTPARPDPALFALVRRHAAWLADWFAREAGWSLQMDSGVARLRKTPAGHDDGTRGAAVKTRFSRRRYVLTCLALAVLERAESQITLGRLAERILRLATDPQLTEAGVTFTLESAEERSDLVTVARLLLEIGVLAQVAGDEQAFVAGSGDALYDVDRRVLSALLIARRGPSTVAGAGFADRLRAITEDVQPDTEDGRNRVLRHAVTRRLLDDPVVYYADLTEEERTYLDRQRGPLLRRIQQATGLVPEVRAEGIALVDPTGEATDLAMPEEGTDGHATLLVAEYLAAAPAEGRPVPLDELHRHLAAMAQRHRTHWRKTAAEPGAERELTARALHRLTALGLVRMSGEQVTALPAIARYRYAEPTIVGKKDA

SEQ ID NO: 38646 - protein, 1366 aa, Thermomonospora curvata DSM 43183
MTSPLPEAERRRWQPLRCGLVDLFYYDYQEFWFRDGRMLLRGNNGTGKSKVLALTLPFLLDGELTASRVEPDGDRGKKMEWNLLLGGRYDERLGYTWLEFGRRTEEGRREYFTIGCGMKAVTGRGIADRWFFTTSQRIGRDLFLIGPNDTTLPFERLAEEIGTHGQVTRKAEQYRRTIDERLFHLGADRYQALISLLLQLRQPQLSKKPDEEKLSQALSQALPPVDQAVISDVAAAFHELEQQREELAGLRDARTHLSHFLKPYRRYAAAAARRQAGKVRRAASEHEEVGRGLAATRTEAEQARRREEELQTQVEAAKRELEEQKAVRDELTGDPRLRDLNEAEQRAEQAEQAAERARRHAETAARQYGKLQRRHQTATRAAAQTRVEVQEAGELLTDAARSAGLEADDAQVRAALALPDGPPEEEIEPLLRRARRAAQTAAERRARAVAHVTVLAEQAEKQYERLVAARSALGEREHEHDIAADEVAQAHAAVSEAASALVAAWRSYAARVTELTVPHPEDVDLAWWAETLEGDNPAEGALRQAAAAAERELARQRAEAGAALQASREELERLTAEQDVLRRGEVQRPPVPLTRGEGVRDDRPGAPLWRVVDFHDDLAEAERAGLEAALQASGLLDAWITPEGRLLDPATHDTVLVAGKPVETGDLTGVLRPAIDPDDPQAAALSSDVVEAVLRSIGLAGPTHPDVWVAADGRWRLGPLHGAWSKPAAEFIGYAAREEARRRRLAELDLLIDREKQRITAATTAIEAVKQRQARLTAELQDRPSDQELRNAHSAWREARRALRRAAEKVEKQRQVVRAAEHAAAQAAQSRDEAAADVRVPTSLEELRKLAEAVKAYTPAVERLLGALWVHVKQVAELANWAEDLEEARQAHTTALEEVARAEREAAEAVLRRDTLRSSLQVTVEELNRRLTQTRTRIKELESHIPRAEEALREAAKQQAQAEARKALLEENLKKEAERRDEAVTEFQRFARTGLLEVALSDLKLPEQPWAPTTALRIARQTEQALQRDVPIDDESWRSLQDRTATGLQNLSAALTRHGHRVQAEHGDWLVVTVHFSGRDRSPVELLNLLEGAIAYQERILTARERELLEEHLVNEVASHLQELIGDAEAQVERMNAELEERPTSTGMRLRLRWEPRRDGPTGLAEARRRLLRQSGDLWSEEDRTAVSEFLQAQIEAVRSRNEQGTWHDHLREALDYRSWHRFFIDRRSDDRWRPASGPASGGERVLAVSLPLFAAASAHYRSAHPDAPRLVMLDEAFAGVDDDARRKCLGLLAAFDLDVVMTSEREWGFYSTVPGIATHHLVRRDGIDAVHVTTWEWDGSSRTMVERDYAARPPASVPSDEQALF

SEQ ID NO: 38647 - protein, 401 aa, Thermomonospora curvata DSM 43183
MDGQRLRRVLGDPALKRLVERLVQRLEHGRPLTGPVRLERPSEAERTAVARLLGRRPGRGSSLSVPLEALEEALRRAGLADDLRSAVEAVAGPVVPRAERQAAESARRRAALTRARRSRHAGEPWFQEWLEGIATDGTLTRLLGRGEDDLLGRAAAVLDLLPADTLPLPVLAERATGDTKALSRGPLAGLVLRALALRTALPVPRTRLAERELWETAGVVVDDLASQVLVLGLTATGSPLGEWLTGAAAARVPFRITLHQLITMPITVTSPAVWVCENPSVLRATVTVPTDAALICTEGIPSAACHRLLSHCAGRPVHWRGDFDWTGLRTTAMALDRYGAVPWRMSTADYNSALAAGDSEPLRGTPSSSPWDPSLATRMHETGRAVMEERLIPALLTDLTA

SEQ ID NO: 38648 - protein, 496 aa, Geobacillus sp. Y412MC61
MDATWLKPIVETKYLSTENAHRYRAILRYFYIQHERMRQYLFPEEVYTFLKQHEEFADYTEEELQQDLDQLVKWNNLIARQETAHVRTIEEFKKKRFRYQCSPYTVEIERMIRTLEQLGDSFGGSLEKTRFDRLYASLSRMETIIASDFQEQPDEMHQVWEETFDYFKKIIQNSADYIAYLHGENLEERMTSESFLVYKEQFTAYLRDFIVALQKTSMQIEQLLEDLPEEGVRQFIEHVVDYERLIPRFADALPPRAVQIEEKWETWRSLCEWFLGRDGRESELSFLQYQTNEAIRRLTRVVQRLGERHHHFRSRKGDYLHLARWFSRLESIEEAHCLSAVVFGCFHTKHLVADFGATDNIYRDVWDEPPAEWVTKPRVRHYGEKKKPQAIEDKEREKEEARLRYLEEKAREEAELKQLVTDGKIVLADLPEVTPYVRKTLLGWIAKAMGREGQAMKTENGWVVNVVNKEGTICLRAEDGELVMPNYEIHVLSGGE

SEQ ID NO: 38649 - protein, 398 aa, Geobacillus sp. Y412MC61
METTFDDKAKEALAALFEQFWIIRDKEPDLYQLVRECEHVLKRYVEEKFGYRLIVHRYFAKLEKIPAEPEPWMGIESFQEPLDYALFCCLMAYLEGKAVEEKFLLSDVCEEIRAMYPGDLPVDWTNYSHRRALIRVLKTAEQIGLVRRMDGEIEAFAQHVEEEALYEVPVLARYFMRTYPKDLLQYESIDELLAEEWKASPQDYRRHRLYRKLFLSPAVHRTEGDEQDFYYLRNFRHRLRDDIEAHTPFRYELYKNAAMLTLPERQAPYTVFPDQKGTSEIILHFAALVRERLGEYPPDEYGRIRLTPEQFSAWLADCRRRYGAGWGKTYRDMSAAELVREMLAALNEWRMADVEHDTGMIVLYPLLGRLCGRYPDDFDAKEGEEHGESMGASSRGAD

SEQ ID NO: 38650 - protein, 1353 aa, Geobacillus sp. Y412MC61
MANPWVLHRAGLINFWYYDEQYFHFADGKLLLRGSNGAGKSVTMQSLIPVLLDGKKTPDRLDPFGSRARRMEDYLLGEKDVVNRDERTGYLFLEYKRKESDQYVTTGIGLRAKRQKSLDFWGFVLFDNRRIGYDLQLYKQEKTGEKIPLTKRELAALLGPGGTVVETQKEYMELVNKHVFRFESLEAFQELIELLIQLRSPKLSKDFKPTVIYEILESSLPPLTDDELRHLSETIENMDQAKQQLEQLERDERALKRLCDQYRLYNEYMIAEKAAEYVKAVKQAEQLAAEQHRLHDEEEQARKALDELDESIIRLRREEDVLRSREIDLAGHEVFQQAEKYEQLKAERERLQERRERHEQTIAEKERLERQHRRRLDESEARLDDLERKLEDELAQLRADAEEGAFSLHETNEDDFHRHRQKQQEFSFAAWKQEADRHIERLEELARLWRRHDDVKRRYEEASNEAGERRREMDEWRHQQRKWEELFEQEKERFEQAVLAWVEQGGIDVSETDIQAFLQQMGSLYEQYSLDDLKRPFVQAYYDAVGKKKDEKWRLEHDIRLLEEKRAEREAELRQWREQRDPEPERDEQTTAARLALEQEGIPFVPFYAAVEFVDDVPEDVRERIESALSHAGLLDALIAARDVDVDCDRVLIPKPVHMAHTLADYLRPDADAPVSAERIDEVLRSIVITDAEQEGGMTIDETGRYSLGLVRGHAPRRARAMFIGRAARERWRLENIAALEAEIAALGQEIDRLRREHQAVEAAIRALADWFVSFPSDRDVRTAFEEGQEARRQAESKEREWKRQEEKAALLAREWKQIKQQLHDESAELDLAFTLDGCEQAQLAMKSYVRHLHELEVLYRETRHTEAMIAQQRERLAALETEIDEAKGERNRLRDDEERISLEIAEMERTLAQMGADDIRAEIARIQERLAFLRQEIPRLVNERARTEQRLMRLVEEREKGAQREAFACQLAAMWGRSFADEAALGLVDLDRSRSLLEQAKEAKQRYEAVLKETRSSLLARLNTVFFQESSNLTEYRATFERLAEQKEPEWIAAAPDDEMAMKAADWREKQERHVIYLDYKGQRATPFAVLAEVERDIALQHEYMKEQDRELYEDVILKSVGRILRSRIQRAERWVSDMNKLMGGLDTSSGLVLSIQWKPKTAETEAELDTKELVRLLRIDSRLLREEDLQRVTNHFRSKIARARELLEERGQGNTLHQIIKEVLDYRKWFAFTLYYEKTNEPKRELTNHRFYQFSGGEKAMAMYIPLFAAAYSRYQEAGDDAPYIISLDEAFAGVDENNIRNLFGLVEQLGFNYIMNSQALWGDYDTVPALSICELVRPRNASFVTVIHYR

SEQ ID NO: 38651 - protein, 406 aa, Geobacillus sp. Y412MC61
MSTVKEAAAFFRSEPGFKRLFVEMKRKYESLGRVGGAVSLQSFSKEEREAVAAFFGKDVVRVSLSAFEKQLGQTKFAGVGLVALLEQYFGEPLVPKKERLQAEEDERERFFARLAEEHHWFAAVRGQRFVQTAYEADRDGLEAAVRLVGAALCRLPLSSYMRLPLFAQQVASDPHAFDLSTLPGRLLLSALQATTPGQWDVTSVESVNELLQSVGLLREDILNFVTCANILAETEGGPHPVFSAASETNTALNMPLRDVLSLVSVRPARGGTVYIVENAGVFSTLLDTRAPLVSTNGQMNLATMKLLDLLAASGAKLYYSGDFDPEGLAMAERLLERYGQSVTLWRFSLDDYAAANPVVALSSERLAKLASVTSAPLQPLKEEMKRKKKAGYQEAIIGRLTGDING

SEQ ID NO: 38652 - protein, 545 aa, Haliangium ochraceum DSM 14365
MNRYDEPSEADTMSQHNEASRETTKATRLLDEVAVFHYVTAPNAPTYRAIMQIFHEAKEHYTVDLRPAQVLAGLQQSVYHAELPDEDALNRALDQLVDWGNLARIHDTAAVARIGDFYRRRHLYHLTAIGEAAHRAVREVEATLGKTGSLQTAMLVKIRDTLRSLAELAESGRRDDADALYALLHDLHGAFDTLTQEASRFLGALGHRDSERMAEERFELYKRAVLNYVSRFVDQLRRLGAEIAIHVRACEAAGIADSFELAVRAANLPPAPDGRDPQALWVAEWRAKWEGVRTWFIGGTQGAESSVERFATKAVGAVVELMRFLSRLNDRRTRPVDRAADYRTLARWFAICTTDEQAHGLWQAATGLYAGRHFHIAEEDEDLVAPSTSWLDAAPVAVPIRLRTHGSSSAAGRAAPAQDYSADKQWIAQMRRREREQVAAATRRFAGHGCVDFRAIERLDAAEFDLLLSLLDQALGAPADSGGVRQVRTADGRLLVTLHPPAADADAATATIDTPRGRLRCRNYRIEVRDAFAAARSVRAQEGGA

SEQ ID NO: 38653 - protein, 405 aa, Haliangium ochraceum DSM 14365
MSVLATKLEDIARAERTAALRYLLRHPLVCASDAADMFATIVRHRNWLTRWFLDQPSWKLVVEPKEGFARLHKVSARVDGTRPARSVSAGKLPFDRRRYVLLSLTLAALEEAGSQITLARLADIVAGLSADEPDIEDFDTDRYGDRCAFVDALRWLVAHRVLRMRDGDESGYARSGAGDALYDVDDRLLGQLLAAPRPPSMTERPDDLLAEQYPETDDGIRQRARHLVFRLLLDEPVVYYDELPPDALSWLTHSRGMVYARLQEDVGMRVERRREGLAAVDPEGDVSDVLFPDGGSTVKHAALLLAEWLTRALRAGAEVVSDDAINAQVVALTAEHGKRGRWSKQFLDAGDDGALRLAAEAMALLAGFRLVARVTDGWRPLPAIARFAAGSSGDDAPKRRARRRA

SEQ ID NO: 38654 - protein, 1404 aa, Haliangium ochraceum DSM 14365
MTTSEPISTESLRLPEPERERWQLLRAGLQNIWEYDDQRFVCHRGRLLLRGRNESGKTKAIEVLLPFLLDADLSPQRLDPFGSMARPMYWNLINDQVPDVQVRIGYVWIEFGRRVDGRAEFCTIGAGLRAKRSKPGVSSWYFLTAQRIDRELDVMPGRAPLTRSRLEQAIAESGSVFDSRADYRRAVNQRIFGLPDDQYAALIETLLQLRRPQLSKSLQPEALSRILTASLPPLEAQVIGSLAEGFQRLDQHRAARERFAETHKAVKDFLATYRRYIRTVARAAALEMTRGDSAYQRARSELRQAREAHAQAKAERDELTSAIAALEQRGENAEERLRTLRSSEAYQAVEKLDEAEQQERSRAEAASRAQRALAAVVEQLGERQRELDRASAAVDAARSRLADARAGARQAASDAGLGTQHEFIDEPLAGAEMDVDAARGAATSVCAARGRAVDGLAEQLRGVRKAARAAERAYERLSDAAQAERDAEEAVRSAEGAEGAARQQFLDAVSEWLDALEVLSLDAGLRDALFDQPSEDMAPWLRTRFEAARAALDERIHAIETERRAGLRLLEEARAEFDALERATHPPPEPPNWRAPRPDERPGAPLYMLCDFREGAAEDTAARANIEAALEASGLLDAWITPDGQALAADTFDVVLTAVPREGATLLDVLVPVSAGGVEAEVIERVLRTIELVRAGSAEDQEQPNGRDGAGCGPCWVSIDGRFRVGPMSGAWAKDVPSFIGATARERERARRMSALERRIAELDEQVRVLESQRGEVEARRAVLRDEEARFPSLEPVLRARFEVERASAQLQGARGERARLRDAYEAAQRAVRSVVDACLAAAEFEGMSPWIRRLSVGQAEGQQAGQATRLIDVDGLDEDLDELRRVTRVYGEAVRDLVQAASELEARQREHALRASSAEQARAQVEGAQESASEADGEAQRARVRAATLRAAVGATRDELLVELRATEQEQREVHGELKRARHQKSEQDRRVGATGAEVDTAARREQESEAQREAAERGFRELAEDGFLSYVGRTDDNDSAARSDSGEGDDESKGPARWTLTDTLREARRIDAATTRVDASPEARDKEENRVSAKQQDLLRSVPADVRVLPQRRRGVLDYQATMNGREMSLLALADVLVEDIAARDRLLGENEQALFESFLSGETHEHLRSRLRQANGLVEDMNQQLTACPTASGRTLRLRWAVRDEAPPGTSEAIALLLRAAHLLSDANRSALRQFLQQRLDEARAEDGIGSLLERMLGVLDYRSWFTFAIEYRDREANSAWRRLTRKVHGAGSGGQKAVMLHLPLFAAAAAFYSAAANSAPRPILLDEAFAGIDTKIRAQLMKLLVTFDLDFIMTSYEEWGFYEELDGLSTYHLSREPGFRGVHAAWFLWDGARAVEMESR

SEQ ID NO: 38655 - protein, 437 aa, Haliangium ochraceum DSM 14365
MSAEDDIGRADDKARVRELRQHLGGPEYRKLFAAMRQRLEEAGERAQRTKLRDLDERERQALADLLGMARVPGEAVVVDVARLDSVLRNSRLAASLVEVVEALGGPLVDRPAQRRAQSEARAALWHQAAAHTSVQSRPELADWLNDLRGQGLLARAAQRSALSQQELLAQALAVVARLPADGMLLAVLAAETTGDAHALDLGRPLSSLVVRAAQYLAGWPAPPKSAAARRRLWSEVGVLCDPLSAQVLVLGLRPGGDCALARHLREWAELGEPRRLTLRELNGCRLRLEVSEEVFVCENPGVVAAAADALGQRCAPLVCTEGLPSTAAVALLRQLCAGGARVRFHADFDWAGIRIGNLLVEGFRATPWQFDVASYRAACDLLADGIPLRGPTVESLWDARLTVEMDTRRRAIFEEQVLETLITDLQDASVEPGASDG

SEQ ID NO: 38656 - protein, 545 aa, Haliangium ochraceum DSM 14365
MNRYDEPSEADTMSQHNEASRETTKATRLLDEVAVFHYVTAPNAPTYRAIMQIFHEAKEHYTVDLRPAQVLAGLQQSVYHAELPDEDALNRALDQLVDWGNLARIHDTAAVARIGDFYRRRHLYHLTAIGEAAHRAVREVEATLGKTGSLQTAMLVKIRDTLRSLAELAESGRRDDADALYALLHDLHGAFDTLTQEASRFLGALGHRDSERMAEERFELYKRAVLNYVSRFVDQLRRLGAEIAIHVRACEAAGIADSFELAVRAANLPPAPDGRDPQALWVAEWRAKWEGVRTWFIGGTQGAESSVERFATKAVGAVVELMRFLSRLNDRRTRPVDRAADYRTLARWFATCTTDEQAHDLWQAATGLYAGRHFHIAEEDEELVAPSTSWLDAAPVAVPIRLRTHGSSSAAGRAAPAQDYSADKQWIAQMRRREREQVATATRRFAGQGCLDFRAIERLDAAEFDLLLSLLDQALGAPADPGGVRQVRTADGRLLVTLHPPATDADAATATIDTPRGRLRCRNYRIEVRDAFAAARSVRAQEGGA

SEQ ID NO: 38657 - protein, 405 aa, Haliangium ochraceum DSM 14365
MSVLATKLEDMERAERTAALRYLLRHPLVCASDAADMFATIVRHRNWLTRWFLDQPSWKLVVEPKDGFARLHKVPARVDGTRPARSVSAGKLPFDRRRYVLLCLTLAALEEAGSQITLARLADIVAGLSADEPDIEDFDTDRYGDRCAFVDALRWLVAHRVLRMRDGDESGYARSGAGDALYDVDDRLLGQLLAAPRPPSMTERPDDLLAEQYPETDDGIRQRARHLVFRLLLDEPVVYYDELPPDALSWLTHSRGMVYARLQEDVGMRVERRREGLAAVDPEGDVSDVLFPDGGSTVKHAALLLAEWLTRALRAGAEVVSDDAINAQVVALTAEHGKRGRWSKQFLDAGDDGALRLAAEAMALLAGFRLVARVTDGWRPLPAIARFAAGSSGDDAPKRRARRRA

SEQ ID NO: 38658 - protein, 1404 aa, Haliangium ochraceum DSM 14365
MTTSEPISTESLRLPEPERERWQLLRAGLQNIWEYDDQRFVCHRGRLLLRGRNESGKTKAIEVLLPFLLDADLSPQRLDPFGSMARPMYWNLINDQVPDVQVRIGYVWIEFGRRVDGRAEFCTIGAGLRAKRSKPGVSSWYFLTAQRIDRELDVMPGRAPLTRSRLEQAIAESGSVFDSRADYRRAVNQRIFGLPDDQYAALIETLLQLRRPQLSKSLQPEALSRILTASLPPLEAQVIGSLAEGFQRLDQHRAARERFADTHKAVKDFLATYRRYIRTVARAAALEMTRGDSAYQRARSELRQAREAHAQAKAERDELTSAIAALEQRGENAEERLRTLRSSEAYQAVEKLDEAEQQERSRAEAASRAQRALAAVVEQLGERQRELDRASAAVDAARSRLADARAGARQAASDAGLGTQHEFIDEPLAGAEMDVDAARGAATSVCAARGRAVDGLAEQLRGVRKAARAAERAYERLSDAAQAERDAEEAVRSAEGAEGAARQQFLDAVSEWLDALEVLSLDAGLRDALFDQPSEDMAPWLRTRFEAARAALDERIHAIETERRAGLRLLEEARAEFDALERATHPPPEPPNWRAPRPDERPGAPLYILCDFREGAAEDTAARANIEAALEASGLLDAWITPDGQALAADTFDVVLTAVPREGATLLDVLVPVSAGGVEAEVIERVLRTIELVRAGSAEDQEQPNGRDGAGCGPCWVSIDGRFRVGPMSGAWAKDVPSFIGATARERERARRMSALERRIAELDEQVRVLESQRGEVEARRAVLRDEEARFPSLEPVLRAQFEVERASAQLQGARGERARLRDAYEAAQRAVRSVVDACLAAAEFEGMSPWIRRLSVGQAEGQQAGQATRLIDVDGLDEDLDELRRVTRVYGEAVRDLVQAASELEARQREHALRASSAEQARAQVEGAQESASEADGEAQRARVRAATLRAAVGATRDELLVELRATEQEQREVHGELKRARHQKSEQDRRVGATGAEVDTAARREQESEAQREAAERGFRELAEDGFLSYVGRTDDNDSAARSDSGEGDDESKGPARWTLTDTLREARRIDAATTRVDASPEARDKEENRVSAKQQDLLRSVPADVRVLPQRRRGVLDYQATMNGREMSLLALADVLVEDIAARDRLLGENEQALFESFLSGETHEHLRSRLRQANGLVEDMNQQLTACPTASGRTLRLRWAVRDEAPPGTSEAIALLLRAAHLLSDANRSALRQFLQQRLDEARAEDGIGSLLERMLGVLDYRSWFTFAIEYRDREANSAWRRLTRKVHGAGSGGQKAVMLHLPLFAAAAAFYSAAANSAPRPILLDEAFAGIDTKIRAQLMKLLVTFDLDFIMTSYEEWGFYEELDGLSTYHLSREPGFRGVHAAWFLWDGARAVEMESR

SEQ ID NO: 38659 - protein, 437 aa, Haliangium ochraceum DSM 14365
MSAEDDIGRADDKARVRELRQHLGGPEYRKLFAAMRQRLEEAGERAQRTKLRDLDERERQALADLLGMARVPGESVVVDLARLDSVLRNSRLAASLVEVVEALGGPLVDRPAQRRAHSEARAALWHQAAAHTSVQSRPELADWLNDLRGQGLLTRAAQRSALSQQELLAQALAVVARLPADGMLLAVLAAETTGDAHALDLGRPLSSLVVRAAQYLAGWPAPPKSAAARRRLWSEVGVLCDPLSAQVLVLGLRPGGDCALARHLREWAELGEPRRLTLRELNGCRLRLEVSEEVFVCENPGVVAAAADALGQRCAPLVCTEGLPSTAAVALLRQLCAGGARVRFHADFDWAGIRIGNLLVEGFRATPWQFDVASYRAACDLLADGIPLRGPTVESLWDARLTVEMDTRRRAIFEEQVLETLITDLQDASVEPGASDG

SEQ ID NO: 38660 - protein, 495 aa, Thermoanaerobacter italicus Ab9
MEDKLDLNVIKPIEEVKYLSAENASRYRLIMRYFYEQYQKFKYWLYKEDIYEYVSQFDMFADYTMEKCEQDLKALTEWKNLIATQDTSKASTIDEFKNKKFRYQLSPYSIEIERMTIRLESIVGYGGSLQPSLFERIYRNLIRTNEMAKKEDLQEINRWWEDLNTDFENIYHNATDYIASLQSSNADELMKSEQFIIYKDKLIEYLRDFIKDLQRFSVAIESFLKKVSPEVVNSVVDKLCQYEMSIPRIDRVLNEEEVKEDLMDKWNNISFWFTGHNFEDSEAVRLLNISNEIIRKITMYAARIAENRMKAASRKNEYIALSKMFAKAGSIKEAHLLSAAVFGCFYTRHIKGDFERKTESVNQSVWEEPPFKVIIKPKTRSYSNSVKTNAIIDRSADKTEMLMDYLNQKNIEDEIIASCIVGNRIRIKDLPVVKPFVRATILKWIGKAIARNGFTGKTEDGRTYRLHMPKNGERAILKCTDGNLDMPDIVIEFVD

SEQ ID NO: 38661 - protein, 383 aa, Thermoanaerobacter italicus Ab9
MEELQMLLENFWILRDDRENFNKIRDAENKIKPFVEEKLGYRLIINPYIIKLEKVPSDVEEWMGIDAFQMPMDYAFLCLLLAFLEDKGPEDQFVLSNITEYIEAQYDGPDKVDWTLFQHRKSLVRVLNFAVDIGIIKIDDGDHERFSESEDTEVLYENTGISRYFLRSFNREITEDMKIEDFLQEDLNLSNSKDAVIQRRHRAYRKLILSPAVYSEGPDDQDFMYIKNYRNTIAKDLEEYLGAKLHLHKTSAFVLFNDNKYLRSYFPDKNKNISDIMLQASKIIRQMIEDGKLAYNPDDTIDITEAEFINIILKVKERFSDGWYKSYREMSEKQLIEEVIENMESFKMIKRVEELHSIKILPMAAKLIGEYPPDFEKGEGADE

SEQ ID NO: 38662 - protein, 1388 aa, Thermoanaerobacter italicus Ab9
MSEKLAERWMINRIGLLNFWYYDDEIFEFADGRLLLRGANGSGKSVTMQSFIPLVLDGNKSPERLDPFGSKARKLEDYLLGEEEVSGLDERTGYLFMEFKKEKKDSYITIGMGLKAKRHQNMDFWGFVILDGRRIGIDFFLYKMEVGDDGKRVKVPLTKKELKNRIGEGGEVVESQKEYMEMVNKYIFGFSSIEEYDELIKLLIQLRSPKLSKDFRPTVIYEIMKASLPSLTDDDLRPLSETIENMDQIKMHLDVLYRNMAAVKKLKNEYDNYNKYILYEKAGDLVKAYSDLYASKKEYDNLTKDIENYRSTIANLGNDIISLESEREALKKKEEQLSSGDAKRTQKELLEEEDRYKQYLEDKSKKEEELRNKQDKYYGLERKIKNTEEQKYKLDKELQDKLEDISSIAQDIDFMEHEFSVSELKKVYGKEFDFTYWKNELKKHKDKIKRAINALREEIEANKRYDAALKEQERLKKEREDRAKKLNEAERLFDEQKREYVERVYSWSQGNAELKLLSSQLEGLSRVILAYGEDKGFDDILAFVRKPYEEILNGIQQEILRLENQREVKENQLHEKEKLLEEWKNKKDPEPERDEQVINNRKRLKEAGIPYIPLYMAIDFKEDVDEETRGNIEAAIEDMGLLDALIVPKEYFEKALQLDSNMADKYVMPGSFNMMLNVSQYFRVVDNEEGVSPEDISDALSNIFVSEESGTTYIDSNGTYGIGVIKGKARDGVKSKYIGSESRKRYREELIKSIQEEIQAIKAEISAIDEEINVKKLRIQRLDYEYSAFPGKEDIEEAYRYLKTAKADYEYTSHKLDEQLFTVKNCFEDLQKKKAVVRELTSGINIHPDIDTYSSAYEYAEGYASGLNEVEILYNKYVLHISNEEMLLQQKQDLEYDIDNLKYEIDVLENKIQSSVKKIEMLKETLKELGLEEIEKELEICLKRLEEIPKEITNKSAEKAKLEERLQRSLKDLLNIEEEIHLKENIYNIVEEGLKRELALGFVKQDVEMEDMLKLSKSILSEYKGFFDKAGFDREKFTERLQNVYFETRNELLEYGLSIGNIFDEACEGDNERIKEAKNKQRRLNITANINGKIVSLYTLYSNIEEDIMANESLLRETDKILFEEIIMHNVGIKIRAKIFKAEEWVKKMNKLMSERDTSSGLKFSIEWRSIPASNEEELDTKELVDILKSDADMLKKEVFDKVVNHFRSKVERARRAMEEKNNTETFHKIMKEILDYRDWFEFKLYFKKEGESRKELTDNAFNKLSGGEKAMAMYIPLFSAVYSRYEGASPTAPRIISLDEAFAGVDDTNIRDMFKLIEDLRFNYIMNSQVLWGDYDTVPKLSIYELVRPKNAKAVLVMKYLWDGKVKHLILPEKDEVAALEVGAINE

SEQ ID NO: 38663 - protein, 440 aa, Thermoanaerobacter italicus Ab9
MNKEELRYFKEKKGYKRIFEGIREKYRSLGRLGGVVKLDNLTEDEKEVLTNHFKKDYRTKKSASIDVAKFEESLKNTRFEEYTLKDILEYYFGEKLTSKKEDMEILAKEREEFFKELFSKYQECKCIDWLKSLYEGTAVGVRAVNQRYLNDKDGLKKDIMYVCDAINNLPVYKGEKKRLPVFSSQIARNPHYFDSNTEAGSMFINALCTLMGLNEVKGSEEISELYYNVGILIDEISNYVTLSGLLAYEGDTENQVFKAAYESNQVLQVPLLNLSKIERIVSPSKKVYVVENPSVFTSLIDATSKVFPVVCTYGQPKLSSLLLLDMLYKEGTEIYYSGDFDPEGLMIADRLYKRYKDKFHFLRYDVEDYLKSLSNEVINDVRLSKLNKIESPLLFDVANEMKIIKKAGYQELIIDDIINDIRLIEEGKGGGKIKVISMPS

SEQ ID NO: 38664 - protein, 505 aa, Aromatoleum aromaticum EbN1
MPFTDTSADLFRHVSADKAGIYRSIMASFAAAKRQFRLHMRPDEVLAEARWTDGVPKLEEVQAALAQLAEWGNLEAQPDTARVASISDFYRARFLYRLSHGGEAVETALAAFAAALGRRAELQTVALEDIANRLKTLLALADAPTPDAAKVHETLRDLVRVFESLADNAQAFMAGMARSIELQQADATAVLAYKQRLIDYLERFIGDLVGRSGAIAQHIASLHPRIDPLLWAAAQREARDAAPGDDQAQADALAQRQQAWRERWGGLRGWFVSTHHEPPQAEVLRSKARAAIPQLLAAVAALNERRSGRSDRSADFRVLAGWFATCASDDDAHRLGRAAFALNPARHFSLNPGAGHELPATTPWAEAPPLRIHPRLREYGEAAPRGPLPKVRERNEERALLARQLREEHLQVEAARARLATGRTTRLSEIGHLDPHAFALFLSLLGEALTAQSSPEDVVERQTGDGLLRIRLEPLETHTRAEVVTDAGIFAGRDHLITITDTQAP

SEQ ID NO: 38665 - protein, 440 aa, Aromatoleum aromaticum EbN1
MTTDSTAIGQQQALHQREELTAALRALLMTPLMTPAHTEFAAVRRHADALREWFIRETGWPLHIERDAARLYKRPADVNDATRGLPGYERRRYVLLCLACAVLERADPQITLRVLGDRLLALAADPALAALGFSFTLQAQHERRELVAVCRTLLELGVLQRVAGDEAGFIHGGNEGPDSLHDALYDVQRRILAGVLAASRGPSTWPADEAPVTLEARLTALVAEPVPDSDEGRRTTLRHHLARRLLDDPVIYLDRLDADQRAYFMNQRGTMATRLCDATGLVAEQRAEGLALADEDGELTDVAMPAEGTEAHVTLLVTEFLTSRSPGRPKIDLAPVGGGSGDLSEPGALLTARANSRTNTDEVAAFIASARGRFGKFWRKSAREAGSEHELAATALDRLQRLQLLEHDGTGVRPLPALARFAVGEAELRPAAPVATGTLF

SEQ ID NO: 38666 - protein, 1408 aa, Aromatoleum aromaticum EbN1
MLDAPSDLPTTDARPALPRPTLVRWQPLRLGLVELFHYDSEEFWFRDGHLLLRGNNGTGKSKVLSLTLPFLFDAQLKPSRIEPDGDAGKKMAWNLLLGKLDRRIGYAWIEFGRIADDGEAHYLTLGCGLSAAAARAQVDAWFFVLEKRRIGEDLWLTSPARNVLTRERLKEALHEHGQMFDTATAYRRAVDERLFQLGAVRYAALMDTLVQLRQPQLSKKPDEGNLSDALTEALPPLSAELLTDVADALNQLEEYRCELQDYEALAKAVGQFNQRYQRYAAINARRQARGLRSAQSGYDTASRSLNEARTDLQAAQHAEAQAQSRLDAAEAALLAGRTRLDQLQSDPAMKDANRLNQAERDAVARTADLADATRMSAEATARLEREQRALDERGARRTQAEESLATAREGVAAAALASGIGEPWRVNPLAALPAAELATLGDLPLDTARQDLRQVTQVRREQLALVQRRVSEVAQAEATHAGRQQARDERLDEAEAAAARRSAADAAIETEGSRVVDAWQAHFANLQVLQVAEPPLPALASWVAGLQGDNPARVALSSAQQRAADHLAQQRAGHLVAQKILHDEQAALHTEHERLAQGEDAAPPPPYTRTAEARKQRAGAPLWQLVDFREHVDAAQRAGLEAALEAAGLLDAWVTADGRLQAAEGAPPLHDTQWTERPHQGASLAAWLAPSAVAAVPVVDAALLTRLLEGIACSAHDDGRAEGWLAPDGRFRLGALAGAWAKPQATYIGYAARTAARARRLAEIDLRLGEIADASRRTDDALAELARQQERAAAEWQGAPSDESLRAAHADAAAREREFQTAKNRLDEADRQLRAASDALQSRRDALAADAADLRLPTDAAALEAVGAALLHFGETLHGLFQAVQELRLAATELARQQERTRETEADALRRAEHLTERRRQADEAQVRLATLRESIGAQVDELQKRLREARAAVSDGDRHVKAAGESLRTAGEARARGEQKVLDADATLQERADARQRAITQLQSFAATGLLSAALPEVELPDLRAPWTIEPALTLARRTEQALAQVADDDEAWTRIQNQISHDYGELGRTLTALGQQAQADTSDYGMVVSVIYQNRPERPDQLTARLDTEIAQRRELLTARERTLLENHLQAEIAAEVQRLLQAAERQVDAINKELSKRPTSTGVKFRLLWQPLPEGGEGAPVGLEAARKRLLNTSTDLWSAEDRRVVGEMLHQRIAAERLKADAVGGSLLDQLAQALDYRRWHRFRVQRWQDGQWRPLSGPASSGERALGLTVPLFAAVSSFYSQASYVFAPRLVLLDEAFAGIDDAARAHCMGLIREFDLDFVITSEREWACYAELPGVAICQLQRREGIDAVHVSRWTWDGRARRREDDPDRRFPTESELPPRSLRSLPPEGASTSLGAARREV

SEQ ID NO: 38667 - protein, 394 aa, Aromatoleum aromaticum EbN1
MDSRLQRLLGGHALAGLRKRLRQRYERGASTGVLRLGALNEAEHAALAALAGRPARHVRSMQINVAEIDTALARAGLAASLRDALEQLDGPIIDLAAQRLQLRSQWQRLVEDCEHPGLRSALLTPVGLGLLKRVCGSRPEAGTRLIHDTDRVLRRLPAAGIPRAQLAVAALGDAHALDAGSPVATLVLTALRHGAAAELEGERTRELWAAAGVLVNELARPALALNLPGPTGAEPGEPAYLSLRRLLRSPPDWAVTGRPVFVCENPNLLAIAADQLGPDCAPLVCTDGMPAAAQRVLLTQLRAAGAMLHYHGDFDWPGLRIGNQMIREHDARPWRFSTADYRAAVVGAPRPGRPLDDDAVSALWDDTLAGAMLTERLAIDEEGLADVLLDDLRH

SEQ ID NO: 38668 - protein, 495 aa, Saccharopolyspora erythraea NRRL 2338
MFRFTSGDRAELYVSVLHAFGEANERLETALGLDDVRGRLRSVGWLDALEDSDLTSALEQLRDWNLVDVIQNHSENYRTAAEYERRNLQYSLTRQGEAALAGVVHAMSVLASSGALQTAVLDAISDRLGDLLEHGETGSDRQVFAILTELESHLDALRGNTKQFNGELQRLLRADGADLETFHEVKASTVAYLQEFVTNLEHRTHAIATRIGRLEDHGVEQLHQRALAGAELPQLSGTDPAPAWLEHRRARWEGLRAWFLPCDSTPPRVEQLHRVARRAIVTLLQVLDRITESRRRASSAVLDFRELARWFTVVPERDLHRLWSTVFGLSSARHAHLAHHDPELVSPSVSWSESPPVEVSPLLRTAGRTERFARTGRVRDVKALRAQRAERARAERAQLEAAWNLLDTGGAVRVSEFGELDHGIFERLLELLGRALSSAPDESGTRRGSTADGRIEILLRPPSDSAVAHLTTPRGVFSGPDYEIEINSLGARGHA

SEQ ID NO: 38669 - protein, 411 aa, Saccharopolyspora erythraea NRRL 2338
MSNLTNQLVIAEREEVARGIRTLLGSPLITERGSPETFDLVRRRHEPIGKWFDYYCGWKLVVEPRLGYARLVKVRAATDASRPARRLRSGRAPFDRRRYVLLCVVAAELLAAPVTTIGLLADRVSRATATDQVVAAFDTAGRGERMAFVDVLRLLESYGVLEVVDGHTESFVDSDDAKVLYRVDPTLLLHLLAAPTGPSRLAVPAEEVPLRFDELVSELSRERRYGTADRDGGSSDVQRNLWLRHSIFRRLVDDPVLYFDQLIDDERAYLGSPTGRQLLRRAAEQGGFVLEERAEGILFVDPDGMATDSRFPDDTSNAKVAALLVLDEIDGPVTSEQLELVVAGILSRFPRWAKTYRGEDGPRQLAEDAVEVLVNFGLAEVSGGLVQLLPAAARYALGTARTSDTDATEAS

SEQ ID NO: 38670 - protein, 1330 aa, Saccharopolyspora erythraea NRRL 2338
MNASRWIPSRAGILNVWRYYDEVFEFHEGRLLLRGQNGSGKSKALELLLPFLFDASLRAHRLSTFGTSERTMHWNLMGDGASGTTRVGYVWLEFRLPGGPDRWFTCGARLQASKNTTTAHADYFTTGQRIGTDVTLVNDSGQPLTKAVLEERLGDSGVLHGNAGDYRAAVRSTLFPTLNEQRYDALITALLQLRTPKLSQRLDPQLLSSLLSRALPPLGQQEIADLAEGFERLDRQRERLANLDEEVAATKTLASRQKSYAQRVLRAAAGNLITSTTELDKLTRTARESAEEYEGVAEAKTRAEWRAETLELDIESTESRITGLTESERYKKGEEYDRLRRQTTDAELQATAVGEDAAEKRSQADKDRQAAHDAARETDRRAETARAQQTETSHAATRAGMTSLHDEIAASLDTDVQPRRLLRAAVRSRHEQLDGVRAAIGTHDRAVERRTQAEDELDQARTVLSQARERREAAAAQHEAALARLSARVRDWASCCRELHFPDPDALLELIESETGLLTHVDSVAAAALEAITRDETSTSARLDAVRADRKQLSTEVDRLAGEQDLPPDPPLSRTADRSTMTGAPLWRLVDFADTTSETVHGPIEAALQASGLLDAWIGHNGAVAGHDVFADPAVLAAVPMSLADVLVPEQDAEVPADVVRKLLSTVAFGDELPPEHPAAIGADGSWRLGNVTGTWSKEHPAHIGVLARRRARQRRIDELRERIDEHDRLIAKHEAALAALRTRRDVLDGERKARPDHRELHASATDLNRAGADVDAADSQVRRWIGVVTEREKDVKQALLALTALAAQHNVPADRAAVAKLSDAVGNFQDQAENWLDSYAELLSARREASALGEQARRSGSIAEQRESEAGEADKQHRRLVAKLEAIEGTVGADFRQVQSEIEALRRRLGDLRGERASTHKELNRLAGRLGELGARRTTDAEHRDAAVEKRDTMAHRFRHLATGVFPADSGMDDLERFKATLTSSDGVRATLDAARMAAAAWPTLAHAPNNLGDAVHRLSESVHECRSTLSSRADLDLETDEDVQVFTAVVDGVRVGAAELLAILRAEAERSRHEITERERELFDKTLTGGTRRHLADRIRQATELVDGMNARLERVRTASNVAVQLVWQVAPDLPAGTKAARDLLLKDPVRLTESDRESLHQFFRDRIEQAKADGTAASWEQQLAQVFDYTSWHRFVVKVDRANGAGWQLLTKKLHGALSGGEKAIALHLPLFAAVAAHYEAAPEAPRLILLDEVFVGVDSINRGQVFALLSALDLDLMLTSDHEWCTYAELSGIAIHQLITGDDSDAVTTARFTWNGHDLAPDGDEP

SEQ ID NO: 38671 - protein, 298 aa, Saccharopolyspora erythraea NRRL 2338
MWSWLEGHPVVAMQPALSDWVAAVRRAGLSGGSVTQTREDLERALKVLAVLPASGIPLPVLAEQTLLDTHALDDGTRCSGLVLRALAAIYDRPSPVDASERRALWEQAGITDDELSSVVLAGGMRVDGDSVVGRVLRLCADAGQPSSLTLRQIRASELTSVPERVWVFENPSMLALALNRFGAACPPIVVTSGWPSSAGVLFLRKLAAAGCELHYHGDFDGEGLRIAAHVIARTGARPWRMSSGDYLAAVADGPPVGRTTPVPWDDELAEHLTRMGTTVSEERVATTLLDELTQRHPA

SEQ ID NO: 38672 - protein, 556 aa, Saccharopolyspora erythraea NRRL 2338
MTVPDHEADVLRAGVATAGPLPADAASSDAAPAAQSAEEAGGGEQRLQLFVYLQAPEHRTYLAIMRLFTSTLLADLSAGEVAAALAAAEREGRVAAGESDLDTVIDRLKQLVKWGNLVVGRRETIAASIAEFQHGSVRYQVSKLAVRVQRDVDALLHVPEGAREVSRELLPAIERGLGEISSMLSEVLVAERRAPEAKSTRKAKERLAEQVTTVFLQHAELAATVRDFYAYLGQVVTRHHLAPDEISGFRNLLVEYIQMVVEDVLRHTGTIAASLAGLAGVRSELLRLLGPADQLGTDVERARGRTAPDWQELTDWFVDAPGRPSQVAALREATARAIGSLLASVKRATSGGGLVPGRRGELLKLARWFDAAEENDAHRIYAAAFGLHSSRHLLPAPDYDSDNHDVAWRDGPVLDVTVSVRSRGDRGARGRTSRVLDDPMTEETLLAQAREADQRRSAAVSELAGAGAELAATTLSTDALGVLCELLTLAMAQREGSDDPGTALDPVHRLRVTVRPEPGHRTEIRSTSGTLTLQDAVLDVRGDGAIPGTEEEATAR

SEQ ID NO: 38673 - protein, 403 aa, Saccharopolyspora erythraea NRRL 2338
MNAVRTFEDLPDIDAANVVRCARVLLRRPLLRPGAPDGDLLPMIYRQRAVLQEVFSSLLGYRLVVERRFARLYKSGPGDDATRGESSLSPRGYAYLALTLAALTGIGRQVLLSRLVSDVRAAASEAGIAVVDDPADRRALTAALRHLVALGVITETEGTVAATDAAAEALITIDTDLLGQLVAGPLAEADSPRALVSTAAEPGPRSVEHAVRRRLVEDPVVLYRDLPDAQAEWLLKHLGTESKLLERFFGLVTESRAEGLVVTDPEDYLTDVVFPGPGTVARIALLALPELLERAEPRESDGRHPVAEADLAEVCAELVESYPAAWSRQATEDQDDLVRSVRALLGRLGLLHREGEQWLLSPAAHRWLPQPDATPAPGREPEPPAAAPAGWSLFDDMEEEGQR

SEQ ID NO: 38674 - protein, 1360 aa, Saccharopolyspora erythraea NRRL 2338
MELPNRWRLHRGGIVNIWQYAEHTFDLSGGRAIFQGTNGSGKSRTLELLLPLCLDGDLRQLGSKGFDTVSIRRLMLDEYPGGPNRIGYAWIELRRDAPGGGEEFLTCGVGVKASKTSQAISDSWRFVTGRRVGVNLQLVGSDRVPVGPAQLREMLGADCVLDDHAFRAKIAATVYGMPAARYGDLLHLQRTLRNPDVGLKVLEGQLEQILSDALPPLDPSLIERLATSFDDLESIRENIVRLSSADKALSAFLTTYSGYALGSLRERAEAMRSARTRLRSLRDELAKLEKQVAAKRGDRESAQRTVTELEQREGELESGIDALRSHPAYSELQNLRDRERLVESARSAAVTALDTASKHRAQEERSVESVLGMLRRLAGDADAAEQAAQRATQQLTTAGLDGGLVPRPPAVPTAQARTSPDQVRTAPDSDAEPATIDRHIAPEVDADALAAAMREAASRTGDAASVATERSALTLALHQQAVELDAQQDKVAELQRLARQAQLTATEAAGRRNQAQQQLSDAAAVWVEQAQRWGAGWPVPTADDPVPAPPRDRELVADRSATRDARERTRRWARPKLHEARGQVTEVEQELAELRERTRGWEQELAELRAGHERTPPRPAWADAERDESKGRPFYRLVDFSPSLNDDDRAGLEAALQASGLLNAWVSLDGSVVGLAELLAAPEKPAGSATLADLLTPAAEPDCPVPGEHVADLLASVATDGSAGLSVSADGTWRAGVLSGAWSKDTAEYVGAGARESARARRIAELEDELSQLRGRIADAERRHRDAGEHTSRLEQYLESYPDDSDLLTAHAKLATALESAQDAEHRAAQLREQHEQADQRWQAAHAELVRSAGEADLPADTRALDAAHRAASEARNGIDALREAIEARCLPTLADLREVSLHHDVAVADRMEAESQAERRCADYGEQAAGLAELTSAVGGEAQQIADKVGDLERERAELRSELPQARERISSLRESSARLETQLENKQSQLAGREQEEASTTEAFGTALRIPGLWAAAAVSDELPPELDDAAALLVESDRKGASETTVLNRFQALQQSLSGNYDISAGEQNGLLTVTVTGEEGPQPVADAARRVSERLGEQRGYLNERYQSIFADYLIRDLAERLRGQITVAEDLCKRMNEVLDGARSSQGVHVQLEWQPSAALGDDIRQTIELVRTPFADRSDDQDALLRRVFTDLIESERDSTSGGYAEILSRALDYRSWFAFTVRVRDTGPEGKPRVRRLRQLSSGETRLISYVTLFAAAAAFYDAVSVSAGGGGPLRLVLLDEAFERLDDPTIARMLGLLVDLDMDWLITWPSGWGVSPKIPKMHIYDVLRPRSGHGIACTHTTWDGRGLERADG

SEQ ID NO: 38675 - protein, 401 aa, Saccharopolyspora erythraea NRRL 2338
MRGLWEKAREVLESPEQPSTFRLELPDEETQTAVGELLGRPMLGYGTRIKVSTLDERVRGAGLGVGLAEVLEILHGRPVSRTSSMSSTSSVADEPRAAVRAALAEHSLGDAPWADEWARWLHQYGRVPEDELDVVVRRAAAVLAELALDRAPVAWTSRADLAARTGDAHGLDSGTTLSRVVLRAAALAHDVAAPGNEHERRALWERCGVALDGVSATVLCWSLPLTGADDWSRSVLRRTAAGLPSHLTHLDLQAAPARLVEPGTTLTVCENPRVLEAALRDDIGHPLVCLSGQPTTAGLELLRRLADDGAVLRYHGDFDWPGVGVAGALRTQLGVEPWRMTAADYRRALDDAARDRIDLPSLIGAPVETPWDPALADLMATSGRAVEEETLLPALLAVLRR

SEQ ID NO: 38676 - protein, 534 aa, Sorangium cellulosum So ce56
MEESPAKLPAFSYLTAENAALYRAIMRSFVEARERFVLHLRPADVLRAVRETGLDPAAVDAALQKLCEWGNLQSHLDTADVATVEEFYRPRFLYQLTPQGEAVERAVDAYFEALAQRGELQAAALDDIRTLLESVAQMLSRPELDDSAVHLALSALRARFGELTTQAQAFMGSLQRSIDLHAAGVASFLAYKQRLIDYLERFVGQLVIATADIAELLGRVDGAAAQRLADSAGRREVADALDGEEADQRAAAARWEARIEGVRGWFIGRPGAPSQAEELRARARAAIPALLSAVASLHDRRFTRSDRAADLRTLARWFAEAPSDADAHRVWRAAFALSSTRHLFVNEEAMAEREAAPVPAGRSWLDAPPLRISPRLRATGRHARPGRPSDVIDRSREKALLLAHEDEDERAIADARARLATGRPTRLSELGRLDPLAFEMLLDWLGEALAAGGGETTSADGAIAISLVPTNDGQVATVETPSGTFRGPDHLLTLRSLAADEAPGSRHRAPAPEDAAPSWHRAPAPPGPSPAERP

SEQ ID NO: 38677 - protein, 433 aa, Sorangium cellulosum So ce56
MTRALEAQERHEQQRALRALLRHPLLPAAGAHAASFLLVRRHAAALRAWLARYPRWSLLVEPEQARLRKTPADLADGTRPALDPHHGTPFTRRRYVLLCLALLALEGEDRQTTLGRLAERMVGYFADDPALTRAGAFELDVQDQRRDLVHVVRLLLDLRVLTRVAGEEQGFIADQRRDVLYSVSRPAVAAMLNVRRGPSTLEATGAADLAARLAGIVEELAPETDDARNQALRARLFRRLLDDPVVYYEDLGPEERAYLTTQRPFIVDEIERATGLVAEARREGLAMVDPDEELSDLAMPEEGTEGHLTLLVAEWLAGRARDGRLVGRAAVEQRVAELVDEHRGRWRKAALGAGAEVELTDRALDRLSALRLLRWTPAGIAPLPAIARYAVVAPPGPSGPAGAPRSGAPLAGLSAPAGRADGAPRARTPRKTR

SEQ ID NO: 38678 - protein, 1376 aa, Sorangium cellulosum So ce56
MTLPSPVTRRWQPLRSGLLNLYRYDSEEFVFEGGRLLLRGNNGSGKSRVLALQLPFLLDGEVSPHRLEPDADPAKRVEWNLLLGRYDERRGYTWIELGRRDDDGAEHYLTLGCGLHAVEGRGLAGKWLFVTSKRVGRDLFLQSAGAAIGRERLEAELGGSGEVFTSAAAYRAAVDRRLFQLGDRYGALLDLLIQLRQPQLSRKLDEAQLSRALSSALPPVPPAVVADLAESFRSLEADRAALDGFAAASAASSAFLDEYRRYVRVAARRRAAAVRSAHAAYEAVMRELRAAEAGLDEARAAGEQAAAREEEAERAARGAAREVETLSRRPEMDQARALDEARGAAQAAANDAREAELEHRRAVEQAERRGGEREEAAASARAERDALAATVAAAEGAGAEVGLPPPALPGGWEADPGGRALPGAQARFDAAVAERRRGVAHLRKLDGELASARAARERADAALEGAAARLERARERAAAALGQREAEADALVDAWRAWARGLSELPIGGADVEDVADAVAAWTEHGDGESPAALSAQRALADALGRLAAARAEADRALAVAEEARRALEEERAALERGAHRGPEPPPSRAPGAREGRPGAPLWQLCDFDPELDAAGRAGLEAALEAAGLLDAWVTPGGELLAEGVLDTALSAAGEQALPLEQQLGRWLRASPALAAEGAAGAPPVPPDVVRAVLTRIGAGRGAGRIWADVSGGFALGPLHGASAKAEAEHIGHASREAARKRRLAAIEEALREAAAARSAALTARAELDRRARVAREEAASAPSSAALRRALAAEQAAEAAVVDARAALTEEEERALSRRQREAQALAERDRAAADLGLAAWVGALDRHDAALAALVHAAAAMWPTARGAAAALRRAQKAEEEARLAEGRAVSRAEARQRAASRLHEAEVHRDTLERTTGALVDEILRQLAEARERREARDAEHRAAQRAHGDARVAEARAQAKIEPLRDGLERAARERAGHVEALAAMARARLLSVLEMADVEPGSEGAAGWSPTRAVDVARRIEASSGDVEHDDRAWERLQRGIFRHVEALRDALLPHGYGPQTTSEDGLVAVTVPFQDRTWAVHDLQAMLADEVAHRRTVLDAREREVLENHLIGEVASHLHDLLHRCEAMVRDMNQELAARPTSTGMRLRFSWAPLVDGPPGLLEARHRLLRAGGTWSPGDRALLARFLKERIEEVRSRGEAASWQEQLSTALDYRGWHAFAVERHQDGAWKRLTRRTYGTGSGGEKALALTIPQFAAAAAHYRSAHPHAPRLILLDEAFVGIDPDMRAKCMGLLAAFDLDFVMTSEREWGCYATLPGLSIHQLTVRPGIDAVGVTRWVWNGRERVRSAAAAAPPEPPPDGVTGPLFGGGPS

SEQ ID NO: 38679 - protein, 420 aa, Sorangium cellulosum So ce56
MTGDRLVVSGDRLRAVLGARELGWIVDKARRRLERGEPVRGAVVQRRDPTAAERAAVERLFGRVTHGGALRVSLDELAQLLRDAELCAGVEAAVEALTGPFVDRRAEAARIEAGWQAVFDEAAASGDGRPEVGVWLDDLRASGLVRRLSCGDVEAARNLLRQAVSVVRRLPAEGLPLAELAAAVTGDSHALDAGAPLGALVIRFAAALSGVTRWERAAERREAWDRAGVLLDDLSAPVLVLNLGAAPDSLAGRVLAMHAAAGEPCRLSVRQLRRAPPCFEVAGREVFVCENPAVLSAAADRLGPRGAPLVCVEGQVRTAARLLLERLRGAGATLRYHGDFDWGGIRIGNVVIGRHGALPWRYGAADYRAAPKGSELAGVPVAAAWDDELCAAMCDERRAVHEEGVVEALIEDLRQGEGAG

SEQ ID NO: 38680 - protein, 556 aa, Cupriavidus taiwanensis LMG 19424
MASVAGASGAQSDVEPPATAGPSENGASPFRFDAHGTRSAFADARRGQLFSHVSADHATIYRAIMDVFAKAKAQYRLQLRPDEVLTEIALPAGIARPDIDQLTQHLDALVRWGNLEAQQDMARWSSIADFKRNYKIYRLSKPGEAVEAALQRYDEVLRQRAELQTVALADIEQLLRALVALTSSKELDADKVRSTLRELTGVFATMTENAAAFMAGVDRHLNPSDVEVNNVERYKKQLIDYLERFVSDLARRGDTISDLIQALDSHIESMLFAVAERLAPDAAPDAEQDAEQDAARRTWESTDAVLAIRRQWKDRWTGLRGWFVNSNNDPSTADLLRQKARSAIRQLAIAIKEINDRRTGRSDRSTDLRTLAAWFLSCDSETDAHRLARVAFGLNPARHLPLDTAQEEYVPPSTPWAEGPALRICPRLYQLGDGPQRGQLPGVKDRSADRRRIQQLMEDESNQVAEARRRFATALPMRLSELGALNTNEFALFLALLGEALDHQIGPDAPTDILTGDGSLLVRLEPLGADTHAEISTPSGTLAGRDHLITITPAWS

SEQ ID NO: 38681 - protein, 421 aa, Cupriavidus taiwanensis LMG 19424
MTEEDNVSGADAPAPSEIAAKPHAYEREEMRLAMRAILMTPLMSPDHDEFGLVRRHAKSLQEFLRRETGWDLRVSPNGARLRKIPADFQDGTRGIPDFDRRRYAIFCLVCAILNGSQAQIMLQHLGEKLTLAASDEALTARGFVLKLTSRSERQDLVTVLRTLLTLGVLQRVDGDEDKYVAEQSTEVLYDINRWLLNEVITAVRGPSTGIRDAISTDERVEWLAKETVFDNEDARRTAMRHHLSRRLLDDPVIYFADLDKETHSYLATQRGLMAARLCDAIEMSAEQRMEGVALVDERCQMTDLKMGGDGTIGHITLLVAEYLSQKHIRARRDTYELAAYSAITDIEDFVRSCIPTHGSHWRKEAREPGAERWLAEEALERLEKLKLVGKDGERVFPLPAIARFALGTPKVSKPARTRAYR

SEQ ID NO: 38682 - protein, 1381 aa, Cupriavidus taiwanensis LMG 19424
MKDTDHTDPRHDDEIPTPTMSRWQPMRIGLIDIYLYDNEEFAFYDGKLNLRGRNGAGKSKVLSLTMPFLFDGFLMPSRMEPDADPGKKMLWNLLQGSIDRRIGYVWMEFGRLRDGDEPEYVTLGAGLSADSRRPNVDHWFFMIDAGVAGRVNDDLSLIGNGNRALTKDGLREVLAYRGRVFDTTQSYRDAVDERLFGVGTTRYDALMNTLIQLRQPQLSKRPDEQLLSNALTQSLTPLPANLVNDVSEALVLLDEHHDELEKFNELRRSVAKFERHYRTYAGMQTRRKGRLLRQAHVDFQTASSTRHAATDRVSAAIAAQARVEIELTTTNSEKERQQTRVNVLRDDPANKDSYRMAMAAEDAAERRKAKDEAATELDERRRKLDASHTVAGERKDHFDKMGHQIADIRHDVTRIAGLAGVSRAIANNRLISSEATDLVGADDAAILAAKTALFAETGVRRSQISEMRRMHGVVNTAQNKFEMFRDLRHDKESAKKAAEERLSQADNELDAASDDLLDAWQRHFVGLRRIKVDVDGNMERLAEWIQRLEEKNPCLTALLSGQQEAVEQIAKEEAEIKLKWLANERLAADLQGEREKLVAGVDIPPPPQYTRDYEARSGRPGAPFWKLVDFKPKVRPEQRAGIEAALEGSGLLDAWVSPNGAITDAEGKVLPLDANWSQRSSVAQSPLKTLLAPSIPPECDVPTAVVERLLAGIACSDNDPGGEAWLSPSGRYRLASLAGAWTKPAPAYIGTAARAQARAARLSLIDEAEKELGAERTSLREQINTAVQEQEQVRKELEDIPSDVGLRRAHLAVKSATESLNSAKAEFSRADTDCQEAERRLQQAVNRRLEAATDMGLPVEPSGLTAVEDSLTELDPKFHGLDHLVYGIRQAWRDYETASRHEDDCRQEFAKQEAILAQCQIDDTRAEAQLAVLRETIGMRVDQYEELITAARHALSIATDAYNAANAKQVAAAKEEGAANEALTSAETQVKEAADNRFRAIDAFKQVAEAGLIPAALPAIDIPDLTRPWAVDAALGLARKAEQELSNLEDTDEAWRRSQSVINTEFRELDHALNALGHEAHGTQSDSGISVRIVFQGKEEQPHALLILLDEEIVRRENLLSVREQEILEQHLKQDIAIEIHRLLRTAEKQVHEINRELDKYPTATGVKFKLQWEPTKDNAGSTANFERLRTILLQKSAELLTEDERKEIGDWFLQRIKAENENPDSYGQKSADRLARALDYRLWHRFRVQRSQNGGWKSISDPASSGERALGLTVPMIAAVANFYNQSAGQLAPRLILLDEAFAGIDDHARGDCAKLIQMFDLDFMITSEREWACYPAFPGVSICELQRAPGVDAVFVSRWKWDGKQRRQVTGRSNPTTLQ

SEQ ID NO: 38683 - protein, 436 aa, Cupriavidus taiwanensis LMG 19424
MTDAPSPRLHNLLGGDDRASLRARLRRVFERERPEAPIAGVVNLRGLPPAHMETLRLILGRPYRHADSISFCLEDVDWALHRAGLAPSLRIALEMLDGPIVNKEKARTDERLAWEGVADSCQDPPLQRFLESSLGRGLIKRLSTRSPERARILCRHAAEVLQRLPLKGVPLAQLAAETHGDAHALDRNRPIASLVLAVLRQSSTTPDDENDDTTRTADEVAEERARDTWARAGVLVNELARPALCLNLPMRPSDRSRFMRGEPGYLTLRQLVRNPETWEVAGIAVFVCENPEVVTIAANALGASCAPLVCTDGMPAAAQRHLLTSLKRSGADLHYHGDYDWEGIRIGNHVMRAYGTNAWRFGAAEYERVVAATRDKDFPATGEPVLATWEPELTTMMKLRSQSAPKSVSWRIYWATWRRDSAPRRKKELVYLNVPP

SEQ ID NO: 38684 - protein, 522 aa, Streptomyces scabiei 87.22
MFERDDAGVSESFDLDSLTVGDRLRLFNFTQRDDPLAYLWVLRAMNVLRAVHQLQVHPDDVANTLNELAAAHDEVPAAADLNLRGMLDNLSSDNEQVLYRVEDPLRCGNLAAYRNRQSVYQFTEIGYRVYCAVEEVIGSRVQDANLSRLVFADILADFKALATANREGDQDEVYRKLARLDNVLEDMTQRAARFYLTLNDVARTTDVSPETFLRYKHALLAHMSEFTAELERYAPRLAEAVNEVEDSGVETLLERAAAVDERPMMRPAARLEDWRRRWMGLRQWFLADSPGETKAAQLQGATRTAISGVIGLLRQVTESRRGGVSRTTQLRHLAAWAAAAPDEQAANALVSAAFDLRSVRHLSGAHDDDDQISPRATWWDAPGVEISVSLFRHGKRPAPGGPQPVRTRRGAHARLREQQLADRAAEREAATDLLDHGPHDRVLNEAETRAVLKLLTRALQARTVVAGRLRSGIGSSDVLTLRLVPNERGSRLRTETGTLRLPGFALEIKPHGAMRRRRTEKP

SEQ ID NO: 38685 - protein, 472 aa, Streptomyces scabiei 87.22
MAAYRVAASVEPADLGSYQQAARLMLLHGVVTESYPRAKALALVLQWSDELAKDFRDLFGYSLQTSARHARLLRRLDAFDASQAFLTVKSKRPFDRRRLAYLCLILACLHRSRIEINLADLVKLLTPSANAIEHLGFDATAPGHKDAVVDVMDWLVDRGALRISDGSMEDWARDHDRGDALFDIDHDTCAALFRPNKPLQHLVSAAGLLDTPTAGTGRDPRRRFAAQRARRLLIEHPVVYFSDTDAETAIALRQPTLAEDIARLTGLPVERRAEGIMLVDITGHFTDKRFPGRGGAVNRTAGLLLAKIADLREDPDRASSLQYLLPAGPGEDHADLLSRIDMALPQAGTLEALAHDPHADAGWHANEADPDVPEHEGQTGLPFVEHGTLEQMITELYEEFGPSSFTNKWQADPSGLLAEAVALLADLRLVHVVPGGILIRPAAGRYRNITAVLPRPAHGQFAFDFPTEDTSR

SEQ ID NO: 38686 - protein, 1439 aa, Streptomyces scabiei 87.22
MTLIPHSRTADESEVRFKPTRAGVIGLWDYTDEEFVFADGRLVLRGHNGSGKTKALEVLFPLVLDGVLDARRLDPFSGEERTMKSNLLYKGQESAYGYVWMEFARTDPDGEVLEAVTVGIGMRVTKAMSTPARFFFVTDGRVGIDFGLLDGASRPLREKALEALLGKKAIFDTAEAYREKIDDRLFGLGRERYSQLVSLLLQLRRPLLAKDLDPVKLSETLTAGLRPVDDDLILQAARDFENLAEIQALLNALTGADTAVRNFLRDYTTYLRAHARDRIDHVTGRIQDTAAQCEKIMEAAEDRRASERQLASAQQERDAAERQCNELGARLAEYKDHDAIKQRDGLKELRDRVHAERQGLAESERHLSQAQKSLATLKGEAERAVQRHGELRKAASRHTDNLMDAARSCGILHDDATLDLGAELDTDVAGRVAARRSELKDVHAHLGAFEDARKAQEREQDHCDTASGELTEAERQSTAAAERLEIARTTASQELDEFISRWSSGNDITVLAASDGDALRAAVDAVGEPEAAPLLEVFRSLTDQRRTRAAARVDTLEREHSGAADALRSRQGERDTVAAEADDAPPPSDLRPASRDERLGAPLWQLVQFADHVPEDHAAAVEGALYGAGLLTAWLHPDPVLTDQALHDKVADAYLRPLPPAQRPTGPTLADLLVVEDQQLVAAATVQAVLASIAVTDDIPATDDALPAPAVTTGSHFSLGVQVGAHPKEQPEYIGATARAARRRERLRVLDESIAALEAQLAGIEEQQRYAQEAFDDFDRARRELPRTRPITEAVGEVAVVAEKVTGARRRLAEARKRLDGTIARAHEKNRQLRHAATAARLPTVREELDKVAQALDDFAGAGKALSTCREQADAAERDIAGRRDIIATQTESCTEQAEALQARKDAFAVQEERLRTQEATLEAPLQEILQQIADAEVQLTAARKTYGRARKEAEDQRDRLLKADHALEFGSTALATAVAEQVRTTLTLEPYARPDLLGLLEANAETVWLPQDVWPSPEQAVQTLMDSLTSPGTSLTGIQAAQNVVPASVASLINALDEATRGRPITASLLKTVTTKISTAITALEAALLESDQGYLFEWEPAGDIILARVTDSEGPAPVADFARRLAEQLADQSVLLEDKERTVLEDGLLTGLAEQIHDRTVAARDLVRSMDADTRSKPMSSGQTVGINWVISDALTDSQQAVNKLLDKNASGLGPAGLADLRSHLRSQIRTKAAADKKRSYQQVIAEVLDYRTWRKFELRLFRPGMSEEERKKGELLTKAKHSVMSGGEKSASIHLPLFAAAHAQYTSAYPTCPRLIALDEAFAGIDEKYRPDLLALTAKFDLDLFMTGYDLWITYPDVPQISHYDMKHDEASHTVSAMLLVWDGEQILDDLEYPGSDDLAAELLGFTPRRHVPAQAGLLADIPDDEPTNDDTEEAE

SEQ ID NO: 38687 - protein, 443 aa, Streptomyces scabiei 87.22
MTGSAAAYERYRAPEFRRLLAAARRSLERHGGEVKGSIGLANPTTAERNAIIGITGTYRPADVRRITIPLSVLEQSVRNVTGMSLLDVLEEIGPELRFRADERTAVDQARQAILAEGEASPLHAAHSWYRQWLASLASSDGTITALINKEDTHLFSQAVRVLEHLYNRPSDAPPIMLPALADATTGDTKALNPGRGSLPTLVLRALAMARGKPLESGAEARRELWDAFDVIVDDLASRVLVLNLPATGQGLGQWLTDAARYGTPFHVTLHQLVTLPIAVDLPTVYVCENPAVLRRAAGELGAGSPPLICAEGRPSTAFHRLARLIIETGGTLRYHGDFDWPGIDMTNQLRARYQAEPWRMSAADYLSAVRADSDHVPLSGKAQDTAWEPGLAEAMKRENRAVYEEAVADVLLADWKGPARKEGDGQAHGPRHCLPQEMAARAQ

SEQ ID NO: 38688 - protein, 605 aa, Streptomyces scabiei 87.22
MFRFTTGETPDLDGAVLDAFGAAAEHLETELGPDAVRAWLRRADRATAAEDGELHETLGRLVRWELLDVLHDHHAEHHPAAVEHEPHHPTVEEHKAHHRTAEEHQPHQPTAEERERHTPRYALTLRGEAALAGVRRTLEVLGSAGAPRTAVLDAIADRLDELCLLSGEPASADRRISTALRELEGHMETLVENATAFNGELQRLLRDGSADPEAFREVKAATVAHLQEFLADLDRRGRAVAAAVARVEERGSAGLRERALRGAEPLPSAGPDRTAAWLENRRARWAVLRSWFRPEDGARPRIERLHDIARRAVVSLLEALERIDASRRPSSGAAQDFRELARWFAAAPAEEDLHRLWSAAFGLGPARHAHLAHPDPELVPSSRSWAETPPVEVSALLRSSGRTERFTRTARVRDVTAVRAERAERARAERAELALACRMLRTRGPVRLSAFGELEPAVFDRLLDLLGRALSTRPDTAGLRRATTGDGRVEIVLAPPSDARTALLRTARGTLAGPDYVVRITEAGGAATPPATPPAPPSAEPAPARQPWAQPSVRTGQPAGPPLRGTHPGHLPAPAARPPLPPSSDVPVAAFPAGHSSALRRETAG

SEQ ID NO: 38689 - protein, 435 aa, Streptomyces scabiei 87.22
MSSLANQLAATEREEVSRAVRILLARPLLTETSDPAGFALVRRRREPVARWFDHTCGWTLLVEPRRGYARLVKVRADPDGSRPARAARAGRAPFDRRRYVLLCVTAAELLTAPMTTVGMLADRVVRATAADPALPAFDPARRAERTAFVDVLGLLESYGVLHAVDGSTEAYAASPHATVLYRVDTTLLTRLPAAPVGAARPAVPPDEMPARFGDLLTGLVRERRHDGTDTGDGTADDEHAGTAAPDARHGRRLRHSVLRRLFDDPVLYRSDLTGEELAYVTSPAGRQTLRRSAEQAGFLLEDRAEGFLLVDPDALATDVRFPDDTSTARVAALLLLEPLCAEPAGLLPEQLAEAGTDLLRRFPRWARTYRPEEDGGARLSDDAVDVLCDMGLAHRAAGRTLARPAAHRYRLTGTTCPAPGTPETEKSAKTEEDEQ

SEQ ID NO: 38690 - protein, 1377 aa, Streptomyces scabiei 87.22
MSLTELPLPRRPEATEPARPAARAADTPGGRWQPHRAGILNVWRYYDETFTFHRGRLLLRGQNGSGKSKALELLLPFLFDASLRPNRLSTFGGSERTMHWNLLGEGATGKTRVGYVWMEFRRVDDDGTERFFGCGARLQASVHTTGVHADYFTTGARIARPDGVLLVNEAGQPLTRAALAEALGDRGEVHTSATGHRTAVRRALFAGMGEQRYESLLSALLQLRQPKLSERLDPSLLSTLLSRALPPLGEGEIAELAAGFEQLDRQREHLRRLDDEVAAAETLAQGQRAYARRVLRAGAAALIEATAETDDLTRAARKSAEELAQALAQRESARALREEQERRARALEETVEGLRQSEAYGRGEEPDRLRRRTEDAAAAAARRRALARAARAAAEQDRAHADGTAGRARTLDEHARAAAEEARGSARPAGLESVHDEAGTLLGATDDPRRAADDPAGESGARQARLLLRRAVTARRQQLTAVTGAMDEHDRAVRDRDAAEDLLDEARARLAEASALLDEAAGAWDTALAAQGERLLAWAASCTELRIADPGELAASAAAESEVTALVEAAARPSEREIATAEATVRAARPGLWDERGRLVEEVRRLGDEPDLPPPAPATRTTVRSATAGAPLWRLIAFREGVPMPVQAAVEAALEASGLLDAWVGPYGGITLPGHDTRAESALAVAAPGHSLLAVLRPEEGIPVPVDTVNRILAGVAFGAGLPDGHAAAVSAQGAWRLALATGSWSKPEPVYIGAAARQRARQRAIAALTDGITRTSASLAALDDRSREIAARRARLDADLAARPGHRELDAPRRERDRAEEAVAAHDDAVRHAAGRLARCEDAVAGALRELSRRAAEHELPADRGRLRALDAALGRFRDTADGWVDARLAAHGAADAARQAAAHAARSGQVADEQAGDAAAAEAEAAALRARLEAALAGTGADHRQIVARLAEAREELRRCREAVARAADLQLRLEGRAGGLRAVSGQDAARHEQAVLARDRAAHRLLHLCLAGLAEDAGIAPGPDAGVAPGPDAGDDPGAVLETARAIAAKWPALPYAPRHLGEAATRLSEAVHEARRHLGARADLDLAADDDVLVFSAGLDGVRVGATGLLRALARQRDSSRDDLTGGERHLFDQILTGDVRRHLAVLIRRAGELVDRMNEHLERVRTASRVAVRLVWDVRPDLPDSTRTARELLLKDPGRVTESDREALHAFLRARIGEAGGSDTAVTWEEQLGEVLDYTAWHRFTVHLDRAGGTGWQPLTKKLHGALSGGEKAIALHLPLFAAVAAHYEAVPLAPRPILLDEVFVGVDTVNRGQVFALLTALDLDLMITSDHEWCTYGELPGIAVHQLLTDGHDDAVTSARFVWNGADLETG

SEQ ID NO: 38691 - protein, 510 aa, Streptomyces bingchenggensis BCW-1
MFRFTTVERSDLYGAVLDAFGVAGEHLETALGLDAVRERLRGVGWAAAVEDDELHEVLRKLVQWELLDVVHNHAENYRTAEEYERRNLQFSLTRKGEAALAGVRHALEVLASTGALQTAVLEAIADRLDELCLLSSEPASVDRRIFSTLRELEGHLEALVENTKAFNSELQRLLRAEAADLEVFREVKAATVAYLQEFLVNLDRRGQAVAAAVARVEERGIAVLRERALRGAELPPVTGENPAAGWLESRRARWAGLRAWFLPDDGARPRIEQLHDIARRAIVSLLQVLERINESRRRSSSAVQDFRELARWFAAAPAEEDLHRLWSAAFGLGPARHAHLAHPDPELIPSSLAWSEAPPVEVSALLRTSGRTERFTRTARVRDVAAVRAQRAERACAERAELARAWRALETDGPVRLSSFGALDPAVFDRLLDLLGRALSARPDAGGLRRATTGDGRVEIVLSPPPDGRVALLCTAKGSLTGPDYVVHITAVGGASAFPALRATRQEAAG

SEQ ID NO: 38692 - protein, 448 aa, Streptomyces bingchenggensis BCW-1
MSTLANQLATAEREEVARAIRLLLARPLLTEGADPAGFELVRRRREPLTRWFDYTCGWSLAVEPRRGYARLAKVRADPDGSRPARRSRSGRAPFDRRRYVLLCVTAAELLSMPMTTIGMLADRVVQATAADRALPAFDPVHRPERMAFVDVLKLLESYEVLRVVDGTTEAYVASAEAKVLYRVDTTLLMRLPAAPVGASRLAVPPDEVPARFAELLTGLVRERRYGGAVVDGTADETHRETAASDAQRNLKLRHSVLRRLFDDPVLYRSDLTEDELAYVTSLTGRQILRRSVEQAGFVLEERAEGFLLVDPDALATDVRFPDDTSTARVAALLLLEPLCAAPVGLLPEQLVEAGADLLRRFPRWAKAYQSEDGAARLADDAVRVLRDVGLVHRTGGRVVACPAAYRYRLTERASTDPENKRGPERGTSPRETAGTSVSGGVAVEGDEQ

SEQ ID NO: 38693 - protein, 1385 aa, Streptomyces bingchenggensis BCW-1
MSVMELPRPRRQESIEPAGTLPQAADPARGRWQPHRAGILNVWRYYDETFTFHQGRLLLRGQNGSGKSKALELLLPFLFDASLRPNRLSTFGGSERTMHWNLLGEGASGKTRVGYVWMEFRRVGDDGTERWFGCGARLQASVHTSGVHADYFTTGARIAHPGGVLLVNEAGQPLTRAALAEALRDRGDVHASATDYRAAVRRGLFAGMGEQRYESLLSALLQLRQPKLSERLDPSLLSTLLSRALPPLGEGEIAELAEGFERLDRQREHLKRLDDEVTAAETVAARQRAYARRVLRSGSAALISATTEMDNLTRVARQSAEELEQALAERESAQARRQEQETRAHALEEAVEGLRESDAYKRGEELAGLRRRTEDASAAAERLRATAQATQVRAEEDQRRTDEVAGQARTLGEHAREAAEEARRSARTAGLESIYHEARTILDVDLAEPLTDGVGGATGGSRPEGSGATPTAGENGARQARRLLRGAAMARRQQVTLINEAMDEHDRAVRDRGAAEDLLDEARTRLAEAIARRGEASAAWDDALAAQAERLLTWAEGCTELRIADSEALMAGAATEAEVTALTEAAARPVEQEIATAEATARAARQGLRDERSRLAEEVRRLSGETDLPPPPPPTRTTTRTATAGAPLWRLVAFREGVPLTVQAAVEAALEASGLLDAWVSPYDGITLPGHDTRAEAALAVTAPGPSLLEVLRPEEDIPVPADTVTRILAGVAFGTHLPGGHPAAVSTDGAWRLALATGTWNKTEPAHIGALARQRARQRRIGELTERIGETNASLAALDDRLHDLDARRARLDADRAARPDHRELDARRRGRDRAEERVAARDDAVRDAAARLARCETEVAGALRALSRRAAEHGLPTDRGRLRALSVDIDRFRDTADSWVDARLTATAAADRAHQLAAQADRSRRVAEEQAEGAAAAEAEAAGLKARLEAVEATVGEDYRQIVARVAEARAELRRCREEAARAADLLLLLEGRIGGLRATSGQDAERRERAVTVRDGAAHRFRHLCLAGLAEDAGSTPELDAGDGTKATLEAARAMAAKWPGIPHAPRNLGDAATRLSEAVHEARRRLGARADLDLEPDDDIQLFTATLDGVRVGATGLLTTLTQERDRSRDDITTAERRLFDQILTGDIRRHLAARIRQAGELVDRMNGHLERVRTASNVAVQLVWDVRPDLPDSTRTARQLLLKDPGRVTESDREALHAFFRVRIEEAKGSDTAASWEEQLGEVLDYTAWHRFTVRLDRANGTGWQPLTKKLHGALSGGEKAIALHLPLFAAVAAHYEAVPLAPRPILLDEVFVGVDTVNRGQVFALLSALDLDLVITSDHEWCTYGELPGIAVHQLITDGDDDAVTSARFVWNGTDLEAG

SEQ ID NO: 38694 - protein, 450 aa, Streptomyces bingchenggensis BCW-1
MTRPEPAPGERTLRRPELRPLWHAVHDRLSSGLPVARVRLGPLDDAQREALADLLGLDRLPDARPSVALARLEEAVTELCGHTVRETVTELVGPLDDRASKRRRQDGERAELWTWLDGHGTVRAQPALAEWAASCRAAGLVGGSPERTRSLLTDALTVLAELPAQAEPLPVFAARVLKGDSHALDDGTRLSTLVLRALATLHDTAPPQSAAGRRALWTRAGVADDDLSATVLVGGLRPSGGGPLARVANVCAEAGQAASLTLAQLRAPGEFTLAAAPAPVVHAVENPSILSLAVRRFGPRCPPLVCTSGWPNSAAIHLLRLLADHGATLRYHGDFDGEGIRIAAYVLDKTPARPWRMSAADYRAAVARTPQGPRPGRLTEAPWDPELTHAMTEHGSAVVEELVADVLLNDLAVAGLPVVSPTSQGHTARAATRRGSGGGRHTAGRADGAP

SEQ ID NO: 38695 - protein, 496 aa, Geobacillus sp. C56-T3
MDATWLKPIVETKYLSTENAHRYRAILRYFYIQHERMRQYLFPEEVYAFLKQHEEFADYTEDDLQQDLDQLVKWNNLIARQETAHVRTIEEFKKKRFRYQCSPYTVEIERMIRTLEQLGDSFGGSLEKTRFDRLYASLSRMEAIIASDFQEQADEMHQVWEETFDYFKKIIQNSADYIAYLHSENLEERMTSESFLVYKEQFTAYLRDFIVALQKTSMQIEQLLEDLPEEGVRQFIEHVVDYERSIPRFADALPPRAVQIEEKWETWRSLCEWFLGRDGRESELSFLQYQTNEAIRRLTRVVQRLGERHHHFRSRKGDYLHLARWFSRLESIEEAHCLSAVVFGCFHTKHLVADFGATDNIYRDVWDEPPAEWVTKPRVRHYGEKKKPQAIEDKEREKEEARLRYLEEKEREEAALRQLVTDGKIVLADLPEVTPYVRKTLLGWIAKAMGREGQAMKTENGWVVKVVNKDGTICLRAEDGELVMPNYEIHVLSGGE

SEQ ID NO: 38696 - protein, 398 aa, Geobacillus sp. C56-T3
METAFDDKAKEALAALFEQFWIIRDKEPDLYQLVREREHVLKRYVEEKFGYRLIVHRYFAKLEKIPAEPEPWMGIESFQEPLDYALFCCLMAYLEGKAVEEKFLLSDVCEEIRAMYPGDLPVDWTNYSHRRALIRVLKTAEQIGLVRRMDGEIEAFAQHVEEEALYEVPVLARYFMRTYPKDLLQYESIDELLAEEWKASPQDYRRHRLYRKLFLSPAVHRTEGDEQDFYYLRNFRHRLRDDIEAHTPFRYELYKNAAMLTLPERQAPYTVFPDQKGTSEIILHFAALVRERLREYPPDEYGRIRLTPEQFSAWLADCRRRYGAGWGKTYRDMSAAELVREMLAALNEWRMADVEHDTGMIVLYPLLGRLCGRYPDDFDAKEGEEHGESMGSSSRRID

SEQ ID NO: 38697 - protein, 1373 aa, Geobacillus sp. C56-T3
MANPWVLHRAGLINFWYYDEQYFHFADGKLLLRGSNGAGKSVTMQSLIPVLLDGKKTPDRLDPFGSRARRMEDYLLGEKDVVNRDERTGYLFLEYKRKESDQYVTTGIGLRAKRQKSLDFWGFVLFDNRRIGYDLQLYKQEKTGEKIPLTKRELAALLGAGGTVVETQKEYMELVNKHVFRFESLEAFQELIELLIQLRSPKLSKDFKPTVIYEILESSLPPLTDDELRHLSETIENMDQAKQQLEQLERDERALKRLCDQYRLYNEYMIAEKAAEYVKAVKQAEQLAAEQHRLHDEEEQARKTLGELDESIIRLRREEDVLRSREIDLAGHEVFQQAEKYEQLKAERERLQERRERHEQTIAEKERLERQHRRRLDESEARLNDLERKLEDELAQLRADAEEGAFSLHETNEDDFHRHRQKQQEFSFAAWKQEADRHIERLEELARLWRRHDDVKRRYEEASNEASERRREMEEWRHQQRKWEELFEQEKERFEQAVLAWVEQGGIDVSETDIQAFLQQMGSLYEQYSLDDLKRPFVQAYYDAVGKKKDEKWRLEHDIRLLEEKQAEREAELRQWREQRDPEPERDEQTTAARLALEQEGIPFVPFYAAVEFVDDVPDDVRERIESALSHAGLLDALIAARDVDVDCDRVLIPKPVHMAHTLADYLRPDADAPVSAERIDEVLRSIVITDAEQEGGMTIDETGRYSLGLVRGHAPRRARAMFIGRAARERWRLENIAALEAEIAALGQEIDRLSGEHQAVEAAIRALADWFVSFPSDRDVRTAFEEGQEARRQAESKEREWKRQEEKAALLAREWKQIKQQLHDESAELDLAFTLDGCEQAQLAMKSYVRHLHELEVLYRETRHTEAMIAQQRERLAALETEIDEAKGERNRLRDDEERISLEIAEMERTLAQMGADDIRAEIARIQERLAFLRQEIPRLVNERARTEQRLMRLVEEREKGAQREAFACQLAAMWERSFADEAALGLVDLDRSRSLLEQAKEAKQRYEAVLKETRSSLLARLNTVFFQESSNLTEYRATFERLAEQKEPEWIAAAPDDEMAMKAADWREKQERHVIYLDYKGERATPFAVLAEVERDIALQHEYMKEQDRELYEDVILKSVGRILRSRIQRAERWVSDMNKLMGGLDTSSGLVLSIQWKPKTAETEAELDTKELVRLLRIDSRLLREEDLQRVTNHFRSKIARARELLEERGQGNTLHQIIKEVLDYRKWFAFTLYYEKANEPKRELTNHRFYQFSGGEKAMAMYIPLFAAAYSRYQEAGDDAPYIISLDEAFAGVDENNIRNMFGLVEQLGFNYIMNSQALWGDYDTVSALSICELVRPRNASFVTVIHYRWNGRIKQLVIDDKEWELMET

SEQ ID NO: 38698 - protein, 406 aa, Geobacillus sp. C56-T3
MSAVKEAAAFFRSEPGFHRLFIEMKRKYESLGRVGGVVSLAAFSEEERAAVAAFFGKDVSRVSLSDFEKQLEQTRFAGVGLVELLEHYFGVPLMSNKERRQAEAEERERFFARLAEEHHWFAAVRGQRFVQGAYETDRDGLEAAVRLISAALCRLPLSSYMRLPLFAQQVASDPHAFDLSTLPGRLLLSALQATTPGQWDVTSVESVNELLQSVGLLREDILNFVTCANILAETEGGPHPVFSAASETNTALNMPLRDVLSLVSVRPARGGTVYIVENAGVFSTLLDTRAPLVSTNGQMNLATMKLLDLLAASGAKLYYSGDFDPEGLAMAERLLERYGQSVTLWRFSLDDYAAANPVVDLPSERLAKLASVTSAPLQPLKEEMKRKKKAGYQEAIIGRLTEDING

SEQ ID NO: 38699 - protein, 495 aa, Thermoanaerobacter mathranii subsp. mathranii str. A3
MEDKLDLNVIKPIEEVKYLSAENASRYRLIMRYFYEQYQKFKYWLYKEDVYEYVSQFDVFSDYTMEKCEQDLKALTEWKNLIATQDTSKASTIDEFKNKKFRYQLSPYSIEIERMTIRLESIVGYGGSLQPSLFERIYRNLIKINEMAKKEDLQEINRWWEDLNTDFENIYHNATDYIASLQSSNADELMKSEQFIIYKDKLIEYLRDFIKDLQRFSVAIESFLKKVSPEVVNSVVDKLCQYEMSIPRIDMVLNEEEVKEDLMDKWNNISFWFTGHNFEDSEAVRLLNISNEIIRKITMYAARIAENRMKAASRKNEYIALSKMFAKAGSIKEAHLLSAAVFGCFYTRHIKGDFERKTESVNQSVWEEPPFKVIIKPKTRSYGNYVKTNAIIDRSADKTEMLMEYLNQKNIEDEIIASCIVGNRIRIKDLPVVKPFVRATILKWIGKAMARNGFTGKTEDGRTYRLHIPKNGERAILKCTDGNLDMPDIVIEFVD

SEQ ID NO: 38700 - protein, 383 aa, Thermoanaerobacter mathranii subsp. mathranii str. A3
MEELQMLLENFWILRDDRENFNKIRDAENKIKPFVEEKLGYRLIINPYIIKLEKVPSDVEEWMGIDAFQMPMDYAFLCLLLAFLEDKGPEDQFVLSNITEYIEAQYDGPDKVDWTLFQHRKSLVRVLNFAVDIGIIKIDDGDHERFSESEDTEVLYENTGISRYFLRSFNREITEDMKIEDFLQEDLNLSNSKDAVIQRRHRVYRKLILSPAVYSEGPDDQDFMYIKNYRNTIAKDLEEYLDAKLHLHKTSAFVLFNDNKYLKSYFPDKNKNISDIMLQVSKIIREMIEEGKLAYNPDDTIDITEAEFINIILKVKERFSDGWYKSYREMSEKQLIEEVIENMESFKMIKRVEELHSIKILPMAAKLIGEYPPDFEKGEDVDE

SEQ ID NO: 38701 - protein, 1388 aa, Thermoanaerobacter mathranii subsp. mathranii str. A3
MSEKLAERWMINRIGLLNFWYYDDEIFEFADGRLLLRGANGSGKSVTMQSFIPLVLDGNKSPERLDPFGSKARKLEDYLLGEEEVSGLDERTGYLFMEFKKEKKDSYITIGIGLKAKRHQNMDFWGFVILDGRRIGIDFFLYKMEIGDDGKRVKVPLTKKELKNRIGEGGEVVESQKEYMEMVNKYIFGFSSIEEYDELIKLLIQLRSPKLSKDFRPTVIYEIMKASLPSLTDDDLRPLSETIENMDQIKMHLDVLYRNMAAVKKLKNEYDNYNKYILYEKAGDLVKAYSDLYASKKEYDNLTKDIENYRSTIANLGNDIISLESEREALKKKEEQLSSGDAKRTQKELLEEEDRYKQYLEDKSKKEEELRNKQDKYYGLERKIKNIEVQKYKLEKELQDKLEDISSIAQDIDFMEHEFSVSELKKVYGKEFDFTYWKNELKKHKDKIKRAMSALREEIEANKRYDAALKEQERLKKEREERAKKLNEAERLFDEQKREYVERVYSWSQGNAELKLLSSQLEGLSRVILAYGEDKGFDDILAFVRKPYEEILNGIQQEILRLENQREVKEDQLHEKEKLLEEWKNKKDPEPERDEQVINNRKRLKEAGIPYIPLYMAIDFKEDVDEETRGNIEAAIEDMGLLDALIVPKEYFEKALQMDSNMADKYVMPGSFNMMLNVSQYFRVVDNEEGVSPEDISNALSNIFVSEEGGTTYIDSNGAYGIGVIKGKARDKVKSKYIGSESRKRYREELIKSIQEEIQAIKAEISAIDEEINAKKLRIQRLDYEYSAFPGKEDIEEAYRYLKTAKADYEYTSHKLDEQLFTVKNCFEDLQKKKAVVRELTSGINIHPDIDTYSSAYEYAEEYASGLNEVEILYNKYVLQISNEEMLLQQKQDLEYDIDNLKYEIDVLENKIQSSVKKIEMLKETLKELGLEEIEKELEICLKRLEEIPKEITNKSAEKAKLEERLQRSLKDLLNIEEEINLKEKIYNIVEEGLKKELALGFVKQDVEMEDMLKLSKSILSEYKGFFDKAGFDREKFTERLQNVYFETRNELLEYGLSIGNIFDEACEGDNERIKEAKNKQRRLNITANINGKIVSLYTLYSNIEEDIMANESLLRETDKILFEEIIMHNVGIKIRAKIFKAEEWVKKMNKLMSERDTSSGLKFSIEWRSIPASNEEELDTKELVDILKSDADMLKKEVFDKVVNHFRSKVERARRAMEEKNNTETFHKIMKEILDYRDWFEFKLYYRKEGESRKELTDNAFNKLSGGEKAMAMYIPLFSAVYSRYEGASPTAPRIISLDEAFAGVDDTNIRDMFKLIEDLRFNYIMNSQVLWGDYDTVPKLSIYELVRPKNAKAVLVMKYLWDGKVKHLILPEKEEVAALEVGAINE

SEQ ID NO: 38702 - protein, 440 aa, Thermoanaerobacter mathranii subsp. mathranii str. A3
MNKEELKYFKEKKGYKRIFEGIREKYRSLGRLGGVVKLDNLTEDEKEVLTNHFKKDYRTKKSASIDVAKFEESLKNTRFEEYTLKDILEYYFGEKLTSKKEDMEILAKEREEFFKELFSKYKECKCIDWLKSLYEGTAVGVRAVNQRYLNDKDGLKKDIMYVCDAINNLPVYKGEKKRLPVFSSQIARNPHYFDSNTEAGSMFINALCTLMGLNEVKGSEEISELYYNVGILIDEISNYVTLSGLLAYEGDTENQVFKAAYESNQVLQVPLLNLSKIERIVSPSKKVYVVENPSVFTSLIDATSKVFPVVCTYGQPKLSSLLLLDMLYKEGTEIYYSGDFDPEGLMIADRLYKRYKDKFHFLRYDVEDYLKSLSNEVINDVRLSKLNKIESPLLFDVANEMKIIKKAGYQELIIDDIINDIKLIEEGKGGGKIKVISMPS

SEQ ID NO: 38703 - protein, 509 aa, Nocardiopsis dassonvillei subsp. dassonvillei DSM 43111
MVERRALDMDPLAVSDRFRLFNFTRRDDHVTYLWILRAMDRLREVHQVQVAPDDVAEALRELARSHDGVPVPDRSLRDRLDELHADRVVHRFDDASRAGNLARYRNRQSVYQFSELGYRAYQSVENLLGARIEDVNLSRLVFSEVLDDLRALAEANRTGRAEQVYRRLARLDAVMEDMGRRSAQFHVTLGEILRSTDTSPDIFLRHKNALLVHMSDFMAELDRYLPRLDRAVREVEETGLATLLSRAADSDERLFMERDERLADWRRRWRALRAWFASDDAIPARAAELHAATRSAVSGVIALLRQITEAQRGGVNRSTQLRHLAEWVFHTPDDGAAHALMGAAFNVRSARHLGAAHDDEEQIPPNTTWWDAPGMEVSVTLFRSGNAPNAGVPKPVRRNPGAQARLRGQQAAGRAAEREAAARLVDLGAHGRVLDETDTRVLLRLVTRALESRSVVAGRLSSAGGEGDGTMVRLVPDPAGSTVHTSQGRIHLPGLRLEATGHRPRTKNT

SEQ ID NO: 38704 - protein, 480 aa, Nocardiopsis dassonvillei subsp. dassonvillei DSM 43111
MPRLFARTVAPADLGSYQQAMRRVLTCDLITAARPRPGVLDQVLRWADELAADLERLFGYTLVATTDHVRLVRELDALDPTQRQTFSRRGKPFDRRRLAYLCLVLAAFQRSQIEISLADLVARFTPGANAVAGLGYDPTDGAHKAALVDVAHWLVDRGALHLSDGSLEAWAAGGEQGDALFDIDHEVCELLFRPARPVQHLGSVAGLLADPLTEASPREQAARRARRLLVERPVVYYADVEPAVAAVLRGRGVAEDLARATGLSVERRAEGVLLADPAGTFTDRPFPGRGGAVNRTAGLLLAKVADLLETSLAALVRLQVPPHADDQAELVRLVDAGLPRDGVVADLAWTVEPAGEREEAAALLEVPLVERGRWETMIHELYAEFGAASFGGAWQQDPYGLLDAALTLLAELSLIRPVPGGALVLPAASRYRNIQGALPERADGGQLPLGLTEPPPGGPVSSGPSPDTAPAAASTSAEGK

SEQ ID NO: 38705 - protein, 1427 aa, Nocardiopsis dassonvillei subsp. dassonvillei DSM 43111
MSPRSDRFRPSRAGVINVWDYVDEEFVFADGRLVLRGHNGSGKTKALEVLFPFILDGYTDARRLDPFSGQNRTMKSNLLYRGQDSEYGYVWMEFARTGPGEGTETVTLVIGLRAHRHRDGVTPSFFVTDQRLGVDFGLLATDGRPLTERQLKGVLGEDAFRSTAADYRRAVDARLFGLGERYVQLLDLLLALRRPLLAKDLDPEKVSETLTSGLSPLDEELLDQAARDFTNLAAVQRRFDQASTAHAATTAFVGEYAAYLTAHARHRLARVHTAAGQTAEQARAIAEARDTRERATLAHAAATGRAEEHDARIRRLAARRGGLEAHEAFRSHAALEIERAHSAETARALAEQRARLDDQAGEVTALQREADRVAADLEHGRARTGELAAELAENAAQAGLDHDGEGPADTGDDLSAAARARATARRADVAAVRERLAELARAETARGAAERAAAQAEDRLGRGEAECARAADDLAAARAGAADALTAWAEHWAEGPAPVTDAACVAALSGALESVGRPGTPTVSEVYGEHTDQQRLDAAAHTRTLETDRDRLGAEIDRLTRERADIAAERDDAPPADALRTASREGSPGAPRGRWSASPTRSANDEAAAVEGALHGAGLLTAWVHPDADATRAALASGGADAYLLPAEGAAAPEGPTLADVLVPERQDRVPEHVIARVLASVRLVRDSEGSAGATDTVQSLGAADATGAGGAAAHTVGTGARFAQGVLVGVSPKAAPEFIGATNRAHRRRERLAECDARIAELDERRARVAEQLDRAGELLKAFTRARAALPETAPIDRAVRRVDQQSTLLASARAESEERRRDLDAAVAEVDAHRHQVRAVASERAMPAQPEAVDAVARAVDDFLETARRLHTARAEVDRHTVDLDGRKETLDRLRARLEEDRERHEERTREHERAAAELAAKQEGIDAPVRELMAELEQVKEELHRAREEHQGAQKEAAAAHEAMIRADEKLEGGQRALTDSLSALFEQADAFAALTHPDLRATLGVDTAHAWPDRRSWPAPEEAAEQVLAEAPDDPEAAVRAVLPGRAAELLDAFTAAVGSGSAVTDGDLKTVSTRISNALRAFQDTLGGDAEGYRVDHELGVSGVITVFVNDETGRNPVSAFARVIAERVEEQGALLREEERGVLEDELLTGIAQQIHERVRVARDLVVSMDRDTRSRPMSSGTRIGIRWSRSDRVSEHQATAARLVRRDTDELGASGLTRLREVLREMIREHHAAHPRATYKQVLSAVLDYRTWYRFELRLAVPGQEEVKLTRNKHEQMSGGEKSAAIHLPLFAAANALYTSAAPTCPRMVALDEAFAGIDDRYKPELMGLTVTFDLDMFMTGHDLWVHYDSVPMAAHYDMHHDKGAHTVSAMLMLWDGTQTIDADAGFSGNEELAAQLLGITPSRFAPLSSAGTLLEDADA

SEQ ID NO: 38706 - protein, 537 aa, Nocardiopsis dassonvillei subsp. dassonvillei DSM 43111
MGLNQWTDNHADDGRGADGRPTPRHGRASLLRLAAWFEEADPDRADALAAASYALHPALHLEGRVDEGVAATTSWWQADADRSTVTEHPGARPPEPVSDHRAQQARLRDAAESSAHWRRAGAAQIRSLLTEPTGRRARLDLSGAGMEVLMELLTAALGSGDASRRPTSAGDLEFALRLHVVAAPGADVTIRGEGGELTLEGLRLLVTPYEQHSPGVLDPLPEEPEEDGADPLAAGAPEGGDAAPEGEEASADSRTPVDPLGPGTDEDLSDPSEEPSEDPPAPAAPAASVSPDAPADPEASVLASVPTAPEDPEAPAGTSVPGGSLPPFDPRVPGAPESAQTPDDPLAPADSPHSAVADRSTGPQAPAGTEAPTASSAPTDTKNPETPAAPFDPRLPTASGRSASPGTPSAPFAPRNPFAPAASEDPEAAPSPAAPRTPQTPAASTEPLFPQPPTVPPYSAHSDAPPAPEIPGTPAAPSYADILGIPVPSATPEPSPAPDAAPRPEDTEPTGNLPGPDPRAPGPDDLSANPPEKPSWE

SEQ ID NO: 38707 - protein, 464 aa, Nocardiopsis dassonvillei subsp. dassonvillei DSM 43111
METDTYSEDAALIGERQAAARALLAHPLLTERTHPAEFALVRSHTEWLVQRFQRVLGYRLTVAEDHARLVKRGLVTEVARPLARGTGAPFTPRTHTYLALSLAVLVEEQGPTTVRGLAARVRSAAHEAGVDADPERGLAERRAFCAALLHLVSLGALTEDFGTIADHREDPSADAELIPHTQVLRSVAVHLPRASDDPDSFLAAARDTDPDGDHQGETALRRLLAETAVVYREELPDRQRDRLAAHQWRAAAALGNLLGCDTEVRAEGVALVMPDEAGARPAFPSDDPVGQVALALVRHLSGRLHPGRPATSAPVPEEEMNTALEALCGADAPARAEWARTAGPEIPDPGRLRERVLVLLADLGLLRGAPGRWRLTAAAARYGAETDIRVPPIQDNDEDSRTHPDPVRAPGDDEGEPDAPADPRGDLSRVASVLQAVANEKVSATSGDSGDQPGPGSGGGDGSG

SEQ ID NO: 38708 - protein, 1584 aa, Nocardiopsis dassonvillei subsp. dassonvillei DSM 43111
MVTQETSQAPEAAAATGPADSAGTGASGGVPRYRLERAGIRNVWQYDDHVLDFAEGRLLLRGRNGAGKSKALEMLLPFLLDGDVRRLDTTGTNRTSLRWLMAEDTRPGRLHGAEDDGPDLLGGPGAEDASEDAPHGADASGDPAEEESGPATRLGYLWVEFTTERGDRGLDAAARSGNGRGASALLAGTGASSASALLAASAAASAAAGSDAAAREPEPRDPDAPPSHLTLGAAVMAVGDSDPRCVFFVTDRRVGHDLELVTDGRPKPVDRLRSEIGADNCFTSPVPYRARVMHDLFGIDDSVRYRNLIHLLYRLRRPTIGDRLEAGELVGVLSEALPPMDETVLDEVARNIADLERARSDKDALTEAGAGVTAFLEDYRGYLVHTLRARAAEVREQIDAAADRTEETERLRAELDDLITAESQVSEERDQARRTRDTARSDDMTLAAAQGGAATATDGERRAYDAAVGAYIRAAEAAWVAAEHAERVERHTVERIGEDTATIERALDVLRQTHAEAARAASAAGIDPGVLGTVPDPVATVHAPRESTTRVDLRGLEQAVEREPVEGVDLDALRERLGRLHDRLTGAADRAADRADLAARLTGLTAAEAAADRRLVALTSEAESADAVLERAHQREQDAIALVRRQSAAYAEGVRAWSARLRDSSHAHALGGAIHELEGSVELPIDDALRVLDPAVPGRVARLAHAAVDPLLEELRARRDVAVGEEGQLSGELAELADRRTKNAEHAPERPGWATYPRPEGDGVPLYLAVDFADGLSTREQAGLEAALEASGLLAGWVRADGALHDPTTRDLMVSPVPVPALSRPVRGRTLLDVLVPAAGPTTGRGVDPDTLRALLSSIALDSEAERVRDPEDAEAEPRHRKDSPGAVALSSAMSLSGGWRLGVASGAHYKSEPEYIGEAARKRARDRTTANTDRRMAIAEALLAEAGERRWAVEHSYAELLEVSRDLPDAAPLIRAWAVLETARDDVAAARRAHDVARDAAEDCRAELLDIREGLRRSSVVEGTGEGGPAEGEKDLPTARADLDSALRALDHLRVLIASALRDLDVLAWELADHEHHVAAWRAVRADRVLAEDARAAAIDDMITVRRQIELGDRARGVAEEQLDAAREQVGARAEEAAQRLPELERDAQRARDERVSAEARLAAATRERAEQVSRALAAGDGLVSSLTWTDASGAEAPDAVLLRAAGLGACAEDDAPLAAYLAARAETAPPGPDARLALLEAFVIGMEEGLAAPEGDDAADVPRVDDSTVLASREDLDRVLASAGWTQVRTEMSEPRGVKRLTVHDEDGAHDVTAYAERIAAAVAGAEESVAIAEEEAFERHLLGELAGHLARQVEEARALIATMNDVLKDVTTSAGLGVRLDWRLAPDAGADIEAVVPLLATPARERTRVQTTRLRDALRRCIEAIRRLDPTATGGAQLRAALDYRSWFTFTVYVTDGAGDERRLGHRTALSQGEQRVVAYLVLFAAAAAHFDALAARAPWAPRLILLDDAFAKVDEPTHGRLLGLLVELDLDFVLTSERVWGCFASVPSLNIYECLRDPNVPGIATLHFTWDGSRRRLVGV

SEQ ID NO: 38709 - protein, 486 aa, Caldicellulosiruptor obsidiansis OB47
MINFQAPLLGKLKYFEYLTAPNSERYRTIMRYCFLCHLEYKNRLTKEEIFTFLKSFPQFADYTEQMCEQDLKNLVEWGNLNSIQDTSKTRTVEEFRNKRFLYELTPIGLRIERFLFELETQEDTKAELNPKHVEKIYFLLQHVDSILQDPQKRAVDWWDELTRSFEEIEKSYSEYISMLKSYEAENLMLKEKFLDYKSKLVQYLYNFYVIFQNYLPRIRSTFLSLEESKIEKLLNYIIAQEKEHPKNIFRDPESIERNIKARFDNIKLWFVASHGQAEKLSDQIQGLIRRVSDLAARLSELSSVKVNRQEEFKHLAKIFSSLDLATCHKLSAVVFGVLLPRYIAAEEKRQSELASLSILDVPPMKSLLRSRGRLVREKSRVLPASEFSEDKKKRFEEYKKKIEEEEKLVAELIKDGRIEFESLPVLTPHVRKKLLVWLSRGLSSGFGNTDSGKRFKVVRPKDDRRCVLRSTDGELEMPAYVIEFVE

SEQ ID NO: 38710 - protein, 407 aa, Caldicellulosiruptor obsidiansis OB47
MKSTLLKLLSNFWILKENDVESYYECKNIDKELKDFIVSKLGLKFYATSDMVRLEKVPLVPREYMGILDFEEPKDYVFFCLVLAFLEDKGKDTQFLLEDITQYIRSNFPGEEIDWTMYSDRRSLIRVLKFCEKMGLIKIDDGNQELFVERADVDVLYESTGLSKYFMRIFPKSLVEYSSVEEILNSEFEFTNGLSDQITDIKRIKAYRGLLIDGIVDFESEAPLYYIKKQKTTILQDLEKFVPELELHLFKSFAYLSVEGNYKYTYPDDSNLCDVLLLCSRELLERVEKGELRFLSAHEMLEISLDHFKLIVEDVKKKYGHFWNKEWREKSTEKIFEELLEFLQLHNFAKTNDDGYLVISPIFFRIVGEYQDYETNSQLSEKDNSNEKVFEDINVDGGFHFEDEQGK

SEQ ID NO: 38711 - protein, 1350 aa, Caldicellulosiruptor obsidiansis OB47
MSKENRWVLSRAGVFNYWYYDEEYFDFYDGRMLIRGPNASGKSVTMQSFITLLLDGNYHPSRLDSFGSNARKLEDYVLGEQGPGQKNEAIAYLFLEFKRQNVFVSVGMGIRAKRGTSTDTWYFVLTDGRRFGIDIFFYEKIGDQKIPLTKKKFENLIGDGGKVFSSRKDYMEEVNKILFGFENIEDFENLIDLIVRIRTPKLSRDIKPDTVCRMLQESLPALSESDLRSLSDSIENMDKIQTELKNLEIIKDVLEKLKKVYDEYNQLLLAQSIFRVVESSKEYYSLKKELENTQTELEKNSKLKAQIEEKIEDLKKEQESLSFRLENIKESDVFKLQTELSTIEEELKNIESQKTKKISQLNAASQKLEKERQELKALEEDLEKCRKRIKDYIDEGKLLVEFIGFQRFLETLDMYLLQNGSLDILKEELSSFLSQVEIVLKNYEKLSEIKKDLDDLYRNLDRNRTEAQKVEEEIQNLLFQLEDVKNSLKNAISIYFEQNEVFKAQDEQKTVIFQAINSCEKKGDYGRIYSILDDIYNFHYLAISDTIRRLEFEIETLNSQIKAKKEEIEKIKSQKDDEIILSPQQKKVRDRLLQKGVPFIPFYMAVDFKDGVDERKKAIIEDALSSLGILNALIVPEKYKDVLSDLMDDEKEMILISKPAYFSHLLNQFLEVANFDGPIELKQEVAAVIDSIFATEKDDGIYICEDGRFGSGILKGRTTTCENARFIGIENRRRYRQMLISQLEDEIQKISLELEGKKQEKNVQKTLLEKLKEERNSFPSMVDLDTAFEMIEERENHKSKLQKEIEFLEKKIRELLGRENSLKHEISVIATKLSVTATRDNFLKLRQEAQKLERLLFVLEKETEMEKVVSNSATTKKKLILQIEESLQSLSLDLQNLKARWENLDVRRTEIVRRLSSDDAQKLFEEEKRAIQRLNSIPKEIEDFNKSLQETIAKISQLETLIEIKGLHLEKAKEEYSNSLEILKIELGFGFVFREENLEDEKRLLEFAKEKSSFASEFKSKDLNQVLQRLISAHYAAQVQLAEFGANLYLKEDDKTGYARYLWTAKKDGRLLSFYEFLEKIESEIIEKKNLITQQERELFEEVLIKDIGRRISSKIMLAQDWVKRMNALMDGMDLSGALKFRLSWEQKKQELEDELSTAELIGLMSKDLSIATDEDKQKVVRHFRARIERAKRLQDSPDSFRSLYEIMKEILDYRQWFEFRLYYQRGMENKRELTNNAYDKFSGGEKALSIYVPLLAALCAKYQSAASFAPRIIALDEAFAGVDENNIEKMFELIENLEFDYIMNSQILWGDYKTVPGLCIYELISDRSKGCVLKVKYIWNGYKKVLVEI

SEQ ID NO: 38712 - protein, 420 aa, Caldicellulosiruptor obsidiansis OB47
MSDKKLLQECIEYFSHKGFSRVLELIYDKYRSLGRFSGRVVLEKPDPVEKEMLSRYLGRIISGDKVVINVKEFAQKRFEQTKFSSLDFKDVLSHVLKKDVLTKKEEKESRQKQLSSFLEKLEKQLANGTDSECVFQAVKENFKWFEGYFKKYSEEKLLSILSHSIKAAATKPEKIESLAVFATRIAHDPHFFDEDRDSGKIFLKILSLLKNVEYPKSSEEKAELLYMHNIVIDELSNWCLVYGIGAITENEKEDEALKIFALQKKPVILPLYTIKDYKQFFGYSNKIVVVENPAVFSMLMQACSDISLICTNGQLRLSTKILLESLCKGGFTIFYSGDFDPEGLLIADRIVQNYGAIPLCLDEESYLLSLSNNRISQKRLVMLRNVKSPELFDVCSKMKELKLSGYQERIVDRIVEKLKS

SEQ ID NO: 38713 - protein, 426 aa, Micromonospora aurantiaca ATCC 27029
MRRLEEWRVVEVWQDRARRDEDFLRNLDRYQLTEVAADLHRAVSSMGQDVAADAAATLAPSVLTGHLGRLRGAIAGDPSAAAEAWAVINPTLTTMANAAAGWQGRLAGALAGTPDAGKLAQIQDTLRRYVDMWGAGIDTHSDQIASTVRVLLETPEQTWRQVAVHGLGATADGASLDRLAASYVQTLETLGRWFDGSNSQARRLRRQMRDTISPLVRGQRTLAAVGGHVSRRAELLALAGRLEAAEDDATGWEIWCRATGLFSARHLPGAGPTPAGNPGAVSFWDAEPAPVAARLRKQGPRGTTGSAARIPDRSQARAAARAAAAQEQAARARTEEAVLARSGLRLSQWRDLTEPELEMLLELLATLAAARLDESQVSSAMTGDGRWMLRADPAPVAHPTAVVATPTGRLVHPDIRLHITLAGRAV

SEQ ID NO: 38714 - protein, 386 aa, Micromonospora aurantiaca ATCC 27029
MGTTSGETRNVQRAFVGLLAKPLVTPDTDAELYRLVARRLQPVKESAQRLGYRVQRVGRAVRLVRVPVAGTVTFPPVPADVVSRRVRSLACCLAACCEETSGTVTLQKLSDMVRDLIAAPGVQVAPYDPEERPQRKLLRDAARLLEEFGVLCRRTSDESLLDEWTESGQGVGAGYAVDRDALLLLTSPDVLELAFATEPAGEEQWVATRTIRQLRALIETPVVLYADLSDDDAIALRARRGPRSHDVAAMTGGHIEARSEGLLVVLTDDERPATVVDWPRARAADWVALLMADIAGRHGARQSDGTVTLTSIQVDEVVDDLVTWRGEYMNSAQKQAPGTIRHDAQKQLVELGLLRVAHDGSWTLLPVAARYRDPDITITTPAETPR

SEQ ID NO: 38715 - protein, 1444 aa, Micromonospora aurantiaca ATCC 27029
MSTTFPDDVTTMTTPGPAATDDQLAEWRDAVTTGGLPQPGSSRWQGLRAGVVNLWEFDIAEYWFADGRGQFVGANQSGKSTLMALTTLIMLAGDLGRQYVDTFGESDKSFRYYVEPTDDARDRRDSSASTNRGWAWAEYGRIADDGQPEFFTTLLYAQAKRGVKAMPPTWIVCRGTARVRDGLTLCEGQAVAVPAQLGAPDGLVVCENGKQYAARLARDLFGFTDSDRYDTVLEMLKVLRTPHLGQRLNPDWFTEQMRAALPPIARAEVEELADGWQQVEQLGTDRDTAVEAREAVAHYLAKGWRPWADAVLRLRGDDLIAAHTAAEDAEKAVRAATGALDTARDNLTAEQKVTDNLLRSFKQAQADYEQALQTQAYKGAAQRTLNAQRLRGEADGAAERARGLLADAGRAREDRDRAVAARGRLEKTAADARERAGAVGEQTAAKVTSAGLGNQASEWVAAGEITRLNKAIKTRKETIPNLRRLIRAAGEANAKLGTADERAKDAQAEFDRRKRTATQAAETAEKALQALSDGIERWALPLAAEAPATVIREQWIAAVTEQARSPQPTAVLASLIRSTWLDPVTLPLTRQAVTITTRAEQLRSDANTYDADADTLEAAGDPAPTPPERWTRRPRPAFPGPHGAPLWRLIDPAPGTAQDTIDYVEAALDAAGLLDAWVSPDRLWLADRDGDETVMTLTAPVATGGSLGAVLQPAEDAGELWAATEQILAAIGFTLDNTPLQASVAVAADGRWQTTTAAGRAARSSHGAELLGVAARAAARRRTVAELREKAARARAEADILQERAEQLQARVDELTAAGTVPEDADVVRAAIASATAYKELETAEQRLIRRQDERAVADEKVNLANTEMLRYANEHLLPSSEELLDQITASLDKAAESVAELAGALEKQHGAEREHRTADGQATSAEDRLKEAERKHLQAAEDAATADLLATQAEQSVDDDDQEQLARVKQLVADRDSLNSRVEASRKKGVALSEAAVLAGQNLSRADDELTAAQHRLNSALDNWWIPVEAGLAAARGITIEPERTLAAALEQATTAAQKLRPAQWPVTSEEKGRRVEAALQKALGTELTTLRTVLESKGGRGVSTIDPDAAGGLTAVAIVVDASGTQLSPTDAIDYLDGLVVRLTRSHDEKMNSILTELLSSTFVDHLRDRLKSVIRLLGLVNDVLGRHPTGANKTTMRLRRTPAEGQRAAFEILKTLQTGSVESETVQEQIRVFLTERIREAQDAGNAGPEELTDRLAELLDYRNWFDVVADFRVGEGKFEPFTKQVHGVDSGGGKVVTLLQPLLATLVALYEESPIAPRPLWLDEAFVGVDPDNRAAMLELLVDFRLDFLLAGPSPLVATVQVPAAALWFVSRAPAPAAGVDLSLMLWAGNTLERVPIADMAAKTFTAKPVPADMPPDLFTALGDDSDSPENESDDDEEVR

SEQ ID NO: 38716 - protein, 380 aa, Micromonospora aurantiaca ATCC 27029
MSASADRWVATGTGPTKVLAAARERLQNGHGGDRVRLTVELDERERAQVGRLLGVAWEASAKAITLGSLRAGLAALDDDLVAVLTRHGGAPDNLRAKRAANLAARTATINAAYEALIAAGWPAHAVDHARAKRWLERANADHVPQRADELCRLWQALPSDNRPLPQLADALFDDTHCLDRGQALGRLAARLLAAAGAAPTEAAEAVDQALTATSWRRTWASFGVLCDEVSSTVLVLGLPLVGDSPAADLSSTAARRGEPLWLTSRSLRGAWRPHDDVHTVRVCENPSIMEAAADEPGTATLPLVCVYGRPSSAAWALLEGLAGAGVRLLISADRDTAGRRFAAEMLRLRGAEPWLPEIDGIFEESRLPELLADLRSAVHR

SEQ ID NO: 38717 - protein, 494 aa, Thermoanaerobacterium thermosaccharolyticum DSM 571
MSDKINFNVIKPIDEARYLTAENASRYRLIMRYFYQNYERLRYWLSKEDVYNYVKNFDLFYDYTLEKCEQDLKSLTEWKNLIAEQDTGRAQSAEEFKNKKFRYMLSEYSIEIERMTINLEKIKGYGGSLEPSLFQRLYENLKKIDDISKSDNLEAVYRWWKDFTSDFENIYHSAIDYIASLQSSNADELMKTDAFLIYKDKLTEYLRGYIKDLQRFSQVIVSLLNKIDKKSLDGIVEKLLLYEENIPRLDRDFDINDVKENILSKWENIVFWFRGNGDEDSEAYRLLEISNEIIRKITMYAARISENRLRTASRKNEYIKLSKIFADIDDIGYAHKLSSVVFGVFHTRHLYGDFDKRTESINESVWDDVPCKFMIRPKTRSYTQSTKTNAIIDRVEEKEMCLKQYLEERHSEIEEISKYIIDGKIVLRELPIIKPFIRTTLLSWISKSLSQPKNIAKSEDGRTYKVSISRNKVITLNCTDGVLEMPDVTIEFLD

SEQ ID NO: 38718 - protein, 378 aa, Thermoanaerobacterium thermosaccharolyticum DSM 571
MEELKILLENFWVTKDDTEMFNRIRDNEKKLRSFVEDKLGYRLIVNPLLIKLEKIPGDAEEWMGIEEFQSPMDYAFLCLLLAFLEDMGIGDQFILSNITEYIEMQYDGIESVDWTLFKHRKSLVRVLNFAEKLKMIKVDDGEQERFAENRDIEVLYENTGLSRYFMRIMNSEISEEMTMKDFMKDDRYEDNKVLERRHRVYRKLLLSPAVYYEGPDDQDFIYIKNYRNTIEKDFDDYLDSKLHIHKTSAYIIFDENKYASSYFPDNKNISDIVLQIAYVLREMIDSGDLNVGVNDRIEITEGQFMNIISNVKNRFKSGWSKVYADMNDDKLFSEITEFMESWKMVIYNDDTHSYTLMPILGKFIGEYRSDFKGAIQNG

SEQ ID NO: 38719 - protein, 1390 aa, Thermoanaerobacterium thermosaccharolyticum DSM 571
MDDRWIINRAGLLNFWYYDDEVFEFSGGRLLLRGSNGSGKSVTMQSFIPLLLDGNKSPERLDPFGSRARRLEDYLLGEEDVNGIDERTGYLYMEFKKENKDNYISIGIGLKAKRHQSMDFWGFIIKDGRRIGIDILLYKMETGIDGKRVKIPLSKKELKNCIGSGGEVVDSQREYMELVNKNIFGFSSIDDYDELIKLLIQLRSPKLSKDFRPTVIYDILRASLSPLTDDDLRPMSETIENMDQIKLHLDSLNKNMKSLKKLKNEYDRYNKFMLYYKAEKLLMQKNELTKVRKQSEEIRQSIEKNNQDVLNGENKISDLLSELQALKNKEIQLRKNDAFNTQRELVEEENILKQFSKDKDLKEVQLKKKKDRYFEIEEELKDLEGREYSIDKNIKDNLECMASISEEVNFDEHNFSEEELKKSYGKDFDFDFWNNSLKEYTGKVKKALDALNDEAEANQKYNDALLEEDRLRKANEDLKRKVNEIEILFDEEKNRFIDKIYDWSDTNKLLKLNREDIEKLARIVLSYGETSVYEDLISSIRKPYDDIRGILQMDMLKVKNELDLKSSQLDEKEEELRKWKETEDPEPERNEQVLENRKRLDKAGIAYVPLYKAIDFKNDIDDDTKGNIESALIDMGILDALIVSRSDLDRAIKMDKDMADKYIVPGTFNMKLNVLQYFNVVDSNSGVSPEEISDALSNVFIYEEENATYINDDGTYGIGILKGKAAGNVKSRYIGFESRRRFRDEMMSSIAKEISIIKDEIRELNDRQLSIKSQLSDLDVEYKNFPEKDDLEEALKELKEAQSNQKFTEDKLNDATLAAKKFFDVLQEKRAVVRKLTSEIGIHADVKAYRDALGELDEYKNLLQKLQINYNSYITILRSIETRKMQKQDIEYDIDNYKFEIDALDTKIKNSIEKINVLKETIEKLGIEDLQNELSQCMKRIDDIPKEINDLTAKTAALKERIVLQEKEYERLREEIRKNEDILNIYDIGLKDEITLGFIDEFTNLDDMYKLAKTVQSQYKEMFTKFDKDSATEKIRNAFYVCINELVEFGLSLDVVENEQSDVGMGTYQEIYKDLRRYQITAKVNDKKISLYGLYNMIDEDIKINENLMKEKDRQLFEDIIMHNVGRKIRSRIFKAEEWVKKMNDLMSQRDTSSGLKFQLEWKPKAATNEQELNTRELVELLKLDADMMKEEDFNLVVNHFRSKVESAKKIYEENSNTDTFHQIMKSILDYRDWFEFKLYFKKEGENRKELTNNAFYKFSGGEKAMAMYIPLFSAVYSMYQSASSQAPKIISLDEAFAGVDDNNIRDMFKLIEDLGLNFIMNSQVLWGDYDTVPELSIYELIRPKNASYVSLIKYKWDGKIRHLVTGIEESVEATDDFSYDEVAYTRVGE

SEQ ID NO: 38720 - protein, 425 aa, Thermoanaerobacterium thermosaccharolyticum DSM 571
MKAEDIDFFKRNKGYERIFKAIRDKYKSIGRIGGVIKLDDLTDSEKEILSNHFKKDFSKRKSANIDVNKFAATFLNTRFEEYSLIDILESYFDEKLTSKKDDMYQYANEKEKFFNRFLSDYEGTKCWQWLKSIYDNKAVGVRTINQRYDSDRTLLERDIKYVCDALNRLPVYEGKKLRLPVFSSHITRDPHGFDVNTDCGKMFINALSTIFGVSDVKNSEEIAELFYRAGIVIDEISNFVTLKGLLAYSADKCNKVFKAAYECNEVLQVPLYNLSEMDRVESPSKKVFVLENPGVFLSVCDFIKKPVPIVCAYGQPRLSLLVLLDMLYKNGTDIYYSGDFDPEGIQIAHRLFKKYPERFHFLRYDVEDYIKALSDKTLTESRLKMLDKIDIAQLKPLADKMKILKRAGYQELILDDIIKDVLSMN

SEQ ID NO: 38721 - protein, 495 aa, Thermoanaerobacter wiegelii Rt8.B1
MEDKLDLNVIKPIEEVKYLSAENASRYRLIMRYFYEQYQKFKYWLYKEDVYEYVSQFDMFADYTMEKCEQDLKALTEWKNLIATQDTSKASTIDEFKNKKFRYQLSPYSIEIERMTIRLESIVGYGGSLQPSLFERIYRNLIKINEMAKKEDLQEINRWWEDLNTDFENIYHNATDYIASLQSSNADELMKSEQFIIYKDKLIEYLRDFIKDLQRFSVAIESFLKKVSPEVVNSVVDKLCQYEMSIPRIDRVLNEEEVKEDLMDKWNNISFWFTGHNFEDSEAVRLLNISNEIIRKITMYAARIAENRMKAASRKNEYIALSKMFAKASNIKEAHLLSAAVFGCFYTRHIKGDFERKTESVNQSVWEEPPFKVIIKPKTRSYSNYVKTNAIIDKSADKTEMLMDYLNQKNIEDEIIASCIVGNRIRIKDLPVVKPFVRATILKWIGKAMARNSFTGKTEDGRTYRLHMPKNGERAILKCTDGNLDMPDIVIEFVD

SEQ ID NO: 38722 - protein, 383 aa, Thermoanaerobacter wiegelii Rt8.B1
MEELQMLLENFWILREDRENFNKIRDAENKIKPFVEEKLGYRLIINPYIVKLEKVPSDVEEWMGIDAFQTPMDYAFLCLLLAFLEDKGPEDQFVLSNITEYIEAQYDGPDKVDWTLFQHRKSLVRVLNFAVDIGIIKIDDGDHERFSESEDTEVLYENTGISRYFLRSFNREITEDMKIEDFLQEDLNLSNPKDAVIQRRHRVYRKLILSPSVYSEGPDDQDFMYIKNYRNTIAKDLEEYLDAKLHLHKTSAFVLFNDNKYLKSYFPDKNKNISDIMLQVNKIIRQMIEDGKLAYNPDDTIDITEAEFINIILKVKERFSDGWYKSYREMSEKQLIEEVIENMESFKMIKRVEELHSIKILPMAAKLIGEYPPDFEKGEGADE

SEQ ID NO: 38723 - protein, 1388 aa, Thermoanaerobacter wiegelii Rt8.B1
MSEKLAERWMINRIGLLNFWYYDDEIFEFADGRLLLRGANGSGKSVTMQSFIPLVLDGNKSPERLDPFGSKARKLEDYLLGEEEVSGLDERTGYLFMEFKKEKKDSYITIGMGLKAKRHQNMDFWGFVILDGRRIGIDFFLYKMEIGDDGKRVKVPLTKKELKNRIGEGGEVVESQKEYMEMVNKYIFGFSSIEEYDELIKLLIQLRSPKLSKDFRPTVIYEIMKASLPSLTDDDLRPLSETIENMDQIKMHLDVLYRNMAAVKKLKNEYDNYNRYILYEKAGDLVKAYSDLYASKKEYDNLTKDIENYRSTIANLGNDIISLESEREALKKKEEQLSSGDAKRTQKELLEEEDRYKQYLEDKSKKEEELRNKQDKYYGLERKIKNTEEQKYKLDKELQDKLEDISSIAQDVDFMEHEFSVSELKKVYGKEFDFTYWKNELKKHKDKIKRAINALREEIEANKRYDAALKEQERLKKEREDRAKKLNEAERLFDEQKREYVERVYSWSQGNAELKLLSSQLEGLSRVILAYGEDKGFDDILAFVRKPYEEILNGIQQEILRLENQREVKENQLHEKEKLLEEWKNKKDPEPERDEQVINNRKRLKEAGIPYIPLYMAIDFKEDVDEETRGNIEAAIEDMGLLDALIVPKEYFEKALQMDSNMADKYVMPGSFNMMLNVSQYFRVVDNEEGVSPEDISDALSNIFVSEESGTTYIDSNGTYGIGVIKGKARDKVKSKYIGSESRKRYREELIKSIQEEIQAIKAEISAIDEEINAKKLRIQRLDYEYSAFPGKEDIEEAYRYLKTAKADYEYTSHKLDEQLFTVKNCFEDLQKKKAVVRELTSGINIHPDIDTYSSAYEYAEEYASGLNEVEILYNKYVLHISNEEMLLQQKQDLEYDIDNLKYEIDVLENKIQSSVKKIEMLKETLKELGLEEIEKELEICLKRLEEIPKEITNKSAEKAKLEERLQRSLKDLLNIEEEINLKEKIYNIVEEGLKRELALGFVKQEVEMEDMLKLSKSILSEYKGFFDKAGFDREKFTERLQNVYFETRNELLEYGLSIGNIFDEACEGDNERIKEAKSKQRRLSITANINGKVVSLYTLYSNIEEDIMANESLLRETDKILFEEIIMHNVGIKIRAKIFKAEEWVKKMNKLMSERDTSSGLKFSIEWRSIPASNEEELDTKELVDILKSDADMLKKEVFDKVVNHFRSKVERARRAMEEKNNTETFHKIMKEILDYRDWFEFKLYYRKEGESRKELTDNAFNKLSGGEKAMAMYIPLFSAVYSRYEGASPTAPRIISLDEAFAGVDDTNIRDMFKLIEDLRFNYIMNSQVLWGDYDTVPKLSIYELVRPKNAKAVLVMKYLWDGKVKHLILPEKEEVAATEVGAVNE

SEQ ID NO: 38724 - protein, 431 aa, Thermoanaerobacter wiegelii Rt8.B1
MNKEELKYFKEKKGYKRIFEGIREKYRSLGRLGGVVKLDNLTEDEKEVLTNHFKKDYRTKKSASIDVAKFEESLKNTRFEEYTLKDILEYYFGEKLTSKKEDMEILAKEREEFFKELFSKYQECKCIDWLKSLYEGTAVGVRTVNQRYLNDKAGLKKDIIYVCDAINNLPVYKGEKKRLPVFSSQIARNPHYFDSNTEAGSMFINALCTLMGLNEVKGSEEISELYYNVGILIDEISNYVTLSGLLAYEGDTENQVFKAAYESNQVLQVPLLNLSKIERVISPSKKVYVVENPSVFTSLIDATNKVFPLVCTYGQPKLSSLLLLDMLYKEGTEIYYSGDFDPEGLMIADRLYRRYKDKFHFLRYGVEDYLKSLSNEVINDVRLSKLNKIESPLLFDVAKEMKIIKKAGYQELIIDDIINDIKLIEEGKGEW

SEQ ID NO: 38725 - protein, 578 aa, Streptomyces violaceusniger Tu 4113
MVCERPVALRMRGVTCQRQGVPSIPAAHPVNPRGGDFRPGVRVGKNAGTMTSPASGPRGSEHAPFIHLTVPNAALYRQVMCAFLAAKERFAVHLRPEDVHAALPPEHRPTDPDAVVKALDSLVEWGNLRADPDTSRVTAVEDFYRKRFIYQLTQAGEAAEQALSVYDEALGRRGALQAVALHDIVTQLRALLVIAAEREEGGPDAAKAHLALSALTGRFKALAENARAFMGSLQRTMDLHGVEVEVFLAYKDRLIQYLERFIQDLITLGGRIAVLIGELEQDGRAGVLLRLAAAREAADAAPEDTESAEEQAYERWAAKWSGLTAWFISADGRESQARLLRGRALGAIPQLLAVVRQLNERRAGRSDRSADFRTLARWFAEAPDDEARHRLWRAAFGLYSARHLTVDADTLAERTARPVPASMSWAEAEPLRISPQLRRTGSYERRGRARRVQDRSEQRHRLAEIAARQAEEIAAARARLATDDTIRLSALGELDPAAFGLFLQLLGDALATWRPGMTNTVATSNDGSLEIRLTALADGTTAEIRTPGGTFRGPDHLIEITDLTRPGRAGRPRTGRDD

SEQ ID NO: 38726 - protein, 421 aa, Streptomyces violaceusniger Tu 4113
MTTPLGEVLDGRRTAEVHKAARTLLKEPLLLARGPHADEFRLVRQHASELRDWFDRNTGWSLRVDAEAARLARTPGTLADPTHPAREASRGRVAFTRRRYVLLCLALAALERGEAQIALGRLAEQVVLDAADPHLAAAGVEFTMERRDERLDLAAVVRLLLRYGVLRRVAGEEEAYVSGSGDVLYDVQRRVLAGLLAARRGPSTIITEDFEDRLAELTAESALDSDELRFRAIRQRLTRRLLDDPVLYYEELTDEELVYLTRQRAFLTARITELTGLVPEVRAEGVAMVDPHDDLTDVRMPEQGTHGHVTLLVAEHLAAMDGGVSRADLERKVQELAAEHGAFWSKSAKQPGAEAELVGQALERLTALGLVAATPKGIVPLPALARYAVGETVVTEPGQASSRTPRVPRTPHTLKRKAPQS

SEQ ID NO: 38727 - protein, 1381 aa, Streptomyces violaceusniger Tu 4113
MTALPDPTPGRWQPLRIGLVDLFHYDTEEFWFRDGRLLLRGNNGTGKSKVLALTLPFLLDGDLSARRVEPDADPGKRMEWNLLLGGRHPHPERLGYTWIEFGRRDQDSGQAHFRTLLCGLKAVAGRGIARHWYAVTDQRVGEELTLLDATGTALSRDRLAEAVAARGMVYDQAKAYRRAVDEALFGLGERRYAALVDLLIQLRQPQLSKRPNETALSRALTEALPPMDQAVIADVAEAFRSLDEEKEELRAAGEAERAASAFLDHYRRYARVATRRRARLPRSEHARYEQLHRDLSQARTDREEAERQRAEAAERIAQLEETSVRLTAQDAALRAGPEMRSARKLEQAAADARRTAGERARAETDRDQAAQANSRALGRLTGAEGRLAAAEQQVGNTLRQAGETARAARLDDVLGPHDAVPEAELRHAAEESVARRRRTLDHVEELAAGAEQAARERRAAARRLDEAQTEAAHTAERQAQAEASATQAGQDLVGAVREHLDRCTELDLPDPTGLLDALHDWGTHLHGPSPAREQPAAAHRGQAADLADQAAALGHRLAELAERCTAAERELAELEAGGQHGPEAPRTRTPGLRDRTPGAPLWKLIDFHDHVTPDERAGLEAALEASGLLDAWVCPDGTMLEASGHDVLLSPLPSHASPAGSVLADALRPAVDHGDPRATQVGEPAVSALLAAVGLGDTGAPGTWVAADGHFRIGALTGSWSKEAAVYVGEGAREEARRARIGTLRGELDALAASTARREAERATVAARRRTLDAELAAVPDDAPLRHAHAVAAAAADAAHRARTRQEERAAELTEAARREAEAATALTETADAVNLPADRPALTAVRQALADHTAALAALWPALRDRAEARRAVADEQAEAGRTGERVAELDQRMAEAARLAAAADEHHTTLRSTVGAAVAELERRLAETAGALATCERDQKQARHEYSAADRRAGRAEGRIEQLDKDVHEAAATRAEAIAALQRFAATGLLTVALPEAPVPPLDGGSWAATPAIGLARAIEAALSGTDDSEGAWERVQKRLSEEYKKLQDVLSRGGHSATARMTEDGMIVDLVYQGHGRAVPELAGALATEVQELTRILSAHEREILETHLLTEVAGTLQELIDTAERQVHAMNTELEQRPTSTGMKLRLIWRPSRKAPAGLAQARARLRQSADAWAAEDRAAVGEFLQVQIARAQAENATGSWLEVLTTALDYRAWHEFGIERHQHGTWVPATGPASGGERVLAVSVPLFAAASAHYATAAPHAPRLVTLDEAFAGVDDDSRAKCLGLLHAFDLDVVMTSEREWACYPQVPGIAIAQLSRVDDIAAVLVTRWQWDGAERARAPEPDRRLATVLAPAHSPGEPEPTPTENPAPGQDALWA

SEQ ID NO: 38728 - protein, 415 aa, Streptomyces violaceusniger Tu 4113
MSAPDAPAGHVDHERLTRLLGDPGCAWLLDRIRRRMERAEPLTGSVILAAPTDGERAAVERLLGRAPGGGRSLSIRLDAVDTILRRSGISPDGLATAVIALTGPVTLRSDARRREADAWHDAYTPLTGLCSERPELTDWGEHIRVSGLVRRLARGPETARALLTSTATALRSLPTDPAVSLPAFAARTLGDAHALDDGTPLATLVHSGIRALTGFPDGTGAEWRREAWASAGLLKDALSSTVLTLGLRGTPALDWATGTGEPAVLTLRQLTRTPPRTTPPVVHICENPTVLATAADTYGPACPPLICLQGQPSAAALTLLRHLHSHRARLLYHGDFDWGGIRIAAALLQRVPWRPWRYTTVDYRAAASRSPMAPSLTGTPATAPWDPNLRAALSELGVRIEEETVLDDLLTDLAP

SEQ ID NO: 38729 - protein, 495 aa, Thermoanaerobacter sp. X513; identical to SEQ ID NO: 38593

SEQ ID NO: 38730 - protein, 383 aa, Thermoanaerobacter sp. X513; identical to SEQ ID NO: 38594

SEQ ID NO: 38731 - protein, 1388 aa, Thermoanaerobacter sp. X513; identical to SEQ ID NO: 38595

SEQ ID NO: 38732 - protein, 431 aa, Thermoanaerobacter sp. X513; identical to SEQ ID NO: 38596

SEQ ID NO: 38733 - protein, 494 aa, Ruminococcus torques ATCC 27756
MRIQETVRKPMTEAKYLNVDNTDRYRPIIRLFYLKYEKLKYWLYQEEVYEELKEDAYFREYTPEQCQQDLAALTAWGNLVTIQDTRKVATIEEFKNKKFRYQLSEATVEIERMVIRVENLFIESSSLEPTLLERLRINLRKISEITEADQEHIYAWWNDLNNDFIRLNQNYQDYMRELNSVKAEEMMKTTEFLVFKDRLIEYLRSFVRSLQVNAAFIEQCLKNTDRQVLRCLLEKIIQYELLIPRINVEVKEDLIADKVYGRWQSLEEWFTGTDGKDSEAAKVFDTTNEIIRKITRYAARISEMSNAGANRREEYHKVAVMFSKCKNIFEAHRLAAVVFGIEKPLHLKGLPWRQTESINSGVFEEEPYIVTVTPRIRTYKEKAKRSGIVDRSKEKEEMRLATIQRLEEERRLLKSYIQDNRLEFAKLPEIEPHVRDVFLTWLSKALENKSLQGKTEDGQVYRVEKSDTEEICILKSSDGNLQMPAYVIVFEKNE

SEQ ID NO: 38734 - protein, 1236 aa, Ruminococcus torques ATCC 27756
MRALEILLERRWILKSREKELYYQIKDELGTVKKFLMEKLGYQVIVNPYLVKVEKMPATPENWMGIQEFTRKIEYVFFCMILMFLEEKEAEEQFVLSELTEYIQGQYREEQIDWTVYQYRRHLIKVIKYCVNCGILNLNDGSEENFARDDTSEVLYENTGVSRYFMKNFTQDIMGYTTPEDQAEKESLSDSDTVKLKQREVEIKSQLEGLKKNITGKQRQEEEKKEKYQETEQKIQLQFQKNEMLWEEIENSLEYMEEEMAGVPFDEFAFMKKELTEQKGEQYSFQAHSELLKDYMTKVRLGKTTLEEEKGCQERYSRFLQELDSYQEEKNKAEREVLQYENQFHEVKQETIESVYRWEKENAELHLQSDLLQEMAREIEKYTTETDYWNIRGLANGEFERKSQELSGKVLQQSRELSDRRLEKDGICEELEQWKNQKEPEPERSEVVEKNRRLLKEKGIPYLQLYKVIDFDGKLDETQRAYLEEALLHMGILDALIVPEEYREQALALDAGVCDRYIFSDAAYVRNNIMDFLDVDNEEGDILLYQNVSRILTAIGWKEQDEETISESIEKNRTWIDKRGNYGIGIIEGTVTKNYTPCFIGAYAREQYRIKKIQELEAECRRLEDTIQIAEDEITQLKQRKSCLETEWKSFPKEQDLKVAAKELEKKTNILEEIECKVQIQKGIVEKERKSLDAVRLRVQEVCQKCYLPPRLDVFTEAEESLTEYKEELMKVQISYGNYINGISYAKVQKEYLEGIDGDLDDIRYDLNHMIRNEREKRGSLNSVMEQLALTDYEEIRERLEHCIERLEKLPSEIEASVTQSSHLETKEKQFIEKLGDIEVSVGKYRQQKDRFCTAFEMEYQLGYVECPFAVSDDAEERAEKICRMFMGRFGNKRHSEILENLQNVYHMNRGYLLEYQVTLQSLFEELDEESGVFDTSMRRIDISAKYRGITIKFKELIARMKEDAEVQRRLLSDKDRELFEDILANTISKKIRGKIQASKRWVEKMNTLMESMKTSSGLTLSLRWKNKRAEKEEQLDTRELVELLQKDAEIMRPEEAQQLSGHFRSKIEEARKSANDLENVQSFHAIMRNVLDYRQWFEFQLECQKTGEKKRELTDRVFFTFSGGEKAMSMYVPLFSAVVAKYAGARQDAPYLISLDEAFAGVDEMNIRDMFRLMVEFDFNFMINSQILWGDYDTVPALAIYQLVRPENAKYVTVIRYIWNGNIKSMVTEKDLSHG

SEQ ID NO: 38735 - protein, 431 aa, Ruminococcus torques ATCC 27756
MDKTETNDLLEECMLYFKARPVYKKLFLKMRDKYAGLGHFGGTAMLTSLSREEKSQLGGFFQRDYTSNKTITISADLMKKCLESSKFAGLTWELILETYFGEPLQVKKEIELAESKRREDYFAEILESISDESGREWLRSILEEKKEGYLLITQLYKESPEELRSILTYVTTGIAKLKVFQDKKQKELLAVFSANVTGNPHYFDEGKTGEKLLFNYLGERNFDLKQEGLSRAEYKNRIYYEAGILKDEVSNDALAYGIHGWKPDGGLHEGIEGFLENREPVKLTLQTIGRLEKVCGQSSQVYVVENPAVFSVLIREYPQRTVICGNGQLRLAVLILMDKFSCDTVFWYAGDFDPEGLLIAQKLKVRYGERLKLWKYEADLYETYLSEVELSDRRMKKLEQVSVQELQEIREAMYKKRRSAYQESMMEALRK

SEQ ID NO: 38736 - protein, 496 aa, Clostridium spiroforme DSM 1552
MEISNKLTKAIKEVNYLRVENAARYRVIMRYFFLEYEKIHYWLHKEDIYEMMTGLDEFQNYTMDLCQQDLQSLVEWGNLTAIQDSQKVKTVEDFKNRKYRYQLTEYSVEIERLTIRLENLEIEGASLEPTLLERIYQNLCQINEVKNKKDSEIHAWLQYLINDFITLNQNYQDYIKTLNSAKAEELMKTEAFLVYKDKLISYLRSFVKTMQETGNLIALQLESIDQNLLEKLINQAVKYELSIPRIDVELDEKNIYDNYCGKWDSFYRWFVGKEGQNEIDRLNDITNEIIRKITRYATQIVELNNRGSNRKEQYEHLAKIFLKCRDINEAHCLSAYVFGVSDCLHLKNLSPRETDNINSGVYDEKPDTLKFDSHSRIVRKKTIRKPSTDYTLEKRMQQLEIEENIAKQKEKINKLIINNQIAFNNLPVIDEQTRKTLLSWLSKGLAQTNRKAKTDDGKEFYIDEQEIDEECVVKCYDGNFIMPSYKIVFLEETNEY

SEQ ID NO: 38737 - protein, 371 aa, Clostridium spiroforme DSM 1552
MNTKEILLSKRWVLKKDDRDMYYRIKDDAKNLKRIFQDNFGYPLISHQNFIKIDKVPGKAEPWMGITEFKSVEEYRILCYILIYLEDKDADEQFILSYLTEFIQMQLNVSEDYWLKFTNRKMFVNVLKFCLKEQLFIQDDGEMEHFIQDENVEVLFENTGLSRYFMRNFVYDIFENQTPQDFMKEDWIGLQQDRGIVRKQRIYRRLMLSCGIYKENENNDDFAFIRHYRKRIQSDFQEICPCELQVYKSSAYLILDEEVRIGKMFPKNNTLDEMIIIIMAYLRKRIKNSDLKKDNNEMVVISISRLKNTIERMIKENESFLPATYRKKSRSLFIEELYQYLIELGFVQVIDDNNIVLYPVIGKLAGNYQEG

SEQ ID NO: 38738 - protein, 1331 aa, Clostridium spiroforme DSM 1552
MSVSRWKMNRLGLVDFWCYEDDEFDFENGHMLLRGSNGSGKSVTMQSMIPLLLDGNRSSERLDPFGTRSRKMDTYLIDENSDRDERIGYLYLEFKRLASDVYKTIGMGIRARKNKPLETWYFVIEDNRRVNIDFKLMENHFTLTKKQLENVLGNQVISSQKEYMQKVNDSLFGFENIDDYKDAIDLLLQLRSPKLSNSLSPSKINEILAQSLQPLSEDDLRPMSEAITSMDNLQDDLQNLNTSYDAAKRINQAYDVYNKVILVDKWQKFNRENEQQNRIIKEIKDKEVNLNKIDIEYHQLQEELQKNKINLEIKQSEKKDLINPNIENMHSELVNLKDQNKTISIQITQKEDQHENKSNKVIDLQNQIEKYQNEMYQLEKEFNQITNTLNRIIEDFPFSEHSVLKEVLDNNEKIDFEYTKKCLKQEKNNTQNIINLFNQYDSIQEQIKDIDDEITIYNSKLAKWDQKYQNAMNQYSNCVNQYQEYFYQFSQTNHILKLSSLDIETMTSYLIDYEYNQEYMSIYNIVHNNYLKHLEQFTNELASLKTTLKSHYEQYQTLENEYQNWLNKTDIEPVRDELTTLYRHNLSKKQIEYMPLFKLLEFDQNLDQDEKNKIEEFLTQMHLLDAIIIEEKWQELLLNNGDLGHDYYLWTKNSLSDLKPVLLKVPFDKNSLLQSLEQLGIQLSGNLDINERYFKNGVLEGSIDGNINSSYIGFQSREQFRQKKLEQLKQELEDEKHQIEIIDNKINTLNGSVILLKQEMQSFKDEKELKITYLQIERTQKEIDFIQDKINQLTKHKNEKEKNLENIYQQIKQGCNVLLINVSKGALINRLENIEEYDNSLDELKNNLDHINNINSLLTINQDNLLEFQVDVDFLNAEIIKLKHNYQINSGKINNIEQQLKEAGYTDLQQKLEQLDQEIVTLQQAIEDNVSLSSTKKAEQSYNKDELINLKEQLTLQEKYTKKYHDILMQEVQYGFIFKEDDNLFKNLKQLTSKIKINKPVNEYATSLQGVFFEQASYLSQYHLTHEVDELCHEADDVTGHFIIKATYLGKKIPFIELLNILQERIESQKMLIQEEDRHIFEEILVNTIGKKIRDRIQASRRWIDKMERYIKDMNTSSGLQLTLKWQSKKSIDDDELDIQNLVKLLEKDYRILKDSDRQKISQHFRTKIENARRLSLDENISASFHQLIREVMDYRQWFEFVLYAKKPNENRKELTNRIFFAYSGGEKAISMYVPLFSAVAAKFESARFDAPHLIALDEAFAGVDENNIDNLFALITKFDFDYIMNSQVLWGDYPSCPSLAIYELFRPNNAPFVTKIAYKWNGHERRVVIK

SEQ ID NO: 38739 - protein, 416 aa, Clostridium spiroforme DSM 1552
MMLKECIEYFKHPGFKRFNQAWIKKYQSLGHLGGQITLFNLSSLEKETIGAFLGTDLSNGTLKISYRKFNQLLQETKFEGIDYLDVLNHLDNKPIITNKEIKSKKILLIENFKEYFLTKYSQDHCYPWLLAYLNNDAQVNRYIYKNKNEFLKELDKIATALNNLPVYQNQYLLLPVFSQRITGDPHFFDQDFHKKLLIDGITVLLKTDKQKLTLHNINDILFQAGLLKDDLSNNCYICHLKPDTASNWEGFYQNYEPWNMNLYNLMQVKQKFKAMNVYIVENPSVFRVLVNYIKDKQLDVGLICSNGQINLCTYMLLDYLSQSGCILYYAGDFDPEGLLISDKLKQRYLDTLNLWGYSKENFYQILSKQQHLFSKRMKKLYNLQTPVLKDIADLIIKNAAFGYQEGLISFYKKTIR

SEQ ID NO: 38740 - protein, 534 aa, Streptomyces clavuligerus ATCC 27064
MGGEVPQGWRRRGRTSMCRVPPEMFRFITGETADLNGAVLEAFGVAGEHLETELGLDGVRERLRAVGWVSDLQDEELHEALKRLVKWELLDVVHNHAQNYRTAEEYERRNLHYSLTRRGEAALAGVRHALEVLASTGALQTAVLEAIADRLDELTVLSGEHSAADRRIFSTLRELEGHLESLVENTKAFNGQLQRLLRAEGVDLDVFREVKAATVAYIQEFLVNLDRRGETVAAAVARVEERGIAVLRERALRGAELPPTPGEDPAAGWLESRRARWAGLRAWFLPDGGARPRIEQLHDIARRAIVSLLQVLERINESRRRPSSVVQDFRELARWFAAAPDEEDLHRLWSAAFGLGPARHAHLAHPDPELIPSSHSWSDAPPVKVSALLRTSGRTERFTRTAKVRDVTEVRAERAERARAERAELARAWQALETDGPVRLSSFRALDPMVFDRLLDLLGRALAARRDADGRRRATTGDGRAEVVLSPPPDGRTAVLRTAQGTMTGPDYVIHITAVGGAISFPAVRSATGQEAAG

SEQ ID NO: 38741 - protein, 410 aa, Streptomyces clavuligerus ATCC 27064
MLTEAADPTGFDLVRRRRDPLARWFDYTCGWSLVVEPRRGYARLTKVRVSPDGSRPARRARSGRAPFDRRRYVLLCVTAAELLSMPMTTIGMLADRVVQAMAADRALAGFDPVRRPERMAFVDVLKLLESYDVLRVVDGTTETYVDSAEAKVLYRVDNTLLMRLPAAPVGASRLAVPQEEVPARFEDLLAGLVTERRYGGASADGTADDTHAETAATTDAQRNLQLRHSVLRRLFDDPVLYRADLANDELAYVTSLTGRQILRRSVEQAGFLLEERAEGFLLVDPDAIATDVRFPDDTSTARVAALLLLSPLCATPVGLLPEQLAEAGAELLRRFPGWAKAYQSEEGPARLADDAVRILLDVGLACRARDRVIARPAAHRYRLTETTGPAPKNDPPAVAATGSAGEGDKQ

SEQ ID NO: 38742 - protein, 1375 aa, Streptomyces clavuligerus ATCC 27064
MTELPLQRRPEETIDPSPVHDADTGRGRWRPHRAGILNVWRYYDETFTFHQGRLLLRGQNGTGKSKALELLLPFLFDASLRPNRLSTFGGSERTMHWNLLGQGASGKTRVGYVWMEFRRVGDDGAEHWFGCGARLHASGHTTTAHADYFTTIARIAHPDGVHLVNDTGQPLTKAALTEALRDRGEVHPSATDYRTTVRRELFAGMGEQRYESLLSALLQLRQPKLSERLDPSLLSTLLSRALPPLGEGEITELAEGFERLDRQRDHLDRLDAEVTAAENVASRQRAYARRVLRAGAAALISATTEMDDLTRDARVSAQEYEKACEERGSTLALREELDLRAHALDEIIEGLRESDAYQKGEELDRLRRGTEEQVAAAAELRTAARSAESDAEEDRKHADDVAGHARSCVEHARATADETNRSARAAGMESIHHEVKTILDAEGEVKSLGNGTASTPVRTGSRRSDAPGAAARRLLRGAVTARREQVADITDAIDAHDRAVRDRGTAEGLLDEARTRLADAIAHRDTAATAGDNALAAQAERLLAWARNWTEMRIADLDELAARAAVEADVRELVETVARPLEEEITTERAAFRTAQQGLEQERDLLDARRSKLSGETDLQPVAPPTRTTVRTAAAGAPLWRLIAFHENVPLPVQAGVEAALEASGLLDAWVSASEGFTLPGHDTRVEVGLATTAPGSSLLDVLRPEEHIPVLAGTVTRILAGIAYGTPLPGGHPVAVSSDGTWRLAPATGSWSKPEPAHIGALARQRAKQRESTELAELIAEKDASLATLADRLRELGARAARLADDRSARPDHRELDACRRDWDQAEEKVAARDDAVRYATEHLAAREGDVAGALRTLSRRAAENGLPTDRDRLRELGRDMERFRDLADTWTDARIDAIAAAERAEETAARADRSRLLAEKQAADAAAAEAKAAGMTARLKAVEETVGADYRQIVARVAETRAERVRCGKEARQAAELLLGLEGRIGELRATSGQDADRQEKAVEARDGAARRFRHLCLVGLAEDAGVVPELDAGDGTKATLEVARAMAARWPQVPHAPRHLGDAATRLSEAVHEARRHLGVRADLELEPDDDIQLFTATLEGVRVGATGLLAVLTQERDRSGDDISTAERRLFDQILTGDIRRHLAARIRRAGELVAHMNGHLERVRTASNVAVQLVWDVRPDLPDSTRTARQLLLKDPGRVTESDREALHAFFRARIEETKGSDTAASWEEHLGEVLDYTAWHTFTVRLDRADGSGWQPLTKRLHGALSGGEKAIALHLPLFAAVAAHYEDVPLAPRPILLDEVFVGVDTVNRGQVFALLTALDLDLMITSDHEWGNYRELPGIAVHQLLTDGDDAVTSARFVWNGTGMEEG

SEQ ID NO: 38743 - protein, 433 aa, Streptomyces clavuligerus ATCC 27064
MQDHPVSGGLTSREHLALGDAPLRRPELLAVWQTVHDRLSSGRPVTRVRLGPLDETQREALADLLGLDRLPDPRPSVALACLEEAVTELSGRTVREVVAELIGPLGDRAGERRRQEDERAGLWAWLAGHDTVRAQPVLTDWAASCRAAGLVGGSTERTRTLLIDALKVLAELPGQAEPLPVFAARVLNGHAHALDDGTPVSTLVLRALATLYDIAPPQSAAERRALWSRAGVADDELSATVIAGGLRPVGDGLLARVARLCTEAGQAASLTLAHVRNPGELTLPATPASLVVHVVENPSILALALRRFGSNCPPLVCTSGWPNSAAIQLLRLLADQGAALRYHGDFDGEGIRIAAYVMEKAGAHPWRMTAADYRSAIVRNAHGPRPGRITGAPWDPELAEAMAGHDIAVVEELVADVLLEDLTATTRQRHPSG

SEQ ID NO: 38744 - protein, 531 aa, Roseburia intestinalis L1-82
MESNWNQAVEADSDIPQISESGSWFWRIMNKGEHVALQVSDKLLKPLTEAKYLNADNVSRYRCIMRIFFENYEKLKYWLYLEEVYEEMLKDPFWSEYKIEQCQQDLTMLTEWKNLNTIQDTRRVSSIEEFKNKKYRYQMSEYSVEIERLVIRLENLFIEGASLEPTLLERIRRNMERFPEMAGKDKNEVYTWWTDLNNDFMRLNQNYQDYIRDLNSVKAEEMMRTKEFLVFKDRLIEYLRSFIKGLQRNVGVIEECLKTQESDMREAVFDKIVEYELLIPRMEVEVSEKMIRQKAEGRFKSIYDWFVGSEGQENEAAKLFDVTNEIIRRITRYAAQLSEKNALGANRKEEYRKVAEMFMRCENLEEAHKMSAMVFGMEKTFHIAGDQVRETDSMNRGVYEEKPIQIELKPRVRTYREKTKRSSIIESTEKKLETRRKMLEQQKEEEKKIKMLEKDGAIDFSALPILEPRIREILLKWISDAMESVDFSARTDDGRRYRLDKSNMAEKCVVHCEDGNFTMPKMRIVFQEESV

SEQ ID NO: 38745 - protein, 381 aa, Roseburia intestinalis L1-82
MKELEILLNRRWILKSEDKELYYRVRDAVGEIRKYVTDKLGCQIIDNSLLIKLEKIPVIPEQFMGIGQFSSKEEYVYLCILLMFLEDKDAQEQFILSQLTEYMTAVMPGEITDWTLYNNRRKLIRVLRYTVEQGMVRVTDGTDDVFMDDAGGEVLYENTGASKYFMRNFSRDIMEYTKPEDFRESEWFEVDEDRGLARRHRVYKRLLFAPAVYREDGSGEDFEYLKYYGYRLSEELEQLFECHVQIHRGSAFLLSGQDCRMGAAFPENNSMADILMLAFGKIREKIEGKVWKITPEEMSLVDKIEFESLILDVKKEYGSGFAKLYRDMPEGEFIKNVTDEMERWMFIKKVDDMHQIKICPLVGKIQGSYPQDYTGGNENEQ

SEQ ID NO: 38746 - protein, 1371 aa, Roseburia intestinalis L1-82
MKMNSRWQANKIGLINFWYYDEQEFPFVKGRMLLRGSNGSGKSVTMQSVVPLLLDGNMSPERLDPFGSRDRKMSSYLLEENDGREERTGYLYLEFKRKDSETYLTIGMGIRAKRNKPLDKWYFSLTDGRRIGKDFFLYKDMGEKVTLSKKELENRVAEGGRVFDRQADYMDYVNRQIFGFETADEYKEMVDLLIQLRTPKLSKDFKPSVINDILSDSLQPLSDEDLRPMSEAIENMDMMNMNLKGRREARGAAEKINAVFQKYNKLLLCEKADRYERTKQRLQKAAAEQKAYEDKYAECNRKIEELETEILQMNQKKETLEKEKESLNKSDAVALKGREAQLTKELEAHDKILADKKSFLAAKEAQYRDVTNQIKEEENRKYEKEKEVETLLEDMREEADQMAFQEFAFMSEELCADLENDYKFDLHRQQFEHTRQYINDGEKLLAELKSLDRQKDEMIQKREKQIRELDALQRKISEFENMLIQVENEWKEALYQWNENNVELKLEKELLRELSTFADTYEENSDYAVVRQKAADQWIKKQSKIETQINSILLEQETAKTELDEAKTELSEWENQKEPQPQRSEAVIRNRQRLDEAGIPYQEFYKVIEFGSELDEDACNHLEEALLKMGILDAIVVDEQYREQVLTPVKGCEDHYLFAGKTQAEKSLLDVLELNEEVNDIFSNQRLTKILSSIAYGGENEVSVSEDGSYHMGVLAGTVTGEYEAGYLGSKARERHRLAKIEECKNLILVLEEKIAGLERERNNLSERKDRLKSEYGALPGDTDLREAMKLLLAEEQKYELLRSENEKTGEQLTAFLEEIKEKKKGAIEIAEKLYLNCTYETFQSAKSAAEEYDKNLVELKSAHEMILRSAAYLRERKVHLEDLDLDMDQIRYDIRETEKQISSKQEERTSILEQLALTDYEAVKDRLDACISWLNAFPKEFQKRVTEKTQKTDEAKLIEANRISNADTIKVYEKKVEFYRKCYEQERGLFYVAVPEEITDDAGHIYDYLLTDIKDMEKNSIIADLNRVYFENRGFLTDYQLTQNELFAESDESEKIDDYTPKRLDITARYQGTKVTFASLLTHLDEDISELENLIKDGDRELFEDILANTVSRKIRGKINASNLWVQKMNTLMNGMDTSSGLKLSLRWRSKTAEKEDQLDTRELVELLKKDYRLMSEEEAARLSAHFRSKVDEARRNARDSAGMISFYQIMKETLDYRKWFEFQLFSQKSGERQKELTNSVFGTFSGGEKAMSMYVPLFSAVVAKYQGGRADAPRLISLDEAFAGVDNRNIRDMFRLMTQFEFDFIINSQVLWGDCDTLDALAIYQLIRPENAKFVTVMPYLWNGHSKELLDDEEKVEQRGIEIEQFDRA

SEQ ID NO: 38747 - protein, 426 aa, Roseburia intestinalis L1-82
MNNLTGHEKLKRDCVAYFRQNEIWQRIFTGFREKYSSYGRFSGKVTVKNISGDGLDTLEGFFCQNFHGKKSITVSAEKFRKALSCSKYGTVTPEEVLAEYFGKALIGKAEEKAFKENQIREIKKEFLENFKGTPAFLEFDTFENILKSSDKENLKEWKRLLWLCANLYNALPYRTQKSVYLAVFAAAVTGNPHAFDQGTAEGKILYQVIQMDLGQRGIQVETLEMFPAYKRQKSYLLAGILIDDISNYALLYNVHAIKKNGELHRGMDGFCQEKNMVQVPLTVLSEWERIECVDHEIFIVENPSVFALICGEKSCMCMNGQPRLAGLLVLELLAKSGTKVYYSGDLDPEGILIAQKLSQYYRGTFCYWHMTPFDYEQCRSKEIISEKRKKMLQKITDERLLPVVDAVTKYGMAGYQESIGLNQISI

SEQ ID NO: 38748 - protein, 500 aa, Subdoligranulum variabile DSM 15176
MQFHAITLNSVPEASYLTAENAWRYRAIMRTFYLESQKAHIRLNKTELLALLRADAHFGEYTAEQLEQDLNALCGWRNLVPIQDPHRPTSIAEYKNKQFSYSMSQTATEIERMTISLENLDLRTAILSSQLFERILDTLERMTERAGADARALNQLWDQLQRDFRQLTNRYQDYLRDFYSSHARHILQTTEFLPYKDKVVRYLQEFVLELQRYAEKIRRMLLSLPPEQVETMLQEVYATQLQEGEGRLIQRSEDYPRQLREEIYGFWQGFYRWFVPGESGQSDSEHVLELANDIIQRILMNAELILQAHSGGANRKVEYKKFLELFAACPTLADARRLSGMVFGAQRAVHLTGIEPEDLYETGSCYDGQPFLYQLRNRRRPGRPPREKSFFEDKSLEKAAQKQAYLQQKAALQARLERLIRKGRLDFSALEEVVTPEIRMSLLNWVVKANANVSKSARTEFGQAYRLTCSPGQTCVLHCTDGDLTMPAYCLEFEEVPAHG

SEQ ID NO: 38749 - protein, 373 aa, Subdoligranulum variabile DSM 15176
MDEFRALLDRFWIRREEDRELFYQVRRKLPALRRALREQFGWEVICTEQVIRLVKEPARAQEAFGIPEFTEVQDYCLLCGVLLLLEDKDDGQRFLLSELTQAVLAYTKPWLPDLSWERYSCRTSLVRVLQYAERLGLLRSFEGESDGFAAHQDQEVLYENTGLCRYFSVHFHRDITGYTSVRDFENPPEDGPDQERGTFRTWRVYRQLALAPAVYWEDPADSLYAYIKNQRGILQRNLDETIGGKLQIYHNGAFFLPEDGEPCGNCFPRDQMRSDIVLLLSERLTEKIQCGAFPRDPDDRVHLTREAFSRELEDLRQEYKDQWGKTVAEKDLAALTQEILEELCYWDFAAVEGEVVTLQSGFALWQGIYPQKR

SEQ ID NO: 38750 - protein, 1343 aa, Subdoligranulum variabile DSM 15176
MQERWRMNKLGFVNFWLYDWEEFPFSEGRLLLRGENGAGKSVTTQSFIPFMLDGDLRPYRLDSFGSKDRKMAYYLLGEEKEESTGYLYLEFIKPEHRLYRTLVVGLRARRSSSTVEFWGFCLSDGRRIGTGPEDFALFETKGSQHISLTRQEVHNRFGDGENWVERGSDYKQMVNRMLFGCAEMEQYDRLLRLLIQLRKPKLSKDFSPRLVQEILNASLQPLSEEDIAPMVNSMEKMDTIQHRLEALGQSLQDARLLRNEYTRYNQYVLGKKGQYYLAARQFTQQRQTEVKSLEDKVALTQQALEEARAGRREAEQQMGEISRQLEVLREGSDLDNAVRRREECRRQVAQQQEAIDREQQEERRKQTALDSKERDRRQAVRRCDDEQDGVEEAFRELGEQNEELRYPGHPATLQAVDFQQEQPEIARFAARLRKAEEGLRRQEEALGRLDRYQQERDAAAQALRHAQSQWEAAQGTVNAMRDELSEAFAALEEPTQVFCLRHEEVMALFAQVTAYEGLAQEQEMQKILSGALQRLSMPLLQEHTLWEQQQKDSQQQLNELAARRRELENQKDLPPRRSEAVQATRAYLQERGIPHASFYELVDFAPDLPPERRALLEAQLADAGILDALVVPPETLAKMPELLAEHPDHFLCLKDLSPAAAPLPLRPERELPPWADMAGVLACLSEQPAGHAWFAADGRYRQGVLQGRSVALQPAGYIGASARRANRERQMEALARQMEEKQRELEEIRARLQQTEGAQRQLQQAYEARPTTADLAMALDLAARQRDETERRERTLDDCTQQLQRQQKQLADLRAEILPLTRGLPYEQDAQTYEQMVDLCEEYREQYRTISEGKEKLERCQSRVQELEQQMNDLNEDLLACTDRVRRQQAEQRKTKAALEELERYLAQPEIQALAQKLEALNEALERAQKQYHDTDKQVLLRQNDLDHQGPELTRKKQDLQKAIGEEEALRQIFEEELCRGPGQPGRGETPLWKQAEAARDHIRQKDRNLGPEDLRTSLEKNMRNTSTLNTYRIGIQSLFASEEGRLRSRVCIELYLDGQRLDLLDFIRRLESQREVEEQLLSREDRRLFETILNQTIITKLSHRINSSQEWTQRMSGIMEQLNTSMGLRFSLVWKGKPADQQKELDTGELLKLLRKDPALMGDADRQKITDHFRAKINRARERSQMEATPATYSELMREALDFRNWFTFRLFYQKGGAEKQTKKELTDSAFNSFSGGEKAMAMYVPLFAALAAQYIAAGKEAPRLMALDEAFAGVDETNIESMFALVHELGFDYIMNSQALWGCYPAVSSLNIAELWRPQNAQIVTVLRYHWDGHVRRLEES

SEQ ID NO: 38751 - protein, 424 aa, Subdoligranulum variabile DSM 15176
MKESSLRDYFVSAPGWQRQLAQLRKKCLAGYADGVIRLQDATPEECRAAEGLLGRHFVPPLLRYKMSDFEKALRDSRFAVTDLAEFWQQLDGVPLRSHTQQKADRRQEVHHFFAAEAALPHGAAARSWLQAMEEDKSHGFGVLQDRIGQPEAARWLHWVCCTLDRRQQHAEPEELALCSYAVSTDPHALDGKNPAGSLLLHALAFWQGVPLPTRARQRLALLRRCGLMQDDISDFTVQRGLILTGADGREHLVWAQLRQAGKFCLLTSSQLAEVKGASSPTSRVYLLENQMLFSSLCRQSRLQHPLVCTSGQLKEASWQLLDLLAQTDCLFYYAGDFDPEGLSIADRLWQEYGERVRFWHMEPQDYRRAISEKKIEGEGRMRQLEQIACPALRPTAQAVLAERRAGYQEALAEQYLGDLQNPGE

SEQ ID NO: 38752 - protein, 471 aa, Blautia hydrogenotrophica DSM 10507
MRIFYREYEKMHFQLYEREVLSLLRACPGFEEYPAQKLKQDLRMLVEWKNLIAVQELKHVRTIAEYKNRQFRYSMTENAVEIERLTVKLENRYRESGNLSSCYLMRIEEALMDMERIKSASTRETGQWWRNLQEDFQRLNQNYQDYLSEFYSENSDKILKSVEFILHKDRLVTYLKEFVQELRVNASRIEAVLKEISGEQAAEILERVVLCERDILFPGSKDKEAVKESVRENVFGGWAALRQWFLSETEPSECSRVLEITDEIIRKIIQNAALIVQAQSWSVSRKNDYQKFIRLFRECEDLEEAHCLAAHLFGIQQVRHFRVCKDRSTESIYSSTYEEEAMEFWLRPRRRRHGSRLERTGFEDKGERKKSQRREYLKRSEEELYTVTQYIQGGCLELSKIEGKISKETRALLLRWIETAMLSGSGRGVTESGKFYQLQRTDSRCTLHCEDGDFSMPNYILMFGAREDGDI

SEQ ID NO: 38753 - protein, 378 aa, Blautia hydrogenotrophica DSM 10507
METFRALIERFWIEKKKDRELYRKIQREAEKIRGFVTEQLGWKLIANEKIIKLEKIPTHAKGFMGVTQFTRIQDYIIFCALLIYLEEREEGEQFLLSEMLEVLETQLQEYMEVDWTMYAQRRSLVRVLQVAENRGLLKVNDGNSERVADGTEREVLYENTGLSRYFAVNFGRSIETFSSCRDFEAAACFETDTEQSKTQRVYRQLVTAPAFYWISTENKDASYLKAERMRIQRVLGEKLGGSLHLHRNAAFYVYEEERMGELHPEESMLSEVVLTVCKEIRKEVENRHLERDAGDCVSIFRREFQGLVRRCQEREKAVWNKEFGEMEISKLERGILEYMKSWMLAELQGERVIFYPACGKFIGSYLTDFVGEEDKTDE

SEQ ID NO: 38754 - protein, 1001 aa, Blautia hydrogenotrophica DSM 10507
MSNRWHMHRMGFINFWLYDEETFLFADGRLLLRGQNGSGKSVTTQSLIPFILDGDRSPGRLDPFGSNSRKMEYYLLGDGEKEEATGYLFLEFKRENRQQYRTIGIGQKAQRGKPMAFWGFLLLDGRRVGYEIKLCRDVGGRKIPCTKRELRQKLEGINFFTETQREYMELVNRYLFGFPCVEQYQQMIRLLVKVRAPKLSKELSPSKVYEVLEESLWPLSNEDLRPMAETMENMDDIQDRLMSLKRAFEDLTALRKEYLRYNLYMLGKKAKAYEEAKEKACQAAGLLEQKERELKEKKENQRAKERKSRKLEEKIQLLEREKSTFYLDEVEASIDRLNGIREQKKQEEKERDRLLEQIEWGKKRQLSLSREFQFSRLKKEEYRSNAERLFRDLEQRNGIIEIPCHEKLKESGPTGGESAKVQEVYRELTELKCQVEGVQQVLGESRGAQKKWSEQEERYQKILAEVQEAQKSWREADRQVEACREWLAERLLMAAEDNQELEIGKKDLKKILGKIEQYQGPGDYEDIRSVLRAIWWKKKEVLERERRSLKEQQIEGRIKIQGLKEERDRRVSDRQEQAREFLEKKGISCLFFYETVEFAENLDSETRKRVEGQLAASGLLDALVIAEEDYKRAVRELRGIAVVLLNPGGFKEESSLKEERFPYLIPADVGSQTLRQAVGRLLSCLSRQKVKLDEKGFDGRLVLYDNGYFEQGILEGYGTWEKARYIGEKTREEEKQKILRERKCELAEAEKELENWDTRLKYVEQRLFRLDEEYKAVPTFAELEKAIGRAQVRREALEWWEAEAQPQERAAAQAKRIYDECEKVATKLCRLLPYGRKLEDYIRVKEEISLYIAQLGEWERAKLRQEMEENRCFHVQELLEREEQEIRKNSDCLRRSECILQELDVLALGMEEHLKKTGAREKVRRLKQIKEELFDQEEQRQDTLISLAVLESEGAALEKEKGQLWLEAKEWAETEKREKECFEAELALGLVKEMDEVPKCE

SEQ ID NO: 38755 - protein, 493 aa, Holdemania filiformis DSM 12042
MQISEALTKKIMETSYLTAINADRYRVIMRYFYEEYEKIHYWLNKEDVFDMMLKTGLFPDYTLNQCQLDLQALLEWGNLTATQDSAKATTYQEFKNKKFRYQLSEYTVEIERLTLRLESLEVEGASLQPSLIERIHRQILALPSLIEKSDEEAAESWTALNQDFIRLNRNYQDYIRTLNSAHAEEMMKTEQFLMFKDQLLMYLRTFVKTLQEHALGLEETMQNLPETTMESLFAKVVRYEQSIPRIEKKTTDDQILENCRGRWRSLKLWFVGENGDSEITRLYDSTNEIIRRMTRYAQQISERYTQGASRVEDYRHLAQVFLQCTTLNEAHNLSAMVFGPEKMLHLKGLPDRATDSIDSGVYDEVPCYFDLDSRSRKARPKSSRLPHPDYQLERQLQRMAVEEQQRQRRESLRVLIQERSIDFAALPVISAAVRKILLSWLSRGLNSSSHRGRTEEGVYFHVNLENASQSCVLRCEDGCFVMPHFILEMEGDY

SEQ ID NO: 38756 - protein, 378 aa, Holdemania filiformis DSM 12042
MNAVETLLSQRWVLRSSQPELYYQIKDEIGRYRRILLEKFGYSVLITPALVKLDKIPGQPEPWMGIQSFEEPGDYAMLCQVLMYLETREKEEQFDFSMLTEYLQGQGVEEKLDWTQYARRRQLVRVLRYCQEQGLMKLLDGSDEQFLRSGNQEVLFENTGNSRFFLRNFARDLMDYTCPEDFIESDWIDMDQDRGIVRRQRVYRRLLLSPGLYRQPEQDEDFNYLRNQRGQVQRDFQSLFACDLHLQRSSAYLVLDEACAAGAVVPGNNAAHDLILILAQQLQQRVKIHQAQYSLQAMEVLVLPVDSVVRLLKRIIQQRLDYLPKYIQGEIPAAIQQTLETLENLGWVRIEDEQVYFMPIFGKLAGDYAVVKEDSHAE

SEQ ID NO: 38757 - protein, 1336 aa, Holdemania filiformis DSM 12042
MLNERWHPARIGLIDFWYYENQEFELDHGHLLLRGSNGSGKSVTMQSFIPLLLDGNKNSERLDAFGTRSRKIENYLLEEDSERTDRIGYLWMEFKRENEEVYKTIGMGLHARLNKKTDAWYFVLEDNRRINQDLSLVRNHLALTQQELKNVVGVQNVMTSRTDYMQRVNQALYGFENLEQYDELIKLLVQLRSPKLSNSLKPTSLNELLQNSLQPLSEEELRPMSEAIASMDRQKDELDHLIQAQRSATQVNQIYQQYNRAVLADKLQKALNQQQQLQGMTKQQQAEEAQRQRVQTEIQQSLRQIQEKQSLQRNLTEEKNQIQDSQLIRLIDQQQSYKEQLKQLEKDLRHKQEAFSRKQDRLQDVRSDQQRFSDRYDGSLRDQQRCLAEMDVLQDNLQFEDHLLLVQQLKDEPAAQLDFKDAEKLIEQRLVLLKQGLVTWDQRRQAAAMAQQQQNEWLRLKDEKAGLQKQADEIAEQYRGIVEEMKSRFFRFSEENTWLKLNAGQFAAVVELLLDYAEQSQFYKITQLITDLYHGHWSSLQSRLTQQKASQSEHLEQQRQIAQELHQWQTVSEPAPLWDEATENHHRWLKEQGVPFCPLYEKLEFSSECSEEQRQMIEESLRRAGILDSILVAKSDWDALPKTPRGQAEKVLLTTLPPVQLPALELDASLLEENGIQQLEQHFQCSLASLQLKENGYRWGSLQGLNSMEQPQVMIGQAARERYRQQQIERCQQALNKIEEQLSQDQAELNKITQAMQQLESELKQIPKEDDLSEALRQVQASEQAVAEKQKQLDQTQQRWDQIRSRMSEIDQRIRQTAEQLAIAADEQVFLSRKEGYEEYRDKMKDLRRITLQLQTAKEQCESSRAQLEELQWDLDDMQADASQLQSQISARRQQLALIEEQLRESHADQLRERLTQIQWQLERLPEEIVLLNRTLGSLQNELKQSSENLESREAEIERQKILCQQYDQVVVRELTNGYLNQEVDPQTDWKGILRQLEKSEGFGRRTSDLQMDLQAQFQNHRIVLQDYSPSYRSVLQEELADIPGRLELLARIQGRRAGFQELVDYIGGAIAELQQLIQEQERTLFEDIMINSITKTIRRHIRTSREWVQRMNTAMSAMNTSSALRLSLQWKGRKAENDQELDSRELITLLETDAQIMKPQDQQRLAGHFRNRLAAARKEAEKEENQQSFHQIMQEVMDYRRWFEFTILYQRGDEKKKELTNSAFYSFSGGEKAIAMYVPLFSAVSAKYSMARPDAPQIIALDEAFAGVDENNIDGLFKLIENFRFDYIMNSQVLWGDYPSVKHLRIAELYRPDGVHYVTVMDYQWNGSVKSWIPE

SEQ ID NO: 38758 - protein, 422 aa, Holdemania filiformis DSM 12042
MKAEQEFAAYLKSKPAFMPLLEALKTRWNHSGTWRGKLVLHECDPSLQEALAELLGGSFWGQSTITLTYGQWKKALSRTRFDGCDLQEVLSLVFDEPLEGQNIQKQKRRVQEQARFDEMTRQLAGTPAGRWLEEIRQARGSLYTRCCAESEAVLRQWAEAMNQLPMRTQEVSLIAVYAARVLHDPHALDTGPVRRLLIQSLRWELTEDSTDEEKVWEESELLEQAGLLRDQVSNRCLVYNLNGIGNRGEVHPGWQGFAEKAEPFSVTLSNVLNVERIESAAQFVIIENPSIFERLSAELRHQKRSDISLMCSEGQPNQCVWQLLRRVDKTNTQMWYCGDFDPEGLQMAQRMLRRCPGLKLWHYEVQDYIKALSNKSFNARRRRILESCGCEELAAIQHRMLQDQRCGYQEKLLEDYLKFDFQ

SEQ ID NO: 38759 - protein, 497 aa, Fusobacterium ulcerans ATCC 49185
MDILDQIKETSYLSTQKTIYYRRIMRVFFREYEKMKFQLYKEDIFEEIKKYSEFDGYTIDELKSDLDILVEWKNLTAIQDSRKVYTIAEFKNREYRYSMSEKSVIIERMTVSLENLYFETGNLSTNYIPRMQEALEKIRLLFNKKENYDEIYEYWENLQEDFRKLNQNYQDYLREFYTKKTENLMKTIEFIVYKEKFISILRNFVRELQINSSKMETTIDNIKDDMEKGILDYIIKNEVKNQELNLSKELKKDKEFEDEIGENIRGKWESLKNWFGSSGMRKSEYRQVMDITEEIIGKIIQNAFFITQKQNWGVNKKEEYKKFIKMFIECEDMDEAHKLSAHIFGIQNIRHYGMDIPRSTDSSENSAYDEEYMEYILESHNRTYKPKIEKTGFEDRKKLKEELSLLYKKKLEEDREMIMKYLQNGILDISKIDENISSEFRIFILNLITSANISVEKTGRTEYGQKYKMSEMKEKFVLKCEDGNLEMSKYIFEFLED

SEQ ID NO: 38760 - protein, 381 aa, Fusobacterium ulcerans ATCC 49185
MKEIRLLLENFWIDRDKNKEEYFEIKKERKEIEKFYIERTGWKTLFTEKVIKVEKIPAKAESFMGINEFQDKMDYCILCGLLMFLEDREDGEQFLLKEMTDRIEFYLKDLLEIDWTKFTHRKSLVRVFEYAERIRVIDKTEGNIKKYGEDEEIEVLYEKTGLSRYFSVNFEKDIMKYTSYEDFEIERNENIDINRGDFRTNRVYRKLLTTPAIYWNETNDQDRIYIKNQKPVIEKGLGKFFNGKLHIHKNGAFLIFDNKDKIGEIHPKGTMLAELVLLLCNEVRKKVINKEVKKELNDIVYISKKEMEDMMEECKNRYGINWSKEYREMKIEKIFDNIIEYMESWMLAEVEGEKIAIYPAVGKITGAYSKRLKPIKGEKDE

SEQ ID NO: 38761 - protein, 1346 aa, Fusobacterium ulcerans ATCC 49185
MNNRWKMNRIGFINFWLYDEEIFNLENGKILIRGTNGSGKSITTQSVVSFILDGDRSPERLDTFGSTSRKMEYYFLGDGEKEDETGYIFLELKKENVEQYLTIGIGQRAQKGKQMSFWGFILSDGRRVGEKFKLYREIGNKRIPLSKNELERLLGDKNKIAYGQRDYMDMINKELFGFSDINYYKKLIKFLLKIRTSKLSTDIKPMNVYEILNDSLQVLEERDLRVLVESLEKMDSMQKRNEEQKEAQKSINIIKKEYDKYNRFILGKKAITYFEAKKEYEILKKNIDKLIKEIEKLEKESKDNSEIKVKIEKRIEDIEQENRILESIDLEKTVNEMLITKREFQNKEKEIKEEEDKLEEHNTELKRQGIRKREEENRIESVKYKIKKIYQELKDINETLLFEGHLKDENEIFQKEIAEKLESIKNNLEVYQKNINLGLEALEKMKKLSEDLEKEEEEVNSYRNERDRIEDEMLKAQGMEERARDNLVENFYILKEKNEFLKISKSDLDKIIELIKKYEGLIEAGEIKKILEKNYNLKNQELQQEKIELGHIKTVKTREYKIELKELEELKNMEDSVPMRKDEVIQCRKDLKKAGIEFMAFYETVDFAENLSEIERNTLEAQLKDSGILDSLVIPYEERERAKDIISKYSDIIITSKKNSDKNFKYNKLVAENIRENVKEVIEDFFKNISPSEQEKNEDIIILEKDGYFKNGVLEGYSSSKEEASYIGVQTRKEKLQKYILEKEEKCAELLHEIENFDLMIEDISNKISALIEEYKNVPLYDDLDTSIKLKKDIEYAFQKIKNELEIREDKLNRIKTEYREWNQKVITRCRILPFEKKVAEYKEAETASKEYLKSIYELENQLRNYQSSKYEIIRTEEMEGKSEELIDFYRDKIRKGKNELEKYQKAIEKLQEVLNSPKNVAAAEKLKNLKEEKLELKEQYDKADRNIIRVDTTIQGREEILNSENKKVEAKERAVEKTLEYYKEELSLGYVVQYEKGEEEKLLEEILKNVKDSEKTTEGITVSLMKKFNDNSSRLYEYMAATEEIFEDDYEYCRKRIYIRMINNGKKLSLYEFEKILSEEIEQREYAIEREDRKLIVDILSGNIGHKLNDQIYESRKWIKEMSKIMSEMETSMKMKFSMEWKPKEKLNESELEINELEILLRKDGKLLPAEDLQKISEHFKSKLNLIREEMEIKGEEVNYIDSIREILDYREWFEFRIYYHREGENKKELTNNAFNRFSGGEKAMSIYIPLLAAASAQYKKAKEDCPRIIALDEAFAGIDDKNISSMFELIDKLDFDYIMNSQILWGCYETVKKLRIAELINRRDLKMVKVNHFYWDGKKKTLEM

SEQ ID NO: 38762 - protein, 427 aa, Fusobacterium ulcerans ATCC 49185
MLNECIRYFKESKGYKRIFQQLKDKYISYGKLSGNIVIDNPEKIEVEAIKGLLGRVMEGNKIKFKISEFEKVLKESRFREIELMDLLEGYFSESIITKKEKKIEKEMSKEIFFQNIKERLKIAEEYNETAAELLEKIIRDKGSFYKHDADNTETENMIYFTIKAINFLKKSKERIKIAILGAEITSNPHYFDRGMPAGQLLLNLLFHINNMEYTKEAEKVLELYYISGIEVDTISSFTTAFGISLHTEKGIHQAYEEFIKQSEEYIITMSNLKKVIKADCKRKKVFIVENQMVFSYLCEYFKDKEIALLCTSGQLKTASLILIDMLCRKGCTLYYSGDIDPEGIEIADKLIQRRGSKIIPWCFTIEDYKLNISEKIISEESMKKLEKIKSDCFIELIEEVKNKKRAGYQELILDKMKEDIKKINWDL

SEQ ID NO: 38763 - protein, 541 aa, Micromonospora sp. ATCC 39149
MVGVRHGAGRSPAAKAGPARHDRGAGAASRQHRQPEDRAGERGGAAVLGGADRGGGRGPLGDAVVGLAADLGGGDHAAAAVPDGDAAGQISGVRDADRDNRGRPLVVADRTGSRRRGRRDPHTGGPARAPGSDLAHLRHHNREHRMSARTSEQQVAAQHAFVGLLAQPMITPATNRELFRLVVRHQQPLSEAARRLGYRIQRVGQAARLIRVPVGGTATVPPRPSDAPSRRLLALMCLIAACCEEVSGTVTLQRLSDMVRDVCAAPGVQVSPYDPDIKSERRQLRDAAALLARWGVLNRRTSDEKMLEEWTEDGSGPGAGYEVDRDALLLMTSPDVLAAALQPEPADADATRTIRLLRALVETPAVLYADLDPIDADTLRRHRSRYAGYLAQMTGGATEARQEGILLVLCDGDGRPPTVADWPRAKAADWVALLAADQAGRDGVRHDDGTVHLTRVLVDELIDDLIRSRGAYMNDRQKADPQVVLDDVQRVLTELGLLRVTGDGGWVLLPPAARYRDPDVLYPETTSRTSSAADLTVVEIA

SEQ ID NO: 38764 - protein, 1439 aa, Micromonospora sp. ATCC 39149
MTALAGLTVPSPGPHLSDAQLAGWRDAVAHGRLPEPVRGRWQILRAGVIGLWEFDVAEYVFADGRAQFVGANQSGKSTLMTLTTLIMLAGNLERQNIDTFGDSGKDFRYYVEPSGNDQDRRDDSATAHRGWAWVEYGRMRDDGTSEFFTTLLYAQAKRGVSQLTRTWMICHGTARVRAGLDLVSGQAVTEPRHLDGIDGVQVFPTGTHYRRKLTTALFGFTDEDRYATVLELLKTLRTPHLGQKLNPDWFTNQIRSALPPLARDEIEGLASGWQQVEQVGADRTDAEEARSAIVDYVAKAWRPWADAVLRQHADALAEADAALSAASAAVDAAAATLDQARQALDAESTKTQQLTSAAERNRGAHRQLLESAAYKSATGRAEAATFARRAANQAATRADDAAAALVMLRSLHEQALAKQTEAQAALEAARTGYQAAVTATVTAAGAAMLGDLAAQWAADADTARLDAAVAARRTAVATLRNLLRETTRLAAKYRTADDLASAAEADLNTRNADAESAAGRLSDAIQQLSDDMERWAAALTGSAPEPALRQRWLEQVTTESIAASPRQVLQQLLMREWLTPAVDPRTTRVAQLRTEAEQQQSAATAADREADELAMHGDPVPPAPAGWTRRPRPPFPSADGAPLWRLVDPADGVERDVLDQVEAALTVAGLLDAWVTVDGVYTSGRDGTDVVATSLPSATGPALSTVLVPAGDSGPLTATITAILDGIGFTPAGQPHASAVAVAADGRWQTPTASGQAGPAEHGAELIGAAARAAARQRRITELHELAEQHRTRADDANQAADTLVDEITALRAAAERAPSDGDVVAAALALTGANRERDTAQRKHVALAGKADAARQVWETATADATAHALDHRLPNSDEHLDAVTEALDAAAGAVGRLRLADQVRNTAERGSAAAESRTAESEAQLDAGVQAEQTAAAEAALLDERATEAEKAVGRGDQELFDRAAELDREADALKSAIAASHRDGLVLAGAAATAQSDWEQRCREQTTAEQDRAAAVISWWIPVDAGLAAARNLPEPCGRSVDDALQQARTAIADLRPASWPATRTGREDRVRQVTARLFAGPYTELQTSLEAKGGRAVHAAEADDARPLPEITMVVEASGKQLTPAAAIAHLDDQIAKLSATHDEKLHQMYAQILSSTFINHLRDRLKRVLSLLSTVNDVLERHPTGANRTTLRLRRNPRNEQQAGYKILRALESGSFESDAAQEQLQAFLIERLQQVQEAGLPGVDDWTDRLATLLDYRDWFDVVCEFRVGTATDPKWRPLTKQVHAVDSGGGKVVTLMQPLLATLVALYSDNPAGPRPLWLDEAFEGVDPNNRAIMLRMLCDFDLDFLLAGPGALVAAAQVPAAAIWTITRAPAPLPGVDLSLMLWAGNTLQIVPVADTAAPLLATPRPAEQDGPDLLSTLTADVGATGSEEMR

SEQ ID NO: 38765 - protein, 438 aa, Micromonospora sp. ATCC 39149
MGREHAADRAGRRHRRAAAGHPATSRTGRTGPTVHAHCRCWGHRQRGDAMSAAADRWAALPGPTKVLAAARELLENGKTGPGVTVRITLDAVERDQVGRILGMSWEASTAPVTLGRLRKALHGLNDTLEDLLVRLGGPLDDRVAKRELDRQAAQDHLDNAYAILTSAGIPEHAVALARTRRWLEHTNPDLADSRAQALALLWQHLPAADRPLPELANSLFGNPHHLDRDADLGRLAARLLAAAHTTEPGAAAAAAGTALSADVWRQVWASAGVSCDEVSATVLVLNLPLAGSGAAAAIAAAAAETGEPVWLTARSLRHAWEPGPGLHTVRVCENPVVVETAAARLGPHALPLICVYGRPSIAAWLLLDGLAAAGVRLLMTCDRDTAGQQFLTELLRLPGAVEWLAAADGVYEESRLPALLADLAPAPPEVLDPVPKSG

SEQ ID NO: 38766 - protein, 512 aa, Streptomyces sp. AA4
MDPIRVPPEMFRFTSGDLAGLYVSVLHAFGEANERLETSLGLDDVRARLRAVGWLDALEDEELRRALDQLHAWRLVDIAQNHSENYRSAAEYERRNLQYSLTRQGEAAFAGVVHAMSLLASAGALQTAVLDAIADRLADLARELDAGSDRRVFTALTELESHLEALRANTKQFNGELQRLLRSEGTTLATFHEVKASTVAYLEEFLADLEQRKHTIGVRIQQVEDRGVGLMHQRALVGADLPRLSGADPGPEWLAHRRARWDGLRAWFLPSDAAQPRVEQLHVVARRAIVTLLQVLDRITESRRRASSAAADFRELARWFAVVPAQGDLHRLWSTVFGLSSARHAHLAHPDPELTSSTTSWEDAPPVEVSPLLRTSGKTERFSRTGKVRDVAAIKAARAEQARAERAELEAAWDLLDTGGPVRLSAFGRLDHAVFERLLDLLGRALGIAPGRGGVRQSTTSDGRIEILLRPPADGAVARLSTPRGLFHGPDYEVEIRTGGVRQARRASGGAS

SEQ ID NO: 38767 - protein, 413 aa, Streptomyces sp. AA4
MSQLANQLAAAEREEVALGIRQLLATPLITERAKPDAFDLIRRRGEPIRKWFDYYCGWALTVEPRLGYARLAKVRAAEDPRRPLRRLRSGKAPFDRRRYVLLCVTAAELLATPVTTIGLLAKRVVQATAADEAITTLDTASREERRALVDVLRILEHYGVLDAVDGSTETFVESTEAKVLYQIDGTLLLRLLSAPVGPSRLAVPLDEVALRFEELLAAVSRERRYGETSAHSDRPGQSEVQRNLWLRHSVFRRLVDDPVLYFEDLSDAERAYLASPTGRQLLRRAAGQGGFVLEERAEGVLLVDVESVATDSRFPDDAGNAKVGALLLLETLTGPVTVEQLRIQAAELLIRFPRWAEGYRGTDGAARLAADAIEVLMAFGLAQLSSGIVRPLPAAARYTVREARTADSEGASG

SEQ ID NO: 38768 - protein, 1350 aa, Streptomyces sp. AA4
MTVTELPRHAEDAFSRQAYRWQPARAGILNVWRYYDEIFEFHHGRLLLRGPNGSGKSKALELLLPFLFDASLRANRLSTFGTGERTMHWNLMGEGASGVTRVGYVWLEFRYPGTPERWFTCGARLQASSRTTTVHPDYFTTSQRIGVSGGISLVNDSGQPLTRQALEQRLGSDGTLYGNATDYRAEVRTTLFPGLSEQRFDALILALLQLRMPKLSQRLDPSLLSDLLSKALPPLGQQEIADLAEGFERLDKHHERLKGLEELVASTRTLAARQRTYAQRVLRAGAGTLISATTETEKRASTARESAVRYETATREKETAEQQIDELAKQIRTSSAHRNGLLESEAYQRGSELELLRRRTADAKSRAERLLTESRRRKAAAEQDERARSSAEQDVRHRTEHVRNLVSETRQAAVRAGMPSVHGEIAAQLDGGDPAAARPLLRAAGQSREEQLRAVDEALGGHERAIDRRGQAEEELEQARTAFSAAKEELDLAAEQRAVALEQLRTDVLAWAQACHELAFPEPDLLLDLLEPERALNAEVEQAVNAALEDITRQEASREALVAELRQRRDDCVTEVARLQSEKDLPPLAPPTRTADRTRMAGAPLWRLVDFSVASSEDDRAGIEAALEGAGLLDAWVGSRGEVQGHDVFAAPEALPAAKGRSLADVLSPEPDGEVAPSAVRRLLSSVGFGDVLPAEGPAAIGADGSWRLGNLTGSWHKERPAYIGAAARRRAREARIEELRNEILLLDAEIADADAELSALAVRRGTVRDERASLPPHTDLNAAARQLDRAEIGLAAADRLVRERIERVGKREREVADALRTLTACAAEYGMPSERSALANLAAATREFHAVCENWLASHDGLRAARQVLGSLAAQASRSADDARQRAEEAEKAEEEYSELAATLEAVDSTAGVEYREVAAKIEKIGRRLDELEATRNSTQNRHTELAVEVGKWNNRRETDAVEHEKAVGDRDAAALRFRRLASGAFPADSGLDDLEQFETVLGSSDGVRAALDAARLVAATWPSVPHSPSNIGDALHRLSESMHTCRDVLQTRADLDLETDEDVQIFTAVVDGIRVGAAELLKILREEAEESRREITERERELFDQTLTGDTRRHLAARIRQANELVENMNSRLEQVRTASKVAVRLVWQVAADLPPGTKAARDLLLKDPARLTAADRESLHQFFRDRIEEAKADDTATGWEQQLAKVFDYTAWHRFVVKVDRANGEGWQLLTRKLHGALSGGEKAIALHLPLFAAVAAHYQAVPEAPRIILLDEVFVGVDTTNRGQVFALLSALDLDLMLTSDHEWCVYAELSGIGIHQLITGADGDDAVTTARFTWDGHQLLSLDGE

SEQ ID NO: 38769 - protein, 389 aa, Streptomyces sp. AA4
MHARLSSGLPVSRVRVGPLDTEQQTAVADLLGLAQFPGQYTSITLAQLDAALREVAGVDAREVVTRLVGPVGNRAEDRRKAAEARASLWHWLDVHPVVAAQPALRSWTASIRRAGLIEGSIERTRLELERALRVLSELPATGVPLPVFADSALGATHALDDGARTANLVLKALTAIYDVAPPTNAPERRALWERAGVADDELSSTVLTAGLQLPGDHVVGRILQVCRAAGTAAVLTLQQLRGSKLASAPSTVWVFENPSVLALALARFGSSCPPLVCTSGWPSSAGVALLKRLTQIGTNLYYHGDFDGDGLRIAANVVARTGAKPWRMTSADYLAAVADGPAAGRVTPVPWDPELAVHLAEQGKTVPEERVADSLLDEITEQGTTLPSG

SEQ ID NO: 38770 - protein, 539 aa, Streptomyces sp. C
MPITGARQGEWPTMDMTRPQPTSQAGGYGPFSHLTAPNVLLYRSVMRAFLVAKERFAVHLRPEDVQAALPVGIRPGELDAVVKALDSLVGWGNLRADPDTGRVTAVEDFYRKRFIYQLTREGEAAEQALAAYDEELGRRGALQAVALHDIVTQLRALLVLTAGEEPDPAKTHLALDGLASRFAALADNARAFMGSLQRTIDLHDVGEEVFLAYKDQLIQYLERFIQDLITLGARIARLILELEDGRRIQPLLRAAAAREAADATPQEAAEAEQAAYERWVHRWEGLAAWFLSRDGRESQSRLLRGRALGAIPQLLAVVRALNERRAGRSDRSADFRTLARWFAEAPDDDARHQLWRAAFGLYPARHLTVDAETLAARFARPEAASTPWADAEPLRISPQLRRTGSYERRGKPRKVEDRQEARRLLAETAAKQAAETAAARARLATDGITTLSGLGELDPASFRLFLQLLGDALATWRPGMTRTRATSNDGSMEIRLTALPDGPTIEIRTPVGTFRGPDHAIEIVDLTAGTDATEGGDAP

SEQ ID NO: 38771 - protein, 414 aa, Streptomyces sp. C
MTTPLAEVLDGQHAAEMRKAARALLKQPLLPAHGPSADAYRLVRRHASELREWFDRNTGWSLRVDSETARLGKIPAHLADATHPAREATRSAAPFTRRRYVLLCLALAALERGEAQIALGRLADQVVLDAADPRLAAAGIQFTLDRRDERLDLAAVVRLLLSFGVLRRVAGDEDAYVNGAGDALYDVERRVLAGLLATRRGPSMVRAATWEERLAELTAETALDSDELRFRALRRSLTRRLLDDPVLYYDELTDAELAYLTRQRGFLTARITELTGLVAEVRAEGIAMVDPDDDLTDLRMPESGTHGHVTLLLAEHLTSADGPVSTADLMSRVTDLAAEHGGFWSKSAREAGAEEELVEQAVVRLAALGLVSRTSDGVVPRPALARYAVGETVVVTPRTAGTAEVPAQRKASPR

SEQ ID NO: 38772 - protein, 1351 aa, Streptomyces sp. C
MGLVDLFHYDVEEFHFRDGRLLLRGNNGTGKSKVLALTLPFLLDGDLSARRVEPDGDAGKRMEWNLLLGGEHPHSERLGYTWVEFGRRDETSGEEHFRTLVCGLKAVSGRGVARHWWAVTGQRIDHSTAGSPVDGSLSLLDATGTVLSRDRLIEAVSGHGTVHDQAKAYRRAVDEALFGLGEQRYGALVDLLIQLRQPQLSKRPNEAALSRALTEALPPMDQAVIADVAEAFRSLDEEKEELRAARAAERAASAFLDHYRRYARIASRRRARLPRTEHSKYEHLLRDLAGAQDEKAGAEQERAEAAERIAALTEMQARLEATDAALREGPEMRSAHELERAAKAAERSQGDSVRARADRDQASLLHSRALGRLGAAENRLESAREQAENTLREVGEVARKARLDLPEAEGVPVGELRAAVAEATDRRQRTLGHVEDLADQAGKAAAERRTAALRLDEAEADLTQAAEAQEAADEAATAAGRALVDAVREHAGRCAELVHPDPAGLLDELQEWAVHQDGPYPARLYAAQVHSAKAAVLADRAAEAAHSREGLAARTRQTEEELAKLEAGGRRAPTAPYTRTPGSRDQTPGAPLWRLVDFREHVGEGERAGLEAALEAGGLLDAWVRPDGVALAPDGHDVLLAPRTGPVGGPSLADVLRPAVDRGDAQAVSVGEEAVAGLLAAIGLGAVRGETAADTWVAPDGRYRVGVLTGRWTKSGAEYIGEGAREAARRVRIAALKAELASLQQQLADIAQQAQELTTRRLALDAELAGVPDEAPLTRAHARAAAAADTVRRARSRREERAADTLAAAERAERAHAEVHETATALGLPSEPSELAEVRQALVELAALLAALWPALRERTEASRQAAEEREEAGRAGERTAELGLRAEAAARTAAADDERLTTLRSTVGAAVAELERRLAETAQTLRRCAADQRVCQERQTEADRRASRAEGRIEQLEKDVSAAAAARAGSIAALQRFTATGLIAVALPDLAVPAAGGEPWAATPAIALARSLEAELATTDDSDGAWERVQRRLSEELKTLQDALSRHGHTASARMVEEGMVVDIVYQGRERAVPELAEALAVEVGELMRILSAHERELLETHLVTEVAGTLQELIGAAERKVLAMNAELEERPTSTGMTLRLVWRASRKAPAGLAQARGRLLQTADAWTPEDRAAVGEFLQTQIARQQTEDAAGSWLEHLTAALDYRSWHEFAVERQQHGRWVPATGPASGGERVLAVSVPLFAAASSHYASAGSPYAPRLVTLDEAFAGVDDDSRAKCLGLLHAFDLDVVMTSEREWACYPQVPGIAIAQLSRVDEVAAVLVTRWEWDGTARTRRADPVRPAEPEPLWA

SEQ ID NO: 38773 - protein, 434 aa, Streptomyces sp. C
MGRNGPHTPRGPGAPGGAGAPVGVSGPPVDEARLRRLLGGADLAWLVERARRRLERGQPLTGAVSLAMPSPAERAAAERLLGRTPGAGKALTVRLDAVDAVLVRSGISPEGLEAAVSVLAGRVVPHDEVRRSEERAWTEAYAPLAGLGEDLPAYAAWAVRVRDDGLVRRLARTPSAARSLVEQTVRVLRELPVAPPRSLAVFAADTLGSAHALDDGTPVATLALAGVRALTGHPDGAGSAWRRAAWASAGLLRDDVSSTVLTLNLRGTPALDWMAEMGEPSVLTLRQLAHRPLRTAPPVVHICENPAVLAAAADNHGTNARPLVCVQGQPSAAALTLLTRLHELGAAFRYHGDFDWGGLRIATTLSGHVPWRPWRYTADDYRAAVAAAGPVLRPLDGKPAQSPWDPGLALALAEHALRVEEEAVLGLLLSDLAG

SEQ ID NO: 38774 - protein, 539 aa, Streptomyces viridochromogenes DSM 40736
MSVTVRRLEVMEGNERKTAHGEEAGAEAWQRLSAYAYLSAPERLEYVAVMRVFCGTLLADLSVPDLLAKLAETDGPGAALDAETLTRRLEELVRWGSLLRSTHTVRATSIAEYQRSRSRYQLSKLGERVQRDADEVLAGADAAREVSSELLALVDRGLREIAAMAEAPGGADPQQALERISTLFVQFAEFAESVRDFYAYLGQVLARYDLDSAEYQGFKELLLDYVEAITEDVSFRAPRIAAHLDSVWPHLPALLARIDAHAAGIGALADGLPETRVQRSRGRDRADWEGLREWFTVTGGHSSQVDQLRDATLRALQSLLANAKRMLRSASGEMSRRKDLLRLAAWFDAAEPEEAHDLAVAAFGLYGARHLGVAPDPDRSVPAYVSWWTGPVVEVPVALRERGSRVPRGRAAAAEDHSAQKRRLVEQARQQAEARQAAADELRSASGRFEQVRLSAPAMRLLLELLTTALGNAQLHKDAHDFLLDGAQAADEDLGIRLTAWRTPGRSMVLKSVDGDLTADDLTVAVDSASGPAVGEASA

SEQ ID NO: 38775 - protein, 445 aa, Streptomyces viridochromogenes DSM 40736
MPLPSAHDVALAAERRTAARLLLAHPLVTSHGPHSDAFPLIRRHADWLAQRFQQVFGYRLLVEASYARLFKAGLGTGSGHRLERPSTGTPFSPRTYAYLALALSVLVTAPEQLLLSQLVADLRAAAVDAGIEIADTGRQAERRTLAAALRQLVDWGVLVETEGQVAAVAEERGGEALLTVDREIARVIVAGPLTQSRDGADLVRRAADPGFGGPRTYVRRRLVETPVVHLDDLTDTEREWLRTRQRREAQAFSELLGLEAEIRAEGIALVDTEDELTDLHLPGTGTVAQAALLLLERLADRLRPEEAGHPAVGGRLVIGVPVPDGLLPELLDDLIEEYGRRSGWQRGHLEDRDGFLAAVLDLLVRMRLMAPAGPVRADGHGLPEGYEQTVADGRSVTDVSRARGQGSADGGWILLAAAARYATTVAVKHRTDRSPADDDSKEPPR

SEQ ID NO: 38776 - protein, 1438 aa, Streptomyces viridochromogenes DSM 40736
MNRPPAPHRYRLHRAGIRNVWQYDEQEFTFGEGRLLLRGKNGAGKSKALEMLLPYLLDGDARALDATGTGRTTLAWLMLDGFGQTNRLGHLWLEFARTDEEGNDHHLTIGAAIRASQSTKTAKPFFFTTRLRVGEALDLAPAGQPLPVDRLKSLVGSENVTDRAVEHRARVARELFGLTDPARYRNLLHLLHRLRRPTIGDRIDSGGLVSVLAETLPALDDEVVEKVARSLDDLDSVRAYLGRLERTDQALRAFLTDYRGYLHGALRRRTDQASGELEQLMAHRRSASDAARTADGLREREQEIGARIEALEGESNAAATDLAALHAGAGYRSLTELGEKRATVTALHSAAAAAFKAVRQAHGNQEEAGRRLTAEADRLGEELVELNTMYGELVREAERSGLDPVHLGEPVATPVAPVVPAATAELTAPDGDFHLVRHSAVLAVDTRTCEAALQAWDERLDAAQPVIRNRARFVTELATLIERSDEARREAAEADAARERLEEQAEHARRRTEQRLQETVHESEAYALAATAWSERLRESTGVPLDALLALVAPEPADGPLPAQTPEAVVEAARSAVDPWLAALGAERDDLSLTVRERETEQDRLRQQRADWERRTDPEPPSPSHRTAPRTPGTGAPLYRLVDFAHDVGPDARAGLEAALEASGLLDAWVRADGTVLDPATCDTLVVPGAPVPGPTLAQVLRPVAAPDSGVTVEQVERVLGAVALAGGETLTGEPGTMGVQVGADVEVAEPHTAIGTDGSWRLGIARGRHTKEAAEYVGAEVRAETRRRALAELDRRLLDLEQELVERRRGLRILTEHRDLVTDTLRRPPPARGLTDAWARTAEAERAAETLASQANTAAREAEQARARAVVARREAEATASAHDLPADPAALQTVRLALDRLGQGAQRLRRRVGAVLSAADGHSAGRADYERAESARREAESDYAEPLARLEAARRTVRALEEALGATEQEILAREAETKRRLDAVGRQLPGARRDMADVHDRRVRAEEDERMRREALATQEAEVLACGRRLRTALSLPGVLRGAGLEADADTGAEADVDSEADVGADADTGAEADADAGADQGALKSLDPVHHDVRERIAAVRVLVDAVRRGLDAVRRDVSDTTLLNRHTELRDQLSGGYDATMEEREGIKLCRLVDDHGPHDIAAVGERIAAEAAEARDRLTERERDVFQRFLTGELGDHLSSQVLAASALVAALNTTLATVRTSHGLGVTLDWSLADGVEADVKAAVDLLRSPSGLRTREQSEQLRDVLQRRIEDARRADPAAGYAAHLRTALDYRDWFTFTPWVVNDAAPGSRRKLSGRTGLSQGEQRVLSYLVLFAAAAAHFTGLADTAPQAPRLILLDDAFAKVDEPTHARLGRILVDLDLDFVLTSERLIGNWPDVPSLHIYECLRDPHVRGVATLHYTWNGRQRRLVSV

SEQ ID NO: 38777 - protein, 443 aa, Streptomyces viridochromogenes DSM 40736
MERAAAEAGVGMTGAEQTDERPPDAEALAFLTRPGLTRLWTAARTRLERNGLRPIGTLRLEHLDAREREALSLLLARPIIGPTATIRLPDLDTRLRASAVGRGLTSTLEELAPPLTDRRAVRDAVAAERSRLWTTVQAELEGTSLSVQPWTAQWLEEIRRGGTLARQDPHTATTVITQAVQTLATLFPGTDPRLTPASWGRGELATRATGSAHGLDDGTLLSRLVLRGIARARGVEFPADAPARRALWRMASVTPDEVSSTVLAYGLRPTGGTWREAALRERADHHMETHLTLRELRTFTLNMPPGTRVHICENPRVVEAAADAGRTAPLVCTSGSATTVALTLLDALATAGCAFAYHGDFDWPGIALANRVMQRYAAEPWRMRAADYEYLATRAQVNGTPSIALTGPSAEALWDTELAPAMDALGIALHEEAALDLLLEDLG

SEQ ID NO: 38778 - protein, 558 aa, Paenibacillus sp. oral taxon 786 str. D14
MESHLPGLPVQSLRGIPELKYVNADNVVRYRAIMRFFYQEYKRLRYWLKPEDVFEAVKAWNVWPDYTLELCQGDLDQLVEWQNLTARHDGGRSSTLEEYLKKKMQYLLRPYSIEIERLLETLEKVTGYGGSLEASLFDTIADKLFDIRSQVGELEPDAALELWNVLYRSFVNLHENAADYIASLHTARAEEMMVTEAFLIFKEKLTDYLQNFVQALQRSAYKIEGNLQRINDSVRDLFLEQVVEGELRKPRLEDEPDREELLEELRQGWTNIRRWFVGEGAAPSELTLLERATKDAIARIVRSAIRIQERKRSGLSRKKELEHLARWFASIETVEEAHRLSAYAFGLFPTRHLQGEDLRDSDRADMSSWEERPMVRMLRSRSRKRGERQPADAVRDNERRKQREREAFKLRQAEEWRMIAALLDRSSVKVSELGPVTAKERLRLLQWIGRCMTTGNGHSFVTPEGVLIRMSNPRTAERTILHAEDGELEMANYELHFRLTEAANGLAVGTAAKQGANGADIAAAEAAAAADTAEVEGEAGSRFESEVRSENEAERQGR

SEQ ID NO: 38779 - protein, 402 aa, Paenibacillus sp. oral taxon 786 str. D14
MAGGALKRLSKRGINAEQAAERKRACMHALLNRPWVAKEEDPDLYFAIRDHYEELRDWFMDKAGFPLIMTRTIAKLDKTPVKAHPWMGFPEFREKRDYVFFTYGLWYLEGKTELDQFLLTDIVEEIREQMLSAGLEADWRNYYDRLSMARALKKLRALGVLHSVDGDEGQWAQDAERNALYECSPLARYVLRRFPRDLTGCSRLEELEDPIPYADTQDGQSMRRRHRIYRRLLLEPAVVDRHWDEEDLNYVLWQRRAIIDQLENMLGWTGRRYREGLWFFHPELTGESELFPTMSAASDLALLLASEIRKELAEGGVLYVEDNGTVRLTKADIETLLYRLQLKHKEFWSKDLREAASQELAELCMNHLAEWGLGEWEGETSFLISPVLARWSSEYANNDFDT

SEQ ID NO: 38780 - protein, 1401 aa, Paenibacillus sp. oral taxon 786 str. D14
MEQQMVEQESGLRADGASGQGGRAAARWQMHRVGILNFWYYDEEEFQLEEGRLILRGANGSGKSVTMQSFLPLVLDGDKRAHRLDPFGSRDRRIEYYLLGEEDGGKTDTTGYLWMEFKHGATGAYRTVGIGLRARRNAAQVQFWGFLLEDGRRIGRDFWLYDRNGWLEDGVRIPLDRKELEAKVGTGGQVVLDQKSYQDMVNKHIFGFADTDAYQDLLQLMIQLRSPKLSKDFKPSAIYEILHQALPPLMEEELRPLSEVLEDMDQMTDRLDELKRHRAEMVKLQERYDFYNKHVLYTKSEDMLEAKAAYDEVAARVRRSEETLAQAEAEKAGAVTERSGIQNRLQEIAVERELLEKHEAIGKQREYEAAAAALADTEKQLERAKEKAGKARIKQEQLERGLQEAEAKRDTAEREQRELLNELEAIAGDMEFAGHVVYHRYWTANVPVDDLWKEAWRKDLRTHRDAVERGLAKAAEEKMAAALVKESEIELGEASRARDEAERERGERDKRFADSKEAFKDEIVAWQSGLRQLPFNEEALRETFGALREYGLEQTSLEPVRGPLLDRYEAARDRLVARRLDMEKQRRDLLAERSSLQEEKRGWEQSREPEPGRSTARAKFREANAERGGAPLFAACDFRPHVGDDTKARIEEALERSGLLDAWLSPDGRVQECGNDDEEAWIVPRPQEFGYTLADMLVADPPEGSGLTAAAIDAVLRSFLWDEEGGLLDDGDWSGMIAADGSYRLGPLAGKAAVKERAEYIGKETRRRTRMMEIARLGEAIARLDAVLRELDERLAGQEAAERQLAVERELFPGGADLAGALRELQAADYRLQAAARQEAQANERFKAKSAQWRELQRELVELTANWTRLKREPDLAAAVNALRDYEASLSDLHSAWRQYRDAHASWERFKDELDALILELEDEEALAEELGERQRDQRAQVDTLRRLIEELGLADVARRLEELKREQSALLVRVKEQERLLDAAKDKASRAEAQLVLLREQAEVLHVELERTLEQLLAELRQGLVDEWRSVATEADTANAANSGAATTRAVFLQASAKEILRQYEPLFTGRNAENIVNRLLEQFNAARMLLTEYVLETVADETTGRLLLLSMRNPRQPLPPQALLEELEQQEAEQSALLSEKDRELYEEIILRSVGKAIRQRIHRAEQWVREMNKLMEERDTSSGLRLKLEWQPKVAAGEQQLDVSDLVELLKRDSHRLREDEIDAMIEHFRGQIVSAKQAAQEEQESLRQHLYQVLDYRNWFQFELKYKKGEQIGYRPLTDARFNVLSGGEKAMAMYIPLFAATWSRYSDARTDAPRLISLDEAFAGVDEENMRDMFKLLTDMGFDYMMTSQVLWGCYDTVPKLAIYEIYRPKDVDFVTLFRYRWNGKIKEYIESGAEE

SEQ ID NO: 38781 - protein, 483 aa, Paenibacillus sp. oral taxon 786 str. D14
MSGGRMNDRSDQAAKARDYFSRPGFKRMLEAVWKRYASLEKAGGHAVISRSTAAECEAINTFFGWYKKPGDDIRVPLADFEQELLESAFTFTITELHEVLTGEPLRTKSDRELLAMQEWGRLFETLEAQFAEQGTPLQPAVAEWLSGLRHGRAAGYRTLRELWRAAPETAQRELASATCAWNLLLAGDATAGLGENGSPPSAVRLPVLAAQTTGDPHALDRNVPAGRLLFQALRSKELGKQFAETDQTDPSDPEAIPGLSSGVDTLEAREIYRSAGIFDDDISSLVHIYCPWDGGNGPYVLSLRQVEITSVLSPITDFYVVENPAVFSTLVDLNEANESAYTAGPMLVCTSGPASAAALRLIDRYLEENLVSGHLYYSGDFDVKGISIGNVLASRYGDRFTAWRFNRESYMEGCALALPNGVTLSTEERLRLAKMQAIWDNSLCNTMRDVGRKLFQEQIIVNLINDWRKAVIGGEIGGRLHSK

SEQ ID NO: 38782 - protein, 502 aa, Catonella morbi ATCC 51271
MKVSEIIKKPVVEAKYLNVDNADRYRPIIRLFYLKYEKLKYWLYQEEVFEELKEDTYFAGYTIEQCKQDLNTLTEWGNLLAMQDTRRAATLEEFANKKFRYQLSETAVEVERMVIRIENLFIESSSLEPSLLERLRMSLAGLPSMLAENDEKLYSYWNDLNNDFKRLNQNYQDYMRELNSVKAENLMRTKEFLIFKDRLIEYLRNFVKGLQTNVGIIETIIKGFDETMLQSLINRIFRYELSIPRLETVVDEERILDNINGRFESLKDWFVSDGNKESEVVKVFDTTNEIIRKITGYAARISESGGSSANRKEEYKKLAEVFYNCEDICEAHRFAGLVFGTATTFHLRGIGERQTESINSGVYEEKTCIKTVTPRVRTYREKAKRSGIKDNFKAKEELRLATIEKLAAERELLRGYIKDGRLVFKDLPEITPFVRDVFLTWISRALENKEGRGKTEEGKRFRLISPTTEEICELKSEDGVLYMPSYEIIFEDEINESIGSIA

SEQ ID NO: 38783 - protein, 376 aa, Catonella morbi ATCC 51271
MKALEVLLSKRWILKSRDRELYYSVRDELPKFKSFLIEKLGFQVVVNSYLIKLEKIPAVAENWMGIKEFSDKMEYVIFMTVLMFLEEKDMGEQFVLSELTEYIQTAVEVESIDWTVYRSRKYLVKVMKYLVSEGILEINDGSEEDFQKDGISEVLYENTGVSRNFVKNFTRDISNFKGMADFYDGDFIDTNEDRGIVRRQRVYRKLLLSAGLYRNENTEEDFNYIRNFRGIIANDFESLFDCNLHIHKSSAYLVINEGSRLGRAFPEESTLSDIVLLVNDLILSRIDENKLTPAVDESIILSLENFNELIEETKRLYGNGFAKTYRDMTTKEICSVVTEYMMELGFIEYLGNDVKINPIVGKVAGRYPKDFESVQE

SEQ ID NO: 38784 - protein, 1361 aa, Catonella morbi ATCC 51271
MNSNWKINRVGLVDFWYYDDEEFVFDDGRMLLRGANGSGKSVTMQSLIPLLLDGNMRPERLDAFGTRARKMENYLLEEDDDREERTGYLYMELKREENEEYASFGIGIRARRNKPLEVWYFQITDSRRIGKDIFLYKEMDGRITLSKTELKNKIAEGGRVIESQSDYSAAVNKTLFGFENEDEYKELIDILIRLRAPKLSKDLKPTLISEILSSSLQALSDDDLKPMSDAIEKMDETKLNLENLKESLASARQIEKVYKLYNEVLLFNKAGFLVEADGDYKRLKKEETDSFKRLEDVKEKIELKSTKIKELDSEENILKEEKNSLDSDEIVKLKENEGRLENEIKLFEKTIKDKEEKEEEKKERERSLQKEIREDKEEADSLWKSCEATLNDMEAELEAVPFDEFAFMRDEFVKNKNENYSFEAHIKTFEAYVSRAKEGKRLLEEEKNQNEKYDRILKTFDEYKSKQDDLEKTEKQCDTLFFDEKERLTEEIYVWEKKNVELHPETEILQNIEREIENYDENKNYFDIKNIAKPAYEKVSGEIFEDNIRIENEIKSLRKEIKEKEEELAEWQNKKDPEPERSESVIKNRDKLKAEGIEYLNFYKTVDFAANISEDERNSLEETLLEMGILDAIIVSGKDRERILAFDKGLSDRYIFDDVQAVNDNILNKFEIEEEYNNIFSNFKITAALSGISLKKSEKGGTWIGENGSFGLGIIEGKTTGEYKAGFIGSLSRENYRLAKINELENDIKGLQEEVRLRKEKMMAVQARKEELVNEWESFPKPDSMNTALIELNKVRSSLKGILEDIAKLKTELDREKKALDEIRLAANEACGKCYVKARLDLFIQLNEALDNYRALLMELRASHREYLSRLELICSKETNLEEVEEYLENIRYELSLERAKLREAKAKLESIKEQLKLTDYDKIKDRIDYIVRRLNEIPKERQKVSIELGSRKQEETDLREKLEGFKPLLELSLKHREDMKRAFADELRLGLVEVIKLDEDVLSTAERLRTGLKQGIGETKREDILGKLQENFQKYRGGLARYNINMNPIFTEEEVDYGSSKNVKRQEISAKYKGSTVKFGGLVSALDSEVLELENILKESDRQIYEDILIGTVGRKIRAKIRRAEKWVEKIKRLMESMETSSGLTLSLAWKPKKAEKEEEIGTKVLVDILMRDEEILRPEDSANLSGHFRSKINAAKKTAEESGGMKSFYAVIRDILDYRKWYEFNLMYQRAGENKKELTDRVFFTFSGGEKAMAMYVPLFSAVVAKYKGARADAPLLVALDEAFAGVDETNIRDMFRLMSEFKFNFVINSQSLWGDYDTVPALAIYQLVRPENAKYVTVIRYRWNGIRRELADNARERG

SEQ ID NO: 38785 - protein, 427 aa, Catonella morbi ATCC 51271
MSEINEALEYFKKKSVYEKLFKVFKKKYESLGKISGTAVLTGLDRGEKLDLSDFLMKDFTEDKEVRVSVKLFEKALLKSKFSNLTTENILAYYFGEELRTKKEKNEDDEIRKAEYLAELKKYTDKTYIKDWLQGVFYGKAEGAGLIIRNYNTDKEELKNTIIKLVKAIPLMPDFTKGEKKELLAVFAAKTTANPHFFDDDTIAQSLLIAFLKDYYKYEYEDGLSESENKSDILFKAGIIKDSLSNDVIAYGIRGRYPDGSLHQGMEGFFTQKEPLKLSLFTLGNLEETFATKDIKRVYIIENPAVFSILISHFPDRAFICSYGQIRRAVFMLLDLFDKNITFSYAGDFDPEGLLIAEKLKKRYGERLTFWKYEPEIYLKYISEKKLTEQRIKKLDGVSDITLLRIAELIRKERRAVYQESMIGEYLS

SEQ ID NO: 38786 - protein, 493 aa, Clostridium carboxidivorans P7
MFLDNKLKKEIVETKYLSVDNTWRYRPIIRIMFKNYEKMNFWLLKEQIYEELIKYEDFKKYDMETLKQDLEVLVNWGNLLTMYDTRKMKTLEEFKNKQYKYQVSPYTVEIERMLIRLETLKEENRGSLEATLVERFKEELKEINSMSSKENVKVYDWWKRLNRDFKILNENYQDYISKFYSPKSEELMKTTQFLIFKENFISYLRDFIKGLQVNASAIREFLQRLDENAIEIVIQKSLEHEKSLPRLEGELNEEFYIEKNRGRFYSIKSWFLGEGHKSSMADQLLDSTNEIIRKITRYAVQLTEMRYISGNRKEEYKKIAELFSKCSTIEDAHKLSSVVFGVFIPKHIKGNPVRETESIESSIYEEKPYYVTVKPRIRQYREKTASRVAVKDRSVEKRIRLGKIIAKREEEKKLVEGLIVNDKITFSKLGSISRNQRGILLRWLSKGINNKKGIGKTEYGKIYNVVQHENKEYITLHCDDGEFKMPDYTLVFK

SEQ ID NO: 38787 - protein, 326 aa, Clostridium carboxidivorans P7
MKLEKIPGRAEGWMGIEGFTDIKEYIFFVILLMYLEDKNKEEQFVLSFVTEYISNQYQNEKIDWTKYSNRKSLVKVIKLALKLGIMKNNDGDEDEFSSNENADVLYESTGISRYIVRSFSKDIMECESLEELMHHNFEGVEQDKGMLRRNRVYRRLLLSPVVYNGGTEDSDYDYIKKFRSSLQENFENNLGWDLHVHKNGALIVLSDDNKIGDLFPSMKGESEAILLFGKLIREKLEEGKLVLNLNDEIVLSRENFNELLLELRNKKGSGFKKELRDSKDEYFIDVLLNYMKDFLMVEEREASIVILPVLGKVVGDYPKDYLAEEN

SEQ ID NO: 38788 - protein, 1350 aa, Clostridium carboxidivorans P7
MKERWIANKFGLFNFWYYDEEEFQLLNGKILLRGSNGSGKSVTTQSFIPLLLDGNKAPSRLDPFGSTARRMENYLLHDNHEDRIGYLYIEFKKPESNLYITIGMGMRAQKSKAMDSWYFILKDGRRVNKDFKLYKVLGEKYPLTKQQFKNSLGEGNFFTESQKEYMYKVNEHLFGFSDIENYEELLKLLIEIRSPKLSKEFKPTKIYNILNNSQKTLSEDDLRPMAEAMDNMDSLNMKLMSFEKSLKAAESLKESFHNYNKYILFSKSKDYLEKEDYVRALTKERESLLLDIEELKDEKDIKKKEADNLKEKYDKARVEYEKLIKNDIFATKNELENLKIEISEEEKEVSALRTSLDKKNKDLKEKEGKLEEIKKEEEYIESQIIRELDDIEDYGEEFNFEEGALLKKELLKGIKDYDFTFIKESLNKEERKLENAFKFIKTYEDIKSEKEECELERDKTAKIVEGLNSELKESYEYFTHIKEEYMEKINIYNGNNNELILKDEELQKLFKLVNDIEKRGDLENLKPIISDAYNNFRGKLLVEKTGLHEKRKSFLESIKELEKQIKILEQEKEAEFILEEEVKVSREKLEEKKIPFIPLYRAFDFTENLSEEEKKLIESSLIDMGMINALIVPNKYKNELMNITAKDRYLFAGEEKKSNNLSSFLKVEHGEFASLYKDELEAVLSSISVEEGTSTYLNNKGIYNIGIIKGKTSSNYELKYIGEESRKRHREALIKEKLQEIQSIRLQVDSLEDGLKYLEKKMVILQKEYEAFPSKEDLKTNLELIEEKEDEVRSQEKSLLILKEKYAQLIKRLEQAKVKVFEETSEISLEKNSKSFEDALDAAEDYRKTLSKIEISVEKFKSCSLRIISIDEQIEYLKEDLDRLWQNVASLDKKIKNKSIKVQGLQEVLIKANLSEIERAIEEAKHIVDSYPYKSSEMNKAVTTIANKIESNMEKEKEKEIKIKREKEFLKILEENLLKEIELNYVEINAADTLKEKAEYVVTNYKEDKNKDERTYGRELFESVQRYEGDLREYNLKHMEIFELEENIEDEEKKRLYMKGKRYDIVLRFNGKVSIYNLTHLLREVIEEQKLFISEKERQIFEETLINTISTKITGKIYQTKIWVDQMNDLMESMNTSSGLKFSLRWVPKKADSENQMDVSSLVNILERGAVVTEEDIDKLSKHFKEKLKQQKRDLEASGEVVNYQSIIKDILDYRQWYEFRLYYTKPLEGKKELTDNEFFKFSGGEKAMAMYVPLFAAVNAKYNGADKKDCPRIIALDEAFAGVDENNISDMFKLLEKMNLDYVLNSQVLWGDYETVKELAICELTRDNEDDIVVVERFQWNGKEKVIVI

SEQ ID NO: 38789 - protein, 433 aa, Clostridium carboxidivorans P7
MLEKEAVKFFQDRKEYERILTAIFEKYKSIGKLSGTFQLKELNDDERRILAPIHHKYFAAKEAKVSVKKFLDHFCSGRFEGLDFTKVLAIYFKDNLTTYREEKEGKKIKKEEFFKELININKGTKSELWLQEALENKGFGYNILIKNYEAYSKDNKLEDFKLLLSAVLNGINSLTFSASALESLPIFSSRITKDPHYFDMNTTAGKILIHGICYILKTEFPKDAEETAEILYSAGLLKDEISSYVATFGLKAYKEEGELEFVYGFTNMGEPLIFTLGNLSKIDRFICNKNRLFIFENPSLFNEVIKRTAEFKPSIVCTSGQLKLASVVLLDKVVQEVEEIYYSGDFDPEGILIANKLKLRYGDKLKLWRFDVEDYLKVISNKFISDISRAKLNNIQNSALEPLIKKLEDIGKAGYQEMLIEEYVEDVIKVSST

SEQ ID NO: 38790 - protein, 518 aa, Streptomyces clavuligerus ATCC 27064
MCRVPPEMFRFITGETADLNGAVLEAFGVAGEHLETELGLDGVRERLRAVGWVSDLQDEELHEALKRLVKWELLDVVHNHAQNYRTAEEYERRNLHYSLTRRGEAALAGVRHALEVLASTGALQTAVLEAIADRLDELTVLSGEHSAADRRIFSTLRELEGHLESLVENTKAFNGQLQRLLRAEGVDLDVFREVKAATVAYIQEFLVNLDRRGETVAAAVARVEERGIAVLRERALRGAELPPTPGEDPAAGWLESRRARWAGLRAWFLPDGGARPRIEQLHDIARRAIVSLLQVLERINESRRRPSSVVQDFRELARWFAAAPDEEDLHRLWSAAFGLGPARHAHLAHPDPELIPSSHSWSDAPPVKVSALLRTSGRTERFTRTAKVRDVTEVRAERAERARAERAELARAWQALETDGPVRLSSFRALDPMVFDRLLDLLGRALAARRDADGRRRATTGDGRAEVVLSPPPDGRTAVLRTAQGTMTGPDYVIHITAVGGAISFPAVRSATGQEAAG

SEQ ID NO: 38791 - protein, 437 aa, Streptomyces clavuligerus ATCC 27064
MSTLANQLASAEREEVARAIRLLLARPLLTEAADPTGFDLVRRRRDPLARWFDYTCGWSLVVEPRRGYARLTKVRVSPDGSRPARRARSGRAPFDRRRYVLLCVTAAELLSMPMTTIGMLADRVVQAMAADRALAGFDPVRRPERMAFVDVLKLLESYDVLRVVDGTTETYVDSAEAKVLYRVDNTLLMRLPAAPVGASRLAVPQEEVPARFEDLLAGLVTERRYGGASADGTADDTHAETAATTDAQRNLQLRHSVLRRLFDDPVLYRADLANDELAYVTSLTGRQILRRSVEQAGFLLEERAEGFLLVDPDAIATDVRFPDDTSTARVAALLLLSPLCATPVGLLPEQLAEAGAELLRRFPGWAKAYQSEEGPARLADDAVRILLDVGLACRARDRVIARPAAHRYRLTETTGPAPKNDPPAVAATGSAGEGDKQ

SEQ ID NO: 38792 - protein, 1375 aa, Streptomyces clavuligerus ATCC 27064; identical to SEQ ID NO: 38742

SEQ ID NO: 38793 - protein, 435 aa, Streptomyces clavuligerus ATCC 27064
MTLQDHPVSGGLTSREHLALGDAPLRRPELLAVWQTVHDRLSSGRPVTRVRLGPLDETQREALADLLGLDRLPDPRPSVALACLEEAVTELSGRTVREVVAELIGPLGDRAGERRRQEDERAGLWAWLAGHDTVRAQPVLTDWAASCRAAGLVGGSTERTRTLLIDALKVLAELPGQAEPLPVFAARVLNGHAHALDDGTPVSTLVLRALATLYDIAPPQSAAERRALWSRAGVADDELSATVIAGGLRPVGDGLLARVARLCTEAGQAASLTLAHVRNPGELTLPATPASLVVHVVENPSILALALRRFGSNCPPLVCTSGWPNSAAIQLLRLLADQGAALRYHGDFDGEGIRIAAYVMEKAGAHPWRMTAADYRSAIVRNAHGPRPGRITGAPWDPELAEAMAGHDIAVVEELVADVLLEDLTATTRQRHPSG

SEQ ID NO: 38794 - protein, 504 aa, Rhodococcus equi ATCC 33707
MSDSGDPRASAADVDFAVREDRLRLFSFTTAEKRTDYLWVMRAFDHARANYVVLLHAGEVADILARIADDDPSGALTAGEIPPLLDQLHTWGVLERSYDGSRAATLAEYRNRHFVYQFSQAGYLAFRAVEDLLGARLEDATLSRLALPDLLSDLEELAQANRCGDGDLIYRKLARLDSTLTDMAARAAQFYLMLGDLVRTTEITPEAFLSHKDALLSHMREFSSDLARYAPKLGAAIENVEATGIESLITRAAASDDRVFLSREERESDWRARWSGLAQWFVAAAGPSESDRLREGTMSAIAAVLSLLRRVTETRRGGVSRESQLRHLAGWFAATPDEESAHALFQLVFDLGRPRHLSMVHPDADIIPESRSWWDATPVEISRTLAETGRAAQPGMPSRMQRNEGSIRRLREEQLAAQRARAIAASSLAASGAYDRVLDEQETDVLLSLLNAALTARVPVTGTVPSSTGSENGVKLTLSPHGESTVVHTARGRLHLDGLRVSVR

SEQ ID NO: 38795 - protein, 470 aa, Rhodococcus equi ATCC 33707
MRNRSVSPLDLDSYQRAARVILSNHLVTQTYPDRLALPLLRRWATELRDDLLELFGYRLEVTETTARLFTVTDRLEPGAPARTGTDRPFDRHRYAYLALALAALGRAGNQITLSELADHVASEATQVAGVTLSTDRAADRDAFVDAVGWLAARGAIVLADGDAGGWASNPDAGEALYDIDRSVVVALFRPPRALQHVTSVRSLLTGEPAPLDDDITAYRPTDARETARRMRRALVERPVVYADTLTDDERLQLALPRTAADVEDLTGLVAERRAEGIAMIDPSGRMSDVRFPSTGTIAQVALLLAGEMADRVLDLDAAPLPRHPLPTTDQAELIERLDSAIPRSGIFEQLADPFESAESAESAGYAADDRDDPIEPARYALLDDDWVTGAVDELVLRFGRTFAAQWQADRNGLRRNAVALLDRLQLVRSVDGGVLVLPPIARFRGVVVNIRDRSAQSELFHEPVSAEKHS

SEQ ID NO: 38796 - protein, 1390 aa, Rhodococcus equi ATCC 33707
MASARFKPTRAGIINLWDYRDQEFSFADGRLVLRGPNGSGKTKALEVLFPFVFDGRIEPRRLNPFAGEERTMKSNLLYRGQDSAHSYVWMEFARGPQDDPEAVTVGIGMRASRQNDKVTRWYFVADGRVGVDFSLLGDDDRPLTKKQLAEQLGSDAITDRPVDYRAAIDARLFGLGAERYDQLINLILTLRRPQLAKNLDPKGLSQALTDGLRPLDEQLVLEAARSFSDMEEVGRALEGLAAADQAAQSFVTVYSKYLAQQARTDVEQVARRLESVDRARSVLDAAVALQSSRQEERLLAEDRFTAAERALEQARADLDTLQRSGAYEGKQQLDDLAAAVAQLKLSTEQQADKARKAQATLEQRTGEATRATESVRTATAALVRAETELAEAAEQAGIAWTPLPEGARSDQIIAAVRGHAEERDGDVRAVRATLATVEKANTERERADRAADKGRELLEAAQAAVAEAEATVELARADCAAALRSWWTEHSADYAAIGVTADLFAALDKALAQAGDDDSPSLSTVLHEHVESALDEQRARRREAAAAQAAATARIAELQTDRKHVAAEKDDAPARFASRTGDRSEQPGAPLWRLVRFADDVEPVIAAGVESALAAANLLDGWVLPTDDAPADIESEQFLEPLPEDRRPQGATLADVLAVESDTGVPEERVRAILDSVSLDRDGSARDTHVGIGVDGRFWQGIARGRHVKADAEYIGTTARERRRAQRIDELDAEITAAEDARTAARAVEGDAKALLDTLAGAAKSLPRTGAVLAALKKLTEAAGALRTRSESTESSGQELDQAIADHTAKEKQLRAVAVAHRVSHHARDVDALAASIRHFESQGEQLLRCRREHEKELELHREAEDRLEEARGNTEEFVEEAAVAEENYAQQVSRLETLREALGASAEQIDADLEEARARIEVCKTEQRAARKAYDAAVEQIGKAEGAHNAAVEGLRSALTETRTDADRLAPYARRDLLDLLRVEGEHTWPQSAAAWLTADQLVYRIVTEGDPDAPILPAEVAALYRAMDAATASVRTSENAKKSTRSALTAALQDFDAQLAAAGQDYRLQWDAPDGLTVVRVQDDQGYSSIGEFSTRIAAARQDQEVLLTDSERRILEDALLTGLAQQIHERTADARDLIAQMGAEMRERRMSSGSTIGVHWVLADNLDDTSRAVSKLLDRAPAALSADELATIRAHFAAQVRIARAAHPERSYPEILASALDYRRWRVFSFTLIGGDGSEDRLTVARHSALSGGEQSVSLHLPLFAAAHVMLSSADPHSPRLLGLDEAFAGVDDNGRSELLGLSVQFDLDLFMTGYDLWITYPGVPGCAHYDLAHSTAEQSVSAALLVWSGGDLLAEHDGSDLARALGSPLRRRVPATADGGLEFADA

SEQ ID NO: 38797 - protein, 519 aa, Frankia sp. EuI1c
MAHDHGDGEPDLASAAREMAARRSLFTYLTVEAADEYMAVMRLFTETLLADLSAAEVASRLAERGLDLDTDAVESRCAQLVVWGNLVRSVRETRVRTVAAYHRSRSRYQVSKLGGRLHREAEEILRTVDGAREVARELLARISDTLRIILLQVSYDRVPVDAESLAGQVTGVFNDHRLFQESVTDFYAYLAGVLTRYDLAGEEYAQFKDLLLDYVDLIGADVARNAPEILNRLKTLLTPPLIDTLLANLPAPPTAGDRLIVVERLPGRTLADWEQLAAWYGASDQRSGPEQLRVAARQALGQLIANAKRMLTASGTGVSRRADLLRLAGWFHGADGETAHRMFDAAFGAFPARHLLLGPEEQDLRAGPSTSWWVAAPVDVPVSLRERGDRTARGRASRVPDAKAQTERLEAQAQERTRAREMAAAELLAAGGLHGSHLSRAARDLLLELVPALFTTAAGGHEEADHPVSDLGLTLWGAPDPGSQTVINGDDGVLTIEGLLLWALPLGEDFERARKAVNS

SEQ ID NO: 38798 - protein, 413 aa, Frankia sp. EuI1c
MSFAPVAGTAARAAQERVDAARALLANPVLTAAAHPDELALVRLHAQALRSTFKKQLGYVLVIEAQFARLFKAPLTADTPARPARRGDGGPFTPIAYTHLALLCAALLAPGTGEMILISALIDQVRADAATIGVPIGDTLPERRALVTAVDLLVRWGVLVEADGTAAAWGERQIDEALLHINRHQLPHLLARPLSGMTTADDLLACDPATADQPRRSLRRRLVENPLVRREDLTEAERDVLSRERSELTRVLADSFGLTLEVRAEGALAYDATGSLTDSPFPGTGTVRQAALLLVDALIARREPQPGDTAVLRDGRAVAGLAAGWSEVDSVLTRLAQEHAKAWSSAALEDLRKLRDLVATTLAEVGLVSVLPGGLVIHPAAARYRPLPASEVPTRAARRLGYRAASFQPEPEL

SEQ ID NO: 38799 - protein, 1395 aa, Frankia sp. EuI1c
MQQALALGDPAQDTFGPMLARHHPHRWRMSRAGFVNVWHYYDNVFDLSGGRLILRGTNGSGKSRALEMLLPFLLDADRRNMGTGSAVRMEDLMSAGAAGQTNRLGYLWLELRRQTEPDEDPTGQFLTLGALVQFSASTKAAKVWYFTTPLRVGHELMLMTSDRAPLSRRELGEAIGEDRISDGPERHRERVRAEVFGLTGGEASKERFAGLMRLLHTLRSPDVGNRIEEGKLPLIVADALPSLSEEALTDAGQQLDGLTSTREEQQRLEAAHDQVVSFLDTYRRYVTGVLTQSLTRLRQHAAACAGAEVGAERLRLTADGLARELSLAEQDRALRDQEMATLRAALEALKESDRYRGAQELTDLAATVGSLATTAEARLETAQLRRDGEADKAATANGLADELTASVDGLSTTIGQARGQLTAAGLATHELPASVGLLRTPRGQRTEIVRLRREAAPGPLARPVADEVRVVPADLAELRGATIRVRDAVRLRASHATTRAADARRIATERDEVRRTVERADEADDGARAAADRAEQQAERRDDEAVSLVERWRAWLAAPATAGLLGDVDWSASAALGPLLRDQLALCGTDSSVDLADLDRAPIDAADSARDLLTTELQRLAALDTRDRGAVLVLQEERKDLLNLRDAPPSAPVWVTATSDAPLWRCVDFAADTPEDEKAGLEAALLASGLLTAAVESTGGLTAASGQLLVSPTGPRAAVSLADRLVPDSAGPAAPEVVVALLGRIGLADRSVPTWVSADGSWANGPVRGRHTVAAAQHIGAAAREARRIRRLGEIDSELAVLTETLREREEQRERIGARKKAIRDHLWSVPRSNPLGEARLRAALEARLAGEAAAKAAGLRAEADHRTVALAADERAHRAACAEFGLPADVDELTGLVRGANAAADTCDRAIGQINALDAAMARHQRAVATLDDEAAPRARAEDDAARAWDKWHAGETRLQALRNALGADPAQVLEELRALEKRQLKAEREREDTERIVNRLRGSAATAVADARAASQRAVEARAGLTEQVTAVRIQLGEPGVVDTAFTTKPAEPFTDSSTAGVDADVTILLAGLRKARIDENALIRAQQGFEREISASYEVTVTRESDILLYELTDADGRRPLVQAAGELAAKRERGRAALTEREQHVFTEFILGEVGEELRNRLLQADNLVKAMNRSLRSIQTSHGIGVRLTWKLDTEGDAAAGRIKQLAATAASVRSQAQDAELLSLLRDRVAAAAIAEPNGGYALYLRRALDYRAWHTVEVIITGPEPGQERKISRRAKLSQGETRFVSYVTLFAAVDAYLSGLDDTATALRLILLDDAFAKVDEPTIAELLGLLVRLDVDFAMTGHALWGCVPQVPALDIYEICRQDGGGPAATVHVRWDGRNRHFLRSA

SEQ ID NO: 38800 - protein, 441 aa, Frankia sp. EuI1c
MMSPSPTPLPAATRAYLEAPVLAPVWAAARARLERNELKPTGTLRMDLDEAAAAQLSGLLGVAVPAGAGRAIRLADLDVALRASKAGRGLVSVLESLSGETLRDRKADQRISDEQWARVWRALDETLHDEGLGTAPWVGIWVADLRRTGILTRAGADIARRAVTDAAHALGQLGRTSAPGLCTAPDEPFPGEASTQLQIGALATATTGDSHGLDDARLTSAAVLRAVAIACGLPAPASSADRRALWRMVGVATDSVSGTVLVWSLRPPGCDPWSEMMRLRADLGLVTHLTLHELERAGKVRLRPGGQVVSLCENPQVLQAAARAEVSAPLVCLSGSPAEVGTRLVRTLVGDGAPVRYHGDFDWPGIAIAARLLAVGATPWRMSAADYRRAVAGLAADVGLPLTGTPEATAWDPDLAAAMIRAGVAVHEESLLDDLLADLAL

SEQ ID NO: 38801 - protein, 486 aa, Caldicellulosiruptor owensensis OL
MINFQAPLLGKLKYFEYLTAPNSERYRTIMRYCFLCHLEYKNRLTKEEIFTFLKSFPQFADYTEQMCEQDLKSLVEWGNLNSIQDTSKTRTVEEFKNKRFLYELTPIGLRIERFLFELETQEDTKAELNPKHIEKIFLLLQQVDSILQDPQKRAVDWWDELTRSFEEIEKSYSEYISMLKSYEAENLMIKEKFLDYKSKLVQYLYNFYIIFQNYLPRIRSIFLLLEDSKVEKLLNYIIDQEKEHPKNIFKDPESIERNIKARFDNIKLWFVAPHGQAEKLSDQIQGLIRKVSDLAARLSELSSVKVNRQEEFKHLAKIFSNLDLATCHKLSAVVFGVLLPRYIAAEEKRQSELASLSILDVPPMKSLLHSRGRLVREKSKVLPASEFSEDKKKRFEEYKKKIEEEEKLVAELIKDGRIEFENLPVLTPQVRKKLLVWLSRGLSSGFGNTDSGKRFKVVRPKDGRYCVLKSTDGELEMPAYVIEFVE

SEQ ID NO: 38802 - protein, 407 aa, Caldicellulosiruptor owensensis OL
MKSTLLKLLSNFWVLKEKDVESYYECKNIDKELKDFIVSKLGLRFYATSDMVRLEKVPLVPRKYMGILDFEEPKDYVFFCLVLAFLEDKGKNTQFLLEDITQYIRSNFPGEEIDWTMYSDRRSLIRVLKFCEKMGLIKIDDGNQELFMERVDVDVLYESTGLSKYFMRTFPKSLVEYLSVEEILNSEFEFTNGLSDQITDIKRIKAYRGLLIDGIVDFECEAPLYYIKKQKTTILQDLEKFVPELELHLFKSFAYLSVEGDYKYTYPDDSNLCDVLLLCSRELLERVEKGELRLSPAHDILEISLDHFKLIVEDVKKKYGHFWNKEWREKSTEKIFEELLEYLQLHNFAQTNDDGYLVISPIFFRIVGEYQDYETNSQLSEKDNSNEKAFEDINVDGGFHFEDEQGK

SEQ ID NO: 38803 - protein, 1350 aa, Caldicellulosiruptor owensensis OL
MSRENRWELSRAGVFNYWYYDEEYFDFYDGRMLIRGPNASGKSVTMQSFITLLLDGNYHPSRLDSFGSNARKLEDYVLGEQGPGQKNEAIAYLFLEFKKQNVFVSVGMGIKAKRGTSPDTWYFVLTDGRRFGIDIFFYEKIGDQKIPLTKKKFENLIGDGGKVFSGRKDYMEEVNKILFSFENIEDFENLIDLIVRIRTPKLSRDIKPDTVCRMLQESLPALSESDLRSLSDSIENMDKIQTELKNLEIIKDVLEKLKKVYDEYNQLLLAQSIFRVVESSKEYYSLKKELENTQTELEKNSKLKAQIEEKIEDLKKEQESLSLRVANIKESDVFKLQTELSTIEEELKNIENQKTKKISQLNAASQKLEKERQELKALEEDLEKCRKRIKDYIDEGKLLVEFIGFQRFLETLDMYFLQNGSLDILKEVLSSFLSQVEIVLKNYEKLSEIKKDLDDLYKNLDRNRTEAQKVEEEIQNLLFQLEDVKNNLKNAISIYFEQNEVFKAQDEQKTVIFQAINSCEKKGDYGRIYSTLDDIYNFHYLTTSDTIRRLEFDIEMLNSQIKAKKEEIEKIKSQKDDEIILSPQQKKVRDRLLQKGVPFIPFYMAVDFKDGVDERKKAVIEDALSSLGILNALIVPEKYKDVLSDLMDDEKEIILFSKPAYFSHLLNQFLKVANFDGPIELKQEVAAVIDSIFATEKDEGIYICEDGRFGSGILKGRTTTCESARFIGIENRRRYRQILISQLEDEIQKISLELERKKQEKNVQKTLLEKLKEERNSFPSMVDLDTAFEMIEEREDRKSELQKEIEFLEKKIRELLTKENSLKHEISVIATKLSVTATRDNFLKLRQEAQKLERLLFVLEKETEMEKVVASSATTKKKLILQIEENLQSLSLDLQSLKARWESLDVRRTEIVRRLSSDDAQKLFEEEKRAIQRLNSIPKEIENFNKSLQETIAKISQLETLIEIKGSHLEKAKEEYSNSLEILKIELGFGFVFREENLEDEKRLLEFAKEKSSFASEFKSKDLNQVLQRLISAHYAAQVQLAEFGANLYLKEDDKTGYERYLWTAKKDGRLLSLYEFLEKIESEIIEKKNLITQQERELFEEVLIKDIGRRISSKIMLAQDWVKRMNALMDGMDLSGALKFRLSWEQKKQELEDELSTAELIGLMSKDLSIATDEDKQKVVRHFRARIERAKRLQDSPDSFRSLYEIMKEILDYRQWFEFRLYYQRGMENRRELTNNAYDKFSGGEKALSIYVPLLAALCAKYQSAASFAPRIIALDEAFAGVDENNIEKMFELIENLEFDYIMNSQILWGDYKTVPGLCIYELISDRSKGCVLKVKYIWNGYKKVLVEI

SEQ ID NO: 38804 - protein, 421 aa, Caldicellulosiruptor owensensis OL
MKEDRLLQECIEYFSHKGFSRVLELIYNKYRSLGRFSGRVVLEKPDPVEKEMLSRYFGRIISGDRVVINVKEFAQKRFEQTKFSSLDFKDVLSYVLKKDVLTKKEEKESKQRQISDFLEKLEKLLANGADNEFVFQTVKENFKWFEGYFKKYSEEKLLGILSCSIKAAATKPEKIESLAVFATRIAHDPHFFDEDRDSGKIFLKILCLLKNVEYPKSSEEKAELLYMHNIIIDELSNWCLVYGIGAITENEKEDEALKIFALQRKPVILPLYTIKDYKQFFGYSKKIVVVENPAVFSILMQDLTDISLICTNGQLRLSTKILLESLSKAGFTIFYSGDFDPEGLLIADRIVQNYGAIPLCMDEENYLLSLSNNRISQKRLVMLRNIQSEQLLSVCRKMNEVRLSGYQEKIVDRLLKKIKTI

SEQ ID NO: 38805 - protein, 487 aa, Caldicellulosiruptor hydrothermalis 108
MINSFQAPLLGKLKYFEYLTAPNSERYRTIMRYCFLCHLEYKNRLTKEEIFTFLKSFPQFADYTEQMCEQDLKSLVEWGNLNSIQDTSKTRTVEEFKNKRFLYELTHIGLKIERFLFELETQEDTKAELNPKHIEKIFLLLQQVDSVLQDPQKRAVDWWDELTSSFEEIENSYSEYISMLKSYEAENLMIKENFLEYKSKLVQYLYNFYIIFQNYLPKIRSIFLQLENSKVEKLLNYIIAQEKEHPKNIFKDPESIERNIKARFDNIKLWFVAPHGQAEKLSDQIQGLIRKVSDLAARLSEMSSVKVNRQEEYKHLAKIFSNLDLATCHKLSSVVFGVLLPRYIAAEEKRQSELASLSILDVPPMKSLLKSRGRLVREKSKVLPASEFSEDKKKRFEEYKKKIEEEEKLVAQLIKDGKIEFENLPVLTPQVRKKLLVWLSRGLSSGFGNTDSGKKFKVVKPKDGRYCVLKSTDGELEMPAYVIEFVE

SEQ ID NO: 38806 - protein, 410 aa, Caldicellulosiruptor hydrothermalis 108
MQSALLKLLENFWILKEKDVESYYECKNIGKDLKDFIVTKLGLKFYATSDMVRLEKVPLVPREYMGIMEFEEPKDYVFFCLVLAFLEDKGKDTQFLLEDITQYIRSNYPYEEIDWTMYSDRRSLIRVLKFCEKMGLIKIDDGNQELFVERADVDVLYESTGLSKYFMRTFPKSFVEYSSAEEILNSEFEFTNGLSDQITDIKRIKAYRGLLIDGIVDFESEAPLYYIKRQKTTILQDLEKFLPELELHLFKSFAYISVEGDCRYTYPDNSNMCDVLLLCSKEILERVEKGELRLSPSHEMLEISLDHFKLIIDDVRKKYGNFWNKEWREKSTEKIFEELLEFLQLHNFAKTNDDGYLVISPIFLRVVGEYQDYDTNGQLSEKNNSTEKAFEDIEDINVDGGLYFEDEQGK

SEQ ID NO: 38807 - protein, 1350 aa, Caldicellulosiruptor hydrothermalis 108
MSKENRWVMNRAGVFNYWYYDEEYFDFYDGRMLIRGANASGKSVTMQSFITLLLDGNYHPSRLDSFGSNARKLEDYVLGDQGPGQKNEAIAYLFLEFKKQNVFVSVGMGIRAKRGTSPDTWYFVLTDGRRFGVDIFFYEKIGDQKIPLTKKKFENLIGDGGKVFTSRKDYMEEVNKILFGFENIEDFENLIDLIVRIRTPKLSRDIKPDTVCRMLQESLPALSESDLRSLSDSIENMDKIQTELKNLEIIKDVLEKLKKVYDEYNQLLLAQSILSVLEKSKEYLSLKKELEKAQTEVEKNREEKLKIEEKIEELKKEQESLTLRLESIKESDIFKLQKELLNIKEELRELEEQKNKKLSQINSASQKLEKERQQLIALEEELEKYKRKIKDSVKEGKLLIESIGFQRFLETLDMYLLEQGSLDILKDELSSFLSQVEIALKNYEKLSEIKKDLDGFYKELDMNRAEAQKVEEEIQNLLLQLEEVKNNLKNAISIYFEQNEVFKALDEQRTAIFQAINSCEKKGDYGRIYSTLDDIYNFHYLAISDTIRRLEFEIEVLNNQIKAKKEEIERIKSQKDDEVILSSQQKKVRDRLLQKGVPFIPFYMAVDFKDGVDEKKKAIIEDALNSLGILNALIVPEKYRDVLSDLMDDEKEMILISKPAYFSHTLNQFLEVANFDGPIELKQEVAAVIDSIFATEKDDGIYICEDGMFGSSILRGRTTTCENARFIGIENRRRYRQMLISQLEDEVQKLSVELDNKKQERNAQKNLVEKLKNERNSFPSLVDLDTAFEMIEERENHKSKLQKEIEFLEKKIRELLGRENSLKHEISVIATKLSVTATKDNFFKLSQEAQKLKSVLVNLENEVEKEKLVSRTTDSKREQIVQIEESLQNLSFDIQSLKTRWESLSLKKAEIEKRLSSDDAQKLFEDQQKAIERLDSIPKEIESFNKNLQEIVAKISRHEVLIETKALQLEKAKIEYTNSLEVLKIELSFGFVWEEENLEDESKLLEFAKEKSSFANEFKSKDLNQVFERLISAHYEAQVQLAEFGANLYLKEDEKTGYARYVWTAKKDGRLLSLYEFLERIDSEIIEKKNLITQQERELFEEVLIKDIGRRISSKIMLAQDWVKRMNALMDGMDLSGDLKFRLSWEQKKQELEDELSTAELIGLMSKDLSIATDEDKQKVVRHFRARIERAKRLQDSPDSFRSLYEVMKEILDYRQWFEFRLYYQRGTENRRELTNNAYDKFSGGEKALSIYVPLLAALCAKYQSAASFAPRIIALDEAFAGVDENNIEKMFDLIESLEFDYIMNSQILWGDYKTVPGLCIYELISDRNKGCVLKVKYIWNGYKKVLVEI

SEQ ID NO: 38808 - protein, 420 aa, Caldicellulosiruptor hydrothermalis 108
MSDEKLLQECIEYFSHKGFSRVLELIYNKYRSLGRFSGKVVLENPQPIEKEMLSRYLGRIVSGDRVVVNVKEFAQKRFEQTKFSSLDFKDVLSHVLKKDILTKKEEKESRQKQLSGFLEKLEKQLANGADSECVFQAVKENFKQFEGYFKKYSEEKLLNILKVCLKAAATKPERIESLAVFATKMAHDPHFFDEDRDSGKIFLRILSLVKNVEYPKSSEEKAELLYMHNIIIDELSNWCLMYAIGAISENAAEDEALKSFALQKKPVILPLYTIKDYKQFFGYSKKIVVVENPAVFSMLMQACSDISLICTNGQLRLSTKIVLESLSKEGFTIFYSGDFDPEGLLIADRIIQNYNAVPVCMDKESYLLSLSKNKISQKRLVMLRNVKSPELFDVCSKMRELKLSGYQERIVDRIVEKLKS

SEQ ID NO: 38809 - protein, 487 aa, Caldicellulosiruptor kristjanssonii I77R1B
MINSFQAPLLGKLKYFEYLTAPNSERYRTIMRYCFLCHLEYKNRLTKEEIFTFLKNFPQFADYTEQMCEQDLKSLVEWGNLNSIQDTSKTRTVEEFKNKRFLYELTPIGLKIERFLFELETQEDTKAELNPKHIEKIYFLLQQVDSVLDDPQKRAVDWWDELTRTFEEIEKSYSEYISMLKSYEAENLMIKEKFLDYKSKLVQYLYNFYVIFQNYLPRIRSTFLSLEAAKIEKLLNYIIAQEKEHPKNIFKDPESIEKNIKARFDNIKLWFVAPHGQAEKLSDQIQGLIRKVSDLAARLSEMSSVKVNRQEEYKHLAKIFSNLDLATCHKLSAVVFGVLLPRYIAAEEKRQSELASLSILDVPPMKSLLHSRGRLVREKSKVLPASEFSEDKKKRFEEYKKKIEEEEKLVAELIKDGKIEFENLPVLTPQVRKKLLVWLSRGLSSGFGNTDSGKRFKVVRPKDGRYCVLKSTDGELEMPAYVIEFVE

SEQ ID NO: 38810 - protein, 390 aa, Caldicellulosiruptor kristjanssonii I77R1B
MKSALLKLLSNFWILKEKDVESYYECKNIDKELKDFIVTKLGLKFYATSEMVRLEKVPLVPREYMGILEFEEPKDYVFFCLVLAFLEDKGKDTQFLLEDITQYIRSNYPYEEIDWTMYSDRRSLIRVLKFCERMGLIKIDDGNQDLFVERADVDVLYESTGLSKYFMRTFPKSLVEYSSVEEILNSEFEFTNGLSDQITDIKRIKAYRGLLIDGIVDFESEAPLYYIKKQKTTISQDLERFVPELELHLFKSFAYLSVEGDYDYTYPDNSNLCDVLLLCSRELLERVEKGELRLSPAHEMLEISLDHFKLIVEDVKKKYGHFWNKEWREKSTDKIFEELLEFLHLHSFAKTNDDGYLVISPIFLRVVGEYQDFVANGELSLQDDGIEERF

SEQ ID NO: 38811 - protein, 1350 aa, Caldicellulosiruptor kristjanssonii I77R1B
MSKENRWVLSRAGVFNYWYYDEDYFDFYDGRMLIRGPNASGKSVTMQSFITLLLDGNYHPSRLDSFGSNARKLEDYVLGDQGPGQKNEAIAYLFLEFKKQNIFVSIGMGIRAKRGTSPDTWYFVLTDGRRFGIDIFFYEKIGDQKIPLTRKKFENLIGDGGKVFSSRKDYMEEVNKILFGFENIEDFENLIELIVRIRAPKLSKDIKPDTVYKMLQESLPALSESDLRALSDSIENMDRIQTELKNLEIIKDVLERLKKVYDEYNKHLLAQSIFSVLESSKEYLNLKKEVEKAKADVEKNRELKAQIEVKIEELKKEQESLTLRLESIKESDIFKLQKELLNIKEELRELEEQKNKKLSQINSASQKLEKERQQLIALEEELEKYKRKIKDSVEEGKLLIESIGFQRFSETLDMYLLEQGSLDILKDELSSFLSQVEIALKNYEKLNEIKKDLDGLYRELDMNRAESQKVEEEIQNLLFQLEEVKNSLKNAISIYFEQNEVFKAQDEQRTAIFQAINSCEKKGDYGRIYSILDDIYNFHYLSISDTIRRLEFEIEVLNNQIKAKKEEIERIRSQKDDEIILSSQQKKVRDRLLQKGVPFIPFYMAVDFKDGVDEKKKAIIEDALSCLGILNALIVPEKYKDVLSDLMDDEKEMILSSKPAYFSHTLNQFLEVANFDGPIDLKQEVAAVIDSIFATEKDEGVYICEDGRFGSGILKGRTTTCENARFIGIENRRRYRQMLISQLEDEVQKLSVELDNKKQERNAQKNLVEKLKNERDSFPSLVDLDTAFEMIEERENQKLKLQKEIEFLEKKTRELLSKENSLKHEISVIATKLSVTAAKDNFLKLAQEAQKLKSVLVDLENEVEKEKLVSRTVTSKREQTLQIEESLQNLSSDLQSLKTRWESLSLKKAEIEKRLSSDDAQKLFEEQQKAIERLDSIPKEIESFNRNLQEVIAKISRFETQIETKGLQLEKAKVEYTNSLEVLKIELSFGFVWKEENLEDETKLLEFAKEKSSFANEFKSKDLNQVLQRLISAHYEAQVQLAEFGANLNLKEDNKTGYARYLWTAKKDGRVLSLYEFLERIDSEIIEKKNLITQQERELFEEVLAKDIGFKISRKIMLAQDWVKRMNELMDGMDLSGNLKFRLSWEQKKQELEDELSTSELVKLISKDPATASDSDRQKIVKHFRVRIERAKRLQDSPDSFRSLYEIMKEILDYRQWFEFRLYFQRGAENRRELTNNAYDKFSGGEKALSIYVPLLAALCAKYQSAASFAPRIIALDEAFAGVDENNIEKMFELIENLEFDYIMNSQILWGDYKTVPGLCIYELISDRSKGCVLKVKYIWNGYKKVLVEL

SEQ ID NO: 38812 - protein, 420 aa, Caldicellulosiruptor kristjanssonii I77R1B
MKEDRLLQECIEYFSHKGFARVLELIYNKYRSLGRFSGRIVLENLQPVEKEMLSRYLGRIVSGDRVVINVKEFAQKRFEQTKFSSLDFKDVLSHVLKKDVLTKKEEKENKEKQLSSFLEKLKKQVESEPAAEKVYLVVKENFKQFEGYLKKYSEEKFLGILNLCIKAAATKPEKIESLAVFATKIAHDPHFFDEDRDSGKIFLRILSLIKNAEYPKSSEEKAELLYMHNIIIDELSNWCLVYGIGAISEDAAEDEALKIFALQRKPVILPLYTIKDYKQFFGYSKKIVVVENPAVFSMLMQTCSDISLICTNGQLRLSTKIVLESLSKEGFTIFYSGDFDPEGLLIADRIIQNYGAVPICMDEESYLLSLSKNKISQKRLVMLRNVKSPELFDVCGKMRELKLSGYQEKIVERIVERLKS

SEQ ID NO: 38813 - protein, 487 aa, Caldicellulosiruptor kronotskyensis 2002
MINSFQAPLLGKLKYFEYLTAPNSERYRTIMRYCFLCHLEYKNRLTKEEIFTFLKGFPQFADYTEQMCEQDLKSLVEWGNLNSIQDTSKTRTVEEFKNKRFLYELTHIGLKIERFLFELETQEDTKAELNPKHIEKIFVLLQHVDSVLQEPQKRAVDWWDDLTRSFEEIENSYSEYISMLKSYEAENLMIKENFLEYKSKLVQYLYNFYIVFQNYLPKIRSIFLQLENSEVEKLLKYIIAQEKEHPKNIFKDPESIERNIKARFDNIKLWFVAPNGQAEKLSDQIQGLIKKVSDLAARLSEMSSVKVNRQEEYKHLAKIFSELDLATCHKLSAVVFGVLLPRYIATEEKRQSELASLSILDVPPMKSLLHSRGRLVREKSKVLPASEFSEDKKKRFEEYKKKIEEEEKLVAELIKDGKIEFENLPVLTPQVRKKLLVWLSRGLSTGFGNTDSGKRFKVVKPKDGRYCVLKSIDGELEMPAYVIEFVE

SEQ ID NO: 38814 - protein, 410 aa, Caldicellulosiruptor kronotskyensis 2002
MKSALLKLLENFWILKEKEVESYYECKNIGKELKDFIVTKLGLRFYATSDIVRLEKIPLVPREYMGILEFEEPKDYVFFCLVLAFLEDKGKDTQFLLEDITQYIRSNYPYEEIDWTMYSDRRSLIRVLKFCEKMGLIKIDDGNQELFVERADVDVLYESTGLSKYFMRTFPKSLVEYSSVEEILNSEFEFTNGLSDQITDIRRIKAYRGLLIDGIIDFENEAPLYYIKKQKTTISQDLEKFVPELDLHLFKSFAYISVEGDYRYTYPDNSNMCDVLLLCSKEILERVEKGELRLSPPHEMLEISLDHFKLIVENVKKKYGNFWNKEWREKSTEKIFEELLEFLQLHNFAKTNDDGYIVISPIFLRVVGEYQDYEISNQLSAKNESTVRSFEDIENINVDGGLYFEDEQGK

SEQ ID NO: 38815 - protein, 420 aa, Caldicellulosiruptor kronotskyensis 2002
MKEDRLLQECIEYFSHKGFSRVLELIYNKYRSLGRFSGKVVLENPQPIEKEMLSRYLGRIVSGDRVVINVKEFAQKRFEQTKFSSLDFKDVLSHVLKKDILTKKEEKESRQKKLSGFLEKLEKQVSNDKNSECVFQAVKENFKWFEGYFKKYSEEKLLNILKVCIKAAATKPERIESIAVFATKMAHDPHFFDEDRDSGKIFLRILSLVKNVEYPKSSEEKAELLYMHNIIIDELSNWCLVYGIGAISENAAEDEALKSFALQKKPVILPLYTIKDYKQFFGYSKKIVVVENPAVFSMLMQACSDISLICTNGQLRLSTKIVLDSLSKEGFTIFYSGDFDPEGLLIADRIIQNYGAVPICMDEESYILSLSKNRISQKRLVMLRNVKSPELFDVCNKMRELKLSGYQERIVDRIVEKLKS

SEQ ID NO: 38816 - protein, 503 aa, Thermosinus carboxydivorans Nor1
MNEQDLRPIVETSYLNRENSWRYRAILRYCFVQHERLHHYVYPEEIYQHLKASPFFAEYTEDQLQQDLKQLVEWKNLIPRQETGRVHTIEDFKRKKFRYQCTPYTIEIERMVARLQQLGDSFGGSLEATLFERLLTALTRLLAEGPSLPPEELFRAWDDLYGHFRSLVQNASDYLAHLKSDKVEEQMQTEAFIAYKSAFTQYLQNFILGMQRTAAKIEAVLKKAPADRVKLIAERLAEYQLSIPRLDSQPSREEWVTLYLDQYASLAEWFLGRPNHPSELITLQNETTDTIRRIARFAQRISERHQAFRSRRHDYLYLAGWFARTEGLDEAHRLAAMLFGVPHSRHLYAQPRASDDFDLTVWAEPPTIVTTAPRLPGMRERSRPGALIDRRAEKEAALAAYIRAQHDRERLIDQLIVDNKIVLADLPEVDPHVRKTLLAWIARCMQREDRTIQTEAGRRIRLVTAPGGHRVVLRSADGWLELPAFIIEFVDARPAMKAGEARG

SEQ ID NO: 38817 - protein, 388 aa, Thermosinus carboxydivorans Nor1
MAEMEEVREALALLLENYWIVREEAPEQYNLIRRHEAHLRRYFLEKCGWRLMATPQFYKLEKIPAQPASWMGIQEFSHPRDYALLCCVLAFLEEKSVNEQFLLSDLCESLLALYPHEADERLNWESYEHRRSLVRALKFAVERGLVRLVDGDSEQFALRAESEALYEVTVLARYFLRSYPKDLHQYKSLAELQSAELFDDEATTGRGRRARVYRQLLLTAAYNAADARPEDFLYLRNMHRRLRDELESYTGLQFELYKDCVLLTSPERTNWCKQIFPFYQSGLHTVILHLASFCRDRWPAGEGWQQSFSPVAFERLVGECRECYGAGWTKEYRTATLSRLAAEVLAELEGWNMAAYDPETGFITLRPALARLAGRYPDGWPSRSEPAD

SEQ ID NO: 38818 - protein, 1414 aa, Thermosinus carboxydivorans Nor1
MTRQTARERDQWRLSRAGLINFWYYDDEEFHFADGRLLLRGANGSGKSVTMQSLITVLLDGVKTPDRLDSFGSRSRRMEDYLLGEKELVNRDERTGYLYLEYKRRGSAQYLTTGIGLQARRGSSLDFWGFVITDNRRIRHDLLLYKEEINPLDGTVERVPLTRAELERAIGSGGQVVRSQKEYMELVNRHIFGFASLEQYEELMKLLIQLRSPKLSKDFKPSVIYDILNEALPPLSDEELRPLSETIESMQRTKDQIEQLERDKQALDRLCRNYDLYNTYVLAEKADLAHKAERRLAKLQREQEELRQRLAEDGRQLVEARQRREELKREETVLAREREDLQQHDAFRAQQQKQQHETQLNQVTALQRDKAAKLAEKQRRERQEQHKLRDYEARAEECRARQEELLQDMNDAAGQAAFAEHKALAGALAEGNAAFSFAAWRRAAGSYSGRLSEVLGLLRRQAELQLRRQEIDKELGEERRVLDEYRAEYRRLEQQFSEARDQLLADLHYWRQQHGRWLPLAQDELRDAAQAIQGLYETRAWPDVEAPLAAAYGRRVQVINQELGLINAELKVLEEEERELTAALNDWRARREPEPPRLSDAQAARALLAERNIPFLPFYAAVEFNPDVSPDMRERIEAALTDMGLLDALIVPRQRRQDIPPDIYGAVIQPAPQIMAVTLADYLYPTPVDGVAVTAADIDDVLRSIIVEDVKLWGEAAEDGAGAALAANGAYCIGPVTGRAPRRQTAMFIGRQAREAYRRRQIAALEEQLAALALKQEALYGRAAELQETLERASQAKANFPADTALRALHHEKLAVAANISRQEQAVERVDARLRAVVRDLQELRGALAQASAGLALPLREGDYAAAVQAMADYQASLHELELCCQDYTNLMANARRCREFLTDIRQEVDDLKGELLVLDGQAAQLRLAIAHLESRLQELGADELQARIRNVARRLDEIPAETAAVIEAIVTLQASIETGERRLAQLTESCAFLDQVCRCWQQAVEDELKLGLVYPGEGTWPTVSAIIQEKGGILKQDRLNRTTVTGRLSESFYAENNVLMEYRMQLEPMTAESYGLPELPADVDDSGELAGELDRLREKRQRQVITLDYEGRRLNPYQLREALDRQLDMLRLVLSEKDKELYEEVILNNIGRLINRRINAAEQWVEDMNRLMRQRDTSSGLRFKLEWKARPAEQDDELDTEELVRLLHADPTALRDDDLSKIERHFKARIERAKQASDGGGQGAESATTFQQAVREVLDYRRWFQFRLYYEQAGLTWRELTDRAFFRFSGGEKAMAMYIPLFSAVYSRYQEARYDAPYIITLDEAFAGVDENNIRDMFALVEQLGFNYIMNSQALWGDYDVVPALTVYELVRPKNSPYVTVVRYHWNGQARSLAVTGEDDGGLFEVAAATQTD

SEQ ID NO: 38819 - protein, 459 aa, Thermosinus carboxydivorans Nor1
MDREELLTAAAAYFGRPGFHRLLAGLAAKYRSLNRLGGVVVLNDPTAEERAELEALLRRRLAPGAIRVSAREFAAALAATKFGALDPKEVLERWLGSELISNQERRRRRWRCRAMLLERLTARFPHPFCQKWLQALLAKETNIRWAPDGNVAPAFVADLELALQAISRLPDEYQRLPVFAQKVCGDPHGLDSDRDAGKLFLVALRFLRNEEAKTGPDPDPDNDRPLSSAEEVGELLYHFRLLRDDVLNFATCYGLAAYAGASELIYWRAAAAAGAPLNIPLRELVRVTAVRPLAAPARPDDLFDVYLVENSGVFSALLDAVTADRNAAAAPTGAARPLVCLHGQFKLASWALLDRLIASGAVLHYSGDFDPEGLQMAQKLLCRYPGRVRLWRMTPADYAAARPAAPLDERRLKKLAAVDHPVLAPLAKYIAARRLAAYQEGILPLLAADLACLASGVGG

SEQ ID NO: 38820 - protein, 492 aa, Bacillus coagulans 36D1
MKKVVEASYLTADSAAQYRVILRFFYRQHERMRDFIAPEEVLEYLRSLPAFQDYAEEQLHQQLAQLVKWNNLVARQDMTNAKTIEEYKKKRFRYQCTPYTVEIERMLIQLEKLGDQFQGSLERSQFDRLLASLEKLEEELEHPLNKPAADYMHIWDDIFHFFGTIRTNTADYIAYINSEKTSQRMQTEAFLVYKNQFTAYLRDFIVSLQKTSLQIRGRLRELDGQRLAPFFEKLVEHRRQIPRLEDTAASEQEWLEEFHEYWGSLRRWFLGGSSSQSELEMLQMQTNEMIRRMARYVQRISERQQHFRSRKKDYLHLAKWFAECRNLEEAHQLSSIVFGAMTVRHLHLEEATTDNLHAETWEEQPEMRQIKPRTNRYREKTKPGAFRSNHEQKEKQRLAYLKEREQEKQLIEKYMKNGEIRLAEIGTVEPFVRKVLLGWIGKSMAAKNHEVKTDYGMTVKVAMNPDHLITLDAEDGKLIMPDVVFERSGGER

SEQ ID NO: 38821 - protein, 387 aa, Bacillus coagulans 36D1
MDPLQIFDEKAVQGMDLLFHHYWILRSEHPDWYQLIREREKVLRRYISEKFGLRLIIHQHFIKLEKIPVEPESWMGILHFQEPMDYAIFCCALSFLEGKAVDEQFLLSEMCQEIQNNYPVEDELDWTLYLHRKSLIRAVQALMEFSLIRTIDGDISRFDTYEDQEVLYEATVYSRYFLRSFPDDFTSYPDWTGLLEEDWKQNQEDERRKRVYRKLFFSPGLHRKDMQDPDFLYIRNFRNRLLEDIEEHSHYKLHVFKNTAFLSAAEPRSYHHVYPNAKGSTDLMLQLSKTLHDHPEKYVPNEAGEILLTEGELEAVIDDMRTRLERGWSKHFRDAGTKAVCAELLEMMKEWMMAETDEAAGLIRIKPLLGVLAGEYPADFEKGDEEP

SEQ ID NO: 38822 - protein, 1364 aa, Bacillus coagulans 36D1
MNRAGLLNFWYYDDEVFKFADGKLLLRGTNGSGKSVTMQSILPVLLDGKKTPDRLDPFGSKARKMEDYLLGEKEVSGHDERTGYLFLEYRKQGTKQYITTGIGMQAKRHKTLKSWYFVLTDNRRIGYNFELAHTRQSERIPLSAKELENRIGSGGHLVHSQKEYMELVNKYIFGFQSMEAFEDLIKLLIQLRSPKLSKDFKPTVIYEILESALPPLTDDELRHLSDTIESMDETEQQLEQLEREHESAKKLVRQYDLYNQYILAERAQKWQEAESRLQEAKQEAGTLAVRCESLRGVIENLTEDQKQNEQKRDVLKAEQERLQHHEVWRLEKEKGEQQARAEKLKSEAADLEKKWELKKSQLLNIRLEQDRLETENSKDGASMQETLDELALDAGEAAFPQHEINAGDFSRHEGEAFDFSVWKQEIKQHSGLLQKLQQLAGEAERLHEMHMKLQRQSSAKKQEIDELRKQLDHLENWFTEQKQELEDAVFLWIEQHPALPFTDERLRRIAGALDGLYEENRYEAVREEIVKAANDYILQVQKEISRAEQAQKAKEQELAEAEETLMYWKNLKLANPERPQDTEAFRAGLDGAGKRYLPFYAAVEFQDHVTEAQKARIEAALRQTGILDSLITEEPVTPVHDRVIRPNPHILGYTLADYLKPDPDNGSPVSAARIDEVLRSIPLEPSDSGFHIDADGSFSVGCLVGHAPDEGPSKFIGRTSRKRYQQEKIKETEQTIAEIRLALLQIENRLSEWARKVQEAEDWKAGIPDDKDLRDLEEQIEKTARSLKQEQEFLTEIDRDWKQVYQHLQNIRLQLHEQGAGLNLVLQSGPLDEALAAAKSYEEHLHSLELIFQRLFSGRKMLARLAADILEKEQELDEIRGEENIRRSEWEKTVANIEAIEQQLKLQGIDEVRARIQAVQHEYTSTEEKIREIYEEKPKKEAELEKCTTNLSLAKTRTTFWTNMAAEWEKLVKAELSLGFVESEHTEPESILTAFSGVLEKYDRAKLNENLTKVFFNEQSNLTEYRMSEFTKEADPPDWFAEKLDDYYETFKKEWEGLRGRRLIQMEYRGRRVSPYTVLESLEKELLNLQSYLDEQDRRLYEDIIVNTVGVILRNRIQRAAKWVKEMDAIMRNRDNSSGLTFSIAWKEKTAESEDELDTKDLVALLQRNSKFLNEDDLNRITKHFRSRIAAAKELIEIRNEGSTLHQVLKEVLDYRKWFQFVLSYKRAGEPKRELSNTAFFKFSGGEKAMAMYIPLFTAAYSRYLEAGSMAPYIISLDEAFAGVDENNIRDMFEVVEQLGFNYIMNSQALWGDYDTISSLAICDLVRPKNANYVTVIRYRWDGHKRSIVEKPKESLAGATPDLL

SEQ ID NO: 38823 - protein, 432 aa, Bacillus coagulans 36D1
MMKDAIDLLRKEPGMLKLFHLFKEKYRSLGHIGGTVSLSGFTRTELEAIAGLAGTSPDLLREKNKISLRAFEKALAPTVFGKYTLVELLEAVLKERIFSKAEEEEIEKKKEEQFLARLTETMPDGNGWWRRIASKTADTRFIWHAYKQDPDTLSAQLKMVWKAFTMLPEEGKYERIPFYSQRITGNPHFFDQTRFAGKLFIHCLFTDQWLKGLIEEVPKTTEELNELYANAGLMRDDLWSFVTCRAFLAETENGLHPVWREAAATGTVMNVPVKELLQLTNIWPRAGKKVWIIENSGVASAVLDAVSDAPVICTHGQFRTAAWIMLQHLAKNGCTFYYSGDLDPEGVVMAERLSSRFPGQTVFWRMDPDAYFLTLSEEDISTRLSKLDAVQSPELLLVANEMRLKKKAGYQEGLADLLIEDLKKRWLSGKEA

SEQ ID NO: 38824 - protein, 498 aa, Pseudoflavonifractor capillosus ATCC 29799
MQMALQADMLESIPQTKYLSAESYISYRAIMRTFYLEYQNMHYQLDKDTILSLLHKDVLFAAYTVEQLVSDLDQLVKWKNLAPIQDPHKAYTIADFKNRQFQYMMTEAALEVERMTITLENLYTQTTGLSSSAFRRIQKALHTAEHLEEMSLKDVGEWWQELQEDFRRLRQNHQDYLREFYGPSAEKQMRSAEFIAYKQHLIRYLEDFIQDLQSSATQISAQLEAFSEAQIERILTLVYQSALEIPRPHSEQTPLWKEELRQKERGVWKSLTAWFTGKDSTARQVMDVTNEVIRRVVQNAAILVQMQDMGVSNKAELRHLMILFSNLPSLEDAHKLSALAFGAQQARHFTVNDERETERIDSSTYEERPLDYSLQPRVRTYRPRMDRSGFADKSAEKAAQRKKILEEERQLREKITQYIQDGKLDFSALSEPVPPEVRTVFLSWVAMANLAPDGYGHTQYGQRFMLERRGNRTCNLICTDGTLSMPDCVLLFEGNGNE

SEQ ID NO: 38825 - protein, 390 aa, Pseudoflavonifractor capillosus ATCC 29799
MEMNEFRYLLDRFWVTRSDNKDLYFSVKRALPHYRRLVNEQLGWNLIVNESVIKLEKVPPKAMSWMGIQEFQESLDYCLLCGTLLFLSDLDDGEQFLLSSLTDALEAILAEIQPMDWTRFSHRKSLVRVLRYAQQIGLLIVYDGVSEGFGSDQTQEVLYENTGLSRHFPVHFGRDIMHCSSIEDFEAFSWEGEDAERGRQRIQRVYRQLTLAPALYWSEQDHSDYDYVKNQRSWINRYLGEAIGGELQVHKNGAFFVLEEEHRFGAVHPRDSAISDVALLLCAQLRSQITAGIYPRSEDDTVFLTRHELQHELLQCHTQYGTGWGRRLRELSLENLAQELIAYLSGWMLLDQQPEGFVLYPAVGKWIGHYPARYQDGLREETADEPLEDA

SEQ ID NO: 38826 - protein, 1348 aa, Pseudoflavonifractor capillosus ATCC 29799
MNRWKMHKLGFVNFWLYDHEEFLIKDGHILLRGNNASGKSITTQSFIPFLLDGNKSPERLDPFGSRDRKMDFYLLGDGEREESTGYLYLEFKKANTEEFLTIGIGMRAQKGKGIDFWGFCLCDGRRIGPDGISLYEKLGGQMLPLTKQKLRNLIGDENNWAEAPGTYKQLVNDRVFQFRDIRQYDQLIQLLIKVRTPKLSKEAFRPSEVKKILNESLQVLTDEDLSAMVSTMERMDALEDTLRDLRSAMRDASTIRNEYSRYNQYMLGMKGQAYLKAHTKTLQLQNELQDAKTDLENLERELLAQAQQQEDAERRLQQAKAQYAALGEDDLEAQRNRMADEETTCRQLAEQLAEGSQQLETLQNSISRCEVDLRQQERERSDAHDSVKHGIRDLKQENECLLLGEEHDQYVQQLSSQDKEVDHQNLLLALQQRKKQINQVLTCFRELSRAKETYDTACQALDGANTAELQAKSALRDAQQQEQQERDHLLEEFSRRQASNQELHFSQEDTLTIKRLISQYRSPADWTEIRNLIDSCYRDQLGQLQGAKNRADFELKNRQKERNEIQLELTRLRNQPEPIPYRRDQIQATRLQLMMRGVPHAAFYEVVDFSPDLGQDMRDLLEAQLADAGILDALVVQAEHLGEIQELLQTYPDRFLVPETPVRDPITSLVPDGDPRFRETVLACLRGISRSDPEAGTALLPDGRFRCGMIHGYSCAEGPAGFVGAAARRANRERQLRECEERLAHAEEMLREKEAEAVTLARRLEQLKEEREQLPVALDLDHALEMLAQAQRALAEAEAEKERRLEQERASKQAVAQLERQTRELSMGLPYMRTEEAYEEALDSVDSYQALMSTLTICHSKFIFAARTVVSTEDRIAELRDQASAQSKSNAQIQKQIDVSQSRIQAIQAFLEQPENQAKAQRRTELTQEMDAQQKRMTDAEKQYAVLKSEQNYKRTQFQQRNDRLCRAVIEEDDLEKYFLEDLKLGLSSVSDGPIEQQAQEACGKVRPEDRERTPERIGDALRNNYQQHNNTLLKYQPKIELVFDDAANQGMLRQRLCISLQWAGKELSLYDFIQELQSKIDMTATLLEEKDRELFENILAETISHKLRSRIEESQQWAKNMTDLMGTLKTSMGLTFRLEWKAKKAEGEAELDTAQLVLLLNKDRALVTREDSQRVSTHFRTKVKRARQEAALQEQLISYADLIRDVLDYRSWYEFHLLYERDGEPKKELTDRVFNKFSGGEKAMAMYVPLFAAVSAQYQKGGSQCPMLLALDEAFAGVDERNISAMFELVGVLDFDYIMNSQSLWGCYSNVKSLDIAELHRPANASVVTILRYHWNGAQRTSEEDGQ

SEQ ID NO: 38827 - protein, 426 aa, Pseudoflavonifractor capillosus ATCC 29799
MNKLTADCAAFFKARPAYHRILELLLQKCKSFGRSAGTICLSDATLEECDAARALFGRTFSPPLRIKTADFEAALQDTPFHGVILKEVLECYFDTVIQTKHQLVEQLDTQMLRIIEQAKNAVQSEVCRRWLDALSHKQGDGYHLIRTSLGKDENAVYQAILQACKSLEWLEQHPAERPRLAVLSAHATSDPHALDTTSLGGKLFLHLLSVRMDTKPPATAEERASLYYNCGILCDSISSSVTQVGVHLYTDTEEHPAYRAFRLRNEAGTLTLTNLACIQAASSSSGKAYLVENQMVFSQLCDQAPHFHSPLICTSGQPTVAVFRLLDMLVSSGTKLFYSGDFDGKGLSIALQLLARYPDHLYLWHMTAADYARCCSDVRLSEASLALLRTCANTALTPTAEAIERKGYDGYQELLLSELLADLIDT

SEQ ID NO: 38828 - protein, 507 aa, Ruminococcus gnavus ATCC 29149
MKNKNTRGIDDMKIQEKMRKPMLEAKYLNVENTDRYRPIIRLFYLKYEKLKYWMYQEEVFEELKEDPYFQEYTMEQCQQDLAALASWGNLLTIQDTRKVTTIEEFKNKKFRYQLSETAVEVERMVIRIENLLIEGSSLEPTLLERLRISLGRLGEMSQAEAEKRYGWWNDLNSDFIRLNQNYQDYMRELNSVKAEEMMKTKEFLVFKDRLIEYLRSFVKSLQVNVTAIEQQLRSVDREVVNQILQKVTEYELSIPRMDTEIDEQMIYDKMKGRWESISEWFAGKDGMESEAGKVFDTTNEIIRKITRYATRISEMSNQGSNRREEYKKLADIFGKCRDINEAHRLSAVVFGIEKPLHLKGELSRETDSINSGVYEEEAYAVTVTPRVRTYKQKARRSGIVDRSKEKEEMRLLMIRRLEEERKLLRSYIHNGRLEFASLPVIEPPVRDMFLLWLSKALERKNHRAKTEDGQMYYIERADVKEYCMLECTDGTFQMPAYTIVFEDGESK

SEQ ID NO: 38829 - protein, 381 aa, Ruminococcus gnavus ATCC 29149
MRTLELLLNRRWILKSRERELYYQVKEELSSGEEKKFLMEKLGYQVVVNPYMIKVEKMPAVPENWMGILEFKEPIEYVFFCLVLMFLEDKEAEEQFVLSELTEYVQSQYQEEQIDWTVYRYRRHMIKVMKYCVAVGILNVDDGSEEGFAKDDTSEVLYENTGASRYFMKNFTQDIMGYTSAKEFEKEEWIDVNEDRGIVRRQRVYRKLLMSMGMYKDAESEEDFAYLRNYRNMIQGDLAELFDCELHVHSSSAFLVLGEECRLGRCFPEGNTLSDVVLLTNQLIQKRVTEGRITVPLDEQICIPKEVFRAIVEECKEKFGEGFNKTYREMTFAEFYREVERYMEELMLIEIGADHVKIRPAAGKIYGKYPEDFLKNGGRDE

SEQ ID NO: 38830 - protein, 1363 aa, Ruminococcus gnavus ATCC 29149
MNSKWQINRVGLLDFWYYDEEEFDFLDGRMLLRGANGSGKSVTMQSFIPLLLDGNMRPERLDPFGSRARKMENYLLEEGDEREERTGYLYMELKRLESEEYLTLGIGLRARKNKKLESWYFCVTDGRRVGKDLFLYKDVENKITCSKGELKYRISEGGKVMETQGEYAQCVNRLLFGFETQEEYKELLELLIQLRTPKLSKDFKPTVINEILSSSLQTLSEDDLRPMSEAIENMDNLKTNLDTLSESIHAARQIEKVYDQYNQIVLYDKALLFSDAGKAYENCMKNGKQITEDLAIHMEELRKEEQHYEALKQEEEILKEEKTSLDKSDAAQLKEQESKLKAELLERVKEQQTKEKQEQEKKEKQIDTEEKIKAETEKTERIWDEIENCLEEMETELEEIPFDEFTFLKNDILQDREKEQSFSSHHQLLNDYTKKVEQGKEALLEEKNSQEKYDRCLLELDVCREERNLAEKEMQQYENLLHETKSELTEQMYLWEKQNQELHLLPETMQEISRKIESYEMGSDYSEIRELARPKLYELERQFSENRMVLERNLQEEQEHLYQAETELEEWKNQKDPEPEQPDCVKANRELLKEKKIPYFQFYKTIEFDQILEEERRNHLEEALLEMGILDALIVPKEYREQVYALDKGVCDRYLFSDVAHVRESLQEVLEVENGENDILFYQNISNILSAIGFGDTHAEHGESWIDANGNYRIGVLEGTITGEYQARFIGVRAREKYRKEKIEELTGLCEQLRASVEDLEKQLAENRARTETLQAEWKSFPGEEDLKTAAKEFSDREYKLERTNKRLWEHQELAEKERKALDGVRIRVREICGKCYLSPRLDLFTQALLALHRYKEILSQLQVAHGKYQNSLRYIMSQRDYLEELELDLDDIRYEFNRICLKVREVEGFLASVQKQLELTDYEEIKERLDHCVERLGKLPGEREACVRNQAALRKETEVLQEKERENELRQKELLEKKEKYQNVFEQEYQLGYVERVFVVTEDMEDQAKKICSQFAGSFGNKKQSDLFGNLQEAYHQNRGYLLDYQITLQSLFEELDGEGSFLDVTVKRIDILAKYRGMPVKFKELIEKMNEDAEVLKRLLSDRDRELFEDILANTISKKIRGKIQASKRWVEKMNTLMESMQTSSGLKLSLRWKNKRAEKEEQLDTRALVELLQKDVEIMREEEVESLSRHFRSKIEEARKISGDMGSVQSFHATMREVLDYRKWFEFQLECQKTGEKKKELTDRVFFTFSGGEKAMAMYVPLFSAVVAKYAGARPDAPKLISLDEAFAGVDETNIRDMFRLMVEFEFNFMINSQILWGDYDTVPGLAIYQLIRPENAKFVSVIRYIWNGKVKVMLTGEES

SEQ ID NO: 38831 - protein, 439 aa, Ruminococcus gnavus ATCC 29149
MKAEEKQKLMQECLQYFRERPVYEKVFQKMRGKYESLGHIGGKVVLIGLSLQDKSQLGGFLQKDYTENQSVTISAEAFEICLSKSRFSDISLEELLDAYFGKKLTVKKEERRKKQEERDAFFAEVQSGYEDTTGGRWLQNTLKEHTTGYEILQQQYNSAPEILREILKYVFEAVKQLPRMEEKELLPVFAAKLTGDPHYFDASTVAERLLFIILSACWQETKDRELSEAERKNQIFYRAGILKDDLSNDTLVYGIRAWKHNGNLHKGIEGFFQEREPVRLTLRTIGTFGGVHAEREKIYLFENPAVFSVFVKKYPDCAAICGNGQPRLATLLLLDFLKENHSFYYHGDFDPEGLLIAQRLKERYGESICLWNYRADWYERYLSDVNLSEVRMKKLEKVYLPELLEVKMQMQKRKRAAYQEAMLDMLEPEKNEWITRSVK

SEQ ID NO: 38832 - protein, 496 aa, Geobacillus sp. Y412MC52; identical to SEQ ID NO: 38648

SEQ ID NO: 38833 - protein, 398 aa, Geobacillus sp. Y412MC52; identical to SEQ ID NO: 38649

SEQ ID NO: 38834 - protein, 1353 aa, Geobacillus sp. Y412MC52; identical to SEQ ID NO: 38650

SEQ ID NO: 38835 - protein, 406 aa, Geobacillus sp. Y412MC52; identical to SEQ ID NO: 38651

SEQ ID NO: 38836 - protein, 501 aa, Rhodococcus erythropolis SK121
MVEETSAPDYAAYADTNRLKLFSFTIAEKRAEYLWVLRAFDHARANYTVLLHAGAVAQILEKIGGSDPAADLSAAEVTPLLDQLHVWEILERSYDGTRAATLAEYRNRHFVYQFGQAGYQVYRSVEDVLAARLDSASLSRLALPDLLADMSELAEANRRSDGDLIFRKLKRLDSTLSDMADRAAHFYLTLGDLVRTTEITPQAFLTHKDALLTHMREFSSDLARYAPKLKEAIEHVESTGVDRMIRLAAASDERVFVPITEREDDWAARWRGLTAWFVSAESGISESERLREGTMSAIAAVLALLRRVTETRRGGVSRESQLRHLAGWFAATPSEDAAHALFQAVFDLGRPRHLSMVHPDADIISHSRSWWEAPPVEIARTLAETGRPPSPGLPSKVARNDGSIRRLREEQLAAQRTRSAAAQSLASNGVYQRELNEQETEVLLSLLNAALTARVPVVGRVKSSTGSENGVKLTLSPSDGSTTIKTARGRMHLDGIEVSVR

SEQ ID NO: 38837 - protein, 480 aa, Rhodococcus erythropolis SK121
MRAREITPLALDSYQRAARVILSNHLITSTYPDRIALPLLRRWATELRDDLLELFGYRLEVTETTARLFTVSDRLNPSAPARTASERTFDRTRYAYLALCLAALGRAGNQITLSELADHVAADAAQVDGVELSTDRASDRDAFVDAVGWLGVRGAIALADGDANGWASNPEAGEALYDIDRSVVVALFRPPRALQHLHSIRGLLATETSSAAEDDGIPVDAKEIGRRVRRALVERPVVLAGELDQHELIALAQPKTASEVELLTGLVAERRAEGIAMIDPTGRLSDVRFPSTGTIAQVALLLAGEIADRVLDVDAPELPKLPIPHVSDDHLIEQLDAAIPEAGIFEDLADEDDDFVLPAGEPAEPPEPVTYPKIDDDWLADKVSELVDQFGRTFAAQWQADHNGLRKQALGLLQRLRLTHAVDGGVLVLPVLARYRDVVVSVRERDPQIDFAVDNSAPDPVDEFGPEPSPNGELSEVENV

SEQ ID NO: 38838 - protein, 1391 aa, Rhodococcus erythropolis SK121
MSNARFRPTRAGIINLWDYRDQEFSFADGRLVLRGPNGSGKTKALEVLFPFVFDGRIEPRRLNPFAGEERTMKSNLLYRGQDSAHSYVWMEFCRGSLEDPESVTVGIGMRATRTNDKVTRWYFVADGRVGVDFSLIGNDDRPLTKKQLAEQLGSDSITDRPLDYRTAIDARMFGLGVQRYDQLINLILTLRRPQLAKNLDPKGLSQALTDGLRPLDDQLVLEAARSFSDMEEVGRALEGLAAADQAAQSFIGVYTKYLRQQSRGEIEQVSTRLAAVTRGVAAMDESSLAQTRSREARAAAEERFNQAEQALENARANVEALQRSSAYEGKQQLDDLAQAVATLKLSTEQQADKSRKAQAALAQRGDEADKAASSVKRAAEALSRAEDELQAAAEDAGIVWTPLPDGSRSDQITAAVRGHAEERDGDVRVVRTALATVEKAATERTRAENSSRRGQELLEASKAAVLEGEAAVELARSQCASGLRAWWTDHSSLFSAVGADTSLFEALDAALAEVGDEDAPALSAVLAEHTEAGTETLRERRREAEAEISASHASIAALKSERKAVSAEHDDAPPAFHARSDNRNELGGAPLWQLVRFADSVEPDVATGIESALQAANLLDGWVCPDEKIPEHVSEQFLTALPVKQRPKGRTLADVLEVEGNADVPDARVQDILASISLVEAPGDSDASVAIGVDGRFWQGVARGRHVKADAEYIGTTARARRREARITEIDAALEELAAAVDTAKALVAQTNEQLSRINSAAKELPKTGSILRALKTVTESAGALRTRSEATETAQRELDAAIADLAAKEKQLRATASQHRTPDIGRELDSLAAAIRHFEKQGELALRCRREHAKEVELERESRDRLDESRANAEEFAEEAAIAEESLLQQVQRLETLRDTLGASAEQIDLDLAKARAKIEECKVEQRAARKAYDAAVLQIGTAEGAYNTAVETLRHTLTETRSDAERLAPYARPDLLELLGVKEHLSWPASSAAWMSPDQLVYRIQNEDRSEDAAHPPVLPEDVDKLYRALEAATSAVRVTDGARKATRTALTSALQDFDAQLAAAGQDYRLQWDAPDGLTVVRVQDDQGYSSIGEFATRIHDARGDQEQLLTESERRILEDALLTGLAQQIHERTVDARELIAQMGTEMRERRMSSGNTIGVHWVLADNLDDSSRAISKLLDRDASALGVDELATLRAHFATQIRTARAAHPERSYPEILSSALDYRQWRVFSFTLISGEGKEDRLTVARHSALSGGEQSVSLHLPLFAAAHVMLDSADPHAPRLLALDEAFAGVDDNGRSELLGLSVQFDLDLFMTGYDLWITYADVPGCAHYDLAHSTAEQAVSAALLVWSNGELLAEHDGTDLARALGSPLRRRVPTPAEGALDYA

SEQ ID NO: 38839 - protein, 495 aa, Thermoanaerobacter brockii subsp. finnii Ako-1; identical to SEQ ID NO: 38597

SEQ ID NO: 38840 - protein, 383 aa, Thermoanaerobacter brockii subsp. finnii Ako-1; identical to SEQ ID NO: 38598

SEQ ID NO: 38841 - protein, 1388 aa, Thermoanaerobacter brockii subsp. finnii Ako-1; identical to SEQ ID NO: 38599

SEQ ID NO: 38842 - protein, 431 aa, Thermoanaerobacter brockii subsp. finnii Ako-1; identical to SEQ ID NO: 38596

SEQ ID NO: 38843 - protein, 495 aa, Thermoanaerobacter brockii subsp. finnii Ako-1; identical to SEQ ID NO: 38597

SEQ ID NO: 38844 - protein, 383 aa, Thermoanaerobacter brockii subsp. finnii Ako-1; identical to SEQ ID NO: 38602

SEQ ID NO: 38845 - protein, 1388 aa, Thermoanaerobacter brockii subsp. finnii Ako-1
MSEKLAERWMINRIGLLNFWYYDDEIFEFADGRLLLRGANGSGKSVTMQSFIPLVLDGNKSPERLDPFGSKARKLEDYLLGEEEVSGLDERTGYLFMEFKKEKKDSYITIGIGLKAKRHQNMDFWGFVILDGRRIGIDFFLYKMEIGDDGKRAKVPLTKKELKNRIGEGGEVVESQKEYMEMVNKYIFGFSSIEEYDELIKLLIQLRSPKLSKDFRPTVIYEIMKASLPSLTDDDLRPLSETIENMDQIKMHLDVLYRNMAAVKKLKNEYDNYNRYILYEKAGDLVKAYSDLYASKKEYDNLTKDIENYRSTIANLGNDIISLESEREALKKKEEQLSSGDAKRTQKELLEEEDRYKQYLEDKSKKEGELRNKQDKYYGLERKIKNTEEQKYKLDKELQDKLENISSIAQDIDFMEHEFSVSELKKVYGKEFDFTYWKNELKKHKDKIKRAMSALREEIEANKRYDAALKEQERLKKEREDRAKKLNEAERLFDEQKREYVERVYSWSQGNAELKLLSSQLEGLSRVILAYGEDKGFDDILAFVRKPYEEILNGIQQEILRLQNQREVKENQLHEKEKLLEEWKNKKDPEPERDEQVINNRKRLKEAGIPYIPLYMAIDFKEDVDEETRGNIEAAIEDMGLLDALIVPKEYFEKALQMDSNMADKYVMPGSFNMMLNVSQYFKVVDNEEGVSPEDISDALSNIFVSEESGTTYIDSNGTYGIGVIKGKARDKVKSKYIGSESRKRYREELIKSIQEEIQAIKAEISAIDEEINAKKSRIQRLDYEYSAFPGKEDIEEAYRYLKTAKADYEYTSHKLDEQLFTVKNCFEDLQKKKAVVRELTSGINIHPDIDTYSSAYEYAEEYASGLNEVEILYNKYVLHISNEEMLLQQKQDLEYDIDNLKYEIDVLENKIQSSVKKIEMLKETLKELGLEEIEKELEFCLKRLEEIPKEITNKSAEKAKLEERLQRSLKDLLNIEEEIHLKEEIYNIVEEGLKKELALGFVKQDVEMEDMLKLSKSILSEYKGFFDKAGFDREKFTERLQNVYFETRNELLEYGLSIGNIFDEACEGDNERIKEAKSKQRRLNITANINGKVVSLYTLYSNIEEDIMANESLLRETDKILFEEIIMHNVGIKIRAKIFKAEEWVKKMNKLMSERDTSSGLKFSIEWRSIPASNEEELDTKELVDILKSDADMLKKEVFDKVVNHFRSKVERARRAMEEKNNTETFHKIMKEILDYRDWFEFKLYYRKEGESRKELTDNAFNKLSGGEKAMAMYIPLFSAVYSRYEGAPPTAPRIISLDEAFAGVDDTNIRDMFKLIEDLRFNYIMNSQVLWGDYDTVPKLSIYELIRPKNAKAVLVMKYLWDGKVKHLILPEKEEVAALEVGAVNE

SEQ ID NO: 38846 - protein, 431 aa, Thermoanaerobacter brockii subsp. finnii Ako-1; identical to SEQ ID NO: 38596

SEQ ID NO: 38847 - protein, 493 aa, Clostridium carboxidivorans P7; identical to SEQ ID NO: 38786

SEQ ID NO: 38848 - protein, 376 aa, Clostridium carboxidivorans P7
MKELLALLENYIILKEKNRELYYQIKDNYDNFKDFLIEKLGYNLIFHEDFVKLEKIPGRAEGWMGIEGFTDIKEYIFFVILLMYLEDKNKEEQFVLSFVTEYISNQYQNEKIDWTKYSNRKSLVKVIKLALKLGIMKNNDGDEDEFSSNENADVLYESTGISRYIVRSFSKDIMECESLEELMHHNFEGVEQDKGMLRRNRVYRRLLLSPVVYNGGTEDSDYDYIKKFRSSLQENFENNLGWDLHVHKNGALIVLSDDNKIGDLFPSMKGESEAILLFGKLIREKLEEGKLVLNLNDEIVLSRENFNELLLELRNKKGSGFKKELRDSKDEYFIDVLLNYMKDFLMVEEREASIVILPVLGKVVGDYPKDYLAEEN

SEQ ID NO: 38849 - protein, 492 aa, Clostridium carboxidivorans P7
MKERWIANKFGLFNFWYYDEEEFQLLNGKILLRGSNGSGKSVTTQSFIPLLLDGNKAPSRLDPFGSTARRMENYLLHDNHEDRIGYLYIEFKKPESNLYITIGMGMRAQKSKAMDSWYFILKDGRRVNKDFKLYKVLGEKYPLTKQQFKNSLGEGNFFTESQKEYMYKVNEHLFGFSDIENYEELLKLLIEIRSPKLSKEFKPTKIYNILNNSQKTLSEDDLRPMAEAMDNMDSLNMKLMSFEKSLKAAESLKESFHNYNKYILFSKSKDYLEKEDYVRALTKERESLLLDIEELKDEKDIKKKEADNLKEKYDKARVEYEKLIKNDIFATKNELENLKIEISEEEKEVSALRTSLDKKNKDLKEKEGKLEEIKKEEEYIESQIIRELDDIEDYGEEFNFEEGALLKKELLKGIKDYDFTFIKESLNKEERKLENAFKFIKTYEDIKSEKEECELERDKTAKIVEGLNSELKESYEYFTHIKEEYIGKNKYL

SEQ ID NO: 38850 - protein, 495 aa, Thermoanaerobacter sp. X561; identical to SEQ ID NO: 38593

SEQ ID NO: 38851 - protein, 383 aa, Thermoanaerobacter sp. X561; identical to SEQ ID NO: 38594

SEQ ID NO: 38852 - protein, 1388 aa, Thermoanaerobacter sp. X561; identical to SEQ ID NO: 38595

SEQ ID NO: 38853 - protein, 431 aa, Thermoanaerobacter sp. X561; identical to SEQ ID NO: 38596

SEQ ID NO: 38854 - protein, 495 aa, Thermoanaerobacter ethanolicus CCSD1; identical to SEQ ID NO: 38593

SEQ ID NO: 38855 - protein, 383 aa, Thermoanaerobacter ethanolicus CCSD1
MEELQMLLENFWILREDRENFNKIRDAENKIKPFVEEKLGYRLIINPYIIKLEKVPSDVEEWMGIDAFQMPMDYAFLCLLLAFLEDKGPEDQFVLSNITEYIEAQYDGPDKVDWTLFQHRKSLVRVLNFAVDIGIIKIDDGDHERFSESEDTEVLYENTGISRYFLRSFNREITEDMKIEDFLQEDLNLSNPKDAVIQRRHRAYRKLILSPSVYSEGPDDQDFMYIKNYRNTIAKDLEEYLDAKLHLHKTSAFVLFNDNKYLKSYFPDKNKNISDIMLQVSKIIRQMIGDGKLAYNPDDTIDITEAEFINIILKVKERFSDGWYKSYREMSEKQLIEEVIENMESFKMIKRVEELHSIKILPMAAKLIGEYPPDFEKGEGADE

SEQ ID NO: 38856 - protein, 1388 aa, Thermoanaerobacter ethanolicus CCSD1
MSEKLAERWMINRIGLLNFWYYDDEIFEFADGRLLLRGANGSGKSVTMQSFIPLVLDGNKSPERLDPFGSKARKLEDYLLGEEEVSGLDERTGYLFMEFKKEKKDSYITIGIGLKAKRHQNMDFWGFVILDGRRIGIDFFLYKMEIGDDGKRAKVPLTKKELKNRIGEGGEVVESQKEYMEMVNKYIFGFSSIEEYDELIKLLIQLRSPKLSKDFRPTVIYEIMKASLPSLTDDDLRPLSETIENMDQIKMHLDVLYRNMAAVKKLKNEYDNYNRYILYEKAGDLVKAYSDLYASKKEYDNLTKDIENYRSTIANLGNDIISLESEREALKKKEEQLSSGDAKRTQKELLEEEDRYKQYLEDKSKKEEELRNKQDKYYGLERKIKNTEEQKYKLDKELQDKLENISSIAQDIDFMEHEFSVSELKKVYGKEFDFTYWKNELKKHKDKIKRAMSALREEIEANKRYDAALKEQERLKKEREDRAKKLNEAERLFDEQKREYVERVYSWSQGNAELKLLSSQLEGLSRVILAYGEDKGFDDILAFVRKPYEEILNGIQQEILRLENQREVKENQLHEKEKLLEEWKNKKDPEPERDEQVINNRKRLKEAGIPYIPLYMAIDFKEDVDEETRGNIEAAIEDMGLLDALIVPKEYFEKALQMDSNMADKYVMPGSFNMMLNVSQYFRVVDNEEGVSPEDISDALSNIFVSKEGGTTYIDSNGAYGIGVIKGKARDKVKSKYIGSESRKRYREELIKSIQEEIQAIKAEISAIDEEINAKKLRIQRLDYEYSAFPGKEDIEEAYRYLKTAKADYEYTSHKLDEQLFTVKNCFEDLQKKKAVVRELTSGINIHPDIDTYSSAYEYAEEYASGLNEVEILYNKYVLHISNEEMLLQQKQDLEYDIDNLKYEIDVLENKIQSSVKKIEMLKETLKELGLEEIEKELEFCLKRLEEIPKEITNKSAEKAKLEERLQRSLKDLLNIEEEIHLKEEIYNIVEEGLKKELALGFVKQDVEMEDMLKLSKSILSEYKGFFDKAGFDREKFTERLQNVYFETRNELLEYGLSIGNIFDEACEGDNERIKEAKSKQRRLNITANINGKVVSLYTLYSNIEEDIMANESLLRETDKILFEEIIMHNVGIKIRAKIFKAEEWVKKMNKLMSERDTSSGLKFSIEWRSIPASNEEELDTKELVDILKSDADMLKKEVFDKVVNHFRSKVERARRAMEEKNNTETFHKIMKEILDYRDWFEFKLYYRKEGESRKELTDNAFNKLSGGEKAMAMYIPLFSAVYSRYEGAPPTAPRIISLDEAFAGVDDTNIRDMFKLIEDLRFNYIMNSQVLWGDYDTVPKLSIYELIRPKNAKAVLVMKYLWDGKVKHLILPEKEEVAALEVGAVNE

SEQ ID NO: 38857 - protein, 365 aa, Thermoanaerobacter ethanolicus CCSD1
MAKFEESLKNTRFEEYTLKDILEYYFGEKLTSKKEDMEILAKEREEFFKELFSKYQECKCIDWLKSLYEGTAVGVRTVNQRYLNDRNGLKKDIMYVCDAINNLPVYKGEKKRLPVFSSQIARNPHYFDSNTEAGSMFINALCTLMGLNEVKGSEEISELYYNVGILIDEISNYVTLSGLLAYEGDTENQVFKAAYESNQVLQVPLLNLSKIERVISPSKKVYAVENPSVFTSLIDATSKVFPLVCTYGQPKLSSLLLLDMLYKEGTEIYYSGDFDPEGLMIADKLYRRYKDKFHFLRYDVEDYLKSLSNEVINDVRLSKLNKIESPLLFDVAKEMKIIKKAGYQELIIDDIINDIKLIEEGKGEW

SEQ ID NO: 38858 - protein, 506 aa, Streptomyces sp. ACT-1
MAHVAEDWWSVLETGLFDVFNDDRQAGKQRLTGAVLAALLVASSRGPMWTLSDIRKLLAEVGYENAAGNEDLVEVLEVLKAHGYVTPSVDHTAAVESLSDGRRRREAWALTRQGRVVVAGVRDIARRLNRSLRLPPRLLDAVEQTLQALLQHYHEDAEMLDPTLDQVRAHLEQLQEAGGDFYSAVGSLAQGDVTDDAVFITSRRHILLALQHFARRTEQSLNQVRMAFDALAEVGTKNIVHRAIAGAGILDPSEQQAWTADRERDLADLEAWFVPRGSIERLVNTAADAIHALLGAIDRRFYASARGSDVGEDFRQIARMLHAQPTEARTQQVFAAAFGIWSARHPVETVEESLAPLHTARSEDSHTIKLVLRPHDRGARSTGAPRKVADLTEQRRAAEAANEAEIARTESIARALATPGVVPLTHFTGLDATHTEVLVDLIEEALNSFDDTTGTGTAATVGAELTLWIGTPGHAVSVVLQEGELIATDFLIRIRCTPPREGEEAA

SEQ ID NO: 38859 - protein, 435 aa, Streptomyces sp. ACT-1
MTTTPPAPTGDQPSLSPEAEPVVARLLGHQVLAEEDDPEQFRLACHHRHEITRWFSENPGWRFHIERSAGIGRLYKRHYDPPAGRVPLLHRSKPSARTPVSPLVQILTALICEQMWRATQTTFNHLQRAVIQACGTEASTGLLPRFQPVATAGQKQATAAAHRLAFIDALRLLESWHFLTSDQPLNVLEQDNDADLTITARRERLALLIACPAPSLLPIDLDDPESHISALCPDQAPPPEDALSVDTARHHRHTALRAVLDNPGIAPDPATGPGAYLSSWSGREQALNVAAAAGLACTVRQDWWMITDPAGHTTELTFPRSRTVEQQAALLLLEALTGRGDPMAWFGPHWTTDVLAEHLRQRPWWARNYQGTGKARNLATAAVHHLLSIGACTADPPPGTGWQPTPAIHLWRLSITDAPRPHPATEAHEGSSRDE

SEQ ID NO: 38860 - protein, 1774 aa, Streptomyces sp. ACT-1
MNDTPRHRLLADVAGAFTDVPTLDPHPTARGRWQPTRAGAVNSWLWTNEQFAYAGGSLAMVGMNGSGKSLTSAVLFPTFIDGNVTAKNLSAAAEAAGTLTAIHTLGRPGPPKSGTWWQEYGQTDPDGPHSRTRWLTAGLWLHSGGGQRNTLDRAWFLVPARVHAQLILERDGMPVTITDLAAQLEAFDGLLFTSSPRLEQQCRDHTSVLRKEEDYPETVRELMYQPLDGTQTDALATVLRALRSVQAGDKISPRIMEETLTSALPALETRRVQNLADALSKAEQLQGHLQAAHTERGILSDVRTAYRRYVAAAATTTSTTYANLHTLHADAVTARDQALHAETLAEQRQKEAAAALQEDEDRAAQLRGTIRTLENRLNEHPGTSLADLSRHAQDCEKRASDSLQHADEAQAIHQERQEQSAADQQTADQALAAWAKTTHDLGRLAGDLGAAAFHEPLASVLSETQQHQKPAGNGATVAAREQAAAWVQAQSQAAERVQAALEHFTNEQNEQSAAQDTYENKRQHAETAEAHSQDATDALEQAEEATRTALSRYSAHLKRLPALPDDLCDATPLDPTAIRAWVNDQTADALAKLDVRACEERADARSQAADEASARATTASELAAGAVRQATSIADALSNKADALTDTPCSLLDLVHAAREVTRPAPPRPKSTTHTGPSDQEECLLDTLEETAHSDLGRRRLLIRQAARDLTDAARAQDRATATYAQAQKAQALAAAAEETSRDARCTADQEAHTWARHVHAWAHDLKILDPAGLRLPDFTDGPLDLNATHHLAHDTATAHRSAVEALSGRLAEAELRLDADRASLEDLEAKIRHARQADTPPTPPDWRASRHGRAGTPLWEAVEFAQHLQPDEASRLEGALLAAGLLDAWISPTGEMAVGDITLTLTPEHQGPSLADVLVPDSHTPLDPALVRRILAGIRLLQPGEQPLPGQAAVGLDGTAYIGPLAAASPATWDACHIGAAARERARQQLLADLNEKRHHAATALAATRTLVDTLKRDLTTADREQATPDPVPWRSAEEAAATTAFEAEVKNAAAGDATHAAAVVEEHRQSTSRTAQQACTNASLTMNQQAAEAALALCTELAGHLTTTTVATKSAIAATRTLHAADEYADRTRVEAAQAHHALSRARQAAHETEQDRRNLPGELDLLAPAQEAAGRAHRCAQEAAKEATAAEEALGRRTRLLSTAVSRLHSTARDGVAELPVEAEALGRYRSRLQTLIASLSGWGDAAMRAQFTAQTAAGSLSNAAAAKEQAERLRRRASDDQRAADHARHRHDEEVRQHERPYQQLSAELEQRLKEQNDLGTRLAERRNADQQARLDHSRRGDETVACTARVAASAEGRAAALTQLQALFDHGLVAELADSESLHRPEHPGEALDIARAVMEQRGLGLAPTREQAATAESEARTQLDRRIRHNLSRLLEINRHVVSEDIPGTTWRRITVTHLGHASEAGTTQPHMQPLSAILAGLTHTITTLENDFSEQVQNEVKGVVFSELRRDINTRIDTAQSIVDDITKTLNGVRTGVANVGIRLQWQPKNDPIATEALQLIQAADLTGNFDRMYDFFIEQLKNEEANHPTWAKRVEHVFNYRNWFTWEIALTHNDFRDDPTSDTEVFRTLTSRNNPLASLSGGEKRLVTMLPLLAAAHAFYSTEGYQGPHMVFIDELDAALDSRNLRKLLELLRIWDFDAVVTLPSMRPLLVAETQSIGIHRIHKTRTARYTIPSIWTGAGTPHTTRIHASIPTPRPHEQPETEGSA

SEQ ID NO: 38861 - protein, 442 aa, Streptomyces sp. ACT-1
MPSDLHDPDIRPLWQSLADRLAQGDAPETIKTITVPLTRPARARIAGWLAHTTPPGRRRPLRTGDNGTTIPVPRLLTALGHTHHDLRNLIEAAGLHIPDTASTRTVARRLRTEIDSHAAHALPDAPLLNERLRSYGISEDTLEERRFLIDALARAHAVLPLPRRLSLARLAHHCAADPHYFDLNDNGRGALLVLLARDLLNAEQPDTPAGDRGLLARLGIVADRLSQTVLLFNVQATGDGPSDRALNLAYKDRRPAHLTLHDLTAHPPTLQAGQRLLVVENVSLIDEALERGVTRPLACTRGTLSAVDHTLLALARDAGLALEYAGDHDPWGHAIAATVHDRYRATLVAMDDAAHRSAADSEPDWSRLPRAGRETNDHEPPRDRSGVEGRIYQENSAIIDMLLGASRSDPLRPDTSPATSSAQSHTEPWPPSPHDSVHMPSR

SEQ ID NO: 38862 - protein, 557 aa, Streptomyces sp. ACT-1
MPGTPPEPGNAPSAHDADETHRRLDAYAYLTAPERLEYLAIMQVFCGTLLADLAVPDVMAKLREGGGPASGLDADPLTARLEQLVKWGNLLRGSHTVKASSITEYQRSRARYQLSRLGERVQRDADGVLAEADAAREVSNELLALVERGLRELAELVAEPGGIAPQDGLERISTLFVQFTGFADSVRDFYAYLGQVLARYDLDGGEYQGFKELLLDYVEAITEDVSFRAPRISAALDMLWPHLPDLLEQLDAHAQGLAGLPTRSQSRTETRVQRSRGRELADWEGLRRWFRDTDGQGSQVDQLRDATLRALQSLLANAKRMLRSATGEMSRRRDLLRLARWFDEAAPQDAHDVAVAAFGLYGARHLGIPPASDEVVPAYTSWWTGPVVEVPVALRERGTRGQRGRTASVEDHSAQKERLREAARQRAAERSAAADELCSASGRFDDVRLTSAALSLLLELLATALGNAQFRRHAPVDGQEEREFELDAAWSEDVDLGILLTVHRTAGARTLLRSADGDLLLDDLEPTVHRTAGSVGGAEPTGPPTRSHGASVGGSGR

SEQ ID NO: 38863 - protein, 442 aa, Streptomyces sp. ACT-1
MTLPSAHDVALATERRTAARLLLAHPLVTSDGPHADLFPLVRRHADWLGGRFQQVLGYRLLVDSSYARLFKAGLGARSGHRLVRSTGTPFTPHTYACLALALSVLVTAPEQVLLSQLVADIRAAAADADIELEETGRAAGKRTLVAALRQLVEWGVLIETHGHVGVIAQEADGEALITVDRELARVIVAGPLAQSGGGADLVRRAADPGFGGPRTYVRRMLVETPVVHLDELTDTERDWLRTRQRREAQAFLELLGLETEIRAEGVALVDPEEELTDLHLPGTGTVAQAALLLVERLVQRLRPAEPGHPATGGVLVVGVAVPDGVVDELLAELITEYGQRGNWQRGYLEDPDALREAVLDLLSRMRLIAPAGPLRSEGAGLPEEYADELPEGRQVTDVRAARPSGGEGWVLLAPAARYATQVTVPTTGGRNKSTDTQQELPL

SEQ ID NO: 38864 - protein, 1420 aa, Streptomyces sp. ACT-1
MTADARGLVPLPRSGHTQAARTRFRLHRAGIQNVWQYDEQEFAFGDGRLLLRGKNGAGKSKALEMLLPYLLDGDSRALDATGTGRTTLAWLMLDGFEQTNRLGYLWVEFRGTDAAGDHRCLTLGAAIRASKSAQKAVPTFFVTPLRVGEDLHFVEAGKPLAVDRLKEIVGSGNTTDRAVEHRARVARDLFGITDATRYRNLTQLLHRLRRPTVGDRIEHGGLAVLLSETLPGLDEDVVEKVARNLHDLDTVRAELGRLERTDAALRTFLSDYRRYLAGVLRSAARGVSQELDTLSERRRNAGDAAQQTSVLRKREKESEEGLRTLREEEESARTELAALHDSHAYRSLRELSERRSTVEALHTAAMTAFAALRGAHEAEESVAERLDEGGQELGARLTELATEHRELLAQAERAVLPAAHLGEAVALPHTVRSPSAQMELTGPDGESQTVRHRPVVRVDLTTTEAGLRSWQQQLGAAETVVRNRQRTVQEVTRLSSLADEARGGAMRADEVRERLEGEAEEAADRLEASRQKVAEESWEYAGEVAAWVRETRNATGPSCPPLDAVLSEVDCASDSDAAYSSRTLPAGIDTHARQTAHLALEPYADALTRHRDTLAVGVGRLGEEMDRLAEERQAWERRTDPEPPAPYHRSAVRDAANGTPFYRLVDFAEHLNSAERAGLEAALEASGLLDAWVSTGGALLDPLSGDTLLDAAPAHDPLPVAQTLASALRPVAQPDSGITSDQVEHLLSAIVLAPATWTTDGGTATASTVHFDGSWRLGALRGQHHKSAAEYVGAAVRAETRRRALAELEDRLGQTERQLAEARTELAAADSRRRAPAQAERDFPRAQRLSDAWSTHASEERAARALSAKAAEAARQAEEARALAVSTRSDADATATAHDLPTDTVALDRVRTALASLFTGVGHLRRAVNGTVARLGGSQADDRRYAEAREKRTEVEEGYRLRHRQLLTAQQDLRTREAAVGSSEEKILADEQAAKDRIAHAVRAIPSREREHNGLRDQRVRAEEKEERLREELADQEATVIETGRALRGALSRPEIVIGAGLDRTTLPDQLQDDPGTSARDRLRALRTLAEAVDRGLGRHREEVSDSLLLKRHTTLRDQLAGGYDAQLDEHDGIKVCRLLDDYGSHDVAVVGERIAVEASEARGRLTERESDVFQRFLTGELGDHLSTQVITAANLVAALNDTLKTVRTSHGLGVELLWKLNDDAEADVRVAVELLRSPSSLRTREQTEQLRDVLQRRIEDARRADPSAGYTAHLRTALDYRSWFTFHTFVVEDAVPGRRRKLTGRTGLSQGEQRVLSYLVLFAAAAAHFTSLADVAPHAPRLILLDDAFAKVDEPTHGRLGRILVDLDLDFVLTSERLMGNWAEVPSLHIYECLRDPHVRGVATLHYTWNGRHRQPASG

SEQ ID NO: 38865 - protein, 423 aa, Streptomyces sp. ACT-1
MSALPPATRDWLAGPGLVRLWSAARKRLESNGVRSTGSLRLTAVSSQERNDLSLLLGKPLTGTAVTVRLDVLDKRLRTSAAGLGLRQVLEELGGPPLVDRRAAREQNAAERQRVWAALASSLDASPLAGLEWVEQWSDVLRRTGVPKGVAPEAAVRTLQQAVQVLSTLLDPHRTDTRGRGELAASVTGSAHGLDDGTWLARLVQRGIALAHDTDLPGDAVGRRALWRLVAVTPDEVSSTVLTYGLRPLGEDWRARSLRERADHHAETHLTSRDLRDVPLRLPAGSIVHLCENPRVVEAAADAGCSQALVCTSGSAATVVLTLLDALASGDCRFAYHGDFDWPGIALANRIMRRYGARPWRMGADDYEYLATRSQAEGIPPLPLVGEPVSAVWDAGLAPAMAALGVALHEEATLDLLVDDLGIP

SEQ ID NO: 38866 - protein, 506 aa, Streptomyces sp. ACT-1; identical to SEQ ID NO: 38858

SEQ ID NO: 38867 - protein, 435 aa, Streptomyces sp. ACT-1; identical to SEQ ID NO: 38859

SEQ ID NO: 38868 - protein, 1774 aa, Streptomyces sp. ACT-1; identical to SEQ ID NO: 38860

SEQ ID NO: 38869 - protein, 442 aa, Streptomyces sp. ACT-1; identical to SEQ ID NO: 38861

SEQ ID NO: 38870 - protein, 513 aa, Frankia symbiont of Datisca glomerata
MTSTHRVPPEMFRFATEQNVDLYTAILHVFGEANERLETALGLDGISDRLASVGFFRELGPDELGRALAQLGKWRLLDVIQNHGADYTTAAEYERGNLQYSLTRRGEAAFAGVQHALAVLASAGALQTAVLDAIVDRLDTLYALMADEASPNRRIFTTLSELEGHLEALRVNTKQFNGELQRLLRAENADLDTFHEVKRATVAYLQEFVTDLDHRSHEIREAIRRVESRGVGALRGRALLGAELSPIGGDDPAPAWLEHRRLRWEGLRLWFDPDGGARPRAEQLHTVARRAIVALLAALERIGESRRRSSSAARDFRVLAHAFAAAPAEDDLHRLWGAAFGLAPARHAHLRHADAELVPTGVSWADAPSVEVSTLLRRAGRVERFSRTGRVRDVTAVRRAREERARRERAELEAIWRRLRTDGPIRLSAVAELGHEELSYLLDLLGHALDGPLDSSGARRATTSDGRVEIVARPTDDGRLAMIRTPRGVLTAPDHVVEIILVGQRARPSEAAQ

SEQ ID NO: 38871 - protein, 482 aa, Frankia symbiont of Datisca glomerata
MSSSANQHVQDERVDVARGIRLLLGSPLLTAAGRPDAFAVVRRRRRPIADWFDYFCGWQLVVEPRAGYARLVKIRSEPDPSRPARRPRSTRAPFDRSRYVLFCVVAAELMAGPVTTIGLLADRAASACAADGALPPFDTASRAGRMAFVDALKFLESLGVVSAVDGVTEAYVQSEDAKVLYRVDTTRLVRLLAAPVAPSRVVTAGASVAPGAGDAPATPTADDTPDDAGKAGAAPPPNQELIDIDVLIADMLVETRYGDAAAEAPTVSDSRRNLWLRHSVIRRLVDDPVVYRWQLSAAQLAYLATPTGRTMVRRAAELAGFELEERAEGYLFVDPDGIATDSRFPDDASSAKIAGLMLLDALRAAPAGLTIEQLAIEAGRILAGLPSWAKSYRSEEGAHRLARDAVTELRMFGLAALDTGHTGASAVVRALPAAARYRDHREDRSRLTDVASSAAKAATGDVTATGDVSGGAERDVASGGQA

SEQ ID NO: 38872 - protein, 1400 aa, Frankia symbiont of Datisca glomerata
MSVTRLPVRPAPADAQARVARWRPQRAGIVNVWRYYDETFHFHRGRLLLRGRNGTGKSKALELLLPYLLDANLQARRLSTFGGPERTMHWNLMGDGASGQTRVGYVWIEFRFGALPETGPAGPTGQPSPVRPVGDGDGEGGGPARPNGSDERWFTCGARLQASVHTASATADYFTTTSRIGLPGGLSVVDEANAPLTRKRLEAELGDTGQLYPTAADYRAAIRAELFGGLSEQRYSGLITAMLQLRTPKLSERLDPSLLSTLLSRALPPLGGAEIAELAEGFERLDRQRESLRRLDEEVEAARVLADRQRAYASRVLRAAAADLISATSTLDALTRTARESQEEYDRVVVEREALDERITAAETDRGTLQARVEGLQVSDAYRAGGRLDELRGQIRAAQRRAADTREQATGAQERARVDKATATRTATGAARAEAELASARETARPAADRAGMTATYQQLAAVTERAAGAGEDREDVAAASWSAAATRPRSLLRAAVEARGRQIGAVRRALGEHRSAVDTRTTAERNLERARQELTAATAARRDARVAYEDAREALGEALARWAAGCAQLRFTDPGALRDAAESEPDVLRLVEETAGPLLEAIAARSAELAREHRDRGAERDAHTAERDRLLILTELPPSVPPTRTADRAGLPGAPLWRLVSFRDGVTPAVQAGIEAALEAAGLLDAWVFPTGGLTVPGHDTVIDVDQMASAPAGGLGAVLTPEPDAKVPAERVLRLLAGIAVGTTAPDGHPVAVGADGTWRLAAARGSWSKPEPAHIGALARDRARRRRVDELTRLISQLDDVLAGIGRELGELGARRERIAAERRARPSHRALDDARGALEAADAAVAARDDVVSHRLEEVREGEDAVRAATRALTAAGAEHGLPTDTDALEAVQDAATAFHRLADGWLDCHQRATAARDAAVAAAGVATRSQESALGLAATAAEAAGETQRLRAKLDGIEAAIGPEYRQVLDEIAGARRRLEELAKQRVMMEQSGRALERRVGELDERRVVDADRREVAVAERDSRANRFRHLGAGSLAADTRLDLPLAGLDGVRPTLEAARAVAARLTTTPYARQNLKEAETRLTDAVHRSRQALADRAELVLEPDEDIQILTAAVDGIRVGAAHLHDAVRDERERSRAEITEGERELFDRTLTGNTRRHVADRIRQANALVADMNSRLEKVRTASRTAVQIQWRVDPALPAATRGARDLLLRDPSQLTKADHEALHEFLRGRVDDARDDDTATGWEEQLLRVFDYTAWHQFIVRVDRGNERGWQPLTKKLHGALSGGEKAIALHLPLFAALAAHYQSAPIAPRLILLDEVFVGVDTTNRGQVFELLASLDLDLMITSDHEWCMYRELDGIAIHSLITGDGSDDAVTTARFTWDGLRLTDADGQPL

SEQ ID NO: 38873 - protein, 500 aa, Frankia symbiont of Datisca glomerata
MTSQADTATATGRAHTAAVTGRAAAGTAGAGAGGASRVAAGLDRPALAPLWRALHARLSSGRPVTSLRIGPLDDDQRTALADLLGLDRLPGSVTTVHLDRLDTLLRTSFGLDARTVAEALHGPLTDRAASRATAARARRDLWEWLCAQPVVAAEPALLAWVADVRRAGVVDGSVDTTRALLDAALRVLARLPADGQPLPAFADAVVGRTHALDDGTRLSTLVLRALAAIYGVAPPAGADERRALWERAGVASDALSAQVLVAGLRPVGDDPLSRALRLWAEAGQASVVTLAQVRACPGLRVVARRVWVVENPSLVTMAITRFGAACPPLVCTAGWPSSAAVTLLRQLAASDADLRYHGDFDGDGLRIAAHVMTRTGARPWRMATTDYLAAVAAMPSAAMPSEAVRAEAVPAAADHPAAAAPAGSTGVARPGHVTDAPWDQDLAAALRARDIAVPEERLADILLADLAGDVRAGDGRSHRSHDLHGDSRAGGPVALTEAPD

SEQ ID NO: 38874 - protein, 517 aa, Frankia sp. EUN1f
MEERGGGGAEDESAVQDRAARRALFSYLTAEAADDYMAVMRLFSETLLADLSAAEVATQLVERGHELDTDTVETRCRQLVIWGNLVPSVRETRVRTVAAYHRSRSRYQVSKLGGRLHREAEEIMRATEGAREVARELLARVSETLRLILLQVSYRDRPIDSELLAGQVTGVFNDHRLFHESVTDFYAYLSGVLTRYDLAGEEYAQFKNLLLDYVDLIGADVSRNAPEILGRLKTLLSPSLIDTLLENLPEPPATGDALIVVERLPGRTRAEWEQLAAWYGASSVRSGPEQLRVAARQALGQLIANAKRMLAASGTGVSRRADLLKLAGWFHCADSETAHLLFDAAFGAYPARHLLLGPEEQDLRAGPSTSWWVAAPVDVPVSLRERGDRTVRGRASRVPDTKEQTDLLMNAARERAQAREAAAAELLAAGSLHRSRLSRAARDLLLELLPPVLSATAGGEAEADHHASDLGLALRGVPARGQLTVINGDDGTLTVDGLLLSVVPLAGPGRARTAASA

SEQ ID NO: 38875 - protein, 413 aa, Frankia sp. EUN1f
MRPTPETGTAASSARERVEAARALLAHPVLTATSHPDELSFVRLHAPALRGMFKAQLGYVLVVEASFARLFKAPLAPGAPSRPARRRDNSPFAPVTYTHLALLCAALLAPGTGEMILISALIEQVRADAATIGVRVGDTLPERRALVTAVELLVRWGVLIEADGTAMAWGERQIEEALLHVARNQLPQLLARSLTGVATPDELLAPDPQAAEQPRRSLRRRLVECPLVRREDLTDAERDVLSRERSELTRALAENFGLTLEVRAEGALAYDATGSLTDEPFPGTGTIRQAALLLVGALLAEREPRPGDTAVLRDGRAIAGLVVGWPDVEATLARLSSQYGKAWSSDALDDPRLLRDSVAATLAEVGLASILPGGLVIHPAAARYRPQPIVAPPTRAARRLDSGRAAYHPELEL

SEQ ID NO: 38876 - protein, 1397 aa, Frankia sp. EUN1f
MQQTLALTEGTEDRFGPTPIRRHPYRWRLSRAGFVNVWHYYDNTFDLSGGRLILRGTNGSGKSRALEMLLPFLLDADRRNMGTGTAVRMEDLMTAGAGEQTNRLGYMWLELRRDVEADEDPASGYLTLGALVRFSASTKEAKVWYFTTALRVGHELSLLTADRKPLGRKELGQAVGEDRISDGPEPHRERVRAEVFGLTGGDAGKERFNGLMKLLHTLRSPDVGNRIEEGRLPQIVSDALPPLSEEALTDAGQQLDGLTSTRDEQQRLEAAHGQVVAFLDSYRRYVAGVLTRSLTGTRQRAASCLETEAEAVRRRAIATGLESELLETLERRQFLADQVSELAAALEALKESDRYRGAKELTELSATVSSLAETARAKLDLAQLRREGEVELVGAANALLTDMSTAVDELSERIDQARDQLTRVRLTAHELPASIGLVRTPPERRSDLVRVHRDAPPVPTLRPAADVPRLVPADLIGLRAAAGSLREAADLRAARATSRAADARRLSDDRAGVQRAVETADDAAVEAETAASRAEQQADERDREAVGLVESWRAWLGDPRTGDLLGDVDWSAQRTLGPLLLDRLVLCGTEADSPVDLAELDRSADDTATGARDRLAGELHRLDADDTADRRVVELLVTERRQLEASRDDPPLEPFWVTAARGAALWQCVDFAPGQSADEQAGIEAALLASGLLTATIDARGQLTATSGQLLVSPIGPRAAVSVAGKLVPDPAGPIDPGVISALLGRIGLADPSAAMWVAPDGSWANGPLRGRHTVPAARHIGAAARQAHRVQRLREIGVELEELAAAAQARAEQRARIEERKKAIRGHLRSAPRSKPLSDARVRAASEERQATQAATKAGRLRAEADRRAVALAESEKAHRAACAEFGLPVDADALADLARAATVAAGTCGAVIDQVDVLTGLAERHQRAVGALATAAEPRGRAEGDAELAWNGWHTGDTRIQALRRALGADPARVLEELKAIEAGQVAAKRKLGAAETAVGELRSTAATAAAQADNADQKVRDEQAALAEQVDAVRAQLGQPGVVASAFTAKPAEPFTDHTAGAVAADAAELLAGLRRSRIEENALIRAQQVFDREIAASYEVIVTRHSEVLLYELADADGRRPLVEAAADLARKCDQGREALTEREQQVFTEFILGEVGEELRGRLYQAEDLITAMNRSLRSIQTSHGIGVRLTWKLAADNDAAVSRIRQLVMTAASVRSQAQDAELLELLRERVAAEALAEPNGGYAQFLRKALDYRTWHTVEVIITGPEPGQERRISRRAKLSQGETRFVSYVTLFAAVDAYLSGLDDTATALRLILLDDAFAKVDDPTIAELLGLLVRLDVDFAMTGHALWGCVPQVPALDIYEICRQDGGGPAATVHVRWDGRNRHFLHSA

SEQ ID NO: 38877 - protein, 457 aa, Frankia sp. EUN1f
MKSPPSAALPAQVQAYLEAPVLRPLWVAARSRLERNGLQATGTLKVDLDETAAAQLSGLLGVRVTVGPKRPVGLAELDAALRRSRAGRGLVSVLEHLDGRPLHDRTAARRATDEQWAQAWRGLDEALATAGLAGAPWISGWIADLRRTGILTRAGADTAGRALACAASTLGLLARTSATGLRTGLETGPRTTSGPLGGDDPVGWQIASLATATTGDAHGLDDSRHTAAAVLRAAAIATGRPAPLTSAQRRELWHALGVATDGVSGTVLVWSLRPPGDDAWSAMMRQRRDLGLVTHLTLHELGRAGEVALGSPDQTVSICENPQVLQAAARAGAPAPLICLSGSPAEVGTRLVQALVLGGVPVRYHGDFDWPGIAIAGRVLALGAAPWRLSASDYLGAVGGVEASGGVPLAGSPAATPWDPDLATAMGRTGVAVHEEYLLDILIADLMHDTERRSGGA

SEQ ID NO: 38878 - protein, 499 aa, Ethanoligenens harbinense YUAN-3
MPVNAVSMDNIPETSYLNTDNTAHYRAIMRVFYDESEKTHYQLDKETVLEKLHQIPAFADYTMEQLLPHLNQLVIWKNLTPIQDPSRANTIAEYKNNQFRYLMSGAAVEVERMTIRLEALVLESASLSIYLFPRIQNALMEMESLQAAPLKDVDEWWQNLQEDFKRLNQNYQDYLRDFYSSKAEHMMRSAEFIAHKEHVVKYLRDFVQELQSRGGKIEKVLFEIPDTLINTILDKIVKSELDKPRPSSERPPNFKVQIKENIRGKWRSLYEWFVSEAGRLSESQYVLETTNEVIRKIIQNANFIIQMQNNGVSRKEDYKKFLRLFAECENLKEAHKLFAHVFGVASVRHFTINSARDTDNINSSIYEEAPCVYLLDTRSRQYKPRIDKSGFSSKSLEKAALRQKLLEEQERTKRLALQYIRNGKLDFSTITDTLEPSTRQIFLNWVVLANNASDRHAITEYGQKFHLLRQPGSCVLHCTDGNLTMPAYVLVFEGRDANG

SEQ ID NO: 38879 - protein, 378 aa, Ethanoligenens harbinense YUAN-3
MDEFRALLGQFWILREQDAALYHRVKRALPTFQKILGEQFGWKLFINEKLIKLEKIPAHAEPSMGIEAFDAPSDYCLLCALLIFLEDRDEGERFLLSELTPSLLAYLQPVLSDWNWETFSSRKSLVRVLCYAESLSLIKTRDGISENFSSDQSQEVLYENTGLSRWFSVSFSYDISGFSCATDFEKEGAENLNQDRGVLRTHRVYRQLALSPAVYWEQPDDPVYAYIKNQRGSVQHYLEKTIGGNLQIYKNGAYFVLDEDESFGMSYPEDRMLSDIALNLSARLRSVVLENEYPRAMNDFVELSFHDFTRELEKCRTQYSALWGKQYREMPLEKLTEEVLSYMESWMLLSRREEGLTLLPAAGKMTGNYRERNETEEV

SEQ ID NO: 38880 - protein, 1347 aa, Ethanoligenens harbinense YUAN-3
MLRWLMNRLGFVNFWLYDVEEFPFRGGRLLLRGANGAGKSITTQSFIPFILDGNHRPERLDSFGTKDRKMDFYLLGDGDRDESTGYLYLEFKKPDVEHYCTLVIGMRAQKGKGISSFWGFCLCDGRRIGSDLCLYREAGSQRLPLSKQEAKNALNDSGNWADSTTEYKKLVNDRIFQFPDIDQYEQFITLLIQIRAPKLSKDFKPSLVQDILNSSLQPLSDNDLQAMVDAMEKMDSIQGNLEQLERAQISAGIIRTEYTRYNQYMLAQKARAFLKHHEETENLQSHVSTTQNDIANLELEIEKLNVKIQKDSETLSQLKAEKNALGGSDTLQEKADRLTELQDALQENDREFEQDARNVEGQREKRNQSQRTLDNLKRQKDDQQALYQQRLDELDEVQEQLQWNGPSELKKQLAKKSYTAFKEAYTAGTVYSRRLKDAQTALEQQEEKSRELDDVQKRLNDADVKCRTAQNELDTAYLVEQKARDELIEAFLRIQAGNREFVFSDTLLGQIKQIVSHYKSTVDDSELNALLSNEKNALYSLLQTQLAECQAQRKELQDTYNALCAQLKVLEDAPEPIPLRTAAVQETREELCRRGVSCAPFYDLIDYAPGMEQRKKDLLEAQLTDMGLLDALVVPQSEQAVVSDILQRHPDHFVKISDAHIRQPLHDLYAVEGPLKEAAETALSGISCTDDDGDTAVLPDGRYRLGVLSGKSHPLKTAGFIGAAARRENRQRQIDALKQQIAECQGALGLQYMKLEKLQQRINNLNAEYEGRPSTADLAMALSLVQTCENSLAVAKGAVEQLDKAEKDARAALGNAKQRAITLCKEIPVSRTASAFLEEQNSLDDYMALLHDLEEGWNGYHHAEELFGAQSDKLEQVEDYLLSLELAARTRKNKSQTLTREIKALQEFLNQPENRALAEKLQKINGEISDLEKNLPDWKADVRVDGTKLEQLCEKKLQKAQELVTMIEHENNLRTYFLEEQALGFFPDTADESVLAAARKAELKLRAQDVEQLPDNMYQALHENFLKNSAALTDYQPKIIPQFEETEGVLRRRRLILLTLDGKQVSLPFFIQEIGQKISLMQELLNEKDRELFESILTETISGKLRNRIAVSHRWVHTMGEIMSGVNTSMGLVFNLSWKGKSQQADGELDTKKLVELLNRDIEILSDEDRRKITAHFRTKVNSARRYATENDQSVSYADLIRDALDFRNWFEFTLSFQRRGEKEKNLTNSEFNKFSGGEKAMAMYVPLFAAISAQYKRATVECPYVIALDEAFAGVDDKNIESMFALVETLGFGYIMNSQALWGCYASVPQLEIADMYRPANSQVVTILLYQWDGYQKTLDEGAMLL

SEQ ID NO: 38881 - protein, 426 aa, Ethanoligenens harbinense YUAN-3
MSQTDCVTYFLEKSGWTRQMNQILKKYKSYGNNSGTVSLPDATEEECRVAGLFMGKTFYPPLRYQLSDFEQALKASRFQDTSLQELLEGYFGYPVCMNKEVSKTHQEWVKNLFAEAYTQATSKVTQNWVQRMLESKDSGYKLFLKAANKDEAMACTSLKQACAALDILATQSLSERRLAVFSAGITANPHSFDMDRLAGKLLLYGICDWQQRKYPHTAEQRAETLFLVNLFADDISSFTTQFGLLLYTEEGEHPAFQAFRTRNESAVVTLSNLSTIVRAASPTGKIYIVENQMVFSHLCEQSLPSHSPILCTSGQVKTASLILLDLLAASSCMMYYSGDFDPEGLRIADRLALRYPKQFFFWHLEKDDYYRSLSEESIPSSRLTALAQLRLPDLQAVSSEIQKTRRAGYQELLLEQLLNDLNAEVR

SEQ ID NO: 38882 - protein, 524 aa, Ktedonobacter racemifer DSM 44963
MNTTEGLPTSPAFNITDRLPIFSYLVSSNRIRWYRTIMRTFLQQHREFYSYQLTIQEIRDAVRAAFDPEYTLEQCQNDLVALKEWGNITTIYDSSRASSIASFLSPALLYQATPEAIAIETFLDEQHRASAARGSLRQGDLPRLWASLQSIDDALQSSGLDLDSTRGRELAEEWQRAFEVWNTMAREAAQYLATMISAAQQARPDLEAFQLYKSAVVAYVHGFAQALTQYSRRIREQLSMWRATGKQSALIDIVARYLEPPTPTAESRRAPEELRQEASNQVEALQNWFAEGKNADSFRRNALAEVDKVVRRASTLAASARPNANYATHLDTLARHLLTTRDGETAQQLFSVAFANHLPVHLPESFAGDPSATYDSQQPNVWQEAPAVTLYLRPVNRSFRGNPALEDPIIDNQTIIRDLVIQHETRLQEQRARIAHLFATDTLDLGALTHVSVDDRTVLTEIIDACQGHTSHQYRALDSSIITLLNPDERIYTLLHADDGTLFLPRYRLSRQQASVLQAQRKLV

SEQ ID NO: 38883 - protein, 460 aa, Ktedonobacter racemifer DSM 44963
MQETEVQQDIPIGEGIEPAQGEQHPANVVNHRIRRATMTADLLKAHVTLMEKEVIHSHQGDLFRLVQHHYYTLQAWHDQHTGWRIQRNSSVIRLERHLNALTPGYLYERLKEPKDFACLTWLLWYSENRQLTGRGNELQFLLSQLAEQVQEQSALGLDGEEPFDFRRTADRYSMQRALHYLEELGGLQLVDGQTREWVEQAGNADVLYEFTPVARSLVAALNPQTVESTAAHLSDPATALQPALLTDMTRSPALVRAWRTLLLGPTLFRFDDPSAFAELLTHADSVANELLDTFGWLLDIQRDYACVVRASGMALGPIAPFSLYGTNDQITLLLCQAIRKQVEISAWSPPDAFGCLHVSVEDMSALLYSVREQCGENWGNEARSKSSRVLLQDVYKKMRQVGLLRGPDEEGQLLILPTAARYAATYEKPGPEATTSTRGRAKASSKRAQKTRSTTLPGLE

SEQ ID NO: 38884 - protein, 1448 aa, Ktedonobacter racemifer DSM 44963
MQETFDQLTEWTATLDENSEDALTNQVTRFVETLQAQAGGPEGYRLRRIILTNFWLYGRQEFEVPHGRLFLAGENASGKSTVLTAALPLALEGDLRPNRLDTFGGRERRIEYYVLGDSNSATPYQHERRTAYIALEFEWCDNDRPPIADELRQRWENGDRTSTRFLTIGLSISGNANTTERIRALRFLITDGSRLGYELDTIYDTKNKGEKRAYDHLRFKQLLEGHGIICETQAEYERQVARYLFGFHDSKDFEKLINLLLILRRPNLSTELNFSRVHDYLKMSLRKISSETTSRVIGTIERIDSIQSEIERVQQSYDAAERLHRSLQHLASVRAQLAACEYEGAQLVEDAAQSRASNLRRSLERADKERTEARQRSQLLQEEQQQIHGQIRALEASEGLQVATQLAAVRQRVQAATAQMNLQQQSLDAARHASNASEQSVQRQQTRFSRMKDESAAQLRTLHTLAAEKALWEAAAIQIESAIAQVKAFATNASFAPEIPSGVTTLLGATAEERIAWLQRLEALHQQRTQLDNKVQNARQLETTRFQELDEVRSHLQALHDSSRQAQQQVEQALETFKLNDDTASVATFPADEIELLLESDEAQEGTLVERFAALLSGYHQTIARLEREMSEAAAEVQDEMHELHLLIGGKTHERQVLKELYERKKAEPEYQPEHAERHIRARTRLAEQGITALPLYTLLDFAPGSDEQETGRIESALEDAGLLNALVVQPSQQDAAATLLASEDLSDCWLDLRRLQPRTHASQTRGILCFDTALQAPTGQWETLTADIIATLHSSDIYGMESSGQWIHGLLSGHAGPGQARYIGRKTRLRTRQRELETLESQQAQLEEEFQWFTNRLFAYEQQLEQVQEKQTQLRKVLPQSGLEEVYLELVQTQKTLNTARDRYQKARQHTQEARQSYNTITAQLERESQGVSALASDAGRVQATLFSVIELKNQANSLQTHFQSLAHSWEEYQRASATLEQAQANEVNSTHLYEHVHQQMLQARAEMEEFQRVASLANAEELSERLRVLRERDDSLTGELDEARQKHTRADERYQNLAGNLVEIEAHLQEAQEECVQRQARFLELLTAYPVEALLAASQTEALAAAHHLLDGALSESEVPQRKERLENAYRDAYNDLARRFNQEQSQLLEYGPDLDRQGRVHFLHENQSRPIELLKILSERIEMQRTLLDEQERQLFEDFLLQEIAEAIRMHILEAEEWVQQINTVLSNLPMIGEHYALQWKPPAEYDQTRLGSQLAQQHRLLRKPAQALTDEEGDTLMNAFRREIEAVRLRQQESPDLNFMEALEQIFDYREWFHFDVWVTPIGGQRQRLTDRLAGTRSGAEQLFALYVPLFAALGALYGSASPGAPRLLALDEAFDKVSASNTQRIMEFLVAQGFQWIMTGPQVSGAGSKIPASARYLMIHDKGSAIATASASFWSDKTGMQAE

SEQ ID NO: 38885 - protein, 447 aa, Ktedonobacter racemifer DSM 44963
MEQNKHDQANVQRAVAFFTQAGLSRLLVRLRDKYLELGQVGGQIMLEESTPQERREIASFLGKPPSSGPTLKVRASDVDNALRRSGFACTLPELLAAFFPASALVTRHQRRATQTAHQQAFRDALDTLRTSLPEASRGRTWLTEGTHGQEWLFSRYKNARPEEQARQLEVIGYIAHILDQLPGEAMPQRLALFAQQTSGDPHMLDPNRAAGRLLLLALGDLTHTPLQPGLNREDVLRLYMEVGLQVDTISSYVVAFNLASASFQDGTPDPMIAAAGERILPLTLRQLWDWGSVQAVTRDIYIIENPQVFEEVIDNLPGTTQAPTIICTAGWPSVAALTLLDKLIAATPDYRFHYSGDFDLKGLQIAAHFLDRYPNHCTPWHIDPEAYMLALQVGGVLAPANELAQLKALPTIFTTLVQALQTHQQWAYQEGIAHLLTAFNEQEQERA

SEQ ID NO: 38886 - protein, 634 aa, Thermaerobacter subterraneus DSM 13965
MADGNTRVEREAGVERKAGGPAPAIDGWAGGSSAPGTAAAPPDDADAPASLLPYPTRPVDEARYLVADHAVARYRIIVRYFFRQHERSRYWLTADEIVEHVRSVYRSDYTLDECERDLGQLVHWGNLHAEQERSRARTVEEFIRRRLRYRLTPYTVELERLLVRLEHPQRQGGSLDPAYLEGLWERLRQLDRLLSTRERATGAITADLPGGGFSLYARAGGHAEPAGAQPVQPALARPTGNGMGPIHVHPADRSLASDRPALPEDTADPRRVRALWREAVEYFTKTRDFANDYLSSLSAARPRDLQQFEAFLSYKDLLVQHLRRFVQSLITHAAQIEGLLRRWRHEGLHRQLAHLAGTADAEEPDPVTGRPRDLDACIRQRLEELVSLENWFCDRSGVDVLQRATVDAIEWIVRQTQRWIDYRRGGASLQRDLEALAIAFGRCRDVDEARRLAGLAFGSPGTRHIHGAEPRSVPVDRDVWRDAEPVPVELVPIARGRRERGRSEAVPDRRTEREAVLHRERLRQQEEAALWDAIFSGPVLDLSEVHLERPELRERLLAVLVRCMQSPDRATVASDGSRIELVGSVPGEAGRLVAPDGVLHLGRYRLRRLPPRRLPPPRRLPPPPRRPNREAPTG

SEQ ID NO: 38887 - protein, 439 aa, Thermaerobacter subterraneus DSM 13965
MTSPNPNAVGSGARRERGERQAAAIDLLDRPAVHLAEDPMAFRRIRMHLGELRQWFDRRCRWPLLATRELIRLVKIPAWTRVGHGLPDLQHPLDYELFTWVLWYAAGDHSEQFLLSELVVEIEARANAAAGERHVDFDDYVHRQAMVRALRAHERLGTLRRIDGDPNAWMNRGEGGNGLYEFGPLAYRWLVSLRREGLERLLARDDPATEVAVETDLPPRVRLYRGLLLDPAVYRADDPEAFRLLLDRHERRRIADELFDVTGWELEVTGAYASLVRPNGSAGRHGELFPARRARTDLVLLICTAVHEAVNGSEDVEAPGGFGRSAPAKGIGAAWRCGEPDNQGCVVLTEAQLERLVVALADRYRTYWGTTLAGHSTAGLLREVLEEMRTWDLLRGPDAHGCYRILPLASRFRGQYAEEPAEPEDLGREPADPSGGGRP

SEQ ID NO: 38888 - protein, 383 aa, Thermaerobacter subterraneus DSM 13965
MTLGVRDLATGEELLVERLEELNRRSGAARWRPRRLILINWWLFDEQVFHFAQGRLVLHGRNASGKSTVLAAAITLVLDGNKSPERMDTFGGRGRSVRYYLVGDPDATPESAFYHESRTGYVALEFQYGASARTLTVGVGLYTHRNRPGGEVDFWGFSIEDGRRLGVDLALYDEQRVPLSWRALAERIGMGGRVVRSVAEYKRLVNRLVFGFPDEADYDDLLSLLLQLRSPKLNKDVRPSDVCETLRTALPPLEEGLLDQVSSTIERIDDCLDRLAETDEQARAARAVDQALGNYLNYVAQEAAVKFDAARAHRREVEARRDVLEAHLTTERARHRSRSALHERVRQRLAVVEEELRTLQAHEVFRTEEDLGRAREELARARQ

SEQ ID NO: 38889 - protein, 493 aa, Clostridium sp. HGF2
MELYDKLLKPITEVNYLRAENVDRYRIIIRYFYQEHEKIHYWMFKEDIYDMISALPGYEDYTMENCQNDLQALCDWGNLVATQDTSVPNTLQEFKNKKFRYQLSEYTVVIERMTIDLEHLAVEGASLEPTLLERIRKQILQLLAVRDKSNMEVADWWRSLNDDFIRLNQNYQDYIKTLNSAKAEQMMKSREFLVFKDKLITYLQTFVKSLQEHGMIIEDYLSGVKDEDMALIFDKVAEYELSIPRINSHITKTAVLENCQGRWQSLFNWFVGENDNNEVNRLFEITNEIIRKITRYALQIGELHNQGANRKEEYRRIAEIFAKCNTMDEAHRLSALVFGADTCMHLKNIASRDTDSIHSGVYQEASAFLALEPRTKVARKKHERKPATDYALDRRIQRLEYEAQREAEQKKIKELSKNGEIIFSQLPLLDKATRKALLGWVSKALAASDRRAKTDQGQHYHIEKEREGDCILHCEDGNLVMPCFKILFDEEQL

SEQ ID NO: 38890 - protein, 376 aa, Clostridium sp. HGF2
MRIIEELMNRRWILKSQDPQLYYEIKDNAKELKKKLQEKFGYALIINPYLVKLEKIPGKAEGWMGITEFETLMEYQMFCYLLMLLEDKEAGERFILSNICEFIQVQLPKGELEWTSLRARRQLVRVLQYALKMGMIISREGDEDYFLKDETSDILYENTGVSRYFIRNIPKDIMDFHEPEDFLQSEWFDMEEDRGIVRRQRIYRRLMLSCGVYHTAEEDKDDDFGYIRNYRRNIENDFQSLFPCQLHVHSSSAFLVLEEDCSMGKVFPKTHAYYDLLLIVHDDLRKRVKSSRLSLDQHEGITLRLEEYLAIVQRLIKKNNALLPKKYQIENRRVEDSAMDVCNLAQTLGFAQVQQENVYIYPVAGKITGTYAEVTE

SEQ ID NO: 38891 - protein, 1344 aa, Clostridium sp. HGF2
MSELISKWHMHRLGLVDFWYYVNEEFSFKDGHMLLRGSNGSGKSVTMQSFIPLLLDGNKSSERLDPFGTRSRKIENYLLEEGGERTDRIGYLYLEFKRSDSEVYKTIGMGMHAKQGRPLVSWYFVIEDNLRINREVQLLDHNLAITKQVLKNRIGDTQVMDSQKEYMDRVNQALFGFETSEEYKEAITLLLQLRSPKLSNSLKPTMINEILSESLQPLSEDDLRPMSEAISNMDNIKDQLDALKQSYASAKAVYQVFEQYSHAVLFEKYHIYQTVRQTAANLHEAYQKYEEELQRHQQETKQKQENRTQLAQEQALLTEEKLSLATDDLQRLVEDCTRLAAEKEDTIQKLQHKETQEEEKSDRLQELRVQHKTQSDRCEQALSEMKEAFDQLDVLQEELLLEDHLLLKEEMFQHPDTPYDFTYIGKRLDAKLRLLEEGLQLFNSYDVAKSHHKQLVEELEQQKQTNEQQEHLVAQLDEQCDRIVEEYKERISQWSANNQHLKLTDEEFHKMMHLLMQYEEQPDFYKLTDIIQQSYQTLYKEIIHLQIEQKEMAETCRMNLEQKSAELHMWQTQKDPSPAIAGEQEQARQLLKQHQIESRSFYTLLEFDEQMDEELRALCEEALLRLGVLDAQVVHASSRSLIETLASGSGDMYFFTQRNVRDLQPYYLKGTTPEQLAGEINTVLTSLHITYDGKLQLHDAMFQTGIVEGKLYQSVSARYIGENARQKYREQMILQLQKACDMLKKEYDQEMQKLTDLDKRLEQLEQEASAFVKEDDLHLALQQLNEGRRILQHDIACYHQMEERLRRHLEAMQGIEKQLRETAGKLSITLRRNVFEQQKDGYNSYRKLLQLVQTKQPIFIQSLDFVKSCETQIEDAFRDVSEFKAEIDTLRELIKKQNLLLQQKEKQLKDLGYEDKQKRLQQIEERLHKLPDLMQELDTRLGQLQSLVAATSQDLERTKQDIEHQDALVSTYFDVVKNEAALGYTNIPLCEDGQLIKEIRNLEKQTEVLKKPEALKMDLQTAYYNHRSNLQEYNLTFTTDDTWEELTDISARLDINARYQGTSLSFPELLDCLQRDVDLQNNLLVDSDRHLFEDILVNIISKKVRIRIQNSRAWVDTMNRYMNAMNTSSGLHLNLQWKSKKAESEEEMDTRQLVEILQKDVKVVKESDLKRLSSHFRSKIAAARNLQNIENNTLSFHQLMRQVMDYRTWFEFKIMAQKTGEAKKELTNNTFYAFSGGEKAMAMYVPLFSAVAAKFESAREDAPLLIALDEAFAGVDEKNIYNMFDLISKFKFDYIMNSQVLWGDYASVKGLAIYELFRPENARFVTVIPYEWDGHIKRMKGDLS

SEQ ID NO: 38892 - protein, 427 aa, Clostridium sp. HGF2
MIEDAFAQYLLQDTGFRRVTDLWIRQYQKLQHFGGTICIKDPEDDEREAIGGLLGKDYWGVRDISIPYSVWEKAIEDSRFAGSDFLRVLEIYKGESILTNKEQKEIKAQKEQQDMQSLSKRYACTKAGEWLNWMQETNHKSYGNIRQLLNNNKWQTVCFILDAINQLPVWKQEIETMAVFASAVTQDPHFFDKGIENTLLFQGICYFLNVEEQDISLAEKNKLYYEAGLLKDDLSNSCMIAHLNAEGRDGKVHEAWKGFFDRYEAWTVSLYNLQQIHNISDAIKAVYIVENPSVFRSLFLEGKRLGKEQIGFVCTNGQLNLCGYVLLDLIQKSNIPMYYAGDFDPEGILIADRLKQRYKDDLHLWKSTVEDYHRIMSTSSIREKRLLSLQNCRSEELQALCRELEKHACSGYQEALLSLYIEEIKNS

SEQ ID NO: 38893 - protein, 550 aa, Intrasporangium calvum DSM 43043
MLRHARAAGVAVGGGVYSGGVTDQPSADEPGGTQVDRVRLEALRYAVNEESATYIAVMRLFTGGLAGMLSDQSAAEVSARLAEQGIALDEDTVDARLAYLVEHGNLARSPRESEARSLQDYLRNRARYQLTQRGELVQRQVDELLGHTETATEVSSEMLGAILAGLRDLARLPADVRELDPQELAQRIGTIFAQFDRLVHSTREFYTYLTQVLSRFDLERGEFQAFKTALIDYLQRFVDEIARHLPQIAEVIEQLRPGIPQLCARANAGQRLVDLEGRAAKRAPGLDPADWNGLIAWFTGSSDRASDAEGVRRLATEAMRSLLANLRRIVTSHEREHGRHAELLRLARWFDDADDTTAHAIWASAFGLYSSRHLGFPVSESEDAVPPTMSWVRAPRAEVPIMLRSTGQRRSAGASGRPEDFSQTKARRLEEHARADAARRRAVAEVAGHRGRLDRVRLSDAGREALMELYAAGLALAGSDNTGSAGSRTGAAVPIPGHDAVLLITSTPGAGTVVVSPSGRLRLVDRSLAVEAGAGRQVRDEAAGGKEAVS

SEQ ID NO: 38894 - protein, 421 aa, Intrasporangium calvum DSM 43043
MSADAGTADRLARPPQAEDAQDTHERRLAARALLRRPLMPVGHGHDDELRLIRRHRVSLTRFFAEALGYRLTVDPAGARLYKTGLGRDGSRPLLRGRAGVPFTPRAYAMLTLTIAALTRTKSQLLVDELVAGVRSTAVEAGVDVDLDAIGDRRALHAALLALVRFGALSERDGDLEHWAEERTQSLLDVRRDVLGLLVAAPLSTLESVDDLLAPAKVPSAAGGARITTRRRLVESPILTTSDLAPDHAEWWARNRNREREWHLDQLGLALELRAEGALGLDPDEELTDVEFPGRGRTSHLALLLLEAMVEDVRPAPDPLGRAGPSSSAWHRIGRGRIDALGRPLLATWAAGLRRDQREDPSAAVAESLRLLESVGLVRPEPDGDPGEWQVHAAAHRYRPVAELAAASGRGEASLFDLEGES

SEQ ID NO: 38895 - protein, 1383 aa, Intrasporangium calvum DSM 43043
MNDERPQRFSLSRGGVLNVWQYDDQVFDFGGGRLLLRGTNGAGKSKTLEMLLPFVIDGDKAKITASGRHHTSLLWLMLDGYTGANRTGYLWVEFARPTADGGSETLTCGIGLRASDSARTATTWYFTSPRRVGVDLHLTDAAGPLSLQRLRAEVETDGHFFDPNATRRYREHVGQLLFGLPLDQYEDLLRLLYWLRQPQVGEDIDPKRLAEQLVQALPQIDESALRSAGDTFDQLEEFGEQIDRQERAAAAIGSFLQSYRTYARGVVAERAQAVVDAADVERRARREVRRLERAVAETLDGLDRARAAQHRAESELADAAARITQLKAGPEARAQAQLLALDDHLTTRLQLADQAERRLVEQQQRVSEAQRRATDAAVDLVAATTEWVSRARTVRAEGADAGIVGPLARVAHLAIAEPDWRAPDSVVELRAALAAAPEELLDVRDRVGVARAAVKVVDAARARAEDLRSDAVRREEDSARAETTLAGRQARHDEAVTATMDATEQFVAALTTWLEMTAAVPVPRPEISAAELGAFGAVVADAVAPVRAEAEQHRADARTRLAAAEGDQEQVRAERAEVAAERDPRPAPPVWRRDDRGALEAIGGAPFWRLVDFRDDIDAPTRAAIEAALEGSGLLDAWVTAEGRVVPEAEDAFLIDVSPEPQEGTGRSLAAVLRADSHLPGAVPSDVVDAVLSRVGLVDDLRSGAAPDDDSLAGGPRADHTLAHVRIGLDGSWWTGPLVGRTNKERAQFIGAAARDAERSRRLAALDGRLDELGRTIAVAGAQVQLHTATLQSLDAWHRARPSHEGLLTAWAAEQASATAVDEARAELAAAARLAQAARAAAAVAHDELVRLGQIHDLPITAQGLHARDERLRAILDQTRDLDDRRSVLERDLAEWEERGRFAVAERERLDEAADDDERARTEAATAAAELDELRASAGASVAELEQRLDELAKTRDRADAERREQVRQVEQLVRASATLESEHRTAAHSLGEATPRLGAAREGLVRLERAPGVIASATTEGHVAVEASSAAYDHWTPDEPRAILAALGEGGCSDDTPVISASQGLLASAAATLEPRLAKVEDVWVAFGLGEGGELPLVALELQLSATVRANRELLSQRERQIFEEQVLGYLGDALRGVRLKAEELVAAMNSQLRGVTTSQGIRVRLRWRQRDDIAADAKRAVELLGQPVGALLPSERIELRESLHRLIDSSRSEAPEESYAEHLSRALDYRRWFAFSVQYHRPETGEWRDLQRKSALSQGEQKVLCYLPLFAAASAHFTSLAGAAPHAPRFVLLDDAFPKIDARTHPLLFGLLVDLDLDFVVTSERLWGTHATVPELAIYEALRSPGERGIAQFEHRWDGQLLTAVGARGPAASGSAGGGDG

SEQ ID NO: 38896 - protein, 472 aa, Intrasporangium calvum DSM 43043
MAEPAPQWLHGDRLRRVWDHVGDALERRALQPRGTLEVAGLSRDERHALSDVVGSPVTGATVRLRLADLDHRFRARTGRGVAEVVTWVTGRVLVDRAAQRRDAIALRQGPFDAAREWLLKELPGSSGSGPGAPVSGPGAPVSGGHAAGAPQASVGLIPAAATGWVDDWLAALRRDGVLTAGSDSTSVLITALRVLEGCGAFGNGPAKAHARTDLAARITGSSHGLDDGSKVALVVLRAAAARSGTRLPRSASERRRLWEALGVVVDRVSATCLVWNITPAPMPAASTPRLAGPGLSGTAAHRTDGGPPAPGAADARVAPRHLTWWDLDSGVAFLKEQRILVCENPRILEAIAERGPTAERIGLVCTMGRANLVVREVLRRLVTSGAVLRYHGDFDWAGVALANSCLAEFGADPWLMGPDDYHGGHGSEPLSGRPIEADWDQELAAAMRARGVAVHEEAVLESLVERLPELWS

SEQ ID NO: 38897 - protein, 494 aa, Lachnospiraceae bacterium 8_1_57FAA
MRIQETVRKPMTEAKYLNVDNTDRYRPIIRLFYLKYEKLKYWLYQEEVYEELKEDAYFREYTPEQCQQDLAALTAWGNLVTIQDTRKVATIEEFKNKKFRYQLSEATVEIERMVIRVENLFIESSSLEPTLLERLRINLRKISEITEADQEHIYAWWNDLNNDFIRLNQNYQDYMRELNSVKAEEMMKTTEFLVFKDRLIEYLRSFVRSLQVNAAFIEQCLKNTDRQVLRCLLEKIIQYELLIPRIDVEVKEDLIADKVYGRWQSLEEWFTGTDGKDSEAAKVFDTTNEIIRKITRYAARISEMSNAGANRREEYHKVAVMFSKCKNIFEAHRLAAVVFGIEKPLHLKGLPWRQTESINSGVFEEEPYIVTVTPRIRTYKEKAKRSGIVDRSKEKEEMWLATIQRLEEERRLLKSYIQDNRLEFAKLPEIEPHVRDVFLTWLSKALENKSLQGKTEDGQVYRVEKSDTEEICILKSSDGNLQMPAYVIVFEKNE

SEQ ID NO: 38898 - protein, 1236 aa, Lachnospiraceae bacterium 8_1_57FAA
MRALEILLERRWILKSREKELYYQIKDELGTVKKFLMEKLGYQVIVNPYLVKVEKMPATPENWMGIQEFTRKIEYVFFCMILMFLEEKEAEEQFVLSELTEYIQGQYREEQIDWTVYQYRRHLIKVIKYCVNCGILNLNDGSEENFARDDTSEVLYENTGVSRYFMKNFTQDIMGYTTPEDQAEKESLSDSDTVKLKQREVEIKSQLEGLKKNITGKQRQEEEKKEKYQETEQKIQLQFQKNEMLWEEIENSLEYMEEEMAGVPFDEFAFMKKELTEQKGEQYSFQAHSELLKDYMTKVRLGKTTLEEEKGCQERYSRFLQELDSYQEEKNKAEREVLQYENQFHEVKQETIESVYRWEKENAELHLQSDLLQEMAREIEKYTTETDYWNIRGLANGEFERKSQELSGKVLQQSRELSDRRLEKDGICEELEQWKNQKEPEPERSEAVEKNRRLLKEKGIPYLQLYKVIDFDGKLDETQRAYLEEALLHMGILDALIVPEEYREQALALDAGVCDRYIFSDAAYVRNNIMDFLDVDNEEGDILLYQNVSRILTAIGWKEQDEETISESIEKNRTWIDKRGNYGIGIIEGTVTKNYTPCFIGAYAREQYRIKKIQELEAECRRLEDTIQIAEDEITQLKQRKSCLETEWKSFPKEQDLKVAAKELEKKTNILEEIECKVQIQKGIVEKERKSLDAVRLRVQEVCQKCYLPPRLDVFTEAEESLTEYKEELMKVQISYGNYRNGISSAKVQKEYLEGIDADLDDIRYDLNHMIRNEREKRGSLNSVMEQLALTDYEEIRERLEHCIERLEKLPSEIEASVTQSSHLETKEKQFIEKLGDIEVSVGKYRQQKDRFCTAFEMEYQLGYVECPFAVSDDAEERAEKICRMFMGRFGNKRHSEILENLQNVYHMNRGYLLEYQVTLQSLFEELDEESGVFDTSMRRIDISAKYRGITIKFKELIARMKEDAEVQRRLLSDKDRELFEDILANTISKKIRGKIQASKRWVEKMNTLMESMKTSSGLTLSLRWKNKRAEKEEQLDTRELVELLQKDAEIMRPEEAQQLSGHFRSKIEEARKSANDLGNVQSFHAIMRNVLDYRQWFEFQLECQKTGEKKRELTDRVFFTFSGGEKAMSMYVPLFSAVVAKYAGARQDAPYLISLDEAFAGVDEMNIRDMFRLMVKFDFNFMINSQILWGDYDTVPALAIYQLVRPENAKYVTVIRYVWNGNIKSMVTEKDLSHG

SEQ ID NO: 38899 - protein, 431 aa, Lachnospiraceae bacterium 8_1_57FAA
MDKTETNDLLEECMLYFKARPVYKKLFLKMRDKYAGLGHFGGTAMLTSLSREEKSQLGGFFQRDYTSNKTITISADLMKKCLESSKFAGLTWELILETYFGEPLQVKKEIELAESKRREDYFAEILESISDESGREWLRSILEEKKEGYLLITQLYKESPEELRSILTYVTTGIAKLKVFQDKKQKELLAVFSANVTGNPHYFDEGKTGEKLLFNYLGERNFDLKQEGLSRAEYKNRIYYEAGILKDEVSNDALAYGIHGWKPDGGLHEGIEGFLENREPVKLTLQTIGRLEKVCGQSSQVYVVENPAVFSVLIREYPQRTVICGNGQLRLAVLILMDKFSCDTVFWYAGDFDPEGLLIAQKLKIRYGERLKLWKYEADLYETYLSEVELSDRRMKKLEQVSVQELQEIREAMYKKRRSAYQESMMEALRK

SEQ ID NO: 38900 - protein, 494 aa, Thermoanaerobacterium xylanolyticum LX-11
MTDKINFNVIKPIDEARYLTADNASRYRLIMRYFYQNYERLRYWLTKEDVYNYVKSFDLFYDYTLDKCEQDLKSLTEWKNLIAEQDTGRAQSAEEFKNKKFRYMLSEYSIEIERMTINLEKIKGYGGSLEPSLFQRLYESLKKIDDISKSDDLEAVYRWWKDFTSDFENIYHNAIDYIASLQSSNADELMKTDAFLIYKDKLTEYLRGYIKDLQRFSQVIVSLLNKLDKKSLEDIVEKLLLYEENIPRLDKDFDINDVKENILSKWQNIVFWFRGNSDEDSEAYRLLEISNEIIRKITMYAARISENRLKTASRKSEYIKLSKIFANTDDINYAHKLSSVVFGVFHTRHLYGDFDKKTESINESVWDDMPCKFLIRPKTRNYTQSTKTNAIIDRVEEKEMCLKQYLEERHSEIEEISKYIIDGKIVLRELPVIKPFIRTTLLNWISKSLNQPKNIAKSEDGRTYKVSISRNKTIVLKCTDGILEMPDVTIEFLN

SEQ ID NO: 38901 - protein, 378 aa, Thermoanaerobacterium xylanolyticum LX-11
MEELKILLENFWVTKDDTEMFNRIRDNEKKLRSFVEDKLGYRLIVNPFLIKLEKIPGDAEKWMGIEEFQSSMDYAFLCLLLAFLEDMGIGDQFILSNITEYIEMQYEGMESVDWTLFKHRKSLVRVLNFAEKMKMIKVDDGEHERFADSRDVEVLYENTGLSRYFMRIMSSEINEEMTLEDFIKDDRYEDNKVLERRHRVYRKLLLSPAVYYEGTDDQDFIYIKNYRNTLEKDFDDYLDAQLHIHKTSAYIIFDENKYASSYFPDNKNISDIVLQIAYVLRDMMDSGSLNVGIDDRIEITEGQFMNIVSYVKSRFKSGWSKIYTDMSDEKLFDEITEFMKSWKMAIYNEDTHSYTLMPILGKFIGEYRNDFKGAIQNE

SEQ ID NO: 38902 - protein, 1389 aa, Thermoanaerobacterium xylanolyticum LX-11
MNDRWVINRAGLLNFWYYDDEVFEFSGGRLLLRGSNGSGKSVTMQSFIPLLLDGNKSPERLDSFGSRARRLEDYLLGEEDVNGIDERTGYLYMEFKRENKDNYISIGIGLKAKRHQSMDFWGFVIKDGRRIGIDILLYKLETGIDGKRVKIPLSKKELKNYIGSGGEVVDTQREYMELVNKNIFGFSNIDDYDELIKLLIQLRSPKLSNDLRPSRIYDILNASLSPLTDDDLRSMSETIENMDQIKLHLDSLNKNMKSLKKLKNEYDRYNKFMLYYKADKLLVQKSELSKVQKQSDELLQSIEKNNQDVFQGEDRISELESELQALKNKEIQLRKNDAFNTQRELVEEENILKQFRKDRDLKEIQLKKKKEKCFQIEEELKELYSREYSIDEKIKENLLDMASISEEVNFDEHSFSEEELKKSYGKDFDFDFWSNSLKEYTGKVKKALDAINDEVDANKKYNDALLEEDRLRKANEDWKRKVNEIEILLDEEKNRFIDKIYDWSDTNRFLKLNREKIEELSRIVLSYGKTSTYEDLISFVRKPYEDIREKFQMDLIKVKNELDLRNSKLDEKEEELRKWRETYDPEPPRNVEVIENRNRLDKAGIAYVPLYKAIDFKNDIDDDTKGNIESALMDMGILDALIVSRSDIDRAMKMDKDMADKYIIPGTFNMKLNVLQYFDVVDSNSGVGLDEISDALSNVFIYEEENATYVNDDGTYGIGVLKGKAVGNVKSRYIGFESRRRFRDEMISSISKEIDAIKGEIRELNDRQLSIKSQLSDLDVEYKNFPGKDDLEEALKELKEAQSNQKFTEIKLNDATIAAKKLFDVLQEKKAIVRKLTSGIGIHADAKSYESALEQLDEYKNLLQKLQINYNSYITVLRSAETRKMQKQDIEYDIDNYKFEIDVLDAKIKNSIEKINVLKETIEKLGIEDLQKELLQCIKRIDDIPKEINDLTAKTAALKERVVLQEKEYERLKEEIRKNQDILNIYHKGLKDEIIFGFVDELTDIDDMYKAAKTIQSQYKEMFAKFDKDSATEKIRNAFYVCINELVEYGLSLDVVEIEQTDTDIDTYQEIYKDLRRYQITAKVNDKKISLYGLYNMIDEDIKINENLMKEKDRQLFEDIIMHNVGRKIRSRIFKAEEWVKKMNELMSQRDTSSGLKFQLEWKPKAATNEQELNTRELVELLKLDADMMKEEDFNLVVNHFRSKVESAKKIYEENSNTDTFHQIMKSILDYRDWFEFKLYFKKEGENRKELTNNAFYKFSGGEKAMAMYIPLFSAVYSMYQSASSQAPKIISLDEAFAGVDDNNIRDMFKLIEDLGLNFIMNSQVLWGDYDTVPELSIYELIRPKNASYVSLVRYKWDGKIRRLVTGIEKSVEEIDDFSYDEVAFTRSR

SEQ ID NO: 38903 - protein, 425 aa, Thermoanaerobacterium xylanolyticum LX-11
MKADDIAFFRRNKGYERIFKAIRDKYKSIGRIGGVIKLDDLTDSEKVVLSNHFKKDFSKRKSVNIDVNKFAETFLNTRFEEYSLMDILESYFDEKLTSKKEDMYQYENEKEKFFNKFLSEYEGTKCWQWLKSIYENKAIGVKTINQRYDSDRTLLKKDIKYVCDALNRLPVYEGKKVRLPVFSSHITRDPHGFDVNTDCGKMLINALATIFGFDEVKNSEEVAELLYKAGIVIDEISNFVTLKGLLAYSKDECNKVFEAAYECNEVLQIPLYNLSVLDKVESPSKKVFVLENPGVFLSVCDFIRKPVPLVCAYGQPRLSLLVLLDMLYKNGTDIYYSGDFDPEGLQIAHRLFKRYPDRFHFWRYDVEDYIKALSDKTLTESRLKMIDKIDMAQLKPLADKMRLLKKAGYQELILDDIIKDLLSMS

SEQ ID NO: 38904 - protein, 495 aa, Thermoanaerobacter ethanolicus JW 200
MEDKLDLNVIKPIEEVKYLSAENASRYRLIMRYFYEQYQKFKYWLYKEDIYEYVSQFDMFADYTMEKCEQDLKALTEWKNLIATQDTSKASTIDEFKNKKFRYQLSPYSIEIERMSIRLESIVGYGGSLQPALFERIYRNLIKINEMAKKEDLQEINRWWEDLNTDFENIYHNATDYIASLQSSNADELMKSEQFIIYKDKLIEYLRDFIKDLQRFSVAIESFLKKVSPEVVNSIVDKLCQYEMSIPRIDRVLNEEEVKEDLMDKWNNISFWFTGHNFEDSEAVRLLNISNEIIRKITMYAARIAENRMKAASRKNEYIALSKMFAKAGSIKEAHLLSAAVFGCFYTRHIKGDFERKTESVNQSVWEEPPFKVIIKPKTRSYSNSVKTNAIIDKSADKTEMLMDYLNQKNIEDEIIASCIVGNRIRIKDLPVVKPFVRATILKWIGKAIARNGFTGKTEDGRTYRLHMPKNGERAILKCTDGNLDMPDIVIEFVD

SEQ ID NO: 38905 - protein, 383 aa, Thermoanaerobacter ethanolicus JW 200
MEELQMLLENFWILRDDRENFNKIRDAENKIKPFVEEKLGYRLIINPYIIKLEKVPSDVEEWMGIDAFQMPMDYAFLCLLLAFLEDKGPEDQFVLSNITEYIEAQYDGPDKVDWTLFQHRKSLVRVLNFAVDIGIIKIDDGDHERFSESEDTEVLYENTGISRYFLRSFNREITEDMKIEDFLQEDLNLSNSKDAVIQRRHRAYRKLILSPSVYSEGPDDQDFMYIKNYRNTIAKDLEEYLDAKLHLHKTSAFVLFNDNKYLRSYFPDKNKNISDIMLQASKIIRQMIEDGKLAYNPDDTIDITEAEFINIILKVKERFSDGWYKSYREMSEKQLIEEVIENMESFKMIKRVEELHSIKILPMAAKLIGEYPPDFEKGEGADE

SEQ ID NO: 38906 - protein, 1388 aa, Thermoanaerobacter ethanolicus JW 200
MSEKLAERWMINRIGLLNFWYYDDEIFEFADGRLLLRGANGSGKSVTMQSFIPLVLDGNKSPERLDPFGSKARKLEDYLLGEEEVSGLDERTGYLFMEFKKEKKDSYITIGMGLKAKRHQNMDFWGFVILDGRRIGIDFFLYKMEIGDDGKRVKVPLTKKELKNRIGEGGEVVESQKEYMEMVNKYIFGFSSIEEYDELIKLLVQLRSPKLSKDFRPTVIYEIMKASLPSLTDDDLRPLSETIENMDQIKMHLDVLYRNMAAVKKLKNEYDNYNKYILYEKAGDLVKAYSDLYASKKEYDNLTKDIENYRSTIANLGNDIISLESEREALKKKEEQLSSGDAKRTQRELLEEENRYKQYLEDKSKKEEELRNKQDKYYGLERKIKNTEEQKYKLDKELQDKLEDISSIAQDIDFMEHEFSVSELKKVYGKEFDFTYWKNELKKHKDKIKRAINALREEIEANKRYDAALKEQERLKKEREDRAKKLEEAERLFDEQKREYVERVYSWSQGNAELKLLSSQLEGLSRVILAYGEDKGFDDILAFVRKPYEEILNGIQQEILRLENQREAKENQLHEKEKLLEEWKNKKDPEPERDEQVINNRKRLKEAGIPYIPLYMAIDFKEDVDEETRGNIEAAIEDMGLLDALIVPKEYFEKALQMDSNMADKYVMPGSFNMMLNVSQYFRVVDNEEGVSPEDISDALSNIFVSEEGGTTYIDSNGAYGIGVIKGKARDGVKSKYIGSESRKRYREELIKSIQEEIQAIKAEISAIDEEINAKKLRIQRLDYEYSAFPGKEDIEEAYRYLKTAKADYEYTSHKLDEQLFTVKNCFEDLQKKKAVVRELTSGINIHPDIDTYSSAYEYAEEYASGLNEVEILYNKYVLHISNEEMLLQQKQDLEYDIDNLKYEIDVLENKIQSSVKKIEMLKETLKELGLEEIEKELEICLKRLEEIPKEITNKSAEKAKLEERLQRSLKDLLNIEEEIHLKEKIYNIVEEGLKRELALGFVKQDVEMEDMLKLSKSILSEYKGFFDKAGFDREKFTERLQNVYFETRNELLEYGLSIGNIFDEVYEGDNERIKDVRSKQRRLNITANINGKVVSLYTLYSNIEEDIMANESLLRETDKILFEEIIMHNVGIKIRAKIFKAEEWVKKMNKLMSERDTSSGLKFSIEWRSIPASNEEELDTKELVDILKSDADMLKKEVFDKVVNHFRSKVERARRAMEEKNNTETFHKIMKEILDYRDWFEFKLYYRKEGESRKELTDNAFNKLSGGEKAMAMYIPLFSAVYSRYEGASPTAPRIISLDEAFAGVDDTNIRDMFKLIEDLRFNYIMNSQVLWGDYDTVPKLSIYELVRPKNAKAVLVMKYLWDGKVKHLILPEKEEVAATEVGAINE

SEQ ID NO: 38907 - protein, 431 aa, Thermoanaerobacter ethanolicus JW 200
MNKEELKYFKEKKGYKRIFEGIREKYRSLGRLGGVVKLDNLTEDEKEVLTNHFKKDYRTKKSASIDVAKFEESLKNTRFEEYTLKDILEYYFGEKLTSKKEDMEIFAKEREEFFKELFSKYQECKCIDWLKSLYEGTAVGVRTVNQRYLNDKAGLKKDIIYVCDAINNLPVYKGEKKRLPVFSSQIARNPHYFDSNTEAGSMFINALCTLMGLNEVKGSEEISELYYNVGILIDEISNYVTLLGLLAYEGDTENQVFKAAYESNQVLQVPLLNLSKIERVISPSKKVYVVENPSVFTSLIDATNKVFPLVCTYGQPKLSSLLLLDMLYKEGTEIYYSGDFDPEGLMIADRLYRRYKDKFHFLRYGLEDYLKSLSNEVINDVRLSKLNKIESPLLFDVAKEMKIIKKAGYQELIIDDIINDIKLIEEGKGEW

SEQ ID NO: 38908 - protein, 487 aa, Caldicellulosiruptor lactoaceticus 6A
MINSFQAPLLGKLKYFEYLTAPNSERYRTIMRYCFLCHLEYKNRLTKEEIFTFLKNFPQFADYTEQMCEQDLKSLVEWGNLNSIQDTSKTRTVEEFKNKRFLYELTPIGLKIERFLFELETQEDTKAELNPKHIEKIYFLLQQVDSVLQDPQKRAVDWWDELTRAFEEIEKSYSEYISMLKSYEAENLMIKEKFLDYKSKLVQYLYNFYVIFQNYLPKIRSTFLSLEAAKIEKLLNYIIAQEKEHPKNIFKDPESIEKNIKARFDNIKLWFVAPHGQAEKLSDQIQGLIRKVSDLAARLSEMSSVKVNRQEEYKHLAKIFSNLDLATCHKLSAVVFGVLLPRYIAAEEKRQSELASLSILDVPPMKSLLHSRGRLVREKSKVLPASEFSEDKKKRFEEYKKKIEEEEKLVAELIKDGKIEFENLPVLTPQVRKKLLVWLSRGLSSGFGNTDSGKRFKVVRPKDGRYCVLKSTDGELEMPAYVIEFVE

SEQ ID NO: 38909 - protein, 393 aa, Caldicellulosiruptor lactoaceticus 6A
MKSALLKLLSNFWILKEKDVESYYECKNIDKELKDFIVTKLGLKFYATSEMVRLEKVPLVPREYMGILEFEEPKDYVFFCLVLAFLEDKGRDTQFLLEDITQYIRSNYPYEEIDWTMYSDRRSLIRVLKFCEKMGLIKIDDGNQDLFVERADVDVLYESTGLSKYFMRTFPKSLVEYSSVEEILNSEFEFTNGLSDQITDIKRIKAYRGLLIDGIVDFESEAPLYYIKKQKTTISQDLERFVPELELHLFKSFAYLGVEGDYEYTYPDNSNLCDVLLLCSRELLERVEKGELRLSPAHEMLEISLDHFKLIVEDVKKKYGHFWNKEWREKSTDKIFEELLEFLHLHSFAKTNDDGYLVISPIFLRVVGEYQDFVANGELSLQDDGIEERVLKI

SEQ ID NO: 38910 - protein, 1350 aa, Caldicellulosiruptor lactoaceticus 6A
MSKENRWVLSRAGVFNYWYYDEDYFDFYDGRMLIRGPNASGKSVTMQSFITLLLDGNYHPSRLDSFGSNARKLEDYVLGDQGPGQKNEAIAYLFLEFKKQNIFVSIGMGIRAKRGTSPDTWYFVLTDGRRFGIDIFFYEKIGDQKIPLTRKKFENLIGDGGKVFSSRKDYMEEVNKILFGFENIEDFENLIELIVRIRAPKLSKDIKPDTVYKMLQESLPALSESDLRALSDSIENMDRIQTELKNLEIIKNVLERLKKVYDEYNKHLLAKSIFSVLESSKEYLNLKKEVEKDKADVEKNRELKAQIEEKIEELKKEQESLTLRLESIKESDIFKLQKELLNIKEELRELEEQKNKKLSQINSASQKLEKERQQLIALEEELEKYKRKIKDSVEEGKLLIESIGFQRFSETLDMYLLEQGSLDILKDELSSFLSQVEIALKNYEKLNEIKKDLDGLYRELDMNRAESQKVEEEIQNLLFQLEEVKNSLKNAISIYFEQNEVFKAQDEQRTAIFQAINSCEKKGDYGRIYSILDDIYNFHYLSISDTIRRLEFEIEVLNNQIKAKKEEIERIKSQKDDEIILSSQQKKVRDRLLQKGVPFIPFYMAVDFKDGVDEKKKAIIEDALSCLGILNALIVPEKYKDVLSDLLDDEKEMILISKPAYFSHTLNQFLEVANFDGPIELKQEVAAVIDSIFATEKDEGVYICEDGRFGNGILKGRTTTCENARFIGIENRRRYRQMLISQLEDEVQKLSVELDNKKQERNAQKNLVEKLKNERDSFPSLVDLDTAFEMIEERENQKLKLQKEIEFLEKKTRELLSKENSLKHEISVIATKLSVTAAKDNFLKLAQEAQKLKSVLVDLENEVEKEKLVSRTVTSKREQTLQIEESLQNLSFDLQSLKTRWESLSLKKAEIEKRLSSDDTQKLFEEQQKAIERLDSIPKEIESFNRNLQEVIAKISRLETLIETKALQLEKAKMEYTNCLEVLKIELSFGFVWKEENLEDETKLLEFAKEKSSFANEFKSKDLNQVLQRLISAHYEAQVQLAEFGANLNLKEDNKTGYARYLWTAKKDGRVLSLYEFLERIDSEIIEKKNLITQQERELFEEVLAKDIGFKISRKIMLAQDWVKRMNELMDGMDLSGNLKFRLSWEQKKQELEDELSTSELVKLISKDPATASDSDRQKIVKHFRARIERAKRLQDSPDSFRSLYEIMKEILDYRQWFEFRLYFQRGAENRRELTNNAYDKFSGGEKALSIYVPLLAALCAKYQSAASFAPRIIALDEAFAGVDENNIEKMFELIENLEFDYIMNSQILWGDYKTVPGLCIYELISDRSKGCVLKVKYIWNGYKKVLVEL

SEQ ID NO: 38911 - protein, 420 aa, Caldicellulosiruptor lactoaceticus 6A
MKEDRLLQECIEYFSHKGFARVLELIYNKYRSLGRFSGRIVLENLQPVEKEMLSRYLGRIVSGDRVVINVKEFAQKRFEQTKFSSLDFKDVLSHVLKKDVLTKKEEKENREKQLSSFLEKLKKQVESEPAAEKVYLVVKENFKQFEGYLKKYSEEKFLGILNLCIKAAATKPEKIESLAVFATKIAHDPHFFDEDRDSGKIFLRILSLLKNAEYPKSSEEKAELLYMHNIIIDELSNWCLVYGIGAISEDAAEDEALKSFALQRKPVILPLYTIKDYKQFFGYSKKIVVVENPAVFSMLMQTCSDISLICTNGQLRLSTKIVLESLSKEGFTIFYSGDFDPEGLLIADRIIQNYGAVPICMDEESYLLSLSKNKISQKRLVMLRNVKSPELFDVCSKMRELKLSGYQEKIVERIVERLKS

SEQ ID NO: 38912 - protein, 494 aa, Pseudonocardia dioxanivorans CB1190
MSRTEVFAYVTESPDYRSILGIFAGTFFAELTPEDVAARLAATGIELPVDTVAVRLESLRNWGNLEVSASVGAVSTVADYYKRRNRYLITRVGQEVHELVENVLAQVDDVRDVSLGRLDVLAAALEALLRLDVRAASPATLADAVRAVFDPHRAFSAEITQFFAAINQWQARFDLDESEFAFFSEVLVGYVGERLESLERKARPIGRLLAELEPLIPVVVARARDGLAARVAEAGLTDVQVRSGQGGTPADWENLGNWFRGRPGVPSRVATLGRDAVNAVRTLTQNLTRLSRSGVAGSSRRADYLRLASWLDAAPRERPHELHRLAGAAFGLFGSRHLGGTPGDQDDPVPSVTSWWTAPTADIPVSLRERGDTTNRGRSGQVADRSVQRAHLLARRRAEEEATAAARAELLAAAASDGTLASGTAMSTSALRALQRLLGPAVAAMGPTGEKGEAEADGTRCIVERRAGEATTVSTPAGTLVVHELGIAVMAADA

SEQ ID NO: 38913 - protein, 374 aa, Pseudonocardia dioxanivorans CB1190
MRDDPHRPAERIAAARALLADPWRPAETDPSLFQLIRRHAEVLDRWFTQRLGYRLVVDADTARLTKSGHLPHDRPLRTRTGRPFTGREYVALTLVLAATAAGPDRISLRDLVLQFRSAAADAGITLDGGSAERRTLVTALRWLIERGVVRELDRSVAAYESDGRSDALLEIRNDRLLMLHTPALVGAESAAELIERSTDPGGRAALRRRLVEDPVLYADDVSAEDWAELRRRVGEEVRFLDEMFGLRIEARAEGLAAIDVDGGLSDIVFPRSGTTAHVALLLLAALRDHHRDGADQKALDDEVGHLVGRYGRFWRKDAVADPTALRQEAVELLRAMGLVAVDAAGIVRPKPAAARFAPAVVVDDEDDDPPMMLL

SEQ ID NO: 38914 - protein, 1355 aa, Pseudonocardia dioxanivorans CB1190
MTVVADARWRPSRAGILNVYQYEDETLHFAGGRLLLRGVNGSGKSTAMNMLLPFLLEADTRRIDAAGEQTGVLKSWMLADNDETQRTGYLWIEFARPDPEVAGGTRHHTVGCGIRANRSTDRATTWWFSTPRRARIDFALTNGRVPLAVDALRAELGSEAVFAQSQVREYRAEIARRFFGGADPSGYFALLHQVRNPRVGDRIDADLPRRLLDALPPVPEDAVADAAQPLEDLESHRLNVRALAQTDRALNSMLETYRHYARRVLRAADQRTAAAVTTARSALQLRGRLRAASDAADATEARLRDEVGQLEREHATADSTLAGLLDSDAYKQLAALLARRDQVRSLESEADTVEEVRNEAARRVRAAVDLVRSRRGRVDGDLKMVSDDLAAAARHGRAAGVVAPLPDAPALRTRTLRGGVEGPEPDAEPLAHVTTTVVSDAVRRRRVDVARVSDLLAESEKQTEAASRAEREARAAEQMADEARTAAAESRATAEAAGADHRAAVAAWWGRLTEHVRAIPPANPAGSASWLTVPAAVDPGGDELRESARLRLAGAAAAVAETETELEPALAAASLRRERATADVAALNRELVEVREARELPLTRPVWQGAEPPDAVLFASVVDFLPGLDDGARAALEAACEAAGLLTATIRADGELIAADGELLLGPGPAVEPNLAEVLGAAPPEGVDPAAVAAALTRIGLGASSAAALWVAQDGRFGAGPLRGRHRKPAAELIGAGSRAAARLRRIAELEADLAVAVDERRAHQQVHDALVEWRRVLRGLGGEIPDARRVDDTAAVAAGAVQDAVRAGERAARDRTLAIEAERTAERAWATAETGAAEAGLRLEAEALDEIRGALVETDAVLRRLPDRVDTARRSLEDWTSAVDAWEAESERLEAAQDRAVEARDRATAARTALSATEASLGEEPERVAAQVEAAKARRDGLAEETKARRAAHNQAIGAAATARSTALSAEGEVERSEQGCRDARAALLEVTRVPGLFSAARADDTDDLPDLPDTVEGAAQLVAAVRAAVPDPQRPVDEDALDRSLRGVRDSLGAGWDAGTSRFGDGAPVAIEVSGPYGRRVLLAATEQVAADLRRSQGLLTAQQDQALRNLLHGRVAREVARALFEADELVRGMNTILRAVTTSLGIGVRLDWRHRGDLDPDTATALRLMAKDPDARSDEEDAAVRVAVSGLVEDARAADTDASYRDVIGRVLDYRSWHELRVYLRRPGRPDELLSRRSRLSEGEKKLVTYLPMAAAASVSATAHDPNGIGAPRLIMLDDAFAKVSEDNHEGLFSLLVGLDLDFIVTSERLFGTHASVPELAITEVLRDADLRTIALLHYHWDGRQRTELATA

SEQ ID NO: 38915 - protein, 401 aa, Pseudonocardia dioxanivorans CB1190
MTDFLAVSELTPLWEAVRAALDRNGLEWRGRLALPLLPAEGRRRLGVLLERPIPADRRSVPLAELAAAVERLSRTDLVSALTDLGHRPSGRREARLAHQEATRLRRAAVDTAVEAAFPDATWAVGWGDSAWTDGLFARQSPEEVRTLIMDTARVLRHAGTGRSRTELAALLLGNAHALDSSERIAVLVTRALIARDGPESERVVWERAGMPLDLVSAPVLTWGLPLLGEGAVAQSSRAMRGAGLPLHLSTVALRAEPLRVPDGTRVLVVENPRLVEAAAQRRLPAAVMCTNGNPTTAPSECIAGLRSSGADLRYHGDFDTAGLAMAARVAASGCAPFLMSAKDYRAALVVASSNGVELPRDGGVTPATPWDAALATAFEASRLIVHEERVMDDVLASHAAR

SEQ ID NO: 38916 - protein, 504 aa, Rhodococcus equi 103S
MSDSGDPRASAADVDFAVREDRLRLFSFTTAEKRTDYLWVMRAFDHARANYVVLLHAGEVADILARIADDDPSGALTAGEIPPLLDQLHTWGVLERSYDGSRAATLAEYRNRHFVYQFSQAGYLAFRAVEDLLGARLEDATLSRLALPDLLSDLEELAQANRCGDGDLIYRKLARLDSTLTDMAARAAQFYLMLGDLVRTTEITPEAFLSHKDALLSHMREFSSDLARYAPKLGAAIENVEATGIESLITRAAASDDRVFLSREERESDWRARWSGLAQWFVAAAGPSESDRLREGTMSAIAAVLSLLRRVTEIRRGGVSRESQLRHLAGWFAATPDEESAHALFQLVFDLGRPRHLSMVHPDADIIPESRSWWDATPVEISRTLAETGRAAQPGMPSRMQRNEGSIRRLREEQLAAQRARAIAASSLAASGAYDRVLDEQETDVLLSLLNAALTARVPVTGSVPSSTGSENGVKLTLSPHGESTVVHTARGRLHLDGLRVSVR

SEQ ID NO: 38917 - protein, 470 aa, Rhodococcus equi 103S
MRNRSVSPLDLDSYQRAARVILSNHLVTQTYPDRLALPLLRRWATELRDDLLELFGYRLEVTETTARLFTVTDRLEPGAPARTGTDRPFDRHRYAYLALALAALGRAGNQVTLSELADHVASEATQVAGVTLSTDRAADRDAFVDAVGWLAARGAIVLADGDAGGWASNPDAGEALYDIDRSVVVALFRPPRALQHVTSVRSLLTGEPAPLDDDITAYRPTDARETARRMRRALVERPVVYADALTDDERLQLALPRTAADVEDLTGLVAERRAEGIAMIDPSGRMSDVRFPSTGTIAQVALLLAGEMADRVLDLDAAPLPRHPLPTTDQAELIERLDSAIPRSGIFEHLADPFESAESAESAGYAADDRDDPIEPARYALLDDDWVTGAVDELVLRFGRTFAAQWQADRNGLRRNAVALLDRLQLVRSVDGGVLVLPPIARFRGVVVNIRDRSAQSELFHGPVSAEKHS

SEQ ID NO: 38918 - protein, 1390 aa, Rhodococcus equi 103S
MASARFKPTRAGIINLWDYRDQEFSFADGRLVLRGPNGSGKTKALEVLFPFVFDGRIEPRRLNPFAGEERTMKSNLLYRGQDSAHSYVWMEFARGPQDDPEAVTVGIGMRASRQNDKVTRWYFVADGRVGVDFSLLGDDDRPLTRKQLAEQLGSDAITDRPVDYRAAIDARLFGLGAERYDQLINLILTLRRPQLAKNLDPKGLSQALTDGLRPLDEQLVLEAARSFSDMEEVGRALEGLAAADQAAQSFVTVYSKYLAQQARTDVEQVARRLESVDRARSVLDAAVALQSSRQEERLLAEDRFTSAERALEQARADLDTLQRSGAYEGKQQLDDLAAAVAQLKLSTEQQADKARKAQATLEQRTGEATRATESVRTATAALVRAETELAEAAEQAGIAWTPLPEGSRSDQIIAAVRGHAEERDGDVRAVRAALATVEKANTERERADRAADKGRELLEAAQAAVAEAEATVELARADCAAALRSWWTEHSADYAAIGVTADLFAALDKALAQAGDDDSPSLSTVLHEHVEAALDEQRARRREAAAAQAAATARIAELQTDRKHVAAEKDDAPARFASRTGDRSELPGAPLWRLVRFADDVEPVIAAGVESALAAANLLDGWVLPTDDAPADIESEQFLEPLPEDRRPQGATLADVLAVESDTGVPEERVRAILDSVSLDRDGSARDTHVGIGVDGRFWQGIARGRHVKADAEYIGTTARERRRAQRIDELDAEITAAEDARTAARAVEGDAKALLDTLAGAAKSLPRTGAVLAALKKLTEAAGALRTRSESTESSGQELDQAISDHTAKEKQLRAVAVAHRVSHHARDVDALAASIRHFESQGEQLLRCRREHEKELELHREAEDRLEEARGNTEEFVEEAAVAEENYAQQVSRLETLREALGASAEQIDADLEEARARIEVCKTEQRAARKAYDAAVEQIGKAEGAHNAAVEGLRSALTETRTDADRLAPYARRDLLDLLRVEGEHTWPQSAAAWLTPDQLVYRIVTEGDPDAPILPAEVAALYRAMDAATASVRTSENAKKSTRSALTAALQDFDAQLAAAGQDYRLQWDAPDGLTVVRVQDDQGYSSIGEFSTRIAAARQDQEVLLTDSERRILEDALLTGLAQQIHERTADARDLIAQMGAEMRERRMSSGSTIGVHWVLADNLDDTSRAVSKLLDRAPAALSADELATIRAHFAAQVRIARAAHPERSYPEILASALDYRRWRVFSFTLIGGDGSEDRLTVARHSALSGGEQSVSLHLPLFAAAHVMLSSADPHSPRLLGLDEAFAGVDDNGRSELLGLSVQFDLDLFMTGYDLWITYPGVPGCAHYDLAHSTAEQSVSAALLVWSGGDLLAEHDGSDLARALGSPLRRRVPATADGGLEFADA

SEQ ID NO: 38919 - protein, 494 aa, Lachnospiraceae bacterium 3_1_46FAA
MRIQETVRKPMTEAKYLNVDNTDRYRPIIRLFYLKYEKLKYWLYQEEVYEELKEDAYFREYTPEQCQQDLAALTAWGNLVTIQDTRKVATIEEFKNKKFRYQLSEATVEIERMVIRVENLFIESSSLEPTLLERLRINLRKISEITEADQEHIYAWWNDLNNDFIRLNQNYQDYMRELNSVKAEEMMKTTEFLVFKDRLIEYLRSFVRSLQVNAAFIEQCLKNTDRQVLRCLLEKIIQYELLIPRIDVEVKEDLIADKVYGRWQSLEEWFTGTDGKDSEAAKVFDTTNEIIRKITRYAARISEMSNAGANRREEYHKVAVMFSKCKNIFEAHRLAAVVFGIEKPLHLKGLPWRQTESINSGVFEEEPYIVTVTPRIRTYKEKAKRSGIVDRSKEKEEMRLATIQRLEEERRLLKSYIQDNRLEFAKLPEIEPHVRDVFLTWLSKALENKSLQGKTEDGQVYRVEKSDTEEICILKSSDGNLQMPAYVIVFEKNE

SEQ ID NO: 38920 - protein, 1236 aa, Lachnospiraceae bacterium 3_1_46FAA
MRALEILLERRWILKSREKELYYQIKDELGTVKKFLMEKLGYQVIVNPYLVKVEKMPATPENWMGIQEFTRKIEYVFFCMILMFLEEKEAEEQFVLSELTEYIQGQYREEQIDWTVYQYRRHLIKVIKYCVNCGILNLNDGSEENFARDDTSEVLYENTGVSRYFMKNFTQDIMGYTTPEDQAEKESLSDSDTVKLKQREVEIKSQLEGLKKNITGKQRQEEEKKEKYQETEQKIQLQFQKNEMLWEEIENSLEYMEEEMAGVPFDEFAFMKKELTEQKGEQYSFQAHSELLKDYMTKVRLGKTTLEEEKGCQERYSRFLQELDSYQEEKNKAEREVLQYENQFHEVKQETIESVYRWEKENAELHLQSDLLQEMAREIEKYTTETDYWNIRGLANGEFERKSQELSGKVLQQSRELSDRRLEKDGICEELEQWKNQKEPEPERSEAVEKNRRLLKEKGIPYLQLYKVIDFDGKLDETQRAYLEEALLHMGILDALIVPEEYRKQALALDAGVCDRYIFSDAAYVRNNIMDFLDVDNEEGDILLYQNVSRILTAIGWKEQDEETISESIEKNRTWIDKRGNYGIGIIEGTVTKNYTPCFIGAYAREQYRIKKIQELEAECRRLEDTIQIAEDEITQLKQRKSCLETEWKSFPKEQDLKVAAKELEKKTNILEEIECKVQIQKGIVEKERKSLDAVRLRVQEVCQKCYLPPRLDVFTEAEESLTEYKEELMKVQISYGNYRNGISSAKVQKEYLEGIDADLDDIRYDLNHMIRNEREKRGSLNSVMEQLALTDYEEIRERLEHCIERLEKLPSEIEASVTQSSHLETKEKQFIEKLGDIEVSVGKYRQQKDRFCTAFEMEYQLGYVECPFAVSDDAEERAEKICRMFMGRFGNKRHSEILENLQNVYHMNRGYLLEYQVTLQSLFEELDEESGVFDTSMRRIDISAKYRGITIKFKELIARMKEDAEVQRRLLSDKDRELFEDILANTISKKIRGKIQASKRWVEKMNTLMESMKTSSGLTLSLRWKNKRAEKEEQLDTRELVELLQKDAEIMRPEEAQQLSGHFRSKIEEARKSANDLGNVQSFHAIMRNVLDYRQWFEFQLECQKTGEKKRELTDRVFFTFSGGEKAMSMYVPLFSAVVAKYAGARQDAPYLISLDEAFAGVDEMNIRDMFRLMVKFDFNFMINSQILWGDYDTVPALAIYQLVRPENAKYVTVIRYVWNGNIKSMVTEKDLSHG

SEQ ID NO: 38921 - protein, 431 aa, Lachnospiraceae bacterium 3_1_46FAA; identical to SEQ ID NO: 38735

SEQ ID NO: 38922 - protein, 491 aa, Lachnospiraceae oral taxon 107 str. F0167
MEYFEPINETSYLSVPNAPVYRKIMRCFYREYEKMHFQIYKEDIFTLLKQDEAFRDYTIEQLMADLEALVKWKNLTPIQDPGRVYTIADYKNKQYRYTMSEYAVEIERLTVRLENIFLESGSLSTNFFVRLEKSLQNVGDIKDSSLKEINEWWSLLQEDFKRLNRNYQDYLRDFYSGKTQQLMKSVEFVLHKDKFIKYLNEFVQELQRHSKRIEQILTENIPLIEEYIVERVIESELDIPHAILQMNGNIEPSIRENVLGKWSSLKNWFIDNAGNECECKKVLKITNDVIRNIIQNAALIVQLQNGGISRKDDYRKFLELFLKCENLEEAHKLSAHVFGVQKIQHFKVLEPREKNSINDSIYSEEPATFLLKPHTRTYREKKDRRGFSDKSLEKYMQREKYLQKIKRQKDIVMYYIKDNKIKFSEIEEIISEETRMIFLQWIIAANMNSMKVGRTEYGQEYHLKKEKGNCVLKCEDGDLHMPAFVLEFKSL

SEQ ID NO: 38923 - protein, 378 aa, Lachnospiraceae oral taxon 107 str. F0167
MNEFRTLLENFWICKDADKELYYKVKRDIPNFQKFVREQLGWKLVHTENLLKLEKRPARGEAFMGIGEFLDIRDYCILCAVLMYLEDKEEHEQFLLSELIDYVETGLKPYIAIDWTLFTQRKSLVRVLQYMEKLQMLRVYEGRSEGFGLESGQEVLYENTGYSKYFATSFSVDISGFESFEDFEKAEFEEIEQNRGSLRINRVYRQLAICPCMYWESVEDADSLYLKNQRQWVAKHISENMGGNLDLYKNMACISLDADDCYGLVHPRDAMLPEIVLLVCNGIQKEILNGHLLKGDNELIFTTSGQMSDIILQCRKNHSAGWSKEYREMNEELLVENVLEYMKNWMMIRFLDEQIIILPAVGRTAGVYPEDFNGGEEN

SEQ ID NO: 38924 - protein, 1353 aa, Lachnospiraceae oral taxon 107 str. F0167
MKDRFKMNRIGFVNFWLYDEEYFEFVDGKLLLRGQNASGKSITTQSIIPFILDGDRTPSRLDPFGSSDRRMEYYFLGEEGREESTGYLFLEFKKEEDKYCTIGIGQRAKKGKPMEFWGFVVLDGRRIGYDFKLYKEIGSSKIPLDKREIKTVLGEDNFFTANQSEYKKAVNQYIFGFRKTEQYEQFIKLLVKVRAPKLSKEFKPTKVYDILNDSLQTLTDEDLRAMVDAMEKMDEIQDSLELLKSAFDDVKIIRNEYNRYNQYMLAKKANAYIEIKKNVESEQTRLNIQEENKREIEEDSKNKSKRLEELEESKKLKEAERSGLLDTNLEEIDRKLEKAKNDKNEAGGKVSYWDSKILDYKELLLSGDNKIKHIKGNLWKVQEEIKERKFELDEYQESIDWDGHAEAILIIEKEEYDKTGDIVKKLDLLKKLLSECTREIYEYEKITGQYDEVAAELEKLKIEKAKNHQELEAAVEEVIKRTDQWIESIYGLKYEAMYWKPDGDILPKLEEKIREYKSAFDAEGIQEILRKDYEHQRLNILDIKSGLEYQQKLKNKELDREKEELIYLQNLEDLEPLRDENTKNSRDELEKLGIKALPFYKTVEFSKDLDETACARLEAQLEKMGILDALVVSKDDFDTVTKKCQSFLDTILYVKEDGNSNFSDLRVSEDLEPGLKESVEKILGNIYEDREYDSGIYIGKDGSFTQGILLGKTKKSGDAEYVGILARKRRKEQRICEIKKYISDIKEDISNLEKEIDSLDENLKKLEEEYKQIPGFLEINQALEFEKNCEYKLQKISEECDKKEIQENSLKSRKNLQYQTVIQKCKPFPYKRTQEAYNEVMDALEEYSTIWQEVRQLLLRFCTEKENLISEKERLSVNEGLMDEAFVEKRGWSTKEKECDIQIKQLEEFLNLPEIVEKADRLRRINKELGEIGRENDRLKTDLATLNERFRVILEAEPGLRESLQKKITEETCLRKYFEEELALKLVFSAENQSLFECAKRAVSLLREGDKNREPTDLLQSLHQVYQRHNASLVNYGTSLEECFESEEAVKIEEVPGAIRKRVRVVSSWNGKKVYLEEFYGILKQGIEETQLLIRKKDRELFEDILSQTISRQLTDRIAESRKWVLDMSKLMKEMETSMGLSFSLDWKPCKAENDMELDTAQLEQILLRDHALLTMEDIEKVAEHFRSRIRMEKLRIEEKNDIINYMDLVRDALDYRKWFEFHMFFRRGEGERKLLTNGAFNRFSGGEKAMAMYVPLFAAVNAQYKKAGGKDYPRIIALDEAFAGVDDKNISSMFELVHKLDFDYIMNSQSLWGCFETVKGLRIADLSRPQDSQIVSVIRYTWNGSERILDVQ

SEQ ID NO: 38925 - protein, 434 aa, Lachnospiraceae oral taxon 107 str. F0167
MCNNKECADYFKSRHEYKRCFEEFRKKWKSYGKPGGFITLIKTSKEERQAIGGIIGKVFFEETLRFSFSEFEQGLQKTRFAPVEIKELLEEYFGETLISTKEQKKEDDDRRREFFDGICQYFEKNHGKGSDAFTWINKMISSKKYGYRILIREFEKQENDARLLAKNIGNALIKLNKMSEDEEDYPLAVFAAYITDNPHYFDRGTTAGLLFIHAICAVKEKELPESAHQWRKLLMQVLIVPDNISSIVHGYGLQLLTKEGRHPAYEAFCKRDEAYVITMENMKGITGVETTGERVYVVENEMVFGYLIQNLKEVNCTILCTSGQPRSVAQILFSYILEGGFKIYYNGDIDPDGVCIADRLWKKFGENFYIWRMEPKDYEKSISKEKIGAIGRAKLENISNPLLRETAKCIRKRGLSAYQENMLKELLFDIGSKT

SEQ ID NO: 38926 - protein, 503 aa, Roseburia intestinalis XB6B4
MNKGEHVALQVSDKLLKPLTEAKYLNADNVSRYRCIMRIFFENYEKLKYWLYLEEVYEEMLKDPFWSEYKIEQCQQDLTMLTEWKNLNTIQDTRRVSSIEEFKNKKYRYQMSEYSVEIERLVIRLENLFIEGASLEPTLLERIRRNMERFPEMAGKDKNEVYTWWTDLNNDFMRLNQNYQDYIRDLNSVKAEEMMRTKEFLVFKDRLIEYLRSFIKGLQRNVGVIEECLKTQESDMREAVFDKIVEYELLIPRMEVEVSEKMIRQKAEGRFKSIYDWFVGSEGQENEAAKLFDVTNEIIRRITRYAAQLSEKNALGANRKEEYRKVAEMFMRCENLEEAHKMSAMVFGMEKTFHIAGDQVRETDSMNRGVYEEKPIRIELKPRVRTYREKTKRSSIIESTEKKLETRRKMLEQQKEEEKKIKMLEKDGAIDFSALPILEPRIREILLKWISDAMESVDFSARTDDGRRYRLDKSNMAEKCVVHCEDGNFTMPKMRIVFQEESV

SEQ ID NO: 38927 - protein, 381 aa, Roseburia intestinalis XB6B4
MKELEILLNRRWILKSEDKELYYRVRDAVGEIRKYVTDKLGCQIIDNSLLIKLEKIPVIPEQFMGIGQFSSKEEYVYLCILLMFLEDKDAQEQFILSQLTEYMTAVMPGEITDWTLYNNRRKLIRVLRYTVEQGMVRVTDGTDDVFMDDAGGEVLYENTGASKYFMRNFSRDIMEYTKPEDFRESEWFEVDEDRGLARRHRVYKRLLFAPAVYREDGSGEDFEYLKYYGYRLSEELEQLFECHVQIHRGSAFLLSGQDCRMGAAFPENNSLADILMLAFGKIREKIEGKVWKITPEEMSLVDKIEFESLILDVKKEYGSGFAKLYRDMPEGEFIKNVTDEMERWMFIKKVDDMHQIKICPLVGKIQGSYPQDYTGGNENEQ

SEQ ID NO: 38928 - protein, 1371 aa, Roseburia intestinalis XB6B4
MKMNSRWQANKIGLINFWYYDEQEFPFVKGRMLLRGSNGSGKSVTMQSVVPLLLDGNMSPERLDPFGSRDRKMSSYLLEENDGREERTGYLYLEFKRKDSETYLTIGMGIRAKRNKPLDKWYFSLTDGRRIGKDFFLYKDMGEKVTLSKKELENRVAEGGRVFDRQADYMDYVNRQIFGFETADEYKEMVDLLIQLRTPKLSKDFKPSVINDILSDSLQPLSDEDLRPMSEAIENMDMMNMNLKGRREARGAAEKINAVFQKYNKLLLCEKADRYERTKQRLQKAAAEQKAYEDKYAECNRKIEELETEILQMNQKKETLEKEKESLNKSDAVALKGREAQLTKELEAHDKILADKKSFLAAKEVQYRDVTNQIKEEENRKYEKEKEVETLLEDMREEADQMAFQEFAFMSEELCADLENDYKFDLHRQQFEHTRQYINDGEKLLAELKSLDRQKDEMIQKREKQIRELDALQRKISEFENMLIQVENEWKEALYQWNENNVELKLEKELLRELSTFADTYEENSDYAVVRQKAADQWIKKQSKIETQINSILLEQETAKTELDEAKTELSEWENQKEPQPQRSEAVIRNRQRLDEAGIPYQEFYKVIEFGSELDEDACNHLEEALLKMGILDAIVVDEQYREQVLTPVKGCEDHYLFAGKTQAEKSLLDVLELNEEVNDIFSNQRLTKILSSIAYGGENDVSVSEDGSYHMGVLAGTVTGEYEAGYLGSKARERHRLAKIEECKNLILVLEEKIAGLERERNNLSERKDRLKSEYDALPGDTDLREAMKLLLAEEQKYELLRSENEKTGEQLTAFLEEIKEKKKGAIEIAEKLYLNCTYETFQSAKSAAEEYDKNLVELKSAHEMILRSAAYLRERKVHLEDLDLDMDQIRYDIRETEKQISSKQEERTSILEQLALTDYEAVKDRLDACISWLNAFPKEFQKRVTEKTQKTDEAKLIEANRISNADTIKVYEKKVEFYRKCYEQERGLFYVAVPEEITDDAGHIYDYLLTDIKDMEKNSIIADLNRVYFENRGFLTDYQLTQNELFAESDESEKIDDYTPKRLDITARYQGTKVTFASLLTHLDEDISELENLIKDGDRELFEDILANTVSRKIRGKINASNLWVQKMNTLMNGMDTSSGLKLSLRWRSKTAEKEDQLDTRELVELLKKDYRLMSEEEAARLSAHFRSKVDEARRNARDSAGMISFYQIMKETLDYRKWFEFQLFSQKSGERQKELTNSVFGTFSGGEKAMSMYVPLFSAVVAKYQGGRADAPRLISLDEAFAGVDNRNIRDMFRLMTQFEFDFIINSQVLWGDCDTLDALAIYQLIRPENAKFVTVMPYLWNGHSKELLDDEEKVEQRGIEIEQFDRA

SEQ ID NO: 38929 - protein, 511 aa, Mycobacterium sinense
MEDDELPDGGPADHWASYLPGPDLVPAYLVVKYAAQYRAVVDVLLEAQDTSLTGLSHDDVRTRVAAYLAERIPADAVEEMVAQDRFNLEARLERLVQWGVLTRWQEPARTGEDFLRKRDRYQLTPKAARLHTFWTEELHAEEASAADLTLAPRAIHDRLATFGDAIKDRRYRDAATEYQVVISLHHGMATAARTWQRSLAHALSGGPDPDKQEVLWRTLRSYIGMWGEQVDVHSPRIAALMTQCTSLLTESVWRACCRAALEDGDDEQIALQAERWQRTWAALTAWFGGSEGQARRLRRQLRDLVTPWARNMHILMDTGGTVTRRTELLRLARAIERAPDDKTACRLWDTATGMFAARHLLLPSDGADDHTRSWADAPAAPVTARFREHGVRAAVGRRAQVPDFGAGRAAARRARAAAVAARAEAEATLRQRSGTRFDGWDQLSQAELDLLLEFLAIARAADGATRTGVTGDGRWRVTLTAPADGPSTVSLPSPRGQLAALNWRFELEPLR

SEQ ID NO: 38930 - protein, 385 aa, Mycobacterium sinense
MTRDTVERQRAFTGLLAHPVLDRWRYPELFALVRNTRHRTVLVDWFKARLDYDLVVTESAARLFRRPIGKSVVAPPRYGAPGRRVLTLAVLGAAVAEDAEDLTTTQELSDRVRVLTRRDDVGLAEYDADRFVDRSQFVKAVGLLVDAGVLRPVDRNDEDRREGWAHHKDAVGGAYEVVRQLLLRLVDPAALAAALGESSDDVDAAAVSDATSRHLIMRRLVELPVCLIADLGEAERAYLVNQRHRIVSWCAEMTGWIVEQRAEGLALIAPEEADTDLPFPRLRAVDFASLMVLDELRTLADEHGRVSEDQLMVAVAEVRFRYPKAMTKELETDLATRDRAVELLRALDLLRPVHDGGWWLSPASARFRNPSVVSVTARLGDNEAP

SEQ ID NO: 38931 - protein, 1403 aa, Mycobacterium sinense
MTASGWGHEWLAAALEGGLPEPHRDRWQPLRVGIIGLWEYDDAEFWFADGRLVLRGGNGAGKTKVLELTTLMLLRGEVSPSVLDPFGSQHRTMRFNLLPTGEGDDPRPPADSGLGYAWAEFGRLDGDGEARFFVCGMGMSARRGTGTTGVTTWQFVTGLRPGKELQLTAGGRALEQKELRKLDGVYLPGSAAAYRERLGHELFGLAAASYDNLTDLLKQLRKPKLGERLSPALLEETLRDALPPLATHEVTQLAEGWDHLETLRGAVEQTQQAAAAVAQFVREGWRPWARAVLRQRADEFTRATTALDNTTRARNEAQKTLAAAAQQVATAQHELAESKRREGDCGAQLRELLESATYLDAVSASQRVERLRDTVANLRDQVVAADRRSDAAQQGFASAQEWLTKVQSEFEDLGDRVAEREASVRKAALPAGLAASADTHLPGRDLDALIADHQTRSERFERLSSLHDGHATAERRADTSGQLVRAAEQDVTTARDDEAQAARQVDQGVETLRQRIRDWAEAAGVAGCPPRLIEDWCDQTGELTVIDAQTGVAQPGASVVDTMRDHVSGVRREIEERTGALRVERAPVATLRHEVDDALERMRARRESPPPAPTLWARRERPGVDDGLGAPLWRLVNPVDGLDGDVLARLEAAAAASGLLDAWVSADGQVDTGDGRLLADVQLSAGGEAGRRSLLAVLEPDGACSVKPDVIRGVLAGIAWHDTAPTDDDDDWLAADGSWRVGGLTGRAEPTGPASYLGAAARAAAREREIARLQGELAELDARLSELDRRIDDLERAQQTLDREAAAIPVRAERELLGHVGGLAERSRRRLVAEQSLTAKRTQHQQDLTRRDQAWAAFAGYATEHQFELRDLASQGAAIRQYGTLLERLSSALELLAERLKTVDEATRRCTEQQASWQAAVAETTGLTEQHRQAELRLATAEDALDVEHAEQLRRKDALDEEIDKLRTQIEQLNGQLMKATAAEGAATATLDSHEGARANAEQSRDTAMAALWAAVDRGLAEPLGLIAPESRAVQSAREFASGARKDITLREQAADVDRAWGRCTRGVEQLRQRLLPNRDARVDDEDSGALPRIEVLVSPDRGWLAPPAAADALAERVSEQQERFDAEQQRVLTTLLGSAFIEHLKDRLDYTAHTFQRINDQLAGHSTRQGHVVRIQYEPDPKDPDAGAVVKALRQGYQQLTQERQDMVRDFLRRQIETAREDADTQGAADWKDQLAQALDYRRWLRLTLQYRQGMAGTWALFDAAKHAAKSGGEKVVLLAQPLFAAAVVAYDAADRRAPRCVWLDEAMTGVDATVKASFMGLAVDFELDVMLTAHDEWCTYATVPAVAIYDLARQPNIAGVDSQPYLWCGGELQQVAVDRLGVAQRSTTAISEGLFAEEFGD

SEQ ID NO: 38932 - protein, 281 aa, Mycobacterium sinense
MALAQQVAVVWGKLPDSGRSIALAQLAASIGGHDAHALDYDRLLGRAVSRLVAAQHNVARPLRAGREWRLAWARVGVTCDGVSSRVLVLNLPLEGEAPAVRWCAATPGEPVWLTLRSITGSWTAPSAATIFVCENVTVLEAAADRFGAECPPMVCTDGNPANVALDLIAGLADAGCAIKVRADFDPAGLSIVDRVCSVAPAAAGWHYDAATYATHLALDLDFEEFAGSELDSLRVVFGRHRVVVHEEAILEQLMTDLDRGSSGGQLTLRKEGGSLVPRNQS

SEQ ID NO: 38933 - protein, 495 aa, Desulfotomaculum nigrificans CO-1-SRB
MHNNLLKPIVELSYLNAQNVDRYRCIMRCFYEHHQRLQYWLRPEEVYRGVLSYGLLENYTMEQCQQDLNQLVEWKNLVPQHDGGRSTTVEEYLRKKFRYMMTPYSVEIERLVVNLENIRGYGGSLEPSLFESIALSLQKMKELPPEITPQEALALWENIYETFTKLTENAADYIASLQSSKTEELMQTEAFLAYKNSVTGYLQGFVQGLQRHAYRIEGLLPLFQPEFLRDFFHKVRDALASRPQLDEPVTPEEYMHRLQTQWHSLNRWFLGEPGEKSDVYYLEQTTKDTIARIVRAALRIQERRRSGISRRRELDYLGQWFFSLTSIEEAHRLAAYAFGLYRCRHFQGEDDKDTESPDISMWQAGPNIRGLRSRSRKKGRSSGPDPVKSQHTRQQRARAEYLAQQQRQAELLQKFLAQGTVTISDLDTVPAATRQVLLSWIGLCLANKSRQIRTPDGIEISLLLPDHQQRTILHCEDGELDMPDYTLYFRPTGDQ

SEQ ID NO: 38934 - protein, 392 aa, Desulfotomaculum nigrificans CO-1-SRB
MARIARNNQEEIKNCFIALLNRPWVTKADDPELYQSIRSHYQELRDWFQEYCGFSLLLTRQLARLEKFPGQAHAWMGLELFSDPLDYALFTYCLWYLEGKNETDQFLLTEMIEEIKNHLIGSQVSLDFTMYHHRQSMYRALKQLKALKVLVAVDGDEAEWARVGNDKNVLYECSPLSRYVLRHFPQDLTTYQTPTSLGELAYPDDQEGQVRRRRHRVYRRLLQEPVVHDWEWSQDERYYVLTQRHTILEHLSARFGLEGQRYREGLIFFYPDHSAEIELFPTAKNISDLVLLLAGEIRRLLDQSDTGIYTDERGRIPLTLAELEGLLLRLRERHKSLWSQQLRQAKSNELAQEILAHLTDWGLATVNSEQIILLNPALGRWNGNYLTDEDEE

SEQ ID NO: 38935 - protein, 1361 aa, Desulfotomaculum nigrificans CO-1-SRB
MMRNRWQMNLAGIFNFWYYTDEVQFKLSDGRLVLRGANGSGKSVTMQSFLPLVLDGNKRPSRLDPFGSKDRKIDYYLLLEPDSGIQDRIGYLYLEFYHPEQQRYLTIGIGLRARRNANTGFWGFAITDNRRIGKDILLYERDYSQGQEQKIPLTRSQLEDVIGEGGQVVTEQGKYMEMVNKLLFGYGDLQSFQELLDLLIQLRSPKLSKDFKPTTIYEILSNALPPLQDDELRPLSEVMEDMDQINDRLEEVCLHRREAEKLQQVYNRYNKYLLYHQSSQLLQAKRQWDNQQSSTQELEAKLQEISRSLQERNERLTEQSTKLLEVNARHQVLAASEVLEKRHELNRLREEKERTNRQAERLAKSLMYWQGKQKEYRRDQEKYTAEAAEYTTRQQATLADLEDIAREFDFSRHDVYHRQWDRDMPREFNQWHNWQQDLSEQERQINQALEIARRVDHKKYERDLAEREVGNARQRRDTAEESYRFEEENCDLVQKSYQEQIFAWRKNLLELHLSDEELQKTLHRLSLFPEVSYESIKEPMLEAFDHRYLDLQKQKVALEQQRDRHQEEQNQLRAAWQEWKNHKDPEPPRSAARELSRRQRGEGAPLYALCEFREGVSEELKASLEAALQQSGLLDAWVSPQGLGILGTNEEEIWIAPNPQFFGYTLADYLYPTPPEDGSLKAEIIDQILRTISLGDISSGDNVGAAVNEQGYFRLGALCGKAAAKERAEFIGKETRHRTRLAEMARLEALMEQEQQNIDDCNRQIHRIEEALTRLTQEKSCFPAGDELQEAFSRLAQARREMESALEEERQKVELFRQASQAYQETAAELHTFMQGWTIPKNTAGLTAARDQLQTYRQLLGELHSHWSSYRMSQAALDRALAGLAEAAEKIAEETDELASLRETLHHINAQISAFEQALKDLGIEDIDRQLRELEQQRDALQREINALDKEIRQLEKEQGIEESRLSAARELLKEKEAALNQAREAWLCEWNRRLVADWSEVTVSEANLPGLYRVAQQVLQQYRDEKYLQKSKDSITNDLFLAFQECRGNLHPYGPELMLDEEHQRNLVLFMRDRHNPLPPQALVQELKTTEEEQRLLLSQKDRELYEQIIIHSVGKAIRYKILRAEQWVQQMNRLMEQRDTSSGLRLHLKWEPRPAANEKELDTLQLVNLLKKDPQMLRNQEIEQMIEHFRSRITWAKQEADQHDTLRQWIYRLLDYREWFRFTLYYEKGEQPRRELTDSRFNALSGGEKALSMYIPLFAATYSRYNDCRPEAPKIISLDEAFAGVDDENMRDMFGLLTQLDFDYMMTSQVLWGCYDTVPKLSVYEIYRPKDARFVTLIQYYWNGFRRMLVDESMVEENA

SEQ ID NO: 38936 - protein, 429 aa, Desulfotomaculum nigrificans CO-1-SRB
MLDYLRQPCFEKLFSLARKKIQSLNGLRGAVTLDNLSPVDQDLISGFLGKNCLGRTRLKIPLLEIDEVLKNSPLEMGLYPFLELYFNERILTNQEISATREHRWAQFFAQLQEQAQTPVTQDWLAQLWQGTGSGYRTLLALYQDNPQAALDEASICVKALDYLATHPGENLRIPVFAAKLTGDPHALDLENSLGRLLYYGLLHFLDKPETDYTAEGKRTLFREAGLLDDDVSSNVLVAGLRVCQDDPRFTIFDVANATGSPLILPLRFLAMPTRWQPGQKVYMTENPAVFSTILDVYPATSLPPIICGSGQPSVAALTLLDQLVQAGCIIYYSGDFDLKGLEIAIRLAQRYKQNFRPWCYDNETYLRVPHGKPAAANQINNLRKLDVPWDKQLVHRMLERKLFVYQESFIDKLINQFNNRHPKLAITKG

SEQ ID NO: 38937 - protein, 517 aa, Ralstonia solanacearum Po82
MNDMKLQSEAQADLFRHISVEKATLYRCVMDCFAAAKRQFRLHLRPDEVLNEANWNRMPEHAPPRIEEVQAALAQLTEWGNLESQPDTTRVASISDFYRARFLYRLSQGGEAVEAALTTFERTLRRRAELQTVALEDISNRLQTLLSLADSATPDTAKIHETLRDLVRVFESLADNAQAFMAGIGRSIELQQAEVTTVLAYKKRLIDYLERFIGGLVGRSGGIAQHLVALSPRIDSLLWLAAQREARDSAPDDDPEQLDAVARGWQAWRERWKGLRSWFVTTGHEPPQAELLRSKARAAIPQLLIAVSALNERRSGRSDRSADFRMLAGWFAACEDDSQAHRLARAAFALNPARHFSLNPAPAPGIQDLPASTPWAEAPPLHIHPRLREYGEAAPRGALPRVQSRDEQRRLLAAQLEEEHAQIEAARLRLATGRATLLSELGALGTHDFALFLKLLGEALTAQMSPDVPVETQSGDGLLHIRLQPLTGSPRAMITTPAGVFSGRDHTVIITRMEDLP

SEQ ID NO: 38938 - protein, 416 aa, Ralstonia solanacearum Po82
MSNDSHDIGRQQTRHRDDERNQALRALLMAPLMTPAHESFAAVRRHADELRAWFSRETGWTLHIERDCARLYKRPADLQDASRGLPGYERRRYVLLCLACAVLERAEPQITLRVLGDRLLALAADPALASRDFHFTLGATHERRELVAVCRSLVELGVLQRIAGDEESFVRSTGDAAEGGDALYDVRRRVLAGLLAAVRGPSTWPVEQTPVSLDERLASLVAEHMPDSDDGLRTALRHHLARRLLDDPVVYLNTLDAELRAYFINQRGAMATRLCDATGLVAEQRAEGLALVDEDGELTDVTMPAEGTEAHATLLVAEFLAGRSRADAQAPTTLDEISAFLADARTRYGSYWRKSAREPGAERELTNIALERLLKLQLVARTADRIQPLPALARFALGETDIRTPIRAATQSNLFE

SEQ ID NO: 38939 - protein, 1376 aa, Ralstonia solanacearum Po82
MTDTQSPALPIPTLARWQPLRLGLVELFHYDSEEFWFRDGRLLLRGNNGTGKSKVLSLTLPFLFDAYLKPSRIEPDGDASKKMAWNLLLGRHERRMGYAWVEFGRVGEDGRHRYLTLGSGLSAAAARAQVDTWFFLLDEQRINQDFWLMSPTRVVLTRDRLREALQDCGQFFDTAAPYRRAVDERLFRLGSTRYAALIDTLIQLRQPQLSKKPDEASLSKALTEALPPISTDLLADVADALNQLEEYRRELEEYEALERAVGQFNQRYQRYAATQARRQARNLRTAQTGFDNASRELNSARDALETAQAEEKRADQAWQQADAMLAANRTRLEELQNDPAMADAKTLEKADADFRQRDKEANAAQQTRHDMQTRLERERQATRTRAQRAEHAGRALAESREDAVQAAERAGLSHAYSANPLASANARLLQPLALDTARQDLRRAGVERRAEVALLLRHCDEADHAAQAHTYARTQRDERADEAEAAAAQREEADAAVDRQGRTLLDAWQRHLDGLRQFQCPDGANALEALAAWTVSLQGDNPARTALHRAQQTASLRLAQRQAALQNDRHALEQEHDTLQDERTRLEQGEDAVPQPPHWRAPDVRVGRAGAPLWQLVDFHPGTSAADCAGLEAALQASGLLDAWVTPNGTLLDSDGGDALLLHDAQWLTRERQPQSLAAWLRPAEAANGASPRVDPAVVQHLLEGVACCAEDNLAAEAWIAPTGRFRLGALAGAWHKPGAEFIGYAARAAARERRQHEIGARLDAIDAALASLARDFVQLDADQREAAHEWQFAPSDDSLRAAHIAAVLHAREFDMARQRLEHADRQLRAAAQQWEQAREILARDAEDLALPPARDALRAIDQALQTFGDCLHTLAVDARELRDALAEHAEQLQREQQAESDTLHAVEQFAEREALAEEAHIRLETLRTSVGARVEELQQRLSDVRSAVTSGETELRQQNGTRRQAGEARARAEQKVEAAEATLAERIAARQYAVGQMQGFSATGLLVTALPDAELPSMHAPWTIEPALALARRTEQALLNVKDDDEAWTRVQSQVSQDYTELGRALAALSHQAQAETNDFGLVVSIIYQNRPERPDQLGARLAGEIAQRRELLTAGERQVLENHLQAEIASAVQKLLRDAERQVKAINDELDKRPTSTGVRFRLQWETLPEGADGAPVGLEAARRRLLNTSTDLWTAEDRRVVGEMLQQRVAAERSRADADQGGSLLDQLARALDYRRWHRFRVQRWDGQWRPLSGPASSGERALGLTVPLFAAVSSYYTQESYAHAPRLVLLDEVFAGIDDAARAHCWALIREFDLDFVVTSEREWACSAELPGVAIAQLQRHEGIDAVHVSRWTWDGRTRRREDDPNRRFPDA

SEQ ID NO: 38940 - protein, 559 aa, Ralstonia solanacearum Po82
MAATVRSRLQRRTRAGPDSAAIRRRLQLLHAGKLRPRAASCAAGRGFCRHRRRSARALLGTDPRVRPGLRCDQRARVGLLRRTAGRSHRATATPRRHRRRTCLALDLGRANPAARRRPEPEVPRRMSSSEAKLQRLLGGPALLSLRQRLRRHFERQSEGETRVTLQLTKLSAGEHEALALLTGRTSRTTRSMRIDITQIDAALQAAGICCSLRVALERLDGPIQNRAAERAAIQAAWSEATQYRGGDARLQAWLDTPAAGPQLKRLARQDATAAQTLVRQADAVLRGLPAPGLARAQLAAQTLGNAHALDAGQPVASIVLAAWRYAEATMAPSRQEALTDPEGEFDGDEADDRGEGTSLAHERARDIWARAGILVNELARPALMLNLPILEQVTASWIAGEPAYLSLRQLVRTPPAWAVKDAPVFVCENPNLLAIAADRLGARCAPLVCTDGMPAAAQRALLTQLLHAGARLYYHGDFDWPGLRIANHVIRTWRAIPWRLAASDYEAAVKAAPHVRRDLDETDAVAVWDPLLTPAMHGHGLSIAEEAVADGLIEDLRPT

SEQ ID NO: 38941 - protein, 461 aa, Bacillus coagulans 2-6
MRDFISPEEVLEYLRSLPAFHDYEEEQLHQQLAQLVKWNNLVARQDMTNAKTIEEYKKKRFRYQCTPYTVEIERMLIQLEKLGDQFQGSLERSQFDRLLASLAKLEEELKQPLDKPAAHYMHIWDDIFHFFGTIRTNTADYIAYINSEKTSQRMQTEAFLVYKNQFTAYLRDFIVSLQKTSLQIRERLRELDTHILAPLFEKLVEHRRQIPRLEDTAASGQEWLEEFREYWESLRRWFLGASSSQSELEMLQMQTNEMIRRMARYVQRISERQQHFRSRKKDYLHLSKWFAGCHSLEEAHQLSSVVFGTMTVRHLHLEEATTDNLHAETWEEQPEMREIKPRTNRYREKTKPGAFRSNHEQKEKQRLAYLKEREQEKQLIEKYMKNGEIRLAEIGIVEPFVRKVLLGWIGKSMAAKNHEVKTDYGMSVKVVIDPDRIITLDAEDGKLIMPDAVFELSGGER

SEQ ID NO: 38942 - protein, 387 aa, Bacillus coagulans 2-6
MDPLQVFDEKAVQGMDLLFHHYWILRSEHPDWYQLIREREKVLRRYISEKFGLRLIIHQHFIKLEKIPVEPESWMGIPHFQEPMDYAIFCCALSFLEGKAVDEQFLLSEMCQEIQNDYPVEDGLDWTLYLHRKSLIRAVRALMEFHLIRTIDGDISRFDTYEDQEVLYEATVYSRYFLRSFPDDFTSYADWTGLLEEDWKQNQEDERRKRVYRKLFFSPGLHRKDTQDPDFLYIRNFRNRLFEDIEEHSRYKLHVFKNTAFLSAAEPRSYHHVYPNAKGSTDLMLQLSKTLHDHPEKYVPNEAGEILLTEGEFEAVIDEMRSRLERGWPKHFRDAGTKAVCAELVETMKEWMMAETDEAAGLIRIKPLLGVLAGEYPADFEKGVEQP

SEQ ID NO: 38943 - protein, 1363 aa, Bacillus coagulans 2-6
MNRAGLLNFWYYDDEIFEFADGKLLLRGTNGSGKSVTMQSILPVLLDGKKTPDRLDPFGSKARKMEDYLLGEKEVSGHDERTGYLFLEYQKQGTKQYITTGIGMQAKRHKTLKSWYFVLTDNRRIGYDFELAHTRQSERIPLSAKELENRIGSGGYLVHSQKEYMELVNKYIFGFQSMEAFEDLIKLLIQLRSPKLSKDFKPTVIYEILESALPPLTDDELRHLSDTIESMDETEQQLEQLEREHESAKKLVRQYDLYNQYILAERAQKWREAESRLQDAKQDAGTLETRSESLRGMIENLEEEKKHYEQKRDVLKAEQERLQHHEVWRLEKEKGEKQARAEKLKSEAADLEKKWEAKKSQLLDIRLEQDRLETENSKDESSMQETLDELALDAGDAAFTGHGINAGDFSRHEGEAFDFSVWKRETKQHSGLLQKLRQLAGEAERLHEAHLKLQRQSSAKKQEIDELRKQLDHLENWFTEQKQELEDAVFLWIEQHPALSFTDERLRRIAGALDGLYEENRYEAVREEIVDAANDYILQVRTEISRAEQEQKAKEQELAEAEETLVYWQNLKLANPERPADTEAFRARLHESGKRYLPFYAAVEFQDHVADAQKARIEAALRQTGILDSLITEEPVTPVHDRVIRPNPHILGYTLADYLKPDPDDDSPVSAARIDEVLRSIPLEPSESGFHIDADGSFSIGCLVGHAPDEGPSKFIGRTSRKRYQQEKIKETEQKIAEIRLALLQMENSLLDWAGKVQEAEDWKAGIPDDKDLRDIEEQMEKTARSLKQEQEFLSDIDREWKQVYQDLQNIRLQLHEQGAGLNLALQSGPLDEALAAAKSYEEHLHNLELTFQRLFSRRKMLARLAADILEKEQELDEIRGEENIRRSEWEKTAADIEAIEQQLKLRGIEEVRARIQAVQHEYASTDEKIRDIYETKPKKEAELEKCIADLSLAKTRATFWANMAAEWEKLVKEELSLGFVESGDTEPESILAAFSGVLEKYDRAKLNENLTKIFFNEQSNLTEYRMSEFTKEADPPEWFAEKLDDYYETFKKEWEGLRGRRLIQMEYRGRRVSPYTVLESLEKELLNLQSYLDEQDRRLYEDIIVNTVGVILRNRIQRAAKWVKEMDAIMRNRDNSSGLTFSIAWKEKTAESEDELDTKDLVALLQRNSKFLNEDDLNRITKHFRSRIAAAKELIEIRNEGSTLHQVLKEVLDYRKWFQFVLSYKRAGEPKRELSNTAFFKFSGGEKAMAMYIPLFTAAYSRYLEAGSMAPYIISLDEAFAGVDENNIRDMFEVVEQLGFNYIMNSQALWGDYDTISSLAICELVRPKNANYVTVIRYRWDGHKRSIVENRKEALAGAPDLL

SEQ ID NO: 38944 - protein, 431 aa, Bacillus coagulans 2-6
MNDAIDLLRKEPGMMKLFRLFKEKYRSLGHIGGTVSLAGFTRTELEAIAGLTGTSPDLLREKNKISLRAFEKALAPTVFGKYTLVELLEAVLREKIFSKAEEGEIEKKKEEQFLARLSETMPGGNWWWRRIAGKTADTRFIWHAYKQDPDTLSAQLTTVLKASTMLPEEGKYERIPFFSQRVTGNPHFFDQNRFEGRLFVHCLFTSQLLKGLIEEMPKTTEELNELYANAGLMRDDLWSFVTCRAFLAETENGLHPVWREAAALGTVMNVPVKELLQLTNIWPRVGKKVWIIENSGVASAVLDEVPDAPVICTHGQFRTAAWIMLQRLAENGCTFYYSGDLDPEGVAMAERLSNRFPGQTVFWRMDPDAYWRVLSEEDISARLSKLDAVQSPELLLVADEMRLKKKAGYQEGLADLLVEDLKKRWAGGKEI

SEQ ID NO: 38945 - protein, 494 aa, Lachnospiraceae bacterium 1_1_57FAA; identical to SEQ ID NO: 38897

SEQ ID NO: 38946 - protein, 1236 aa, Lachnospiraceae bacterium 1_1_57FAA; identical to SEQ ID NO: 38898

SEQ ID NO: 38947 - protein, 431 aa, Lachnospiraceae bacterium 1_1_57FAA; identical to SEQ ID NO: 38899

SEQ ID NO: 38948 - protein, 496 aa, Lachnospiraceae bacterium 2_1_58FAA
MKIQEKMRKPMLEARYLNVENTDRYRPIIRLFYLKYEKLKYWMYQEDVFEELKEDPYFQEYTMEQCQQDLAALVSWGNLLTIQDTRKVTTIEEFKNKKFRYQLSETAVEVERMVIRIENLLIEGSSLEPTLLERLRISLGRLGEMSQAEAEKRYGWWNDLNSDFIRLNQNYQDYMRELNSVKAEEMMKTKEFLVFKDRLIEYLRSFVKSLQVNVTAIEQQLRSVDREVVNQILQKVTEYELSIPRMDTEIDEQMIYDKMKGRWESISEWFSGKDGMESEAGKVFDTTNEIIRKITRYATRISEMSNQGSNRREEYKKLADIFGKCRDINEAHRLSAVVFGIEKPLHLKGELSRETDSINSGVYEEEAYAVTVTPRVRTYKQKARRSGIVDRSKEKEEMRLLMIRRLEEERKLLGSYIHNGRLEFASLPVIEPPVRDMFLLWLSKALERKNHRAKTEDGQMYYIERADVKEYCMLKCTDGTFQMPAYTIVFEDGESK

SEQ ID NO: 38949 - protein, 381 aa, Lachnospiraceae bacterium 2_1_58FAA; identical to SEQ ID NO: 38829

SEQ ID NO: 38950 - protein, 1363 aa, Lachnospiraceae bacterium 2_1_58FAA
MNSKWQINRVGLLDFWYYDEEEFDFLDGRMLLRGANGSGKSVTMQSFIPLLLDGNMRPERLDPFGSRARKMENYLLEEGDEREERTGYLYMELKRLESEEYLTLGIGLRARKNKKLESWYFCVTDGRRVGKDLFLYKDVENKITCSKGELKYRIGEGGKVMETQGEYAQCVNRLLFGFETQEEYKELLELLIQLRTPKLSKDFKPTVINEILSSSLQTLSEDDLRPMSEAIENMDNLKTNLDTLSESIHAARQIEKVYDQYNQIVLYDKALLFSDAGKAYENCMKNGKQITEDLAIHMEELRKEEQHYEALKQEEEILKEEKTSLDKSDAAQLKEQESKLKAELLERVKEQQTKEKQEQEKKEKQIDTEEKIKAETEKTERIWEEIESCLEEMETELEEIPFDEFTFLKNDILQDREKEQSFSSHHQLLNDYTKKVEQGKEALLEEKNSQEKYDRCLLELDVCREERNLAEKEMQQYENLLHETKSELTEQMYLWEKQNQELHLLPETMQEISRKIESYEMGSDYSEIRELARPKLYELERQFSENRMVLERNLQEEQENLYQAETELEEWKNQKDPEPEQPDCVKANRELLKEKKIPYFQFYKTIEFDQILEEERRNHLEEALLEMGVLDALIVPKEYREQVYALDKGVCDRYLFSDVAHVRESLQEVLEVENGENDILFYQNISNILSAIGFGDTHAEHGDSWIDANGNYRIGVLEGTITGEYQARFIGVRAREKYRKEKIEELTGLCEQLRASVEDLEKQLAENRARTETLQAEWKSFPGEEDLKTAAKEFSDREYKLERKNKRLWEHQELAEKERKALDEVRIRVREICGKCYLSPRLDLFTQALLALHRYKEILSQLQVAHGKYQNSLRYIMSQRDYLEELELDLDDIRYEFNRICLKVREVEGFLASVQKQLELTDYEEIKERLDHCVERLGKLPGEREACVRNQAALRKETEVLQEKERENELRQKELFEKKEKYQNVFEQEYQLRYVERAFVVTDDMEDQAKKICSQFAGSFGNKKQSDLFGNLQEAYHQNRGYLLDYQITLQSLFEELDAEGSFLDVAVKRIDILAKYRGIPVKFKELIEKMNEDAEVLKRLLSDRDRELFEDILANTISKKIRGKIQASKRWVEKMNTLMESMQTSSGLKLSLKWKNKRAEKEEQLDTRALVELLQKDVEIMREEEVESVSRHFRSKIEEARKISGDMGSVQSFHATMREVLDYRKWFEFQLECQKTGEKKKELTDRVFFTFSGGEKAMAMYVPLFSAVVAKYAGARPDAPKLISLDEAFAGVDETNIRDMFRLMVEFEFNFMINSQILWGDYDTVPGLAIYQLIRPENAKFVSVIRYIWNGKVKVMLTGEES

SEQ ID NO: 38951 - protein, 439 aa, Lachnospiraceae bacterium 2_1_58FAA
MKAEEKQKLMQECLQYFRERPVYEKLFRKMRGKYESLGHIGGKVVLTGLSPQDKSQLGGFLQKDYTENQSVTISAEAFEICLSQSRFSDISLEELLDAYFGKKLTVKKEERRKKQEERDAFFAEVQSGYEDTTGGRWLQNTLKEHTTGYEILQQQYNSAPEILREILKYVFEAVKQLPRMEEKELLPVFAAKLTGDPHYFDAGTVAERLLFIILSACWQETKDRELSEAERKNQIFYRAGILKDDLSNDTLVYGIRAWKHNGNLHKGIEGFFREREPARLTLRTIGTFGGVHAEREKIYLFENPAVFSVFVKKYPDCAAICGNGQPRLATLLLLDFLKEKHSFYYHGDFDPEGLLIAQRLKERYGERLRLWNYRADWYERYLSDVNLSEVRMRKLEKVYLPELLEVKMQMQKRKRAAYQEAMLDMLEPEKNEWITRSVK

SEQ ID NO: 38952 - protein, 510 aa, Streptomyces zinciresistens K42
MSDEFDVPLSVDEGAFGIDAFSLDDRLRLFHFAAGEKRHEYLWLLRAFDRGRANYQVLLHTSDVVGLLERLAADHPAAAVIGGTAGVQPLLDALAEWQVLDRSYDGTRAANLAEYRNRHYVYQFTQAGYRAYRAVEDVLGASLEDAQLSRLVFPDILGDLRALAEANTAGDGEEVYRKLGRLDSVLNEMAQRAARFYLMLGDLARTNDTRPEVFLAHKDTLLGHMREFTAELGRYAPLLAEAVEKAAATGVDRMIEYAAEADERLFRNPAERLADWRHRWDGIVHWFAEREHSEAERLQDATVTAIRSVLALLRRVTEARRGGVSRESQLRHLAQWFTSCESDEDAHALFQAVFGLGAPRHVAVPYADPERIPSRTSWWEAEPVELARTLVQSGRTPALHGPGRIERDDDRRARLRAEQLKEQAERRGAANSLASDGVYGRTLDEPETRALLGLLDVALAARVPASRRVTAASGSAHGVRLTLTPAEGSTTVDTVRGRLHLDGLRLEVTV

SEQ ID NO: 38953 - protein, 483 aa, Streptomyces zinciresistens K42
MSRVAEGVSPLELADYQKAVRLVLRHPLVTSGYPDRAALATVRRWADQLRTDLMEVLGYRLVTTADTARLQRAQDGLDATRPALTRAGRPFDRRRYAYLVLTLAALGRHGAQVALGELADAVAADAVRIDGLGLDTARKPDRDAFVDAVTWLTERGALTLADGSATAWAGDPERAEALYDIDREILLAVHHPTRVLQHLTSVTALLDSSGALGLSAGRAAQRRDQARRARRLVLENPVAYYADADSELLGQLRAPALAEDLERLTGLAVERRAEGVTLVDTSGRLSDLRFPGGGTVAQAALLLAARISAAVQRSGRHALELLPAPTAAERLAARARRIDGALPSRGTVAELTELTELTALTELTEPDAESAYETAVDADHEPGETRYPFVTDSWLRGRLKDIIGEYGAGFAAGLRGDPDRLLDQALDLLGAMSLIVRVDGGALALPLLARYRGVTARVKTRTGPQPPAQTPLFDDETAEDPTP

SEQ ID NO: 38954 - protein, 277 aa, Streptomyces zinciresistens K42
MSTSAPTPAARYVPTRAGIINLWDYRDEEFSFAGGWLVLRGPNGSGKTKALEVLFPFVLDGRIDPKRLNPFAAEDRTMKSNLLFRGQDSALGYVWIEFTHRETGEAVTCGIGLHAQRHRDTPARWHFVAEGRVGEDFSLLTPDDRPMTRKQLAAELGRELIASTADYRAAVDRRLFGLGPERYEQLLTLILTLRRPQLAKNLDPAKLSDTLTAGLRPLDDDLIAEAARSFDDMESVQRTLEGLAAADDATRAFLTSYSTYLRVHARAAADRLTARRA

SEQ ID NO: 38955 - protein, 493 aa, Erysipelotrichaceae bacterium 2_2_44A
MELYDKLLKPITEVNYLRAENVDRYRIIIRYFYQEHEKIHYWMFKEDIYDMISALPGYEDYTMENCQNDLQALCDWGNLVATQDTSVPNTLQEFKNKKFRYQLSEYTVVIERMTIELEHLAVEGASLEPTLLERIRKQILQLLAVRDKSHMEVADWWRSLNDDFIRLNQNYQDYIKTLNSAKAEQMMKSREFLVFKDKLITYLQTFVKSLQEHGMIIEDYLSGVKDEDMALIFDKVAEYELSIPRINSHITKTAVLENCQGRWQSLFNWFVGENDNNEVNRLFEITNEIIRKITRYALQIGELHNQGANRKEEYRRIAEIFAKCNSMDEAHRLSALVFGADTCMHLKNIAPRDTESIHSGVYQEASAFLALEPRTKVARKKHERKPAVDYALDRRIQRLEYEAQREAEQKKIKELSKNGEIIFSQLPLLDKATRKALLSWVSKALAASERRAKTDQGQYYHIEKEREGDCVLQCEDGNLIMPCFKILFDEELS

SEQ ID NO: 38956 - protein, 376 aa, Erysipelotrichaceae bacterium 2_2_44A
MKIIEELMNHRWILKSQDPQLYYEIKDNAKELKKKLQEKFGYALIINPYLVKLEKIPGKAEGWMGITEFETLMEYQMFCYLLMLLEDKEAGERFILSNICEFIQVQFPKGELEWTSLRARRQLVRVLQYALKMGMIISREGDEDYFLKDETSDILYENTGVSRYFIRNIPKDIMDFHEPEDFLQSEWFDMEEDRGIVRRQRIYRRLMLSCGVYHTAGEDKDDDFGYIRNYRRNIENDFQSLFPCQLHVHSSSAFLVLEEDCSMGKVFPKTHAYYDLLLIVHDDLRKRVKTFRLSLDQHEGITLRLEEYLAIVQRLIKKNNALLPKKYQIENRRVEDSAVDVCNLAQTLGFAQVQQENIYIYPIAGKITGTYAEVTE

SEQ ID NO: 38957 - protein, 426 aa, Erysipelotrichaceae bacterium 2_2_44A
MSELISKWHMHRLGLVDFWYYVNEEFPFKDGHMLLRGSNGSGKSVTMQSFIPLLLDGNKSSERLDPFGTRSRKIENYLLEEGGERTDRIGYLYLEFKRSDSEVYKTIGMGLHAKQGRPLVSWYFVIEDNLRINRDVQLLDHNLAITKPVLKNRIGDTQVMDSQKEYMDRVNQALFGFETSEEYKEAITLLLQLRSPKLSNSLKPTMINEILSESLQPLSEDDLRPMSEAISNMDNIKDQLDALKQSYASAKAVYQVFEQYSHAVLFEKYHIYQTVRQTAVKLHEAYQKHEEELQQHQQETKQKQENRTQLAQEQGLLTEEKLSLATDDLQRLVEDCTRLTAEKEDNLQKLQHKENQEEEKSNRLQELRVQHKTQNDRCEQALSEMKDAFAQLDELQEELLLEDHLLLKEELFEHPDTPYDFTYIGK

SEQ ID NO: 38958 - protein, 514 aa, Thioalkalivibrio paradoxus ARh 1
MSYSTFSHLVADKAALYRRIMAAFVDAKAHFTVHLRPEDVRERTGIDTLEDVQAALAQLVAWGNLEADPDTSRVTSVEEFYRARFLYQLTRAGEAAEQALQVFDRELGRRGALQAVALDDIRLRLQSLLELSRQAHPDATQTQLLLRDLTHVFSDLAENARAFMSGLSRTLELRGDDQQALIAYKERLIGYIERFIGDLVTSSAEIAGTIRALDRDDDGRRPITPLLRLAVERELDDLAPDLADPLDIDAARDAERRRVNAHWEGHWEGLKAWFLDRPERRSQASLLRAQARRSISQMLEAVQRLNERRLGRSDRSADFRALARWFLECENDDQAHRLWRAAFGLGPARHLGVDAETLAQWRADPVPASQPWRDAPPLRISPRLRATGSYQKRGAMPRLQRRDRERAFLAQQMSREAAETRAARAALATGEMLRLSELDRLDPGAFSLLLQLLGDALSHAAHPDHAVAATTGDGSLRIEMEPLGADTEAAIRTEAGTLSGRDYRIRITELEAAP

SEQ ID NO: 38959 - protein, 410 aa, Thioalkalivibrio paradoxus ARh 1
MPDVLERARAEERQRALRALLMQPLMDARHPAFALVRRHQAPLREWLAAETGWHLQVESEFARLYKRPAELRDATRGAALGSGTQTTPFSRRRYALLCLILADLERGDQQITLARLGTGLIQAAADPALEAAGLRFRLDHQDERRDLVATVRLLLDYGVLARVAGDEEAFVRDQTGSDALYDINRRMLAALLVSVRGPSLVEMEGPTSDLEKRLQALTESFVPDTQEGRNRALRHALTARLLDDPVVYWDELPDDARQYLTSQRAAITRRIADATDLVPEIRAEGVAMVDPAQNLSDQSLPSEGTEGHVTLLIAAHLAEAPEGSRFTLDALAERVARWRPQYRGYWRRSALAAGSERALARQAVEQLRRLRLVALGADEQIHPLPALARFAVEPARSPQGKPLAEAADAS

SEQ ID NO: 38960 - protein, 1375 aa, Thioalkalivibrio paradoxus ARh 1
MSDLPQPGKTRWQPLRAGLIELFYYDHEEFRFHDGRLLLRGNNGTGKSKVMALTLPFLLDGRLSPSRVEPDGDGSKRMEWNLLMGETGERQGYAWIEFGRQGDNGPEFLTLGCGLKAVAQRGVRSWFFITPQRVGDSLFLVEDGRTLSRDRLIQALGSSGRPYDQATAYRSAVDQQLFQLGTERYEALLDLLLQLRQPQLSKRPDESRLSNALTEALPPLDSAVIADVAEAYRNLEAEADETRGLEEAHHAVTEFLHHYRRYAGIAARRRAGEVRRRHREYEDTRARVGHQRKTLDAARERDEALEERETRNERAVQEAEQQRQTLRDSPAMRSAQALHAAEDTARERRAFAQSRATLQAQTEQTRQRLEQQAQEQEAAAAETAHEAATTLQGLATAAEVGGIAEPHGAALARLGLPDSRDVPLDQVERQLQNLHDRRRDSIRLLQQHNRELADAERRVDSAREHWQHQVDEHDRLTLRHQDARSAAEAAAERLLDAWRDCLAGLRELRLDDTEETLADLAAWLRGLEGANPAQQQLEARRDQRVREIAAERSRHQHDTMQQALDALEAERLHLETGAEIAPPVPHVRDDALRISRAGAPLWKLVDFHAEVPDETRAGIEAALESAGLLDAWILPDGQLLDPYTWDTWLAADLPIPEQSLDRILHPAVDWQDPAQQPVGAAEVAAILARIGLGEQPDQAHWIGEDGRWRLGPARGAWGKGEAQYIGHAAREAARQARLRQIASEAQACRDAIDAAMQALQRLDQRERRLREEWRTQPEDGPLRTAYAEEASALRTLESQTERTEAARRALEARSHEAAEQRQQRDELAADLALPSADEPLAAVARAVETYGAGIRELTRALRDQRREQLRLERMLQDLEQARAEAQQATADAATAESNARNAETQRDTLRETIGADVAELEQRLAEVERRQAALKSERQSLGQERTRIAREIGRLEADISNGEQQLVAIGDQRAVAITRLRELADAGLVPMATADRVTVDPELSWAPEPAVLLSRRMEQALAEVDESDTAWQRHQKGLHQHFAVLQGALGRHGHDAHIEQQDDLLLVRIIFQGRHHGPDALAAQLAREIERRRELLTARERELVENYLLDEVASHLQLRLMETERQVRQINDELAERPTSTGMRLRIQWQPLAEGQQAAGLTAPAGLDITRNRLLRQSMDAWSADDRRAVGEFIQGRIREARETDSAGALTDVLERALDYRHWHRFVVERWQNGRWRPAYGPASGGERALVITLPLFAAAASHYESAQPAAPRLIMLDEVFAGVDDDARAKSMGLLAQFDLDAMMTSEREWGCYPEVPGLAIAQLIRREGIDAVYVSRWRWDGAHRIRESDPQTPMEATAGPEKAAEGPATEELF

SEQ ID NO: 38961 - protein, 420 aa, Thioalkalivibrio paradoxus ARh 1
MSLDRERLQRLLGGPGTERLRRRLRERLGRGGGDTLTLTRSTPEERAAVERLLGRAPRSGSSLRVSLPEIDATLARAGIAPGLRAALEALDGPIRDQQAEQQAETRRWQALFEAVRERAAPLGLEAWLDELAARGLLKRLARRDPARAAALLDQSLTVLEALPDPGLNRSTLAARCLGDAHGLDPGQPAAALVRRALHRHWRGGIGDDRPDERTIWAHAGILVGGDITSTVLVYQLPVQGDTPGSRMLRIQNQVGEPAYLTLRQLLRHPPRWDCADRDVFVCENPTVVAEAAERLGTECAPLISTGGRPGAAVWLLLEQLRDAGARLQYRADFDWAGLSIMNSVLARFEARPWRMDAATLQRHAEVPGPPLEGPAAAAPWDPDLAPTLAARGTALHEERLLDELLADLSRSPANACAVSP

SEQ ID NO: 38962 - protein, 512 aa, Thermobacillus composti KWC4
MDLPLSGRLTRNIPELKYVNADNVARYRVIMRFFYEEYKRLRYWMKPEDVYNGVMRWGALPDYTLEQCMADLAQLEEWGNLASRHDAGRATTLEEYMRKKLQYLLTPYSIEIERLLESLEKVTGYGGSLEPTLFDSIAEKLFAIRRMDWDKEPGAALELWTSLHDAFKRLHENAADYIASMQTAKAEEMMVTESFLVYKDRLTHYLQNFVQALQRSAYKIEGNLEQISANLRDMFLERVADEELDRPRLEDVPDKASMVGELRQGWSNLDRWFRGDGRAPSELALLERATKDTIARVVRSVIRLQERKRSGVSRKKELEHLAGWFARMERLEDAHRLAGLVFGLFRTRHLQGEDLRLTDRADQSMWDEEPTVRALRSRSRKRIGRQETEPVPEHAERKRREREAYRRRQAEEWAVMQDLLRRGKLVVSELGVVPSAVRLRLLHWIGRCNASPRHSFMTPEGVVIAMTNPRTARRTILRSEDGDLELPDYEFVFAMEDAARMAAAAAEGGRGE

SEQ ID NO: 38963 - protein, 413 aa, Thermobacillus composti KWC4
MSGGNAGMSAIARAKRAARTEAASAQALERKRECVHALLNRPWILKEDDPDLYFAIRDDYEELRDWFMDQAGLPLIVTRSLAKLEKTPAIPHPWMGFEEFREVSDYVFFTYVLWYLEDKTEMDQFLLSELVEEVREQMNAAGLEADWKIYHHRMSMARALRKLTSLGVLIAVDGDESGWAQSEERNALYECSSHARYVLRRFPQDLTMYVRMEELTDPIRYADTPDGENMRRRHRVYRRFLMEPAVLDRDWEADLLPYVLTQRRSIMDHLQRMLGWEGRRYREGLLFFHPELTSEAELFPTLAGVSDLVLLLAGELRRRLGMEDGGLRPEPDGTILLERSELEGMLLRLQEQHQTYWSKEYRGMSSAQLAEECTRHMAEWRLGEWEDGHRFRIFPVLSRWSGEYDIAGTDDEP

SEQ ID NO: 38964 - protein, 1376 aa, Thermobacillus composti KWC4
MTVYTGNADGRWRMGRVGILNFWHYDEEVFELEDGRLILRGANGSGKSVTMQSFLPLVLDGDKRPHRLDPFGSRDRRIEYYLLGEPDSGKTDVTGYLWMEFVHPARGLTKTIGIGLRARRGAAQVQFWGFLLDDGRRIGIDFWLYDRNHWLEHHTRIPLGRQELEKAIGAGGQVVHDQASYRDLVNRQLFGFADAESYQDLLHLMIQLRSPKLSKEFKPSAIYDILHSALPPLQEDELRPLSEVLEDMDQIADRLDELRLHMRELGRLQETYERYNRRTLYDESARLLEASAEHRGQETRLRESEANLKQAEEDKRAAMADISRLEAAIGQAESELDVLENHEAIGKQRELEAAAAALTDAEKHLELAHERLRRNRDRLLAVERDLEEAELHSGRLRAEQQELLKELESIAQEIEFADHAVHHRLWERGEPADDVWREPWRRDLKRHRERLEMALAKAREEQAAARAVRELEADLGEARKGRDERERERNECARALEEGKDALRETIVMWRDALVELPFGEDRVRETFEAVSAFGVNTRSAEAIRAPMREALAARREQLAAERLRLEHERRMLELERERLAEEKRTWEAEREPEPPRGDARARRRERCAPGSGAPLYAACDFRADVDDARRARIEEALERAGLLDAWISPDGRIGAAGDDEEEAWIVPQPIEFGYTLADVLVPSPPAESGLSNETIDAVLRTVLWVDDGGAYGLDAQGAALSGAGAWRIGPLAGQTAGKARAEYIGKETRRRTRLLEIARLQRELEALAERIADLDRGLADLSARERQVIEESGGFPDTANLEQRLQDLNDAASRLEAALGQEHRALERFKAKSAEWRELQRELTELTQSWSRLKRERDLEEALAAARDYEAALSDLHSAWRRQADLERRTDDLRHARQAAEDAIGQDEQLTDELEDRRRVLRAQVDALRRLMDDLGLADISRRIETLKRERERLLLERKAASARLADATEAAGKAAASVELVREREAECRRLLEDALERWRREIGRRLLDEWRDAAAEAASAGAERAAELAHAIRQRYDAAFSGRNADTVKNTLLEQFNEVRSVLTDYVLELDIEEDTGRIVLASKRDRAHPQPPSLLLEELKRDEEQQSALLSEKDRELYEEIILRSVGKAIRQRIHRAESWVDRMNRLMEERNTSSGLRLKLEWREKAAANEQQLDTAVLVELLKRDAHRLREDEIDAMIRHFRSQIGYAKQNALSEKESLRKHLYEVLDYRNWFQFELKYRKGEQTGYRPLTDSRFNVLSGGEKAMAMYIPLFAAAWSRYSDARPDAPRIISLDEAFAGVDEENMRDMFQLLTEMGFDYMMTSQVLWGCYDTVPRLAIYEIHRPKDADFITLFRYRWNGRVREYVPDEADAS

SEQ ID NO: 38965 - protein, 460 aa, Thermobacillus composti KWC4
MRTDEQRGDGPRRAAQYFGRPAFRRMLAAVWRKYASLGRIGGKAVVPDLSPDECEAIGEFFGWNLRPGDTAEIPLTLFETELRDSAFAIGILDLHQVLEGRPLLAKSEQRSLRDEAWRRFLLAARESAGAVVSSVAAEWLSRLEQGCGAGLPALRELYKADPEEALSSLRVVVRVLDFLFAGAGRPIRLPVLAARISGDAHALDAGHPAGRMLLAVLRELADMEDGVASTGGGDAASELGAGDSREEEDGSGTLKLRELYRRFGILDDDLSSIVHWYVPVPDEPAMPRVWTLRQVEAAERIPRCSSLYVVENPAVFSTIVDAAGPVVMDGDPPALICTSGPASAAAIRWMQRVLEHSGDGCKLYYSGDFDIKGLSMARTLAGLFPERFAPWRFDSESYLTAIRSLPGPAFDGGELSRLANMVVEWDRSLCAVMREAGRKVHQEALVEDLVSDFCETGGFA

SEQ ID NO: 38966 - protein, 513 aa, Saccharomonospora azurea NA-128
MERIPPELFRFSVGENADTYTAILRAFAEANERLETSLSLDEVQQRLRTVGWFGALTNDDLARDLQKLRDWQLVDVIQNHAENYRTAEEYERRNLQYSLTKRGEAAFAGVQHALTVLASTGALQTAVLDAIADRLAELHKLLTDAAASDRKIFTTLTELENHLDALRTNTKQFNSELQRLLRAESADLTTFREVKTATVAYLEEFLTNLERRAQAIADGIGHLEKHGLNTLHERALTGADLPPSPGNEVRASWLALRRSRWAGLRAWFLPEDDTPPRVEQLHVVARRAIVTLLQVLDRIAESRHRAGSAVADFRELARWFTLAPTENDLHRLFSAAFGLGSARHAHLAQPDPELVSSSTSWHEGPPVPVSPLLRTAGRTEKVARTGRVRDVAALKRERAERARAQRMQLRRAWRQLATGGPVRLSTFAELDHDTFERLLDLLGRALATRPDTSGARRAATTDGRVEIVLRPPHDGARASLRTPRGVFTGPDYLVDVSTSVADDSDDTVEEATA

SEQ ID NO: 38967 - protein, 408 aa, Saccharomonospora azurea NA-128
MSNLANQLVISEKQDVARGVRLLLATPLISVRTAPDAFDLVRRRHGPIAKWFDYTCGWRLVVEPRFGYARLAKVTSEHDHTRPARRSRSGRVPFDRRRYTLLCVIAAELLSGPVTTIGLLADRVKYATATDPVLETFDTAARSERMAYVDALRLLESYGVLDTVDGSTDTFVDSREAKVLYRVDTTLLLRLLSAPRGPSQLAPSPDEVVQRWAELLTGLTRETRYGDGEMSASDVQRNLWLRHSICRRLFDEPVLYRCELSEEQSHYLASLTGRQVVQRAAEQAGFVLEERAEGYLLVDPDAIATDRKFPDDSGTANVAGLLLLDTLVSAPLGLTVEQLHAEAARLLTRFPRWAKTYRGEDGTERLVHDALDVLASFRLVEHTGSQVRALPAAARYSVTEIRTSKESS

SEQ ID NO: 38968 - protein, 1338 aa, Saccharomonospora azurea NA-128
MTIAELPTKAAAEAGRWQPTRAGILNVWRYYDEVFEFHNGRLLLRGPNGSGKSKVLELLLPYLFDASLRPNRLSTFGTSERTMHWNLMGEGASGTTRVGYVWLEFARNSDHDEYVTCGARLQATTRTTGVTADYFTTSLRIGTDLSLTNASGQPLTKAVLAEQLHGRGTVHSNASEYRAAVRQLLFPGLSEQRYEALITALLQLRTPKLSQRLDPGLLSSLLSRALPPLDQEDITELAEGFERLDQQGERLKKLDEEVEAARKISARQRSYAQRVLRAASADLIAATTRMTEVTRAARQSETEHQEAVVARTAAQQQRKDLAAAIRQTDASIEGLTKHDLYEKGEELDDLRRRTGKAQRAAREQAAVAERKSTAAATDRDAADDAAQAVEQWVERVRVAAEECAGVARRAGLDSAYGELVDTLEQPNAHSRQLLRAAVRGRRKAIESVRRALDEHERAVDARTEAEHGLEAARTELSRANNLKDTLADRYDDVLKEHERALLEWASACRELVFDDTTVLVGIADSEAAILTRIAEAAERRQHDLTVEETTLAGRRQQVETTRAELVMRLEKLQKEVDLPPKAPPHRTADRTRMAGAPLWRLVAFADHVTAPVQAAVEAALQAAGLLDAWMSPSGVLVVDGHDTFVDGTLLKPAPGRSLREVLVAEAGGPVPVERIEELLTRIAFGDTLPDEHPAACGADGRWRLGAATGSWAKNDVEHIGAAARERSRQRRITELTEQLDDADRELAGLKAWSERLAQRRRTLAVERERRPPHTRVDQVRKELNDAESAVATADSLVHAASQRLHDHEESVRHAQHALHLAGTEYGMPTGREALEKLGHALEAFHERAQIWFDQHTSLVTARSRAELLLDAAGRSEAEAAEHQATAERTAEDAEILAGKLRTLERLVDADDLRQIVEELEQQRCLRQQLVEQDEQAGEQLMKLHGRIGGLEARLAQDAERRNEAVLARDNAADRFHRLATSTLIDDADLEADFTGSGAVTAALEAARAVHRSWPTLPHEPKHINDALHRLNETVYACRDVLSGRADLELEADNEVRVFTAVLDGTRVGAHELLETLRAEAERSRDDLTEAERELFDRTLTGDTRRQLADRIRQAGELVDAMNARLERVRTASRVAVRLVWQVDQDLPAGTKDARQLLLKDPVWLSETDRESLHRFFRERIEAARADNTSSNWREQLAQVFDYTAWHRFVVKLDRADGKGWQPLTKKLHGALSGGEKAIALHLPLFAAVAAHYQAVPSAPRLILLDEVFVGVDSSNRGQVFELLASLDLDLVLTSDHEWCAYRELPGIAIHQLVTDDDDDAVTTARFVWTGMDWAGEER

SEQ ID NO: 38969 - protein, 398 aa, Saccharomonospora azurea NA-128
MHTRLSSGRAVTRVRIGPLNREQRAAVADLLGLDRTPDEHYTVSMTALKTVLAEAGTDISTVVTALVGPIADRAAERARAEARRAELWDWLDTHPEIRRQPTLSSWAAQVRRAGLINGSVDRTREILSTVLSVLARLPAEGQPLPTFASEVTGDPHALDDGTRLGNLVLRALATIFDAPVPDTAYERRVLWERAGVAADELSSVALTAGLRLGGRGVVCDLVRCCTEAGHAVTLTLAQLRATELHAAPKRVWVVENPSIIAMALREFGTTCPPIVCTSGWPNTAVVLLLRGMTALGTRLHYHGDFDGEGLRIAAYVMEKTGARPWRMTTGDYLRGLRPGAQAPAPGRVTEAPWDPDLAGTILAHDQAVVEESVATDLLADLARHAASGNTSGHSTDEP

SEQ ID NO: 38970 - protein, 493 aa, Desulfotomaculum gibsoniae DSM 7213
MNDSLLKPILETNYLNAQNVDRYRCLMRCFYEHHQRLQYWLRPEEVYRGVMAYGLLPNYTIEQCQQDLNQLVEWRNLVPQHDGGRSTTVEEYLRKKFRYMMTPYSVEIERMVVGLENIHGYGGSLEPSLFENIALTLQKIIELPQDAPAAEALLLWDEVYDNFVKLTENAADYIASLQSSKTEELMQTEAFLAYKNSVTDYLQGFVQGLQRHAYRIEGILPQFDQKAQQNFLLKVQSAILARPQLDEPPTPEEVLQQLQDRWQSLKRWFLGEAGENSDVYYLEQTTKNTIARIVRSALRIQEKRRWGISRRRELDYLGQWFYALPTASEAHRLAAYAFGLYRCRHFQGEDEKDTESPDISMWQSGPNIRSLRSRSRKRLRSSGPEPVQNQSHRQHKAKAEYLAHQRQQAALLGKFIERGAVTISALDTIPALTRQQLLQWIGMCLANKSRHMRTPEGIEIKLSLPANGRRTVLHCEDGELDMPDYTLTFKRKV

SEQ ID NO: 38971 - protein, 391 aa, Desulfotomaculum gibsoniae DSM 7213
MARAARNNQVDKVNCFISLLNRPWVSKADDPELYQNIRSYYQELKDWFQEYCGFSLLLTRQIARLEKIPGRAHDWMGLELLNEPLDYALFTYCLWFLEGKSETDQFLLTEMIEEIKNHLTGSSMSLDFTLYQHRQSMYRALKQMRELKVLVAVDGDEMEWARTGSDRNVLYECSMLSRYVLRHFPRDLTTYDSLESLGELAYPDNQEGQLRRRRHRVYRRLLQEPVVHDWEWSQDERYYVLTQRHTILEHLATRFGLEGQRYREGLIFFYPDHSAETELFPTAKNISDIALLLAGEIRRLLHKQDTSIYTDEQGCVPLTLAELEVILLGLREKHKSLWSQQLRQVKSNELARELLEHLTGWGLATVNEQIILLHPALGRWNGHYLNNEDEE

SEQ ID NO: 38972 - protein, 1388 aa, Desulfotomaculum gibsoniae DSM 7213
MRNRWQMNLAGIFNFWYYTDEVQYHLRDGRLILRGTNGSGKSVTMQSFLPLVLDGNKRPARLDPFGSRDRKIDYYLLLEPNSGIHDRIGYLYLEFFHPAQNRYLTIGIGLRARRNAPVNFWGFAITDNRRIGREILLYNQDYSQGQEQKIPLTRSQLENIIGEGGQVVTEQGKYMEMVNKLLFGYNDLHSFQELLDLLLQLRSPKLSKDFKPTTIYEILSNALPPLQDEELRPLSEVLEDMDQINDHLEEVCLHRREAEKLWQVYNRYNKYLLYSRSSQLLQAKKQWDNQQSTVRELDEKLQEIREALQEHNQKLEEHTAQLLETKARHEVLAASEALEIRDKLNLLRQEKERTDQQAARITRSLDYWRAKQDEYERDRERYAGDVLEYAALQKDALDELEAAARECDFARHDVYHRYWDRDIPEDFSQWPNWLNDLDSQHKRISQALEMAKQVDQKKYARDLAEREVGQARQRRDTAEDSYRFEEENFELVQKSYQEQIFAWRKELQELQLSDTELQTILHRLALFPDASYEAVKEPVLEAYNRCHLHLHEQIVQITQQKNQHQAEYERLQNQWQEWKNLKDPEPPRSEARERSRRLRGKGAGGAPLYAVCEFKAQVSEEQKANLEAALQQSGLLDAWVSNQGLAALGAEEEEIWITPQPVLLGNTLADYLRPTPPEDGSVKAEIIDEILRTIRLGNTGGDNVAASVNARGYFQLGALCGKAAPKERAEYIGKETRHRTRLAEMARLEALMDEEQRIIDECTSQITGIEESLTRLAQQKALFPGGADLQDAYTRLAQAKREMGLALEEEKQKVELLRETSRAFQEALAELHDFTQGWTIPPNTRGLNGALEQINWYRQHLGELRSHWSSHRSSLQNLKRCEADLLEAAEKMAEETGDMENLQAALLEINVQIKALEKALQDLGIEDIDRQLSELEQKRRLLEKAIASLNNALSDLKVKQGVEQTKLAAAQELLTEKETALSQARAAWLAEWDRYLLDDWTEIKASQKELPGLYHVAQQVLHRYRDEKYIQKSKDSITNDLLIVFQECRGNLHTYGPELVPDDEHQRNLVLFMRDRHNPLPPHALVQELKATEEEQKLLLSQKDRELYEQIIIHSVGKAIRHRILRAEQWVKQMNILMEQRDTSSGLRLHLKWEPKPAANEKEMDTLQLVSLLKKDSQMLRYQEIEQMIEHFRSRINWAKQEADQHDTLRQWIYRLLDYREWFRFTLYFEKGEQPRRELTDSRFNAMSGGEKALSMYIPLFAATYSRYNDCRPEAPKIISLDEAFAGVDDENMRDMFGLLTQLDFDYMMTSQLLWGCYDTVPRLSVYEIYRPKDTDFVTLFQYYWNGYKRILVDESLGDGDLAEDVEVSGDAAEEDVGGQPNNEGRNA

SEQ ID NO: 38973 - protein, 439 aa, Desulfotomaculum gibsoniae DSM 7213
MKEEMLNYLRQPCFKRLFALTKNKIQSLNGLRGTVVLDNLTTEEQDLIGGFLGKNCLGLTKVKISLAELDELLKNSPLETGLHAFLEVYWKEKIVTNQEKTQHAKRLWLQFFEQLREKAQTPVSRDWLDRLFQGSGNGYRTLLALYRQNCKKAANDASITVKALDYLAGHRGQSIRIPVFATLLTGDPHALDSDNAIGRLLFHGLLHYLDIPETDYTAEGKRALFREAGLLDDDISSSVAVAGLQVRPEDLRFAVFDCANAAASPLILPLRFLETKTLWQPGRNIYVVENPAVFSTFLDTCPAASLPPLVCGSGQPSVAALTLFDQLVEAGCTIYYSGDFDVKGLEIATRLAQRYHINFRAWCYDSETYLSVASGKRIPAKEINSLLKLAVPWDEHLTARMVERKLYVYQEAFIGKLLSVTKEGSFIKAFPYRDTEPDK

SEQ ID NO: 38974 - protein, 491 aa, Clostridium clostridioforme 2_1_49FAA
MEYFEPINETSYLSVPNAPVYRKIMRCFYREYEKMHFQIYKEDIFQLLKQDETFTGYTMEQLMTDLEALVKWKNLTPIQDPGRVYTIADYKNKQYRYTMSEYAVEIERLTVRLENLFLESGNLSTNFFVRLEKSLQKAEEIKDSSLKEINEWWGLLQEDFKRLNQNYQDYLRDFYSGKTEQLMKSVEFVVHKDKFIKYLNEFVQELQRHSKRIEQILSDNMPVIEEYILSKVIQSELDIPHAVLQLHGNAEPGIRENVMGKWNSLKNWFIDSQGNECECKKVLKITNDVIRSIIQNAALIVQLQNGGISRKDDYRKFLELFLKCEDLEEAQKLSAHVFGVQKIQHFKTLEPREGEGINDSIYKDEPAVFLLKPHTRAYREKKDRRGFTDKSLEKYMQREKYLQKIKRQKEIVMYYIKDNKITFSEIEEVISEETRITFLQWITQANMNSRKTGRTEYGQEYRLTQTKGNCVLRCEDGDLVMPAFVLEFITL

SEQ ID NO: 38975 - protein, 378 aa, Clostridium clostridioforme 2_1_49FAA
MNEFRTLLENFWICKDTDKETYYKVKRDIPNFQRFIREQLGWKLVHTENLLKLEKRPAHAEGFMGIGEFMEIRDYCILCVVLMYLEDKEEQEQFLLSELIDYVEAQLKSYVSIDWTSFTQRKSLVRVLQYMEKLQMLRVYEGRSEAFGSEAGQEVLYENTGYSKYFATSFPTGISIFESWEDFEKTDFEEFQENRGALRINRVYRQLAVCPSMYWENSEDADSLYLKNQRQWVAKYINDNMGGNLDLYKNMACISLDGDDCYGSVHPRDAMLPEIVLMVCGRIQKEVSEGNLEKQENECIYMTRERISDVILSCRREWSSGWSKEYREMDEELLVEHVLKYMKTWLMIRNDGTQITIFPSVGRTAGVYPEDFKGGTGE

SEQ ID NO: 38976 - protein, 1355 aa, Clostridium clostridioforme 2_1_49FAA
MKDRFKMNRIGFVNFWLYDEEEFEFVDGKLLLRGQNASGKSITTQSFIPFILDGDRTPSRLDPFGSSDRRMEYYFLGEEGKDESTGYLFLEFKKERSEEYRTIAIGQRAKKGKPMDFWGFIILDGRRIGYDLKLYKEIGSSKIPYDRREMKTELGDDNFFTTSQSEYKKAVNQYIFGFRKAEQYEQFIKLLVKVRAPKLSKEFKPTKVYEILNDSLQTLTDEDLRAMVDAMEKMDEIQESLEILKRAFDDVKIIRNEYTRYNQYMLAKKAQAYIAMKQKIETEQCQLDIQEQKRQETEEARNSKSRRLADLEEQKKLKGIERAGLLDADLEGIDRKLEQARGEKEEAAGKVADWESKIRDYQEMIWRGERRVKEIMACLEQIQQEIGEAKLELGEQQEIIQWDQHEAALQMIDRGDHEKSGEIVKSLDSLKKLLAECKREIHEYEERSRQYDELAAQLEKLHTEKAEAQQNFKAAQEDVVRCVDQWITDIYAAEKKSSQWSPDSGILPILVEKIREYQSAADAETVQALLRTDYERQRQGLMDLKSSLEYQKKIQEEELDQEKEKLTCLRNSGELEPERDESIERSRKALKRAGIKAVPFYKTVEFSKNLDETYCARLEAQFQKMGILDALVVSADDFENIRKRCPGFLDTVLYVKGNGGSGFSGLTVSEELEPALKETVQRILSNIYEDKEDGQGIYLGKDGTFKQGILAGKAGKTGSAEFVGVLARKRRKEQKIRELEGRISEITEIIVSLEKEITAVQEHLEKLQEEYQKLPGFSEINAALDQERECEYKLQRTCEECGKKEAQERQLIFKKNQQYQTMLQKCKPFPYGRTEEAYEEAYNALEEYSRIWQEIRQAMLQLRTDQENLSTEKDRNVQSEQLMDDAFAEKRSWSAKEKESEIQIRQFEEYLNRPEIAKKAGRLKQLKKELEEIGTECDTLKKDLVILGERLRVILEDEPKLKESLRQKIIAETCLRNYFEEELALKLVFDRESQGIFECAKRAVSVLRESDKNREPTDLLQALHQVYQRHNGSLVNYGTSLEECFDTPVEAALETEAAGAIRKRVRVVSSWNGKRVYLEEFYGILKQGIDETELLIQKKDRELFEDILSQTISRQLTDRIAESRKWVSDMSQLMREMDTSMGLIFSLDWKPRKAENDMELDTAELEQILLRDHMLLTIEDIERVAAHFRSRIRMEKLKLEEKGDMINYMDLVRDALDYRKWFEFHMYFRRGEGERRLLTNAAFNRFSGGEKAMAMYVPLFAAVNAQYKKAEQEDHPRIIALDEAFAGVDDKNISSMFELVHKLDFDYIMNSQALWGCFETVKGLRIAELSRPQDSQIVSVIRYTWNGREKILDVQ

SEQ ID NO: 38977 - protein, 432 aa, Clostridium clostridioforme 2_1_49FAA
MCNNKECANYFKSQRAYHRCFEEFRKKWKSYGKAAGRITLKQTSEEERRAVGGIIGKVFYEGTIRFSFLEFEQGLQKTRFAPVDMKAVLEEYFGEPLITTQGRQREEQERRKKFLDRSCGYFEENAGREAAALVWLRKMISEKKYGYQLLMREYAKDEKQAELLVRNVGNAVMKLKELTDKEDEYPLAVLAAEITDNPHYFDRSTTAGLLFVHAICCCENMELPEDAHQWRKMLTQVSIVPDNISSMVHGYGLRLLTKQGWHGAYDTFCERKEPYVITMENMKGIIGVQAVGEKAYIVENEMVFSYLIHNLKNSDYTLLCTSGQPRSVAQVLITYILASGSKIYYNGDIDPDGICIADRLWKKFGDRIHIWRMSPEDYDKSLSKERIGDIGRAKLENIGHPILKKTAECMKEKQLAGYQENMLKELLEDMQN

SEQ ID NO: 38978 - protein, 483 aa, Rhodococcus opacus PD630
MKLFAFTTAEKRAEYLWVLRAFDHARANYVVLLHAADVARILDGLAGDDPAGQLGAGDVTPLLEQLHVWEVLERSYDGTRAATLAEYRNRHFVYQFSQAGYQVFRAVEDALAARLDDASLSRLALPDLLADMNDLAAANRAADNDLVYRKLNRLDATLSDMAGRAAQFYLTLGDLVRTTEITPETFMSHKDALLTHMREFSSDLSRYAPKLAAAIALVEDTGVETMVARAAASDERVFLSIEEREADWRARWAGLTHWFVGSEAGLSESERLREGTMSAIAAVLSLLRRVTETRKGGVSRESQLRHLAGWFAATPTEDAAHALFRAVFDLGRPRHLSMVHPDADIIPDTRSWWEAQPVEISRTLAETGRPPSPGLPARVQRNEGSVRRLREEQLTAQRLRASAAQSLARGGVYERELDEAETDVLLSLLNAALTARVPVSGRVKSSTGSENGVKLTLSPHSESTVVRTARGRLHLDGLQVSVR

SEQ ID NO: 38979 - protein, 464 aa, Rhodococcus opacus PD630
MKAREISPLALDSYQRAARVILSNHLVTQTYPDRIALPLLRRWATELRDDLMTLFGYRLDVTETTARLFTVSDRLDAGTPAKTATDRTFDRYRYAYLALALAALGRAGNQITLSELADHVAADAAQVDGVDLSTERASDRDAFVDAVGWLAARGAIALADGDAGGWAANPDAGEALYDIDRSVVIALFRPPRALQHLRSIRGLLAGADSVTEDDTSEFGTARPVDVKETARRVRRALVERPVVYAADLDDDELVQLALPRTAADVELLTGLVAERREEGVAMIDSSGRLSDVRFPGTGTVAQVALLLAGEIADRVLDPDAPETARMPLPRGRFDDLIEQVDSAIPQSGIFDSLAGHDGFEPEDPAPADRLFPVVEDEWIAGTVRTLTERFGRTFAAGWQADPDGLGRAALALLERLRLTAAVPGGVLALPALARYRGVVVTIRDRTPEIDLFQSSANDSEEVTA

SEQ ID NO: 38980 - protein, 1385 aa, Rhodococcus opacus PD630
MTSARFRPTRAGIINLWDYRDQEFSFADGRLVLRGPNGSGKTKALEVLFPFVFDGRIEPRRLNPFAGEERTMKSNLLYRGQESAYSYVWMEFCRGAKDDPEAVTVGIGMRATRTNDKVTRWYFVADGRVGVDFSLLGSDDRPLTKKQLGEQIGTDSITDRPLDYRAAIDARMFGLGVQRYDQLINLILTLRRPQLAKNLDPKGLSQALTDGLRPLDEQLVLEAARSFSDMEEVGRALEGLAAADQAAQSFVGVYAKYLRQQARTDVDHLATRLEAVRSGIAALHGAAADRARSQESRAAAEERFTAAERALDQANATLDALKRSTAYEGRTQLDDLAQAVSTLEKSTELQAEKARKAKATLEQRAEEHDKAGDAVARAVEALTHAEDELHLAAEDAGITWTALPENARTDQLTAALRGHTEERDGDIRAVRAALATVERAATERTRADEAARRGQEQLDTAKVAVLEAETAVESARSRCATELRSWWTEQSSLYAEIDTPASLFEALDTALGLIGDDDAATLSETLTEQTTDAVDALRLRRQQYDRDVAAAEEAIAEHESARAAIESEHDDAPPLSAARQDARSRLTGAPLWRLVRFTDSVDAAAAAGIEAALQAANLLDGWVPVDDALPDVESEQFLVALPAEDRPTGKTLADVLEVEQDTGVPDDRVRGILESIALESLDLPEGPVGVAEDGAYRQGIQRGRHTKSDAEYIGTTARARRRAARIAELDRILEETRATLDETRAAADAAAALLSRTTAAAQALPRTGSILTALKKVTESAGALRSRSDTATAVGRELDQAIADLSAKEKQLRATASTHRTPHVAREIDSLAASVRHFEKQGEMVQRCRREHAKEVEHTRESEDRLHEARGSAEEFAEEAAIAEEVLAQQVQRLETLRDTLGAGAEQLDRQLEEAHARIEACKKEQRDARKADKDAGEAIGKAEGAYNTAVQTLRLALTETHADAARLAPYARRDLLELLGVDGGHTWPASSAAWMSAEQLVYRIQNAEGDTPILPPEVDALFHALDGATESVRVSDSARKSTRTALTTALQDFDAQLAAAGQDYRLQWDAPDGVTVVQVQDDEGYSSIGEFAARIASARSDQELLLTESERRILEDALLTGLAQQIHERTVDARELIARMGTEMRERRMSSGNTIGVHWVLADNLDDSAKAISKLLERDTSALGPDELATMRAHFAHQIRTARAAHPERSYPEILASALDYRRWRVFSFTLISGNGNEDRLTVARHSALSGGEQSVSLHLPLFAAAHVMLDSADPHAPRLLALDEAFAGVDDNGRAELLGLSVQFDLDLFMTGFDLWITYGGVPGCAHYDLAHSTAEQSVSATLLVWSDGELLAEHDGTDLAQALGSPLRRRVPTPAEGAFEFA

SEQ ID NO: 38981 - protein, 496 aa, Geobacillus thermoleovorans CCB_US3_UF5
MDATWLKPIVETKYLSTENAHRYRAILRYFYIQHERMRQYLFPEEVYAFLKQHEEFADYTEEELQQDLDQLVKWNNLIARQETSHVRTIEEFKKKRFRYQCSPYTVEIERMIRTLEQLGDSFGGSLERTRFDRLYASLSRMETIIASDFQEQPDEMHQVWEETFDYFKKIIQNSADYIAYLHGENLEERMTSESFLVYKEQFTAYLRDFIVALQKTSMQIEQLLEDLPEDGVRQFIEHVVDYERSIPRFADALPPRAVQIEEKWETWRSLCEWFLGRDGRESELSFLQYQTNEAIRRLTRVVQRLGERHHHFRSRKGDYLHLARWFSRLESIEEAHCLSAVVFGCFHTKHLVADFGATDNIYRDVWDEPPAEWVTKPRVRHYGEKKKPQAIEDKEREKEEARLRYLEEKAREEAELKQFVTDGKIVLADLPEVTPYVRKTLLGWIAKAMGREGQAMKTENGWVVNVVNKEGTICLRAEDGELVMPNYEIHVLSRGE

SEQ ID NO: 38982 - protein, 398 aa, Geobacillus thermoleovorans CCB_US3_UF5
METAFDDKAKEALAALFEQFWIIRDKEPDLYQLVREREHVLKKYVEEKFGYRLIVHRYFAKLEKIPAEPEPWMGIESFQEPLDYALFCCLMAYLEGKAVEEKFLLSDVCEEIRAMYPGDLPVDWTNYSHRRALIRVLKTAEQIGLVRRMDGEIEAFAQHVEEEALYEVPVLARYFMRTYPKDLLQYESIDELLAEEWKASPQDYRRHRLYRKLFLSPAVHRTEGDEQDFYYLRNFRHRLRDDIEAHTPFRYELYKNAAMLTLPERQAPYTVFPDQKGTSEVILHFAALVRERLGEYPPDEYGRIRLTPEQFSAWLADCRRRYGAGWGKTYRDMSAAELVREVLSALNEWRMADVEHDTGMIVLYPLLGRMSGRYPDDFDAKEGGEHGESMGASSCGAD

SEQ ID NO: 38983 - protein, 1373 aa, Geobacillus thermoleovorans CCB_US3_UF5
MANPWVLHRAGLINFWYYDEQYFHFADGKLLLRGSNGAGKSVTMQSLIPVLLDGKKTPDRLDPFGSRARRMEDYLLGEKDVVNRDERTGYLFLEYKRKESDQYVTTGIGLRAKRQKSLDFWGFVLFDNRRIGYDLQLYKQEKTGEKIPLTKRELATALGAGGTVVETQKDYMELVNKHVFRFESLEAFQELIELLIQLRSPKLSKDFKPTVIYEILESSLPPLTDDELRHLSDTIENMDQAKQQLEQLERDERALKRLCDQYRLYNEYMIAEKATEYVKAVKQAEQLAAAQHRLHDEEEQARKTLDELDESITRLRREEDVLRSREIDLAGHEVFQQAEKYEQLKSERERLQERWERHEQTIAEKERLERQHRRRLDESEARLDDLERKLEDELAQLRADAEEGAFSLHETNEDDFHRHRQKQQEFSFAAWKQEADRHIEQLEELARLWRRHDDVKRRYEEASTEAGERRREMDEWRHQQQKWEELLEQEKERFEQAVLAWVEQGGIDVSEADIQAFLRQMGALYELYSLDDLKRPFVQAYYDAVGKKKDEKWRLEHDIRLLEEKRAEREAELRQWREQRDPEPERDEQTTAARLALEREGIPFVPFYAAVEFVDDVPDDVRERIESALSHAGLLDALIAARDVDVDCDRVLIPKPVHMVHTLADYLRPDADAPVSAERIDEVLRSIVITDAEQEGGMTIDETGRYSLGLVRGHAPRRARAMFIGRAARERWRLENIAALEAEIAAVGQEIDRLRREHQAVGAAIQALADWLASFPADRDVRTAFEEGQEARRQAESKEREWKRQEEKAALLAREWKQIKQQLRDESAELDLAFTLDGCEQAQLAMKSYVRHLHELEVLYRETRHTEAMIAQQRERLAALETEIDEAKGERNRIRDEKERISLEIVEMERTLAQMGADDIRAEIARIQERLASLRREIPRLVNERARTEQQLMRLAEEREKEARREAFARELAAMWEKSFAREAALGLVDLDRSRSLLEQAKEAKQRYEAVLKETRSSLLARLNTVFFQESSNLTEYRASFEPLEEQTKPEWTAAAPDDEMAMKAADWREKQERHVIYLDYKGERATPFAVLAEVERDIVLQHEYMKEQDRELYEDVILKSVGRILRSRIQRAERWVNDMNKLMGGLDTSSGLVLSIQWKPKTAETEAELDTKELVRLLRLDPRLLREEDLQRVTNHFRSKIARARELLEERGQGSTLHQIIKEVLDYRKWFSFTLYYEKTNEPKRELTNHRFYQFSGGEKAMAMYIPLFAAAYSRYQEAGDDAPYIISLDEAFAGVDENNIRNLFGLVEQLGFNYIMNSQALWGDYDTVPALSICELVRPRNASFVTVIHYRWNGRVKQLMVNDKEWETIET

SEQ ID NO: 38984 - protein, 406 aa, Geobacillus thermoleovorans CCB_US3_UF5
MSTAKEAAAFFRSEPGFRRLFIEMKHKYESLGRVGGAVSLEAFTDEEREAVAAFFGKDVSRVSLIAFEKQLGQTRFAGVGLVELLEQYFGAPLVSNKERRQAEEEERDRFFARLTEEHHWVESVRPQRFVQTAYETDRRSLEEAIRLVSAALGRLPLPSYMRLPLFAQQVAGDPHAFDLSTLPGRLLLSALQATVPGDWDMASVESVNELLQSVGLLREDILNFVTCANILAETKDGPHPVFSAAWEANTALNMPLRDVLSLVRARPAHGGTVYIVENAGVFSTLLDTRAPLVSTNGQMNLATMKLLDLLASSGAKLYYSGDFDPEGLAMAERLLERYGQAVTLWRFSLDDYAAANPVVELTPERLAKLASVTSEPLRPVKEAIGRKKKAGYQEAIIGRLTGDING

SEQ ID NO: 38985 - protein, 496 aa, Rhodococcus pyridinivorans AK37
MEDALVRDDRLRLFSFATAEKRVHYLWVLRAFDHARGNYSVLLHAGDVENVLTRLPGASGDDVPDSSEIPALLEQLHAWGVLERSYDGSRAATLAEYRNRHYVYQFGQAGYRVFRAVEDVLSSRGEDVSLSRLALPDLLADLNDLADANAAGDGELVYRKLSRLDATLSDMAERAARFYLVLGELVRTTEVTPETFLAHKDALLTHMREFSTDLARYAPKLSTALDRVQTTGVQKLTAAAARHDERVLLSFEEREADWAQRWWGVEHWFVGVGSEPSESERLRGATINAISAVLGLLRRLTEQRRGGVSRESQLRHLAGWFAAAPSEEAAHALFDAVFDLGRPRHFSVAHPDADIVPVTRSWWEAPPVEIARTLAETGRRPAAGAPGRIQRNDAGVRRLREAQLEKQRRRAEAARSLAAGGVRERKLSETEAEVLLSLLDAALSARVPVSGRVRSDDASSGTQNGVKLTLRPSGESTVVHTARGRLYLDGLSVEVR

SEQ ID NO: 38986 - protein, 464 aa, Rhodococcus pyridinivorans AK37
MRARSIPSVELDSYQRAARLVLTHHLVTATFPDRSALATVRRWATELREDLLATFGYRLEVTETTARLFTVADRLDAGAGTSTHTGRPFDRRRYAYLALAIAALGRGAGQITLSELAEHVASEASRVDGVELDTERAADRDAFVDAVTWLGVRGAITLADGDAGRWASDPDSGEALYDVDRAVVHALFRPPRALQHLESVRGLLGNAGAPQSDTAEVRRRVRRALVQRPVVYADDLDDDEALQLALPRTTDEVKLLTGLVCERRAEGVALVDTSGRLSDVRFPNTGTVAQVALLLAGEMCDRVLDPDAPAPPRIPVPAQTQDALLAAVDSAIPRSTVFTPLAASDTPIPDELEQDDAARAPLEHPLLEDSWLAGTVGRLVDIYGRTFAAQWQADPAGLAEAAVDMLDRLRLVARVPGGVLVLPAIARFRGVTVSVRERDPEIDLFPETTPPTVPAPDTNPTEIS

SEQ ID NO: 38987 - protein, 1386 aa, Rhodococcus pyridinivorans AK37
MSSARFRPTRAGIINLWDYRDQEFSFADGRLVLRGPNGSGKTKALEVLFPFVLDGRIEPRRLNPFAGEERTMRSNLLYRGQDSAHSYVWMEFCRGRADDPEAVTIGIGMRATRGNDKVTRWHFVVDGRVGVDFSLLDDEDRPLTRKQLVDQIGADAIADRPVDYRAAIDARMFGLGAQRYDQLINLILTLRRPQLAKNLDPKGLSQALTDGLRPLDDDLLVEAARSFSAIEEVERTLESLAAADDAAQQFVKVYSKYIRQQARTAVDKVATRLGVVDTAVRSLREAAEARTEAATARTASEEQLLVAERDHEQARTTLEALHRSSAYEGKQQLDDLASAVKNLERTTAAQAEQANRAQAVVADRLRDHDSARDALETATAARRRAEDGLSAAAEDAGITWTGLDGIERTEQLSAAIDALAEERDADVRVVRSALSQLDGAAAARSRAEAAAVRARAQRDTASAAVEAGETMVELSRSEVAAELGRWWSDRAETFAAVGLSTPVFEALDTAFGTVGQDDAPSPAAVFAEHTGPVLDDLRFRRRVCGAEIESLGTRIAELEAERTAVAAESDDAPPTSPARTGNRDDLVGAPLWQLVRFRDDASAQDAAGIEAALQGANLLDGWITDGVGDLPDIESEQLLVPLAPGHRPSGPTLADVLVPETDTAVPEERVAAVLSSIAWATDPGPDARVSVDAHGRFRQGVQLGRHVKEQAEFIGATARARRRQRRIVELETTIAECRADVASLREQDREIGDRLTALDEAVKSLPRTGSVLAALRKVTECAGALRTASESASAADRDLDQAIAAVATKEQHLRSTAGRHRAPLTATELDSLDAAVRHFRSQGQALQRALREQVTCGDRLRDNDVRLDEARVSAENAAELAAENAETLANEQQKLETLRESIGASADRIDAQLDEARRRIEAAKTAERTARKAHESALERIGKAEAAHTGAEQTLRSALTEARADADALAPFARRDLLTLLGAESEHMWPSSAAAWLDADQLTYRIRQSPDDTVDVLPTEVVALFRALDAATDSVTASESTRKSTASALTSALQEFDAELARGRDYRLHWDAADGITVVQVQDEQGYTSVAAFAQRIARARQEQETLLTDSERRILEDALLTGLAQQIHERTVDARDLIARMGTEMRQRHMSSGNTIGVHWVLADHLDEPARAVCKLLDRDASMLAPDDLAGIRAHFASRIRAERAAHPERSYPEILAATLDYRRWRVFSFSLVGADGSEDRLTPARHSALSGGEQSVSLHLPLFAAAHVMLDSADPHAPRLLALDEAFAGVDDTGRSELLGLSVQFDLDLFMTGFDLWITYAGVPGCAHYDLSHSVAEHTVATTLLVWSGGELLAEHDGSDLESALGSPRTRRITRPVEGALEFA

SEQ ID NO: 38988 - protein, 509 aa, Rhodococcus pyridinivorans AK37
MGEHIGRDLFRHLVADEANEYLAVMDCFTDLLLADLSADDIAVSCARRGVALDIAVVDARCRSLVRWGNLALTSGGTDGGGSHRRSAPETASTEVRARYRPTPAGLRVHRETGRLLSTSDDVRGVARVSLRCVADGLARIEELLVDDGNVPDRDELAAHVTALFAHHRMFTDSVADFYSHLAEILSRLEHSGRPEHSSDRERAGAVDDYAETKNLLLDYVDVIGSDVERLAPLVAGRLDRIRPRLDSLLAALRESGLPNTVPGSPGRRRTDWDELAQWYAEDAGPRRMREAAAEALNRLLVRTRRIMASTPGFSHRADLLRLARWFTESSDEQGHRLFAATFGAFPSRHLLLGPDETDPRVGAGTSWWRADPVVVPVSLRERGDHTSLGAVGRLPDSMPGRVRADELARRESRRRSDAVAELSAAGDLHGADLSAEARDVLLDVLAAALAGHLTTDGPVQVDDPDLGLSLTAEPGADTVVHSPDGDLTVHGFSLRTSVTASVDHSAAAP

SEQ ID NO: 38989 - protein, 284 aa, Rhodococcus pyridinivorans AK37
MSTSHASTVSGDVSGRRDAARALLQQPIVTAASERETFDLVRRHAPALKSMFADRLGYRLVVEPTFARLIKAPLEPTSPHRALRHADGTEFGAITYACLALVCAALLEPGTGERVSVDDLLEQVRADARENGIVFGDPVSEERNLAAALRVLEEWGVIAESGHGDEVSGDEVRGDEPHLDVHRDLLSQLLDTPLHGMPGPAAALTRHEHEPAALRLYRRLVEDPFVARDELDDESATILARDRHELARMLENDFGLVLEVRAEGALAYDPAGVLTDEAFPGSAP

SEQ ID NO: 38990 - protein, 1408 aa, Rhodococcus pyridinivorans AK37
MTHSSDPSALDENSPPRFPDRWRLHRAGIVNVWHYLDVEFVLSGGRMILRGTNGSGKSRALEMLLPFLLDADRRRMDATGAAKVDLDELMRTGASDTTDRVGYLWLELARPSGHLTVGAQVRHRADARRSDVHFFTTPLRVGTELHLIDDARIPLSRERLAELVGADNLTRDPERHRETVRKSVFGLHAETGRERYDGLLQLLHTLRSPDVGHRIDEGRLPQILSDALPPLTENMLAEAGGRLDLLGDTRQEQVRLEAAHAHVLRFHEVYRQYAADLLRAGAETARDLAQRVVETRRALTVAEAEAADLDAQAAAVDTRLKERRDQVAELDRAIRGLETHEMFRSADDLAQRQLAVDALRRAAEHATAAADRSRLQERRHTDHAARLLDELTCSVTRAARRLATVGRDLLSVGLPHDTAPTTLHFSADRPPAVLEPVRTGIDDTTEPVVRPVVATVSLDAGHVDEVRGAILRAAEATRRRRDQAGRRLLEARRLDAAAHAVREAEAAADRAARDAEQRAVEAAETDAGVGAAAAGLQHRWREWITADRTTALLPELDRDRVILMRRLSTRLDALIDSSPTDAGDTDSEDVDVDSALAELDSLPAAAARSALSDLVGAPADRERREREARTAREDLVREQAALDAIGEGPEQAPWHVRTDGVPLWRAVEFVDTLGDDDRAGIEAALLSAGFLTATVDGEGRLRALGGQVLVSPRGEPPAQPLSTVLRPDPEADVPRPAVEAVLNTIGFEDATAVASVSRDGRWHNGVLRGRHTAETPGCIGRPAREAATAARRVRLDEIRAELTRIDLAVEQLRVDYPDAAHRRAKIDAHLSTAPTSHALRSALERRRHAYAHVRSAANTAVELRERATTLRARWTAELDAHRTACEHFGVPGDVPELEALVAGCASAETLCTELARDLGDVLAAHVRFTDAAERCVQATAERIDSEEIAESCRYEWHAKAAVVAAQTAAVDVDAADLAQELRDSEAERARADEQFRRTVAHRDHLGRAVAEVLQRCAAARERLDRDRRELAAAAELLAAHLQLPELRGALEEDPESDSASARTVLPPVHLEDPDHVLSVARTLLATLPPRTGVDENAMLVALQQFDRDLTARFDIEHTVTHGAHRVRIAGAGDDTTPAGLSVTLTRQVEDGRRALSQREHDVFTGFVLGGVADELRRRIERARQVIAAMNDSLADSRTTHGIGVRIEWRPGGEDADAARLTQLLTATERSPEDASELVGVLRRRVESAHTADPSAGYAQHLSQALDYRRWHEVEVTILGPEPDRERRISARAKISQGETRFVSYVALFAAADAYLSGLPDTGTALRLVLLDDAFAKIDDPTIGELMGLLVRQDIDFVMTGHALWGCVPEVPELDVYEVRRLADGAAVTTRVHWDGRVRQLRPLTELQT

SEQ ID NO: 38991 - protein, 523 aa, Actinoplanes sp. SE50/110
MRVRPDSSEDDDDERPAAGLDLWQLAGLPGGLLQASYLTSRFAAQYRLIVDVLLAEQEHTLTGVAATELPDLLRRRLRHLGVDTALLDDPGFRLKERMARLERWGVVYTFQDKAVRDAEFVLDRDRYQLTETVAQLHRAITSLGDDSAAEAAATLAPGILTANLNLLYEYARTDPAAAAAAWSVIATTHQSMVKAAAGWQARLAGALAGAPTPEKITTVQETLRRYVDMWGAGIDTHSDTITTRAGKLALLPAGVWRRIAVHTLGTNADNPAIDALVDTHQHTLQTLRRWFDGPDCQARKLRRQMRDTIGPLLRGQRTLAAVGGHVSRRAELLALAARLESAADDHAAWRLWCAATGLFSARHLPGETNPPAGSAGAVSFWEADPVPIEARLRKQGPKAVTGTAARIADRTGAKRAARERAARMAAHAALTEAAILARSGQRLSQWRNVSADELQMLLVLLATIAAARPDPTGIRSATTGDARWLLHADPPPDGAPAAIVHTPDGRLVHPDIALHITPAGSRP

SEQ ID NO: 38992 - protein, 387 aa, Actinoplanes sp. SE50/110
MNTATSAVEKQAQQAFLGLLAQPLITPATNRILHRHVLRHQRQITDHARRAGYRIQRVGRAVRLIRVPIGGQVTAPPRPAGAPGRRLLALACCLAACCEEVSTTVTLQQLSDMVRDLTGAAGSTVTGYDPELKPQRRLLRDAATLLADWGVLRRRTSDEMLLDWTEDGAGPGAGYDVDRDALLLMTSPDVLAAALHTAAADAEQLAATRTVRQLRELLETPAVVYADLDEHDADALRKARGLRTADLAQMTGGTVEARAEGLLLVLPDDPDRQPSVVDWPRARAADWVALLMADLAGRHGARTSTGTVRLTGTQVDEVVDDLVAWRGDYMSKDQKTVPGSVRADAETILTELGLLQVGADGSWTLSPVAGRYRDPDITLIDTTEPTR

SEQ ID NO: 38993 - protein, 1058 aa, Actinoplanes sp. SE50/110
MTMIDLPAPGPAATDEQLAAWRDAVTTAGLPAPSRSRWQVLRAGVIGLWEFDVAEYWFADGRAQFVGQNQSGKSTMMALTTLLMLAGSLDRKYVDTFGESEKEYRYYVEPVTDDRDRRDASTSTNRGWAWVEYGRVGPLGAPEFFTTMLYTQTKRGVKQMTRAWVVCRGTARVRDGLDLAVGQAVTEPRELEGVDGLTVYPKGADYTERLATDLFGFDDTERYATVIEMLKVLRTPHLGQKLDPAWFTSQIRSALPPVAKSEVTELANGWQELEQLAHDRDHADEARKAITVYLNRAWRPWADAVLRLHADTLIAADAAFIKAGDDATAAERKLEQARARLNEETQNTIDLEKALGRTRADLMQLLRSSAYTTAVDRADDAKRLRADANAAAERARKATAQLATTRVDLQKATGRRDTTRAELGVARDEVEIAGGHAVEAATAAGLGEHAPAWAAAGDVDRFDAAIANRRGQVAALRKLIRAASTAAATWNTLDDLAQKAQTELHNRTAAATATENALQQAVQTLSDDLERWASALDEWAPPTEIRTQWITAVTDQTRVERPRELLTALLTHQWLEPVTVPLITRAADLRAAAKTATHQAAAADAEADRLAAAGDPIPSPPARWTRRERPAFPTAAGAPLWRLLDPVDDLDPAVLDHVEAALAAAGLLDTWVTPDGTFNPEHGADVVITTGTLPAATTSLAAVLQPAEDAATLTEAVTKVLHGIGYTPDGPLTTTVCLAADGRWQTTAAAGRAAPAEHGAALIGTAARAATRRRNIAELRARATAFRDEAQRLAGEADTVSTRVTSLRAIAGQAPTDADVVAAAAAHTAATAEAEKAGTAHRDARSREAHARTLSQEKSAEVTRYGTDNRLPTGEEHLDALAAALDTTATAAGTLRLALRGLTAATAAATDAADRFITEEDRVSAATTLAEDEAAAAELADTNATLAEQFVDADAQQLFAQAEELERRVEEYGPSISASRREGLARSKEAGEAENAWKSACKDHTAAGEHRDVAATAWWTPVDAGLTTARNLPTPDSRDLPAALAVLTTDVGDGEILK

SEQ ID NO: 38994 - protein, 528 aa, Streptomyces cattleya NRRL 8057 = DSM 46488
MSDAPPPQPFAYLQAPNAALYGQVLAVFAQARERFIVHLRPEDVAAELRQGSGGTAAVPVGTEAVGAALEKLVEWGNLRADADTGRVTSVEDFHRARYLYQLTRHGQAALRAMAVYEQALGRRGELQSVALADIAEQLGSLLVLAQAEDPDPAKTHLLLLQIAERFGSLADNAQAFMASLRRTIDFQDGDEEAFIAYKDRLVEYIERFIADLAGRGAQIADLLTRLNAAGVGRLLLAAARREAGDAVPDSDEPEAELARAEAAQSALVAWENRWRGLADWFLSRSPRQPSQAKLLRGAAVSAITGLINTVAALNERRGGRSDRSADFRALARFFAQAADDAAAHRLWRAAFALTPARHLTVDAATQAAWQEADLAATTPWAEAPPLEISPRLRETGSYERRGRPNRVADRTAARQVLAEQVEREAAQTTAARARLATDGPVLLSELAGPDGLDPHAFRLFLAVLGDALSARVPGESESSALTGDGTMEVRLKLVDPDTTVRIPTADGVLCGPEHIIEIIDLAPTGDVV

SEQ ID NO: 38995 - protein, 396 aa, Streptomyces cattleya NRRL 8057 = DSM 46488
MTDADVQAERRRAARALLASPLMTSGSEAKRSEDFRLVRKHAGELASWFTQETGWRLVVDAGAARLYKTPARPDDATRPARAPRTRVPFTRRRYVLLCLALAVLERADAQITLGRLADGVLTATGDPVLVAAGIEFRMDRREERSDLVAAVRLLLEWGVLHRVAGDEEAYLSEASNDVLYDVRRRVLAALPAATRGPSTVEAAAPDQRLTLLTSDVAPDTEELRLRALRHRLTRRLLDDPVVYYAELPEDERAYLVSQRHAITRRITELTGLVAEMRAEGIAMVDPEDELTDLRMPEQGTDGHATLLVAAHLATADGPRTEPQLVELVRQLAAQHRSYWRKGAAEPAAAAELLSQALDRLTALDLVTREGGHVTAKPALVRYALAAPTIRKARSRA

SEQ ID NO: 38996 - protein, 1367 aa, Streptomyces cattleya NRRL 8057 = DSM 46488
MTAPLPEPTRTRWQPLRAGLVDLFYYDAEEFRFHDGRLLLRGNNGTGKSKVLALTLPFLLDGELAAHRVEPDGDRAKRMEWNLLLGGKHPHDERTGYTWLEFGRIGEDGKPQYRTVGCGLKAVKGRGIAKHWFFTTSLRVGAQLPLMSATRVPYTRERLREALEGHGLVHDTAAEYRRAVDEQLFGLGPGRYEALVNLLIQLRQPQLSKKPDEKLLSKALTEALPPLDPALVGEVAEAFRGLDEERHALQALAEASGAAADFLTHYRRYAQTAAKRQAAVLRVAHSRYEHLGRDLGEAESEHTAAEERLGQAEARLAELEDARETLAAARDALTRSPEMDAARELEQAGKTSEALRAVADDRTGACRTARRQADDWQRRAAAAHAQHETDRAALAAADDAARHAAEAAGIDHAPVAGTLEGDHAPFQDTRRAGERAVERRRQAVTGLAALLAAAERAHERSRTAQTEATRRSADLEAARERSAEAARSVAEQGAALTAAWRAWAVGTTELRLPDPDQALAALEAWTDTLAGPDPVAEAAAAAYHAAVGALTRREAGLDAEHAAVRRELAAVEEEIARLESGGHDAPPLAHTRDPGARAGRPGAPLWRAVDFADAVPAEHRAGIEAALEAAGLLDAWVTPDGTLLDADDAVLLPGTGAPGTSLAAVLRPAVDRADPSAAALDDAAVRAALASIALGADTDHHTWVATCGRYRIGALTGRWTKPAAHYIGEGAREAARRARLAELADKRGELAFRLNEVSEQLAAVRDRATALAAEQQNQPSDHALREAHARAGHEAEAVHRLTDRLTDAEREAATRQEDADRADREVHEYAQDTGLPTTREELEQVRDAVSGYAAALAALLPAAAARARSATLAAETAAEAEAAATALAEAEEAETAARRTADAAAERHRVLAETVGASVEELYRRLAEADAAIAARDAEEKTTRRRRDEAMTARARAEGRCSEIRARIEEATAERDRAVAALRAFAATGLLAAALPELAVPPLDEPWAPTPAVALARTINQELDGTDDSDRRWELIQQRISAEHKTLTDALGRHGHSVGMTLHDGIMIVDVVFQGRTHDVPALAASLREEVAQRTRLLSAKERELLENHLVGEVAGALQELIATAEEQVQAMNEDLAARPTSTGMTLRLVWQPAKDAPPGLEAVRARLLRQSSDAWTPADRATVGEFLQARIAQDRENNPGDSWADQLTRALDYRTWHAFTIQRRQDGQWRPATGPASGGERVLAASVPLFAAASSHYSSGSPHAPRLIALDEAFAGVDDDSRAKCLGLLASFDLDVVMTSEREWACYPTVPGIAIAQLSRREGIDAVLVTPWRWDGVARTRETRAVPYVPVQAAAAGQTHPSLLEQ

SEQ ID NO: 38997 - protein, 433 aa, Streptomyces cattleya NRRL 8057 = DSM 46488
MTDLPRLRRLLGGPETAWLLDRARDRMATGRPLDTPATLKAATPEQRRAIELLLGRRLRSGSSLTVPLADVDRVLRASQACPNGLAAAVVALTGPVTDRRAQDTALAAAWRQALAELDHPAIAARAELAPWRAKMEATGLLKRLSGGDPATARRLAVDVVRVLSALPADGLTLPVLAARTLGDAHALDDGRPLAALVLSAVRALAALPAETAAGAEGRRAAWAAVGVALDDLSSRVLVLGLPGSTGDTTGRILAAAREGGEPCVLTLRQIAAGPLELGLTDHTTVHACENPAVLAAAADELGPGCPPLVCVEGNPSAAARTLLSHIADQGYPIAYHGDFDWGGIRIATGILRLPTAAPWRYDAPSYLTAVDRGLGTPLTTGIPAPTPWDPGLALALTHHAVRVEEEQLLDQLLADLHSRCTRADGGARRRHRG

SEQ ID NO: 38998 - protein, 528 aa, Streptomyces cattleya NRRL 8057 = DSM 46488; identical to SEQ ID NO: 38994

SEQ ID NO: 38999 - protein, 396 aa, Streptomyces cattleya NRRL 8057 = DSM 46488; identical to SEQ ID NO: 38995

SEQ ID NO: 39000 - protein, 1367 aa, Streptomyces cattleya NRRL 8057 = DSM 46488; identical to SEQ ID NO: 38996

SEQ ID NO: 39001 - protein, 433 aa, Streptomyces cattleya NRRL 8057 = DSM 46488; identical to SEQ ID NO: 38997

SEQ ID NO: 39002 - protein, 493 aa, Erysipelotrichaceae bacterium 6_1_45
MELYDKLLKPITEVNYLRAENVDRYRIIIRYFYQEHEKIHYWMFKEDIYDMISALPGYEDYTMENCQNDLQALCDWGNLVATQDTSVPNTLQEFKNKKFRYQLSEYTVVIERMTIELEHLAVEGSSLEPTLLERIRKQILQLLAVRDKSHMEVADWWRSLNDDFIRLNQNYQDYIKTLNSAKAEQMMKSREFLVFKDKLITYLQTFVKSLQEHSMIIEDYLSGVKDEDMALIFDKVAEYELSIPRINSHITKTAVLENCQGRWKSLFNWFVGENDNNEVNRLFEITNEIIRKITRYALQIGELHNQGANRKEEYRRIAEIFAKCNTMDEAHRLSALVFGADTCMHLKNIAPRDTDSIHSGVYQEASAFLALEPRTKVARKKHERKPATDYALDRRIQRLEYEAQREAEQKKIKELSKNGEIIFSQLSLLDKATRKALLGWVSKALAASDRRAKTDQGQHYHIEKEREGDCILHCEDGNLVIPCFKILFDEEQL

SEQ ID NO: 39003 - protein, 376 aa, Erysipelotrichaceae bacterium 6_1_45
MRIIEELMNRRWILKSQDPQLYYEIKDNAKELKKKLQEKFGYALIINPYLVKLEKIPGKAEGWMGITEFETLMEYQMFCYLLMLLEDKEAGERFILSNICEFIQVQFPKGELEWTSLRARRQLVRVLQYALKMGMIISREGDEDYFLKDETSDILYENTGVSRYFIRNIPKDIMDFHEPEDFLQSEWFDMEEDRGIVRRQRIYRRLMLSCGVYHTAGEDKDDDFGYIRNYRRNIENDFQSLFPCQLHVHSSSAFLVLEEDCSMGKVFPKTHAYYDLLLIVHDDLRKRVKTSRLSLDQHEGITLRLEEYLAIVQRLIKKNNALLPKKYQIENRRVEDSAMDVCNLAQTLGFAQVQQENVYIYPVAGKITGTYAEVTE

SEQ ID NO: 39004 - protein, 1344 aa, Erysipelotrichaceae bacterium 6_1_45
MSELISKWHMHRLGLVDFWYYVNKEFSFKDGHMLLRGSNGSGKSVTMQSFIPLLLDGNKSSERLDPFGTRSRKIENYLLEEGGERTDRIGYLYLEFKRSDSEVYKTIGMGMHAKQGRPLVSWYFVIEDNLRINREVQLLDHNLAITKQVLKNRIGDTQVMDSQKEYMDRVNQALFGFETSEEYKEAITLLLQLRSPKLSNSLKPTMINEILSESLQPLSEDDLRPMSEAISNMDNIKDQLDALKQSYASAKAVYQVFEQYSHAVLFEKYHIYQTVRQTAANLHEAYQKYEEELQRHQQETKQKQENRTQLAQEQALLTEEKLSLATDDLQRLVEDCTRLAAEKEDTIQKLQHKETQEEEKSDRLQELRVQHKTQSDRCEQALSEMKEAFDQLDVLQEELLLEDHLLLKEEMFQHPDTPYDFTYIGKRLDAKLRLLEEGLQLFNSYDVAKSHHKQLVEELEQQKQTNEQQEHLVAQLDEQCDRIVEEYKERISQWSANNQHLKLTDEEFHKMMHLLMQYEEQPDFYKLTDIIQQSYQTLYKEIIHLQIEQKEMAETCRMNLEQKSAELHMWQTQKDPSPAIAGEQEQARQLLKQHQIESRSFYTLLEFDEQMDEELRALCEEALLRLGVLDAQVVHASSRSLIETLASGSGDMYFFTQRNVRDLQPYYLKGTTPEQLAGEINTVLTSLHITYDGKLQLHDAMFQTGIVEGKLYQSVSARYIGENARQKYREQMILQLQKACDMLKKEYDQEMQKLTDLDKRLEQLEQEASAFVKEDDLHLALQQLNEGRRILQHDIACYHQMEERLRRHLEAMQGIEKQLRETAGKLSITLRRNVFEQQKDGYNSYRKLLQLVQTKQPIFIQSLDFVKSCETQIEDAFRDVSEFKAEIDTLRELIKKQNLLLQQKEKQLKDLGYEDKQKRLQQIEERLHKLPDLMQELDTRLGQLQSLVAATSQDLERTKQDIEHQDALVSTYFDVVKNEAALGYTNIPLCEDGQLIKEIRNLEKQTEVLKKPEALKMDLQTAYYNHRSNLQEYNLTFTTDDTWEELTDISARLDINARYQGTSLSFPELLDCLQRDVDLQNNLLVDSDRHLFEDILVNIISKKVRIRIQNSRAWVDTMNRYMNAMNTSSGLHLNLQWKSKKAESEEEMDTRQLVEILQKDVKVVKESDLKRLSSHFRSKIAAARNLQNIENNTLSFHQLMRQVMDYRTWFEFKIMAQKTGEAKKELTNNTFYAFSGGEKAMAMYVPLFSAVAAKFESAREDAPLLIALDEAFAGVDEKNIYNMFDLISKFKFDYIMNSQVLWGDYASVKGLAIYELFRPENARFVTVIPYEWDGHIKRMKGDLS

SEQ ID NO: 39005 - protein, 427 aa, Erysipelotrichaceae bacterium 6_1_45; identical to SEQ ID NO: 38892

SEQ ID NO: 39006 - protein, 493 aa, Erysipelotrichaceae bacterium 21_3
MELYDKLLKPITEVNYLRAENVDRYRIIIRYFYQEHEKIHYWMFKEDIYDMISALPGYEDYTMENCQNDLQALCDWGNLVATQDTSVPNTLQEFKNKKFRYQLSEYTVVIERMTIELEHLAVEGASLEPTLLERIRKQILQLLAVRDKSNMEVADWWRSLNDDFIRLNQNYQDYIKTLNSAKAEQMMKSREFLVFKDKLITYLQTFVKSLQEHGMIIEDYLSGVKDEDMALIFDKVAEYELSIPRINSHITKTAVLENCQGRWQSLFNWFVGENDNNEVNRLFEITNEIIRKITRYALQIGELHNQGANRKEEYRRIAEIFAKCNTMDEAHRLSALVFGADTCMHLKNIASRDTDSIHSGVYQEASAFLALEPRTKVARKKHERKPATDYALDRRIQRLEYEAQREAEQKKIKELSKNGEIIFSQLPLLDKATRKALLGWVSKALAASDRRAKTDQGQHYHIEKEREGDCILHCEDGNLVMPCFKILFDEEQL

SEQ ID NO: 39007 - protein, 376 aa, Erysipelotrichaceae bacterium 21_3
MRIIEELMNRRWILKSQDPQLYYEIKDNAKELKKKLQEKFGYALIINPYLVKLEKIPGKAEGWMGITEFETLMEYQMFCYLLMLLEDKEAGERFILSNICEFIQVQLPKGELEWTSLRARRQLVRVLQYALKMGMIISREGDEDYFLKDETSDILYENTGVSRYFIRNIPKDIMDFHEPEDFLQSEWFDMEEDRGIVRRQRIYRRLMLSCGVYHTAEEDKDDDFGYIRNYRRNIENDFQSLFPCQLHVHSSSAFLVLEEDCSMGKVFPKTHAYYDLLLIVHDDLRKRVKSSRLSLDQHEGITLRLEEYLAIVQRLIKKNNALLPKKYQIENRRVEDSAMDVCNLAQTLGFAQVQQENIYIYPVAGKITGTYAEVTE

SEQ ID NO: 39008 - protein, 1344 aa, Erysipelotrichaceae bacterium 21_3
MSELISKWHMHRLGLVDFWYYVNEEFSFKDGHMLLRGSNGSGKSVTMQSFIPLLLDGNKSSERLDPFGTRSRKIENYLLEEGGERTDRIGYLYLEFKRSDSEVYKTIGMGMHAKQGRPLVSWYFVIEDNLRINREVQLLDHNLAITKQVLKNRIGDTQVMDSQKEYMDRVNQALFGFETSEEYKEAITLLLQLRSPKLSNSLKPTMINEILSESLQPLSEDDLRPMSEAISNMDNIKDQLDALKQSYASAKAVYQVFEQYSHAVLFEKYHIYQTVRQTAANLHEAYQKYEEELQRHQQETKQKQENRTQLAQEQALLTEEKLSLATDDLQRLVEDCTRLAAEKEDTIQKLQHKETQEEEKSDRLQELRVQHKTQSDRCEQALSEMKEAFDQLDVLQEELLLEDHLLLKEEMFQHPDTPYDFTYIGKRLDAKLRLLEEGLQLFNSYDVAKSHHKQLVEELEQQKQTNEQQEHLVAQLDEQCDRIVEEYKERISQWSANNQHLKLTDEEFHKMMHLLMQYEEQPDFYKLTDIIQQSYQTLYKEIIHLQIEQKEMAETCRMNLEQKSAELHMWQTQKDPSPAIAGEQEQARQLLKQHQIESRSFYTLLEFDEQMDEELRALCEEALLRLGVLDAQVVHASSRSLIETLASGSGDMYFFTQRNVRDLQPYYLKGTTPEQLAGEINTVLTSLHITYDGKLQLHDAMFQTGIVEGKLYQSVSARYIGENARQKYREQMILQLQKACDMLKKEYDQEMQKLTDLDKRLEQLEQEASAFVKEDDLHLALQQLNEGRRILQHDIACYHQMEERLRRHLEAMQGIEKQLRETAGKLSITLRRNVFEQQKDGYNSYRKLLQLVQTKQPIFIQSLDFVKSCETQIEDAFRDVSEFKAEIDTLRELIKKQNLLLQQKEKQLKDLGYEDKQKRLQQIEERLHKLPDLMQELDTRLGQLQSLVAATSQDLERTKQDIEHQDALVSTYFDVVKNEAALGYTNIPLCEDGQLIKEIRNLEKQTEVLKKPEALKMDLQTAYYNHRSNLQEYNLTFTTDDTWEELTDISARLDINARYQGTSLSFPELLDCLQRDVDLQNNLLVDSDRHLFEDILVNIISKKVRIRIQNSRAWVDTMNRYMNAMNTSSGLHLNLQWKSKKAESEEEMDTRQLVEILQKDVKVVKESDLKRLSSHFRSKIAAARNLQNIENNTLSFHQLMRQVMDYRKWFEFKIMAQKTGEAKKELTNNTFYAFSGGEKAMAMYVPLFSAVAAKFESAREDAPLLIALDEAFAGVDEKNIYNMFDLISKFKFDYIMNSQVLWGDYASVKGLAIYELFRPENARFVTVIPYEWDGHIKRMKGDLS

SEQ ID NO: 39009 - protein, 427 aa, Erysipelotrichaceae bacterium 21_3; identical to SEQ ID NO: 38892

SEQ ID NO: 39010 - protein, 554 aa, Desulfosporosinus youngiae DSM 17734
MIDYLTKKVSVYSVTERKPGTVNFFVNKVGFQQNSAKLREALLILIYEVISMNEQLFKPIQEATYLTVPNAWRYRSILRYVYQQHERLRHYIVLEEIFQHLQQDAHFRELTEEQFQQDLDQLVAWKNLIPRQDTGRVSSIAEFKKRKFRYQLTPYTIEIERMVLSLEQLGEGFGGSLERTIFDRLLGNLKDLTQAWEANEAIFHKTNEEMYLLWQDLYENFHKLTDNAADYLAHLHSEKVEEQMMTEAFLVYKEALTEYLRNFMTSLQKTSFRIEGLLMEIPELFSRKLTQCVAEYELSIPRLDVRPPQEQLMERFQTEWESLRTWFLGDGGRESDLIYLQNATNETIRRLTRFAQRLGETHHNLRNRRLDYLHISKWFASLETLQEAHELSACVFGVFHTRHLWVDSPKQTESFEVEVWDEPPSELQIRPKVRSYKEKSRPNAVVDQSERRKAALEAYLKEKEIEQQLLENLIQDNRIVLRSLPELTTFIRKTLLTWISKCMASPDRQGKTETGRLFSLKRISDRPIQLNCEDGLLEMPDYVLVFEKKAEAAR

SEQ ID NO: 39011 - protein, 407 aa, Desulfosporosinus youngiae DSM 17734
MSEKKGFDEVAREGLIALLENFWILREQDPETYQIIRDRENALKDYVLDKLGYHLIVHRHFAKLEKIPAQPEGWMGIELFQQPRDYALLCCVLAYLESITGYEQFLLSDLCTEVQALYPGELALDWRSYEHRKSLVRVLQLMIELRILTVVDGETSTFGQNESNEVLYEVSVVARYFMRSYPKDLFQFQSKEDILAAEVFEGEDELLGARRRYRIYRQLLLSPSMYRSTAEDGDFLYLRNYRARLQDDLEKHTGLQLELYRNTALLVAPEPKSALTLFPNQKGISDIALQFGSILRTQVQEGLHSLDSFGRVALTLLEFEQTVKLCKEGFGFGWSKQFREGLIRNTAEELLDFLLDWTFAQRSEEANVILLQPALGRLAGDYPPEFRNKQQAKAGSLDEEHEEIKDI

SEQ ID NO: 39012 - protein, 1409 aa, Desulfosporosinus youngiae DSM 17734
MRWQLNRAGLFNFWYYDEEEFHFADGKLLLRGSNGSGKSVTMQSLIPVLLDGRKSPDRLDPFGSRARRMEDYLLGEKDVSDLDERTGYLYLEYHRPGTQEYLTTGIGLKAKRQGTLDFWGFILWDNRRIGRDFQLFKTERALNGTLEKIPLTRRELEHRLADGGEVVKTQKDYMERVNRYLFGFKAVEDYDDLIKLLIQLRSPKLSKDFRPTVVYEILNAALPSLSDDELRPLSDTIETMDQIKSQLDQLQKEEQALKRLVRYYDQYNHKVRGEKAEGFLQAHQRLLAAAQTLKRLHLEREETESALSKRKEDEMSLKREQLVLGQEREALEEHDVFKAEKERSDLQQKQRINQENLVAKQKQLAGNVSQEGKLKEQIGGLELKEQRTLDRIHEELEELEGLAEESDFLNHEVAAHEFEKNLEQLFSFALWKKEARDYQSLLERVSKALRQEAAGREKYQEAELMLGESKKAWDEAQHQEKKWADVLHEEQSKWVENLFAWQPLNQELWLEDIELQTLAQRARSFPESVSTNSLREPLQNAANRARDKIRTEILQARHQQDQLQRDVKAKIQEIESWRQRKDPEPSRHDLTNQARQSLQGAGIPFVPFYAAVEFHDQVPQETRERLESALKEMGILDALILPELFAPQTAEQKQVLQSTPVHDRVLKPDPQILAHTLADYLYPTPAAGSQVMAEDIDNLLRTILVEEGRAEGNGSTTLTTAGSYRIGALQGHAPQEESALYIGKEARLQLRLRRIKQLEAEREVLDQQVQELEGRLQTLKQRSEILEAEYRGFPGETAIQEAWDIIYTVRKEAALLEKDVQRKNETLLKTLEAWRNLKAQVKELSKTLTLPLDELAYEKALEAVGSYKDELNTLESRHQQLHSLRRERSAVLSHHQDVAEAVDELRGDINELEDQSLTLRDLLRRVEQRLQDLGADEIRRRIQIVIRRLSDLPGEIETCIKQITMLTKNLEDFTQKILEQERDCSLAENLHQGWAKVFQAEETLQTSFYHDLEGELKPDSHAKVPALSSAPLHESHLGDLRQRAEEFLRSQDTRNSNSPDRETLRERINDAFTKEMGNLVEYRLTQNTLFEALDELSRQREEGPELWLKLWEELRQKARRLQLMLEYDGKRVNPYYLQAQLGKNMTLQRQLLNEKDRELYEEIIMNSVGRIIRGRIQRAEHWVEEMNRLMDERDTSSGLRFRIRWKPRTAEQEDEIDTQDLVELLKSDPRLLKETDMSRITNHFRAKIERAKQQLEIKGFGESFHQIIKEMLDYRHWFEFRLFYQKEGENWRELTDRAFYQFSGGEKAMAMYIPLFSAAYSRYSDARPDAPRIISLDEAFAGVDENNIRDMFDLLEKLGFNYIMNSQALWGDYDTVSKLAIAELVRPKNASFVTVIRYRWDGKVRCLDV

SEQ ID NO: 39013 - protein, 459 aa, Desulfosporosinus youngiae DSM 17734
MQSDELEKAKAYFTSTKGFARLFKAMAQKYQSLGRWGGSVTLTSPKDEEREAFSALFRADFSRQKSITISLERFAKALEFTKFSSVSPVSLLEEIQGESLISNAERTAGKERMKAGFFGDLLSRYPQPYCQRWLQAIIAKKSGTRPVHTAYETHPELLRVQMDHVLKALSDMNRQLPDKIERLPIFARRITKDPHGFDANSDTGRLLIQAMKILDSEVRGRDPLTFPLTGTEELTELYYSFGLLRDDLWNFVTCTGITAAAVDHENKDLSYLAEAYRQQVTLNLPLREVVRMGNAYAGARSPNESAKVVFVVENSGVFSALLDRFRGYSEDEGLAESPNPPFLCSHGQFKLASLLLLDKLAASGAMIYYSGDFDPEGLLMMERLLLRYPSQAKPWHYTVADYQLAQSEQVISPQRLKQLDRVVSSELVPLAEEILRAERAGYQEGILSELWRDIKAHER

SEQ ID NO: 39014 - protein, 496 aa, Acetobacterium woodii DSM 1030
MKFEVTGKLTKQIDEMRYLTVENAWRYRSILRYFYIQYEKMNYWLYKEEVYEVLKENQEFKEYTMDMCKQDLDMLLSWKNLSAIQDAAKVSTVEEFKNKQFRYQLSEYSVEIERLTLRLENLFVESASLEPTLLERLREELKKLPQVAKQSEKEVGSWWSSLNSDFKRLNQNYQDYIRDLYSIKAEEMMKTQEFMVFKDKFIEYLRDFVKGLQNHANAIEYSLKNLSLADIDQVLKKAIAYEVSIPRIETEIDEAGISENIYGRWDSLNAWFLGAKGNESEATRLMDITNDIIRKITRYASQISESRNSAINRKEEYRKLAELFDQCQDIKEAHRLSSLSFGIFQMKHIKSDHFRETESINSQVFEEIPAITTLKPRVRGYQEKAQRTPIHSNSDRKEAMMKQIRRERQMEEKTIENYVVDDGIDFATLPVIERHVRTTLLKWLSKGLAGFEKKGKTEDGRVYQVELPKESDRRCLLRCEDGDLEMPAYVIRFLDN

SEQ ID NO: 39015 - protein, 381 aa, Acetobacterium woodii DSM 1030
MKELEILLDQYWVVKDNDKDLFYRVKDSIPQFKSFLSDKLGYGIIMNQHLIKLEKIPGSAESFMGIQEFNHPLEYVLLCLLLMFLEDRSRDEQFVLSEVTEFISGNNIGKEKIDWTLYSHRKHFIKVLRFAQTLGLLKINDGDDQKFAYHDDTEVLYESTGLSRYFVRHFTADIMDFGNYQDLENAEWGDLNADRGVIRRQRVYRKLLMEPVVYSQGADDVDYDYIKKQRGLMESDFQKYLEYRLHVHKNGTMLVVPAEKNIQDGFPNTKAICDITLLLMAMMREALQEKKLRINSSGGMTMSRVAFDEWVVKLKEKMGQHWSKEFREMTAAGLAENLVAYMENFKMLREWYDGREIEILPLAGKLIGTYPEDVIERKEKK

SEQ ID NO: 39016 - protein, 1362 aa, Acetobacterium woodii DSM 1030
MQDNRWVINRAGLVNFWYYDEEIFDFSQGRLLLRGSNGSGKSVTMQSFIPLLLDGNKSPERLDPFGSKARKIENYILGDDENGKDESIGYLFMEFKKKNSNNRVTIGMGFKASRGKQMKSWGFSITDGRQIGEDFFLYKQMGEKIPLTMKELENRIGEGGQVVEGQKNYMKLVNDLIFGFDDLDEYDELVKLLVQLRSPKLSKDFKPTVIYEIMENSLQPLSEDDLRPMSEAIENMDNIKSRLEVLKECKGAADRIRQAFDRYNKFIIGDKAKQFHDHQLRLEQEKKQKLKKIKAIDTAEKEIIALTEKISELEMVIDTQQQKKLELESHDSVKVREKIIQIEKEIQELLKQRSDKDNQHQTKRQQERGLDDQVNRCCQEIEAAKRDIIKQLEEMDGLAETFAFDEHDFMRDEVKKDITEPFDFNYVTNNLKNHTEVLGQAVKALEQEKQVSESYEKLVMELDILKKELAEKERLREQATRQLTEIQDETLEKLYQKNQANQEYIISDDGLSQLAREIRQFGAESNFNVIAQTLRSEYIGLEELKRSRLYDEKATWSKINTEKNEKEIELNNWKNIKDPEPFRTEKVINSRAKLVELGIPHIPLYKALDYQEGVDDLTQAAIEAAMTTMGILDALIIPADYRKKLGSMPELSGDKFIFPAPQYMVHSMNQYLKVEDSLGKIAPEEVANILTSILIDENHHTHMDEKGNYSLGILRGQVSDPETAKFIGSSARRKYREKQQKQLEAELEVIIERLAIRQKVLNKIEQEIETLKQEFSEGLDQEDLVTAANVLKQAIFDDDMCSKAVEKKNGEEKILYETVKKLKEAVYHITRRITLPVNLESYREAQSAASAYREELHGLEKQKLQLNHFSTSLKIAENRYEEVLQEIDEVLYEINALNTKRSTQELTLNNLNEQLKLTDYEAIKTELEQCLTALKEFPKEKEEAVKRLERERLGAERLAEELEKLERELEQQQRIFVIVTDAFKEELNLGYVVKSIENDLLQIAKDLLEKNPVADKQNKEQMTIKLVENLNNNGQYLRDYAVNSQYVFEQEGNVGTDEAVAKAHEMRKRMNITAKVTGKVVNFYDLSDYLKDSLEETEKLLKESDRELFEDILVKNISKKISARIFHSEKWVDNMNHLMSKMDTSMGLSFSLKWTSKKAETEEQMDTRKLVNLLKMDGNLLRDEDLNALSEHFRSKITLARRTLEEKDVNLTFHSIMKDILDYRKWFEFKLFFKKTGQLSKELTNNGFFKFSGGEKAMAMYVPLFSAVNARYEAAGKESARILSLDEAFAGVDEQNIRDMFRLLNELDLNYIINSQILWGDYDTVDSLAISELIRPDNADFVTVLRYHWNGKVRKLVVDDAS

SEQ ID NO: 39017 - protein, 424 aa, Acetobacterium woodii DSM 1030
MMPHEFAAYLKANPGYQRIMKQIREKYESLGHLGGVIRLDKLTENEREVLRSLFKKNYLQKSATFTVGKFVGAFAKTRYEGVDFEAMLSCYFGEKLNWKKELKNQYQEEKSRYFNEIIKTFKATPAASWLMESLTNRNNAYAILNIKYNEDPENLKKLLTQVCTGLNQCVVEPQKLRLALFASKITKDPHAFDMNRDGGRLLLYGLCAYYQLNYPKNAEAQMEVLYQAGLIYDEVSNYTIGRGIKATAKDRSHPGWAGFAETGEPLHISLWNISLIDGVNCVKNRVFVFENPTVFSEIAGLLEDQPGSLICSAGNVKVATLLLLDKIVLGGGEIYYGGDFDPEGLIIADKLKKRYREKLILWHFTPEDYQKILSKKKISEARLKKMAKVVSPELKIMAEIIKKTGYSAYQELMVDVYLKDIKSC

SEQ ID NO: 39018 - protein, 510 aa, Saccharomonospora xinjiangensis XJ-54
MERIPPELFRFSVGENADTYTAILRAFAEANERLETSLSLDEVQQRLRTVGWFGALPNDDLARALQKLRDWQLIDVIQNHAENYRTAEEYERRNLQYSLTKRGEAAFAGVQHALTVLASTGALQTAVLDAIADRLAELHRLLTDPTAIDRKIFTTLTELENHLDALRTNTKQFNGELQRLLRAESADLMTFREVKTATVAYLEEFLTNLDQRAHAIAAGITHLESDGSDVLHKRALAGADLPPSPGNDIRASWLALRRSRWAGLRAWFLPEDDTPPRVEQLHVVARRAIVTLLQVLDRIAESRHRAGSAVADFRELARWFALAPTENDLHRLFSAAFGLGSARHAHLAHPDPELVSASAPWQEAPPVPVSPLLRTAGRIEKVARTGKVRDVAALKQQRAERARAQRRQLRRAWRQLVTGGPVRLSAFAELDHDPFERLLDLLGRALATQPDTSGTRRAATTDGRVEIVLLPPPDEAQAVLRTPRGVFTGPDYIVDVSTPDTDDAAEEATA

SEQ ID NO: 39019 - protein, 408 aa, Saccharomonospora xinjiangensis XJ-54
MSNLANQLVIAEQQDVAKGIRLLLATPLISARTAPEAFDLIRRRHGPIAKWFDYTCGWRLVVEPRFGYARLAKVTSEHDHTRPARRSRSGRTPFDRRRYTLLCVIAAELLAGPVTTIGFLADRVKYATATDPVLEVFDTAARSERMAYVDALRLLESYGVLDTVDGSAEAFVDSREAKVLYRVDTTLLLRLLSAPTGPSQLATSPDEVAHRWPELLAGLTRESRYGDGENSTSDVQRNLWLRHSICRRLFDEPVLYRRELSEEQRGYLASLTGRQVVQRAAERAGFVLEERAEGYLLVDPEAIATDRKFPDDSGTANVAGLLLLDTLVTSAPGLTVEQLRAEVTRLLARFPRWAKTYRGEDGTERLVHDALDALAAFRLVEHTGGRVHALPAAARYSVAEIRTSKENS

SEQ ID NO: 39020 - protein, 1342 aa, Saccharomonospora xinjiangensis XJ-54
MTIAELPNRADAEAGRAAARWQPTRAGILNVWRYYDEVFEFHNGRLLLRGPNGSGKSKVLELLLPYLFDASLRPNRLSTFGTSERTMHWNLMGEGASGTTRVGYVWLEFARMPGLDEYVTCGARLQATTRTTDVTADYFTTSLRVGTDLSLTNASGQPLTKAVLTEQLDGHGTVHPNRAEYRATVRQLLFPGLSEQRYEALITALLQLRTPKLSQRLDPGLLSSLLSRALPPLDQEDIAELAEGFERLDQQGERLKELDEEVEAARKVATRQRSYAQRVLRAASADLITATKRMTESAQATRQSETEHQEAVAARTATEQQRKKLAAAIRRADASIEGLTKHDLYEKGSELDDLRRRTGDAQRAAREQAAVAERKSTAAATDRKAAEDAAHAAEQWVEQIRVAAEECAGAARRAGLDSTYGELIYALEQPNDHSRQLLRAAVQGRQQAIELVRRALEAHDRAVDARTEAEHRLEDARTELSQANDRRDALADQYDEVLREHEQALLAWASACEELVFDDPAAFVEIADSEAAVLARVAEAAERRQHDITVEETTLSARWEQAETTRTDLVESLEKLRGKVDLPPHAPPHRTADRTRMAGAPLWRLVTFADHVTPAVQVAVEAALQAAGLLDAWVNPSGALVVDGHDTFLDGALLEPAPGRSLREVLVAEPDSPVPVERVEELLAAIAFGDTLPAEHPAACGADGRWRLGAATGSWAKNEVEHIGAVAREQSRLRRIAELTEQLDDVDRELDDLSAWADRLAQRRRTLAVERERRPSHTRVKQTWTELDRAENAVSAADSSVRAESGRLHEREESVRRAQHALHLAGTEHGIPTAREALDKLGHAVEAFRERAQIWFEQHTNLATARSRAELLQDTAGRSAADAAEFQATAERIAEDAQALDEELRTLERLVDADDLRQIVEELEQQRRLRRQLLDQDRQAGKQLNELHERIGRLGERLAQDSERRNEAVLARDNAADRFRKLTTSTLVKDAALEVELTSSGGVTAVLEAARTVASKWPTLPHEPKHINDALHRLNETVYACRDVLSGRADLELATDDEIRVFTAVLDGTRVGAHQLLETLRAEAERSRDDLTESERELFDRTLTGDTRRQLADRIRQAGELVDAMNTRLERVRTASRVAVRLVWQVDQDLPAGTKDARQLLLKDPVWLSEADRESLHRFFRERIEAARADNTSSNWREQLAQVFDYTAWHRFVVKLDRADGKGWQPLTKKLHGALSGGEKAIALHLPLFAAVAAHYQGVPSAPRLILLDEVFVGVDSSNRGQVFELLASLDLDLVLTSDHEWCAYRELPGIAIHQLVTGDDDDAVTTARFVWTGKDWAGEQN

SEQ ID NO: 39021 - protein, 404 aa, Saccharomonospora xinjiangensis XJ-54
MPHALQAVALRPLWEAVHTRMSSGRAVTRVRIGPLNHNQRAAVADLLGLDRTPGEHYTVSIPALETALAEAGTDIPTVVTTLIGPIGDRAAERVRAEARRAELWDWLDTHPEVRRQPALASWAQQVRRAGLVNGSVGQTRDILATVLAVLARLPAEGQPLPAVASEVTGDPHALDDGTRLGNLVLRALATIFGAPMPATAYERRVLWEQAGVAADELSSVVLAAGLRLNGHGVASDLARCCAEAGQAVALTLAQLRATELHAAPEQVWVVENPSIIAMALREFGTDCPPMVCTSGWPNTAVVLLLRGMADLGARLHYHGDFDGEGLRIAAYAMEKTGARPWRMATGDYLRGLRPSTQGPEPGRITEAPWDADLADTVREIGQALAEESVADDLLTDLARHVVSG

SEQ ID NO: 39022 - protein, 483 aa, Rhodococcus imtechensis RKJ300 = JCM 13270
MKLFAFTTAEKRAEYLWVLRAFDHARANYVVLLHAADVARILDGLAGDDPAGQLGAGDVTPLLEQLHVWEVLERSYDGTRAATLAEYRNRHFVYQFSQAGYQVFRAVEDALAARLDDASLSRLALPDLLADMNDLAAANRAADNDLVYRKLNRLDATLSDMAGRAAQFYLTLGDLVRTTEITPETFMSHKDALLTHMREFSSDLSRYAPKLAAAIALVEDTGVETMVARAAASDERVFLGIDEREADWRARWAGLTHWFVGSEAGLSESERLREGTMSAIAAVLSLLRRVTETRRGGVSRESQLRHLAGWFAATPTEDAAHALFRAVFDLGRPRHLSMVHPDADIIPDTRSWWEAQPVEISRTLAETGRPPSPGLPARVQRNEGSVRRLREEQLTAQRLRAAAAQSLARGGVYERELDEAETDVLLSLLNAALTARVPVSGRVKSSTGSENGVKLTLSPHSESTVVRTARGRLHLDGLQVSVR

SEQ ID NO: 39023 - protein, 464 aa, Rhodococcus imtechensis RKJ300 = JCM 13270
MKAREISPLALDSYQRAARVILSNHLVTQTYPDRIALPLLRRWATELREDLMTLFGYRLEVTETTARLFTVSDRLDAGTPAKTSTDRTFDRYRYAYLALALAALGRAGNQITLSELADHVAADAAQVDGVDLSTERASDRDAFVDAVGWLAARGAIALADGDAGGWAANPDAGEALYDIDRSVVIALFRPPRALQHLRSIRGLLAGADSVTEDDTSEFGTARPVDVKETARRVRRALVERPVVYAADLDDDELVQLTLPRTAADVELLTGLVAERREEGVAMIDSSGRLSDVRFPGTGTVAQVALLLAGEIADRVLDPDAPETARMPLPRGRFDDLIEQVDSAIPQSGIFDSLAGHDGFEPADPAPADRLFPVVEDEWIAGTVRTLTERFGRTFAAGWQADPDGLGRAALTLLERLRLTAAVPGGVLALPALARYRGVVVTIRDRTPEIDLFQSSANDSEEVTA

SEQ ID NO: 39024 - protein, 1385 aa, Rhodococcus imtechensis RKJ300 = JCM 13270
MTSARFRPTRAGIINLWDYRDQEFSFADGRLVLRGPNGSGKTKALEVLFPFVFDGRIEPRRLNPFAGEERTMKSNLLYRGQESAYSYVWMEFCRGAKDDPEAVTVGIGMRATRTNDKVTRWYFVADGRVGVDFSLLGSDDRPLTKKQLGEQIGTDSITDRPLDYRAAIDARMFGLGVQRYDQLINLILTLRRPQLAKNLDPKGLSQALTDGLRPLDEQLVLEAARSFSDMEEVGRALEGLAAADQAAQSFVGVYAKYLRQQARTDVDHLATRLEAVRSGIAALHDAAADRARSQESRAAAEERFTAAERALDQANATLDALKRSTAYEGRTQLDDLAQAVSTLEKSTELQAEKARKAKATLEQRAEEHDKAGDAVARAVEALTHAEDELHLAAEDAGITWTALPENARTDQLTAALRGHAEERDGDIRAVRAALATVEKAATERTRADEAARRGQEQLDTAKVAVLEAETAVESARSRCATELRSWWTEQSSLYAEIDAPASLFDSLDTALGRIGDDDAATLSETLTEQTTDAVDSLRLRRQQYDRDVAAAEEAIAEHESARAAIESEHDDAPPLSAARQDARSRLAGAPLWRLVRFTDGVDAAAAAGIEAALEAANLLDGWVTVDDALPDVESEQFLVALPAADRPTGKTLADVLEVEQDTGVPDDRVRGLLESIALEYLDLCEGPVGVAEDGAYRQGIQRGRHTKSDAEYIGTTARARRRAARITELDSTLDETRATLDETRASADATAALLTRTTAAAQALPRTGSILTALKKITESAGALRSRSDTATAVGHELDQAIADLSAKEKQLRATASTHRTPHVAREIDSLAAAVRHFEKQGEMVQRCRREHAKEVEHTRESEDRLHEARGNAEEFAEEAAIAEEVLAQQIQRLETLRDTLGAGAEQLDRQLEEAHARIEACKKEQRDARKADKDAGEAIGKAEGAYNTAVQTLRLALTETHADAARLAPYARRDLLELLGVDGGHTWPASSAAWMSAEQLVYRIQNAEGDTPILPPEVDALFHALDGATESVRVSDSARKSTRTALTTALQDFDAQLAAAGQDYRLQWDAPDGVTVVQVQDDEGYSSIGEFAARIASARSDQELLLTESERRILEDALLTGLAQQIHERTVDARELIARMGTEMRERRMSSGNTIGVHWVLADNLDDSAKAISKLLERDTSALGPDELATMRAHFAHQIRTARAAHPERSYPEILASALDYRRWRVFSFTLISGNGNEDRLTVARHSALSGGEQSVSLHLPLFAAAHVMLDSADPHAPRLLALDEAFAGVDDNGRAELLGLSVQFDLDLFMTGFDLWITYGGVPGCAHYDLAHSTAEQSVSATLLVWSDGELLAEHDGTDLAQALGSPLRRRVPTPAEGAFEFA

SEQ ID NO: 39025 - protein, 495 aa, Thermoanaerobacter siderophilus SR4
MEDKLDLNVIKPIEEVKYLSAENASRYRLIMRYFYEQYQKFKYWLYKEDVYEYVSQFDMFADYTMEKCEQDLKALTEWKNLIATQDTSKASTIDEFKNKKFRYQLSPYSIEIERMTIRLESIVGYGGSLQPSLFERIYRNLIKINEMAKKEDLQEINRWWEDLNTDFENIYHNATDYIASLQSSNADELMKSEQFIIYKDKLIEYLRDFIKDLQRFSVAIESFLKKVSPEVVNSVVDKLCQYEMSIPRIDRVLNEEEVKEDLMDKWNNISFWFTGHNFEDSEAVRLLNISNEIIRKITMYAARIAENRMKAASRKNEYIALSKMFAKAGSIKEAHLLSAAVFGCFYTRHIKGDFERKTESVNQSVWEEPPFKVIIKPKTRSYSNYVKTNAIIDKSADKTEMLMDYLNQKNIEDEIIASCIVGNRIRIKDLPVVKPFVRATILKWIGKAIARNGFTGKTEDGRTYRLHMPKNGERAVLKCTDGNLDMPDIVIEFVD

SEQ ID NO: 39026 - protein, 383 aa, Thermoanaerobacter siderophilus SR4
MEELQMLLENFWILREDRENFNKIRDAENKIKPFVEEKLGYRLIINPYIIKLEKVPSDVEEWMGIDAFQMPMDYAFLCLLLAFLEDKGPEDQFVLSNITEYIEAQYDGPDKVDWTLFQHRKSLVRVLNFAVDIGIIKIDDGDHERFSESEDTEVLYENTGISRYFLRSFNREITEDVKIEDFLQEDLNLSNPKDAVIQRRHRVYRKLILSPSVYSEGPDDQDFMYIKNYRNTIAKDLEEYLDAKLHLHKTSAFVLFNDNKYLKSYFPDKNKNISDIMLQVNKIIRQMIEDGKLAYNPDDTIDITEAEFINIILKVKERFSDGWYKSYREMSEKQLIEEVIENMESFKMIKRVEELHSIKILPMAAKLIGEYPPDFEKGEGADE

SEQ ID NO: 39027 - protein, 1388 aa, Thermoanaerobacter siderophilus SR4
MSEKLAERWMINRIGLLNFWYYDDEIFEFADGRLLLRGANGSGKSVTMQSFIPLVLDGNKSPERLDPFGSKARKLEDYLLGEEEVSGLDERTGYLFMEFKKEKKDSYITIGMGLKAKRHQNMDFWGFVILDGRRIGIDFFLYKMEIGDDGKRVKVPLTKKELKNRIGEGGEVVESQKEYMEMVNKYIFGFSSIEEYDELIKLLIQLRSPKLSKDFRPTVIYEIMKASLPSLTDDDLRPLSETIENMDQIKMHLDVLYRNMAAVKKLKNEYDNYNRYILYEKAGDLVKAYSDLYASKKEYDNLTKDIENYRSTIANLGNDIISLESEREALKKKEEQLSSGDAKRTQKELLEEEDRYKQYLEDKSKKEEELRNKQDKYYGLERKIKNTEEQKYKLDKELQDKLEDISSIAQDIDFMEHEFSVSELKKVYGKEFDFTYWKNELKKHKDKIKRAMSALREEIEANKRYDAALKEQERLKKEREDRAKKLNEAERLFDEQKREYVERVYSWSQGNAELKLLSSQLEGLSRVILAYGEDKGFDDILAFVRKPYEEILNGIQQEILRLENQREAKENQLHEKEKLLEEWKNKKDPEPERDEQVINNRKRLKEAGIPYIPLYMAIDFKEDVDEETRGNIEAAIEDMGLLDALIVPKEYFEKALQMDSNMADKYVMPGSFNMMLNVSQYFKVVDNEEGVSPEDISDALSNIFVSEEGGTTYIDSKGAYGIGVIKGKARDKVKSKYIGSESRKRYREELIKSIQEEIQAIKAEISAIDEEINAKKLRIQRLDYEYSAFPGKEDIEEAYRYLKTAKADYEYTSHKLDGQLFTVKNCFEDLQKKKAVVRELTSGINIHPDIDTYSSAYEYAEEYASGLNEVEILYNKYVLHISNEEMLLQQKQDLEYDIDNLKYEIDVLENKIQSSVKKIEMLKETLKELGLEEIEKELEICLKRLEEIPKEITNKSAEKAKLEERLQRSLKDLLNIEEEINLKEKIYNIVEEGLKKELALGFVKQDVEMEDMLKLSKSILSEYKGFFDKAGFDREKFTERLQNVYFETRNELLEYGLSIGNIFDEAYEGDNERIKEAKNKQRRLNITANINGKIVSLYTLYSNIEEDIMANESLLRETDKILFEEIIMHNVGIKIRAKIFKAEEWVKKMNKLMSERDTSSGLKFSIEWRSIPASNEEELDTKELVDILKSDADMLKKEVFDKVVNHFRSKVERARRAMEEKNNTETFHKIMKEILDYRDWFEFKLYYRKEGESRKELTDNAFNKLSGGEKAMAMYIPLFSAVYSRYEGASPAAPRIISLDEAFAGVDDTNIRDMFKLIEDLRFNYIMNSQVLWGDYDTVPKLSIYELVRPKNAKAVLVMKYLWDGKVKHLILPEKEEVAATEVGAINE

SEQ ID NO: 39028 - protein, 431 aa, Thermoanaerobacter siderophilus SR4
MNKEELKYFKEKKGYKRIFEGIREKYRSLGRLGGVVKLDNLTEDEKEVLTNHFKKDYRTKKSASIDVAKFEESLKNTRFEEYTLKDILEYYFGEKLTSKKEDMEILAKEREEFFKELFSKYQECKCIDWLKSLYEGTAVGVRAVNQRYLNDKDGLKKDIMYVCDAINNLPVYKGEKKRLPVFSSQIARNPHYFDSNTEAGSMFINALCTLMGLNEVKGSEEISELYYNVGILIDEISNYVTLSGLLAYEGDMENQVFKAAYESNQVLQVPLLNLSKIERVISPSKKVYVVENPSVFTSLIDATNKVFPLVCTYGQPKLSSLLLLDMLYKEGTEIYYSGDFDPEGLMIADRLYRRYKDKFHFLRYGLEDYLKSLSNEVINDVRLSKLNKIESPLLFDVAKEMKIIKKAGYQELIIDDIINDIKLIEEGKGEW

SEQ ID NO: 39029 - protein, 518 aa, Frankia sp. QA3
MSGEPRLWWQDIDPVVWRCFGQPEDLARERNTALLASLEELSTRAPMSTLSDIIARIRQVGYHDPLTDLELRDALDHLTTVHLVEPFRDYAALNSGLDAVVRRQEAWALTRTGRAVVAAVRSAVVDSRRALQLPNRLLDGVERTVRALLEHVNGDHGLLPGDLNDVRTRIEELQRVTADFYASLGRMVQSDVTDDQLFGDNRDRIVEALRQFPREYGRALRRVEQALVDLAEVGHRQVTEAAVAHAGLIDPRDQQHWVDERVRRLADLAAWFAPAGSVQRLITSATGAVHTLLVAIDRRYTALRRGSDLGADFRELAYSLHAQLSDDDTRRVYAAAFGAWPSWHAAVPTVEEDVAFATVAAAGASRHQIEVTLREHERVGPAGGRPRKVPDSTRDRSAALKEAAAIAERRRRLTALLVTEGEVSLTFFVGLESAAAAILLAAVEVAVQRVDSKTGYGECHAEGASVLVRVRRVSPERRVTVHLAEGDLTGPDLRVTVTATESSSAEATATARAAGGAA

SEQ ID NO: 39030 - protein, 434 aa, Frankia sp. QA3
MSARPLDPDVAEAALYLTRTCRVTAVDDPGRYRAVLRGRRELVEFFRRELGWELDVREVAGLARLHKRRDDAPGDRGPRLVRADRQGGLASAKVLVLVALVCEQLWRRPRITLRELLQAVAQVCAAEAPTGRLPRFRVVASDGVSKREAQQDRQDIVDALKLLVAEGEISVDSDLDLAVADENVDVFIAADRERLSTKFASLSPSLLGLSGRPVDGHIAALSAPSLPDADLATVADRLSSVEGRRLTALRRVVDDPSTDPGDDPGPVGYLMTSAGRERALAVVAALGLVATVRRDWWEIIDPSGAATDFPQGRRTERQAALALLAELPKRPEPATDLLLAEIVAMLERWRAALPRWAASYVGRLPALARAAAAELVVAGLLTVVDEVDRWRPTPGVHLWRVRVRHGQPTGTAPPVPSKSGQRLEQPILGHGEQP

SEQ ID NO: 39031 - protein, 1658 aa, Frankia sp. QA3
MTVPRQPSHPTLAVPPNSAEAEVGRPVRDGRWQPTRAGVVNSWAWADEQLLFADGWLALAGPNGSGKSLTASMLVTLLLDADSSQRALSVSGEATGTLLSRHTDRNDREDRTGTWWIEYGRRDANGLVDYLTTGLWLRSVGGALHRAFFVTPARVGAGLDLHHERVPVPVEKLAEQLATTHGQLFTSSSRLRPKAAAHLSVADEDQYRPHLLARLFAPLDDVQFEALVGVLRSLRSVRTAEAISPNDMSRVLTDALPALDGDRLVVVAEAMERISDLEEQLQRTLEETRLLARTDEFYRRYVNAVTAAEAAHLAKAVTVFDDQTRLAREAAHALERANARLAATRERRADLRTETADLEGQLDGVDTRLRDHAGAELPQLEKRLEGLREQRDRDADRARRERVTAGEVVDRAAEAAHTARDAQVHLTELGGELEATGTRWGADAALERLLGAGRALADVGIGQTSSIAVDEVGAVPLAWADMRQTQTRHVRDALHTHALAQRDEQAAAVELRRIEDDEDRLRQEAFAAAEARTASEQGVLDAITTWDADRAEIHAVPDMLTEPDDRLDPDRIADWLRGAWEDARDRIAVVDHQRAAAAADIAARQTAAAAAAATEARRRAEAEARETESWRVAIEQDAVQRRAQAQARRRLAHESHATAELAAHEVTTRARTGLSVGREAAAAAGRTWAEQVAAWRTGLVHLPADAVPLPDDPDELDPDAAYRDLERVYGEAMATLRGRVVAADRAVEDVRDAVHAVETELAVARRAAPVPPAPPWREGRRHAEGWPLWSLVDFHPGLSEPEADRLEGALLVAGLLDALVTPDGQVVAGDLTLTPDAPVAGGRTLADLLVIEEEPEVDGGRVQTVLSGVGVGGPAGEPSEGLLRNGILTAASPEGYRATFIGRTTRERARLEHVVVLENRHRAARADLDRAQEWRAGLDTEVLAAAAEREDFPAADELRHRRGAIVELRVAVEAAQRRTAELITAADTALREALADIGADEAALDVRVADAGERAAQAATAAADAVVAEDSAQSDLRAARTAAADAAALRDQAESAQRRADAERARFPSLGPLREALRTEDFADRALSGAQAATVAARDRHRSASGKVATALRAVHDAATLPDGAMLPTATEALDGFVSALNHLSRRVEAWIHAASRTGDLLRDAARAASDAARAERAARESEGDLQRIGLAVERLQAQITLVLQLHGAEYEELRAARHALVERIADAKAADDQQIAEWEDASRAAFGAEATLRELEPARTQAEQDRNARFHAMALLVTHGLADVPDGIPVDDVGRPANITAALTWSRRILAGRSGDADRVAALTNSRDRALSALENSARTVNGAIARFDQQVDIATITGTQWRRATLAAPNAAMGEDLRVAVEALRATRTRLESDLRDDVKATLKTSMFTQLRRDIQDRRELARDLVRQIRTTLAGVRTGVARVGVEVDWVVREDADARRMVELISAPPSDETFEQMYEVLRLRMEDSRGEAWADRVAHTFDYRSWHEWKISVTHASFGEEGTERFRPVSARSNPLKALSTGESRLATMLPLLAAAWSMYSGDGYRGPRLLSIDEIDAAFDEENLRQVLALLRSWDFDVLATTPTITPLIKREAGQVVVHQVVTTGRTRVTVPWLWQGSGEPRPLTLDLWSAGTDGP

SEQ ID NO: 39032 - protein, 400 aa, Frankia sp. QA3
MLADDPELAPLWQAVHARLCAGEAANALATVRVAGMSRSGVAALRSWLDTTTRRRRGPSAVRTDTDGTLVPLRELLGVLGLAAEQLQALVERAVGVPVVDRSAAQRLGAGRRERLWEEAAERLPQVPRLLARMRAAGVGADDTDIRRLIDALAAALARIPARPPVPLAKLAHDTAGDPHFFDLDTTAGGRLVAAVAEISGHEQPTRPDRVRALLAGAGVIADRLSATVLLLNVAASGDGPVDRRLREAVAPVALTLLDLLETPPVLCPQQLTIVENPSVLEIALIRGVRKPLACTSGHLRAVDHTLLALAQRCGVTLRYAGDLDGPGLRIATTVAHTYGAELVAMDNATLAEAAVPPSAVPLDAPIFADDLALADGLNAHGRAVFQEHDELLRRVLDQSS

SEQ ID NO: 39033 - protein, 511 aa, Frankia sp. QA3
MRAAEPGDAPGAGRGEVNTSVFAYVTESADYRVILGVFAGTFFAELTPDDVTARLAEAGVVLPVETVASRLESLRGWGNLDVSASVGSVSTVADYYRRRNRYLITRIGQEVHELVEGVLAQVDDVRDVSLSRLDALAAALEALLRLDLERADPAVLADHVRAVFDPHRAFSAEITQFFAAINQWQSRFDLDETEFAFFSEVLVGYVGERLDAMERRARPIAALLGALEPDVPVLVARARDGLAARVADAGLTGVRVRAEHGSSAADWENLNAWFLGRPGAPSRIATLGRDAVNAVRTLTQNLTRLSRSGVGSTSRRADYLRLAGWFEQAGHDDPEAAHQLAAAAFGLFGARHLGAAAGDETDPVPSATSWWDAPRARVPVSLRQRGDTTNRGRSGQLLDRSRERAHLLERRRRAEELATAARAELLASTTGPDGALGDGTRLSEQALARLQRLLGPAVAAMGPGRAKGEAEADGLRCVVERRPGQPTRLHTPAGTLTVHDLALTLLPVQEA

SEQ ID NO: 39034 - protein, 392 aa, Frankia sp. QA3
MPEGPRIGDDPESGDPQRPGELVAAGRALLVRPWRTAEADRSLFVLIRRHADVLDRWFTQRLGYRLVVTADTARLVKSGYVPPDRPLRTHTDHPFTARQYVMLALVLAATAAGPDRISLRDLVLQVRSAAADADISLDGAAGERRALVTALRFLIGHGVVRELDRSIGGYESDEGVDALLEIRNDRLAMLPAPALVGARSATDLLERAAGEGRGRAALRRRLVEDPVLHAEDVVPEDWAQLRRRFGEEARYCEEMFGLLVEARAEGVAAIDVDGGCSDTPFPATGTTAHAALLLVEALAARHRDGATVEQVDAELADLLERYGRYWRKDATADPARLRDDAVALLASMSLVRWQPDGRLCPRPAAARFATSVTVNEPRREQPAGEPEQPTLL

SEQ ID NO: 39035 - protein, 827 aa, Frankia sp. QA3
ATAVAAAGVRADAGAAEATRLTRELAAVRAAAELPLPRGDWRATDPPDTALFASLVDFAPDLVDADRAGLEAACEAVGLLTAQVLDDGTARAATGELLVVAGPVATPNLTSVLVASLPVGATVAQGVVRRVLEHVGLGAAAGAALWVDVDGAFGAGALRGRHAKAGAEHVGAGARAAARARRIGELAAALEVAERQRDIQRQTHQALRGHADALRALTGEVPSAAPVDESVAAALAATRDAQRAAERAAKAREAAVRAQSAAEQTWARAQTGAASARLPLDGDALATASAAVNDAGGELDRLSGRVEAARRSLDDWAGAVETLQADADALARAAEDAAEARLAADTAAEELAAARAALGEEPRRVAEQITELDTRSIRSDGELTATRREHTESVGVAATARSAADNAADVAERAERACRDQRGALLAVTSVDGLLAASGQLPPQAGPPEQGAAEHGAAEHGAAEHGTDEHGTAQFGQVRLPLTADTVDGTSRLVAALRELVSKPEREVSEDALHRSLRAIRDSLGAGWDAESRRGTDGAPLAVEVSGPYGRRVLPDATVQVAADLRRARGLLTAQQDQALRNLLHGRVAQEVARALFDARELVERMNAVLGRVTTSQGIGVRLDWRTRGDLEPATATALRLLAKDPDARTAEEDASVRAAVAGLMDDARDHRPDASYRDVIGEVLDYRDWHELRIYLCRPGRPDELLTRRSRLSEGEKKLVTYLPMAAAASASAAAHDPHGVGAPRLILLDDAFAKVSEDNHARLFGLLVSLDLDFVVTSERLFGTHADVPELSIIEVLRDPDLRTIALVHYHWDGRQRTELAGASR

SEQ ID NO: 39036 - protein, 435 aa, Frankia sp. QA3
MSLPDDEAPARPAAEAHPFLADPALRPLWQAVAAALDRNGLDWRGRLTLPVLPAEGRRRLGVLVERPVPVGRRALPLADVAAAVERLTGGGLVEALVALDCAPRGRREAAQARRAESQHRRVTLDRAVETYLAGLAQPDSPDADGVGRDAGWSAGWRDAAWSDGLFAGRTPEEVAGLVRTVAAVLAHTGSGLSRGEIAARECGDAHALDGSTRLAALITRALVARDGPAGERAAWERAGMPLDLVSAPVLTWALPLLGDSAVARAARAMTAAGLPLHLTVLALRAAPLTIAAGTPVLVVENPRLVEAAARRRLPAAVLCTGGNPATAPTEAIAKLSASGAALRYHGDFDAAGLAMTARAGAAGCVPFRMSAADYRTAVEAARAEGVELPRDPAPAPPTPWDPDLAAAFTAERAIVHEERLMDTVLTAHEDAPSPP

SEQ ID NO: 39037 - protein, 483 aa, Rhodococcus opacus M213
MKLFAFTTAEKRAEYLWVLRAFDHARANYVVLLHAADVARILDGLAGDDPAGQLGAGDVTPLLEQLHVWEVLERSYDGTRAATLAEYRNRHFVYQFSQAGYQVFRAVEDALAARLDDASLSRLALPDLLADMNDLAAANRAADNDLVYRKLNRLDATLSDMAGRAAQFYLTLGDLVRTTEITPETFMSHKDALLTHMREFSSDLSRYAPKLAAAIALVEDTGVETMVARAAASDERVFLGIDEREADWRARWAGLTHWFVGSEAGLSESERLREGTMSAIAAVLSLLRRVTETRKGGVSRESQLRHLAGWFAATPTEDAAHALFRAVFDLGRPRHLSMVHPDADIIPDTRSWWEAQPVEISRTLAETGRPPSPGLPARVQRNEGSVRRLREEQLTAQRLRAAAAQSLARGGVYERELDEAETDVLLSLLNAALTARVPVSGRVKSSTGSENGVKLTLSPHSESTVVRTARGSLHLDGLQVSVR

SEQ ID NO: 39038 - protein, 464 aa, Rhodococcus opacus M213
MKAREISPLALDSYQRAARVILSNHLVTQTYPDRIALPLLRRWATELRDDLMTLFGYRLEVTETTARLFTVSDRLDAGTPAKTSTDRTFDRYRYAYLALALAALGRAGNQITLSELADHVAADAAQVDGVDLSTERASDRDAFVDAVGWLAARGAIALADGDAGGWAANPDAGEALYDIDRSVVIALFRPPRALQHLRSIRGLLAGADSATEDDTSEFGTARPVDVKETARRVRRALVERPVVYAADLDDDEQVQLALPRTAADVELLTGLVAERREEGVAMIDSSGRLSDVRFPGTGTVAQVALLLAGEIADRVLDPDAPETARMPLPRGRFDDLIEQVDSAIPQSGIFDSLAGHDGFEPADPAPADRLFPVVEDEWIAGTVRTLTERFGRTFAAGWQADPDGLGRAALALLERLRLTAAVPGGVLALPALARYRGVVVTIRDRTPEIDLFQSSANDSEEVTA

SEQ ID NO: 39039 - protein, 1385 aa, Rhodococcus opacus M213
MTSARFRPTRAGIINLWDYRDQEFSFADGRLVLRGPNGSGKTKALEVLFPFVFDGRIEPRRLNPFAGEERTMKSNLLYRGQESAYSYVWMEFCRGAKDDPEAVTVGIGMRATRTNDKVTRWYFVADGRVGVDFSLLGSDDRPLTKKQLGEQIGTDSITDRPLDYRAAIDARMFGLGVQRYDQLINLILTLRRPQLAKNLDPKGLSQALTDGLRPLDEQLVLEAARSFSDMEEVGRALEGLAAADQAAQSFVGVYAKYLRQQARTDVDHLATRLETVRSGIAALHDAAADRARSRESRAAAEERFTAAERALDQANATLDALKRSTAYEGRTQLDDLAQAVATLEKSTELQAEKARKAKATLEQRAEEHDKAGDAVARAVEALTHAEDELHLAAEDAGITWTALPENARTDQLTAALRGHAEERDGDIRAVRAALATVERAATERTRADEAARRGQEQLDTAKVAVLEAETAVESARSRCATELRSWWTEQSSLYAEIDAPASLFDSLDAALGRIGDDDAATLSETLTEQTTDAVDSLRLRRQQNDRDVAAAEEAIAEHESARAAIESEHDDAPPLSAARQDARSRLTGAPLWRLVRFTDGVDAAAAAGIEAALEAANLLDGWVTVDDALPDVESEQFLVALPAADRPTGKTLADVLEVEQDTGVPDDRVREILESIALESLDLCEGPVGVAEDGAYRQGIQRGRHTKSDAEYIGTTARARRRAARITELDSTIEETRATLDETRASADATAALLTRTTAAAQALPRTGSILTALKKVTESAGALRSRSDTATAVGHELDQAIADLSAKEKQLRATASTHRTPHVAREIDSLAAAVRHFEKQGEMVQRCRREHAKEVEHTRESEDRLHEARGNAEEFAEEAAIAEEVLAQQIQRLETLRDTLGAGAEQLDRQLEEAHARIEACKKEQRDARKADKDAGEAIGKAEGAYNTAVQTLRLALTETHADAARLAPYARRDLLELLGVDGGHTWPASSAAWMSAEQLVYRIQNAEGDTPILPPEVDALFHALDGATESVRVSDSARKSTRTALTTALQDFDAQLAAAGQDYRLQWDAPDGVTVVQVQDDEGYSSIGEFAARIASARSDQELLLTESERRILEDALLTGLAQQIHERTVDARELIARMGTEMRERRMSSGNTIGVHWVLADNLDDNAKAISKLLERDTSALGPDELATMRAHFAHQIRTARAAHPERSYPEILASALDYRRWRVFSFTLISGNGNEDRLTVARHSALSGGEQSVSLHLPLFAAAHVMLDSADPHAPRLLALDEAFAGVDDNGRAELLGLSVQFDLDLFMTGFDLWITYGGVPGCAHYDLAHSTAEQSVSATLLVWSDGELLAEHDGTDLAQALGSPLRRRVPTPAEGAFEFA

SEQ ID NO: 39040 - protein, 496 aa, Propionibacterium propionicum F0230a
MTEALEGDLSPWSLLTTPGEIRAASYLVGSHARQYRLIVDVLADRQEVSLTGVGHDELAELIRARLPQGTVAELVEDLNLSDRLASLVSWGTCEAWQDRATTEEEFLRNRYRYQLTEAGAALNQAVRAIEEDLGAGSTAVLLAPAVLADRLRAALDALAGERIDDASREFSVVETTLDAMAREANQWQSRMAAALGGVPDQARITRLLETILAYIDAWGAGVDAWSGRITACLPDLKAIGPDIWRALTLQRLGAEINPETVTRATTHLAGIVAVLERWFSGELPQATRLRRQMRDAVTPVLRGHRALLAVGGTVSRASELSRLADAVAGAEDDAEAWRVFASGTGLYSARHLAMETPEVPGTPSVWEAPPAPVSKRLRSQGRRSLSGRAPRVVDRSRARELARAAAAHDQAALREAEHRLVSRSGTHLSDWAVLTAEETRLFLDLLTSARESDGTGTTADGRCTMKLTPVHPPRSAVCRTEEGRLVLADALVEFTA

SEQ ID NO: 39041 - protein, 371 aa, Propionibacterium propionicum F0230a
MMLGNDHSEIQAAFTGLLANPIVTPWRHPELHVLVHRHAAVLNVWAKRVGYLLVGINRCYRLRRPPIEGGVALPATTPPPRGQLVLALYTASCLEASPGESLTLQELSDDVARLAQINGGWPYDPNRRPDRQRLLAAIQLLIGHGVLEERTSGTLQNDWERTGSGIGAGYLLHRDALMLLVDTNDVDLALARRVDGGQDARGQELLRILVECQALYPQELPESHRDYLTRQRSRLVERAEELTGGRVEVRSDALVLVMPASRELPEGLVCGFPDATTLDWVTLAMIDALCPGAAGFHRVPADRVLAAAEDIHRGREKQLTVALKESATAIRDAVAGRLGELGLLRVEAGDWILAPAAGRYRDAELTSGEEE

SEQ ID NO: 39042 - protein, 376 aa, Propionibacterium propionicum F0230a
MSVPGYLLAWARLPGPARLLAEVRRRRERGWRGDRGEVSLDWSPSERRDIGRFLKADWRESGRGVRASELRQGLRAHGAGLDELLVALGGPLRDLRGERAEAEQARESDRAAGLALLRGAVGDWGDDLTVVARGILQPAPSWALLAGEVADVLAATGEEPRRLAELAAALFRDPHALDRSTPLGRACVRSLELRRAVTEGGSYRDPLEDAQLWSAAWAGAGVICDAVSAQVLVLNLPLTGNAPAVRLCHAAPGEPVWLTLRSLRGAWELAGGAEVFVCENPTVLEAAADRHGAASRPLVCTFGLPSQATWELLTGLGEVRCQVRADGDVVGWRIVKQLRARLPGAFTWRMPEGCTAYEEELLEDLLSDLKGDTLGP

SEQ ID NO: 39043 - protein, 483 aa, Rhodococcus sp. JVH1
MKLFAFTTAEKRAEYLWVLRAFDHARANYVVLLHAGDVARILDGLAVGDPAGQLGAGDVTPLLEQLHVWEVLERSYDGTRAATLAEYRNRHFVYQFSQAGYQVFRAVEDALAARLDDASLSRLALPDLLADMNDLAAANRAADNDLVYRKLNRLDATLSDMAGRAAQFYLTLGDLVRTTEITPETFMSHKDALLTHMREFSSDLSRYAPKLAAAIALVEDTGVETMVARAAASDERVFLGIEEREADWRARWAGLTHWFVGSEAGLSESERLREGTMSAIAAVLSLLRRVTETRKGGVSRESQLRHLAGWFAATPTEDAAHALFQAVFDLGRPRHLSMVHPDADIIPDTRSWWEAQPVEISRTLAETGRPPSPGLPARVQRNEGSVRRLREEQLTAQRLRAAAAQSLARGGVYERELDEAETDVLLSLLNAALTARVPVSGRVKSSTGSENGVKLTLSPHSESTVVRTARGRLHLDGLQVSVR

SEQ ID NO: 39044 - protein, 464 aa, Rhodococcus sp. JVH1
MKAREISPLALDSYQRAARVILSNHLVTQTYPDRIALPLLRRWATELRDDLMTLFGYRLEVTETTARLFTVSDRLDAGTPAKTATDRTFDRYRYAYLALALAALGRAGNQITLSELADHVAADAAQVDGVDLSTERASDRDAFVDAVGWLAARGAIALADGDAGGWAANPDAGEALYDIDRSVVIALFRPPRALQHLRSIRGLLAGADAVTEDDTSEFGTARPVDVKETARRVRRALVERPVVYAADLDDDELMQLALPRTAADVELLTGLVAERREEGVAMIDSSGRLSDVRFPGTGTVAQVALLLAGEIADRVLDPDAPETALIPLPRARFDDLIEQVDSAIPQSGIFDSLAGHDGFEPADPAPADRLFPVIEDDWIAGTVRTLTERFGRTFAAGWQADPDGLGRAALALLERLRLTAAVPGGVLALPALARYRGVVVTIRDRTPEIDLFQSSANDSEEVTA

SEQ ID NO: 39045 - protein, 1385 aa, Rhodococcus sp. JVH1
MTSARFRPTRAGIINLWDYRDQEFSFADGRLVLRGPNGSGKTKALEVLFPFVFDGRIEPRRLNPFAGEERTMKSNLLYRGQESAYSYVWMEFCRGAKDDPEAVTVGIGMRATRTNDKVTRWYFVADGRVGVDFSLLGSDDRPLTKKQLGEQIGTDSITDRPLDYRAAIDARMFGLGVQRYDQLINLILTLRRPQLAKNLDPKGLSQALTDGLRPLDEQLVLEAARSFSDMEEVGRALEGLAAADQAAQSFVGVYAKYLRQQARTDVDHLATRLEAVRSGIAALHGAAADRARSQESRAAAEERFTAAERALDQANATLDALKRSTAYEGRTQLDDLAQAVSTLEKSTELQAEKARKAKVTLEQRSEEHDKAGDAVARAVEALTHAEDELHLAAEDAGITWTALPENARTDQLTAALRGHTEERDGDIRAVRAALATVERAVTERTRADEAARRGQEQLDTATVAVLEAETAVESARSRCAGELRSWWTEQSALYAEIDAPASLFDVLDAALGRIGDDDAATLSETLTEQTTDAVDALRLRRQQYDRDAAAAEEVIAAHESARAAIESEHDDAPPLSTARQDARSRLTGAPLWRLVRFADSVDAAAAAGIEAALQAANLLDGWVPVDDALPDVESEQFLVALPAGDRPTGTTLADVLEVEQDTGVPDDRVRGILESIALESLDLSEGPVGVAEDGAYRQGIQRGRHTKSDAEYIGTTARARRRAARIAELDRILEETRATLDEARASADAAAALLSRTTAAAQALPRTGSILTALKKVTESAGALRSRSDTATAVGRELDQAIADLSAKEKQLRATASTHRTPHVAREIDSLAAAVRHFEKQGEMVQRCRREHAKEVEHTRESEVRLHEARGSAEEFAEEAAIAEEVLAQQVQRLETLRDTLGSGAEQLDRQLEEAHARIEACKKEQRDARKADKDAGEAIGKAEGAYNTAVQTLRLALTETHADAARLAPYARRDLLELLGVDGGHTWPASSAAWMSAEQLVYRIQNADDDTQILPPEVDALFRALDGATESVRVSDSARKSTRTALTTALQDFDAQLAAAGQDYRLQWDAPDGVTVVQVQDDEGYSSIGEFAARIASARSDQELLLTETERRILEDALLTGLAQQIHERTVDARELIARMGTEMRERRMSSGNTIGVHWVLADNLDDSAKAISKLLERDTSALGPDELATMRAHFAHQIRTARAAHPERSYPEILASALDYRRWRVFSFTLISGNGNEDRLTVARHSALSGGEQSVSLHLPLFAAAHVMLDSADPHAPRLLALDEAFAGVDDNGRAELLGLSVQFDLDLFMTGFDLWITYSGVPGCAHYDLAHSTAEQSVSATLLVWSDGELLAEHDGTDLAQALGSPLRRRVPTPAEGALEFA

SEQ ID NO: 39046 - protein, 510 aa, Ralstonia solanacearum PSI07
MQANRMAAELFRHLSAEKSVFYRSIMEVFAAAKRQYRLQLRPDEVLHEANWPEEPPRLEEVNAALAQLTEWGNLESQPDTARVSTLNDFYRARFLYRLSHGGEAVETSLAVFFQTLQRRAELQTVALEDIAQRLQALQQLIDSDTPENGLDVAKIHQLLRDLVGVFHDLAENAQAFMAGVARSLELRQAEASAIIAYKRRLIDYLDRFLGDLVRRSDSIARLIQQLTPRVDAVFLQVAEREARDAAPGDLPHQTDEKLRRWRAWRERWKGLRGWFLATGSEPPQVELLRARARAAIPQLLGAIAALNERRSGRSDRSADFRVLAYWFAACNSDSEAHQLARAAFALHPARHYSLNPQSDDDLPATTPWADAPPLQISPRLREYGEIAPRGPLARVRDRSAERALMAEQLSEESRQVDMARERLATGRPVRLSELGDLDTHAFGLFLNLLGEALAEQAHPDQTIERQTGDGLLHIRMEPLDAATQASITTPTGIFTGRDHLLTITSTQKTA

SEQ ID NO: 39047 - protein, 424 aa, Ralstonia solanacearum PSI07
MNARSDRRRDNQRIGELQRAQQQDEFRQALRALLMRPLMAPDHEAFSAVRRQADRLREWFAREAGWPLHVEREGARLFKRPANLVDDTRGLPNYDRQRYVLLSLACAVLERADPQITLQLLGERLMELAGDPVLTSYGFQFTLTSAAERRDLVAVCRTLLDLGILQRVAGDEENFVHESGWMQSDALYDVQRRLLAGMLAAVRGPSTWRTEEAPIDFKDRLHSLVQEHVADSEQGRRDSLRHHLARRLLDDPVIYSATLSPEHFVYFVNQRGAMAARLCEAAGLNPEQRAEGLALTDESGELTDISMPAEGTEAHATLLVAEFLANHLRDTPQTPDVSKDAVADFLRSAVDRYGRYWRKSARQPGAETELADVALDRLEKLQLITRTQGKIFPLPAIARFALGNPEMRARSTDDISPKRSRATA

SEQ ID NO: 39048 - protein, 1242 aa, Ralstonia solanacearum PSI07
MTGTLFDSPQTAKPALPEPQRERWQPLRIGVVELFHYDSEEFWFRDGHLLLRGNNGTGKSKVLSLTLPFLFDAQLRSSRVEPDGDNSKRMAWNLLMDGYQRRIGYTWIEFGMRQADGSARYLTLGAGLSAVNGKTHVDSWFFLIEGQSPGQDPRIGQDLWLTSEQRIVLTRERLRELLEGQGQGIVFENAHSYRRAVDERLFHLGPKRYEALMDTLIQLRQPQLSKKPDETSLSHALTEALPPMPQELLVDVAQALNQLEEDREQLDKTRQLEQAVRHFEHRYRIYAGTLTRRQARELRQAQTAFDNASEDRNRTQGALREAELAKDAATQAHDTAKSALASARERLETLQSDPANQDANRLGQAEKDAKDREEEAAKSVSQHSLALQNLKREEERREQSERRTETARIEITTARSQCESEAQTAGTSFALSNNPAIELPVEEIAVLPAADVGTAIAKLRIAANDRRNDIRHMERRHAALATKQSTLQTLQTTQHERRAELEDATERRAEADMAAETEGNRLVDAWTTYCAGLEQLQLDVEQPLSQLATWVIRPDGPNPAQSALSVAYSDASVRHANRQAVLEARQASVEQEQTDLRAERERLIAGHDAVPPAPFTRSTDARQGRQGAPLWQLVDFRPHVEPAGRAGLEAALEVSGLLDAWISPDGEVTQAEGAPIWDTQWRRRPPPIGESLLTHLHPVTPDRCPIEPALVETLLASVACGREDDPSLESWVATDGRFRLGTLTGAWLKSEAIYIGHTARTQARQRRLQAIDQRLHELGADADILSQDFENLANHRVRAKDELDGLPSDDAVREAILATAGAAREVLQARKRFDNADSQCQAAEIDLQREREELANDATDLQLPVAQADLTPIAHALDRFTETHHALSQAIREWQSAWPDYLQQREREAEARNTLTQREEEVRNANSRAEQARARHSVLQEAVGAKVETLRHQLGEASQTVQRIDAEAELKQKALTDAATAYGVAQTHFVGAENVLAERTAARALAIERLQRFTESSLLASALPDIPIPLGTATWTIDPALQLARRAEQALANIADDDNSWARVQRQVSEDLTELQRSLSALGHQATSEPNDWGFTVHVTYQNRSERPDTLAAHLADDVAQRSELLSAKEREVLENHLQAEIAAEIQRLMRAADKQVETINEELYKRPTTTGVRYRLQWLALSSEEGGPIGLEIARERLLNTSSDLWSAEDRRVVGTMLQQQIAMERDGFAPAPPDTASHLS

SEQ ID NO: 39049 - protein, 526 aa, Nocardia cyriacigeorgica GUH-2
MTDSVDGSPSTEPAHRDERLRLFSFATAEKRADYLRVLDAFDRARAAYVVLLHADDVATWIDAADPAPADASPEPTRLTAAEIGPLLDQLHRWGVLERSYDGSRAATLAEYRNRHFVYQFAQAGFQAYRAVAGVLEARLDDVALPRLVLPELLADLEALAEANRGADAERVYRTLRRLDIALTDMAGHAAQFYLSLGDLVRTTEITPEAFLAHKDALLAHMREFGLDLARFAPRLAAAILAVEATGLDELIERAARCDERVLLSPVRRQADWRSRWDGLRTWFVPPEDNAGTEAERLREATMSAIAAVLSLLRRVTETRKGGVSRESALRHLAAWFTAAPSAEGAHALFDAVFGLGRPRHLATEHPDADIVPAIRSWWEAPPLEISRTLAETGRPPSAGAPARIHRNDAGIRRLRETQLAAQRERAAAARSLAGADVHERVLDERETEVLLRLLDAASTAWVPVSGRVGGTTGSDSGVTLTVSAHTGSTVVRTAAGMLHLNNRKLEVRQTTRASARKTATGEGDRA

SEQ ID NO: 39050 - protein, 475 aa, Nocardia cyriacigeorgica GUH-2
MTARRIDALALDNYQRAARVVLANHLVTRTYPDRIALALVRRWATELREDLAELFGYRLEVTETTARVFPVLDRLDASRPARTPADRVFDRRRYAYLALALAALGRAGDQITLSELADQVAVYTAQIDGLELATERAADRDAFVDAVGWLSTRGALTLADGDASGWASDPSAGEALYDIDRAVVFALFRPPRAVQHLHSVRGLLGESAGTGPPPTRQAEAARQVRRALVERPVVYAADLAADAVPLLTQDRLIAEVELFTGLRAERRAEGVALIDTSGRLSDVRFPGTGTLAQVGLLLAGEIADRVLDIDDPVERRTGGTEPESSLAADLDTAIPQESVFEPLSELDPVTTESEDPPAEPAPEPDYPFLPTAWIDETVRALTDRYGATFAAQWQADVPGLTAEVVALLERLRLIVRVPGGLLVLPALARYRGAVVTVRAKKSAELFVTAAETYPPAEDRLHPEPVLDTAGTEGAE

SEQ ID NO: 39051 - protein, 1449 aa, Nocardia cyriacigeorgica GUH-2
MTLIHGGVRFVPTRAGIVNLWDYRDQEFCFADGRLVLRGPNGSGKTKALEVLFPFVLDGRIEPRRLNPFAGEERTMKSNLLYRKQESAYSYVWMEFARGDWDDPEVVTVGIGMRATRSSDKVTRWYFVADGRVGVDFSLLGPDDRPFTRKQLAEQIGSDAIVDRPVEYRAAIDARMFGLGQQRYDQLINLILTLRRPQLAKNLDPRGLSQALTDGLRPLDEQLIMDAARSFSDMEEVGRTLAGLVHADTATRDFVAVYRKYLAVQAKTDVDQVAARLDAVTHASTALFAATALRERREGERTAAEARAEDADRAYEQAIADRETLQRSSAYEGKQQLEDLADAVRRLEVSAGAHRDKAVKAAQTLDQRTQEAERAAAAVATTAAALSRGEDELRSAAEEAGISWSPLPEGSRAEQLTAAVRGHAEERDADVRAVRQALGLLDTATAERTRAERLADRARTARDEAGAEIARAEAAVAVARTEASAALREWWSAHREVYAAGGNDIVDALETALAHTGADEVAGLSEILAEHAEPLLDELRTRRQEAKAHAAAAAQKVRELTAERDRVAAQRDDAPPSSATRTDSRDGRPGAPLWQLVRFADDVPAEEAAGIESALAAAGLLDAWVCADADRPAEFESELFLVPLPEHERPTRRTLADVLVVEDDSDALEVPRAEVAAVLASIALGDAATGGSVTSSLTDAPGDAAPTPSGQDAPEQASDSADNGIAIRPNPDGGAAAGSRSVAADQVSVSASGHFRSGIQLGRHRKPHAEFIGTTARARRRELRIIELEQAIEAATAAQRAAADEETEVSARLSRISAAAKALPRPTGVTAALRAVSECAGMLRSKSEAATQADADLDHAVGQVAAAEKALRTAAVAHRTPRDARELDALAAAIRHFENTGTGLLRLRAEHERDREREREAADRHGEARDLAEAFAEEAEAAQAGFEEQSRKLETLRESLGASAADIDRDLEQARERIEAARAEQKAARKAANAAIEAVGDAEAAYRTAHESLGTALTEVLADVRALAPYAQPDLLALLGANTECRWPSSEAAWSTPDQLLYRIASAGPESEPSVLPDEVAELFAELRTATESVRATEAGRKSTRSAVTTALQEFDAALAASGRDYRVHWDAADGLTVVRVHDEHGVAPLADFATRVDAARRDQELLLTDAERRILEDALLTGLAQQIHERTSDARELISRMSAEMKQRRMSSGNTIGVHWLLADGLSDAARAMCKLLDRDTSALSADDLAAIRAHFAAEIRAARAAHPERSYPEILAATLDYRIWRVFSFTLISADGSEDRLTVARHSALSGGEQSVSLHLPLFAAAHVMLDSADPQAPRLLALDEAFAGVDDNGRSELLGLSVQFDLDLFMTGYDLWITYPHVPACAHYDLAHSTAENTVSATLLVWDAGDLLAEHDGTDLTTALHSPNRRRLPHSIHGGLPLEPVG

SEQ ID NO: 39052 - protein, 493 aa, Selenomonas ruminantium subsp. lactilytica TAM6421
MEEQDFRRIAEVSYLNTDNTWRYRSILHFCFKRHEHMQTYVYPEDIFHELKKDPHFQAYTFEQLEQDLATLVGWKNLIPHQETGRSKSIADFKKKRYRYQCTPYTVEIERMVEKLQSLGTEFSGSLETTQFDRILRALRDFLVSGQELTSKELNQTWVDLEHYFHTLVQNSSDYLAHLKSAKVEERMQTTAFVVYKDRFTKYLQTFVIGLQRSAKRMENLFQGSTSEQEAALFSRLTDYQLSIPRLGEEKSRETYMEDYQESFLVMREWFMGNSYRESELSALSKETVDTIRRITKFAQRLAEQHQTFRSRKAEYIQLARWFSHLSSKEEADCLSAVAFGPAGGRHFYGESREMEDMNSHIQDEAPTRIEMKPRVSTYRERQRQVPIRQYAAAKEEARQQHLAQQEKLAAVMNGLAADGVIDFASLPVISREARQMLLSWVARALQRNPVRTELGSTVELIYDRQAKGRITLHCEDGEFSLPPMKFRLQKGNG

SEQ ID NO: 39053 - protein, 404 aa, Selenomonas ruminantium subsp. lactilytica TAM6421
MAITGGQDELRQAAQLLVENRWVTRKDMPDEYLLVRRNEKALRQFFRDKCGWPLLVTPQFYKLEKIPANPRSFMGIEAMQSVEDYVLLACVMAFMEEYEAGGQFLLGDLAEALLSYYPEDAYTPKLNWESYNWRKSLIRVLKYLADEGILQIVDDESVAFLSQGYGSDGNIAGEALYEVTTLARYFLRNFPQELGAYDSLAELGAADFMPEIDEEATALRQRRHRLYREVLLSPVYYRDTESEGDFLYLRKRHGRLEEAMLEWFGLHVELYQDAVMAVSHEQSSWVKDSFPVRFRGLHDVLLHFAHYWREVSPQVTSLSKTEWQVHMEKLQAAVGHGWTKEYREMSVKRLAENVLAEMTAWGMAKVAEDGLITLLPALLRYDGSYPTDYQPGKSAKRGKTEDKE

SEQ ID NO: 39054 - protein, 1387 aa, Selenomonas ruminantium subsp. lactilytica TAM6421
MSDNRWQAYRAGILNYWYYDEAEFYFADGRLLLRGSNGSGKSVTMQSLITVLLDGVKRADRLDSFGSKSRTMDDYLLGEKEISEYEERTGYLYLEYKRANSEQYITTGIGLHARRGNSKVDFWGFVLQNGRRIGEDLSLYHLTKNPETGEEQKIPLTRRELENAIGQDGRVTTEQREYMAMVNQYVFGYEDIRKYEELMKLLIQLRSPKLSRDFKPSVIYEILNASLPTLSDEDLRPLAETLENMEKTRLAIEQLKRERGAFQNICRAYTAYNTAVLAERALAEADCQKALKRLNKQAEAQQEELLAAEKQAAEASERLQSLTVEEEALRQEQASLQEHEAYKAAERKKEAELQLAKEQAEKQRKDDSLLEKRRRELSLQEQMRQEEADLAQLEKQVADILEDLTDLAEQADFDSHAAFQEGFQLSSPDCEEHFRLWRRERQNQLQSLQKLHKQMLQYEQSLEKLQQWEQELGEENRRLDQYRHEEDRLTEMLAQEREQLVKAFYEWKDRWQALLSMDKDAEIRLAGSLRELFGTTSWLDIQNQLGTIVSEKQRSLNAAIGKVELNKQELTGQLAEAQAELASLRQTKEAEPELQEAWAAARQELTAQGIAYVPLYEATEYRSTVSPAMRERLESALLEAGLLNSLLLASNEAAQKLPESMRGTVLFSGEPVMLAESLLDYLEPVPGESGIARERIADVLGSIAISSEVYGKGNGIALNVVDGAYRLGTLAGRAAQRPAALFIGKQARENYRRQQIAAKEAEIAGLQAELAHVQEQESSLLAENDCLLKAREDFPNQQEVQSVYDELRSRERDIERQQHRLGELADRQKKLTLELRDERAGIIAERGDTGLAFSAIAYEEALAALHDYGEVWHKLTLMQANYAHSAELFRQQSQEAEYVREEVDALKGELLDKDMNIARLEKNISALQEQLTRMDAAAIEACIAEVVERLRHIPQEIRQVSQLLGQNESSRQILASQLEQSRRRQQVYGKLLVLWQKLLQAEQKRGFVDLDKKNLRELMQARQKSRDNKTLHSLAQDVESQYARQRDEIAEYRLSLRENVDELGDLPEISPEDEEIFLPRLDTLRDYAVRQLALTEAGGKPLSPYEQLQQLKDHLLEQESLLSEQDKRIYQEIILNSIGRTISEKIYGAEDWIKKMNKLMGKSETSSALRFRLEWKPLTGEDDNELDTAELVELLHSDPELMKEADMKRLEKHFSSRIRRAREEAQLQEKDADAFQASVREQLDYRQWFRFRLYYDKGEQIQRRELTDKAFFRFSGGEKAMAMYVPLFSAAYSRYLDAGKDAPRLITLDEAFAGVDEQNMRDMFRLVEQMGFNYIMNSQAIWGDYDVVPSLNIYELLRPLNANYVSVLGYHWNGHSRNVMLEDSREG

SEQ ID NO: 39055 - protein, 420 aa, Selenomonas ruminantium subsp. lactilytica TAM6421
MKDKLAAEAAAYFKGHAILLALAKEFCCKYRSLGHFGGRVSLTALTVEEQRSLAAFLRRKFGEADSVSYKEFSAAWEKTRFGSIPLPDFLLSLMPGNFITKREERQQEQAKRQEIMDRLLAKYPAGPARRWLQALAQGNLHLFAKELYQQEDVLATVACALAMLPAKYERLPLFANRVAQNPHALDFDRTEGRLFLQALAFLQGENVPSAADARTELLYKYRLIRDDILNFATVYGLKAYGEDGGEIAYWREAANSYAPLNVPLREIAAAERILPVEGNADTVYIVENSGVFSTLLDGLQARQKSVPLVALHGQLKAASWALLDRLAASGIRLLYAGDFDPEGLSIASHILNRYEGAALWHMSVNEYAQANLLLPENRLKKLPTSDHPQLTPLVAAMRQEQKVLYQESLLQELQADLWKK

SEQ ID NO: 39056 - protein, 502 aa, Bacillus alcalophilus ATCC 27647 = CGMCC 1.3604
MLESRLLEPFTKAKYLSEQNYQRYVAIINYLYIQHEIYYSPPSLPIDIFNHIISNDKLGVFKEYNLTKLETDLNALEEWGNVMSHPDTGHVTRIEDFNKRKLRYQCTEETIELERMMEKLNSKINMVRGSMDSGLVKALTTLLLELEDYTGEEKYVNLEEQKDVSKLWEDMFTRFDNLRKETSDYLGVIHSRNIEDAMQNKKINAFRIKFTNYLTDFIITIQRNIHIIEDVISVMDKSKALDLVIATLIKKQKEKPTLEDDMSDDEYREIFMNQWKGLVRWFVRDDFNERYVDYLLKQTNDTISRFTKYLQQLSERELQSKNRKKQFLHVADLFETEEGFDICQKAFGTITNVEKPLHFQSSKVREVNTEDTLYNHTPEIISIKDAKDRNKPIKKKMAAIELSDEDKDIQEQLKRRKEYEEQELSALMNCGIVEIKELEEVEPFVRNALLNWISMAVGKEKMKGKTEQGIKYEIEKQSASWISMNCTDGTLRMPDYVLFFEV

SEQ ID NO: 39057 - protein, 397 aa, Bacillus alcalophilus ATCC 27647 = CGMCC 1.3604
MNIFNKVDLEYDKNNQVKPVIKECIYELFERFWVLRENDEKLFYQIKDNEHELKRFFRDTFRYRLVSNHEMIKLEKIPVKPLSWMGEKYINSVPVFKSAKDFAFFFRILAFLEGKSVDQQFTLKNICDAISAFSQEQVVWKEGIGYQNRLSLVRLLKYMVKMSLIKVIDQEIEDFTGNDNHDVLLERTPHSSYFMRMFPQEEVENWKGLRDFLRYMERENQEIADRKHRYYRRLFLEPVVYHNELSEEERDYIKKFYVGVENTIYRYTDLTYERYKSSSLVVKTDYVKGEKIYPADNMITKIAILMGNYLYTRPLAFPKNERNEIELMGEEIATVLSNLRKEYKGSWTKKMKDYKLEELQKEVMSELVMWGFLEEKSENIYVIKEGIFRFVGDYFKD

SEQ ID NO: 39058 - protein, 613 aa, Bacillus alcalophilus ATCC 27647 = CGMCC 1.3604
MGEITEKWTMHRAVLFNYWYYPNQELLFSNGCAVLRGHNGSGKSVTTQSLITVLLDGDVRSHKLDPFGGRERKITDTVLGEKGLVDIDHRIGYIALEFKRGNTNIFKTIGMGVEADRNKKQPNVWYFIIDGKRIGEKERDLKLYEEVMDEGKVKKLPRNEKELRNVIEAKLQCGKVYSNRDEYADNVNKHLFGFESLESFKGLIDLLLQARSPKLSDQNKPEGVVQVLNDSLPQLTGEELRPLTSSIEAIDRIEKDLRDYRQDLKGINALHEVYEEYNKITLAEKAVSYLKSTADYEETKKKITESKKNIEKFEKRLAVLSFESKKLDDELSIFRTEKANLGLDEIEALQQNKNDEEKNLVENKNKLAGLEEKKETAEKEYRTYKLQYEEKESQKKTLDWNMKGYLSELKNLSADIHFEEHDRFYNHFFQEKDGNSYSFATWKDVFDGYKQFIKITKEKLDAYEGMKKEVEVLDNQLGNIRMEIDKSQSIIDKEEENHETEVIKLTHEIGAWSQSSKTLSVSEDIVDGLQRNLEDVFDSMEKEVYFSILKLHYEGSKKEHERQLMKKGYAIELLASEIEDIESKIQDWKGREEIEPEFAKKEKVIGKNCIKME

SEQ ID NO: 39059 - protein, 335 aa, Nocardiopsis alba ATCC BAA-2165
MGLNQWANDRADERQDTGDRPVPRHGRAALLRLAAWFEEAEPDRADALATAAFALHPSRDLQGRVADGVAATTSWWQAEPDRSTVTEHPGTRSPEPVRDHRAQQARLRDAAESSAHWRRAGAEQVRSLLTEPTADRARLDLSGAGMEVLMELLTTALGSGDASRGPASAGDLEFGLRLHVHTAPGAEVVVRGEGGDLTLEGLRLHVTSYDQHHGQTVPPTPVEPLAEPEGEIDGPEGPDRTETLDVPEEPGSPETDETPEPEETTESPEAPETAEGSEETEAALEPETAPGDDEASSPEAGGEGPERTDSLPGPDPDAETTGPIEIITHTPRTRR

SEQ ID NO: 39060 - protein, 464 aa, Nocardiopsis alba ATCC BAA-2165
MTVPNVHIEDAALLGERQAAARALMARPLLTRRAHPTEFSLVRSHTEWLVQRFQRVLGYRLTVADDHARLVKRGLVDEVVRPLTRADGTRFTPRALAHLALSLAVLVETTEPVGIRALARGVRDAAGEAGVDADPTRGLAERRAFCAALLHLTDLGALTETSGTIRAHRDDAAVDAVLTPDVDALRAVAAHLPKAGDTADTFLAGAVDPDPESDQAGETTLRRLLAETAVVHREELPARQRDRLAAHQWRAAAALGNLLGGEIEIRAEGVALIMSDEAATSPRLPSDDPVGHTALALVRHLAGRLNPGRPATSVPVPDRELQVALEALGGADAPARADWARTAGPEVPDPDRLRTLVLELLADSGLLLGGPGEWRLTAAAARFGAEVDDRVPRIQDNDEDDRTDPARPRGAGHDASEHDESRLRTDPREDLDRVASVLRTVANEKVSATSGDTGDERGPGDGSG

SEQ ID NO: 39061 - protein, 158 aa, Nocardiopsis alba ATCC BAA-2165
MVTQETSEARETAPADPTPRYRLERAGIRNVWQYDDHVLDFAEGRLLLRGRNGAGKSKALEMLLPFLLDGDVRRLDTTGTNRTSLRWLMAEDPRAGRAPVEEAGPDLLGEPEDEPAEADDATDGGLPVGGVHDRPRRSGPGRGGPERHRPPVRRRPAR

SEQ ID NO: 39062 - protein, 495 aa, Caloramator australicus RC3
MEINAKLQKQIDEVRYLTAENASRYRVIMRFFYLQYERMKYWLYKEDVFEELKKHSQFEDYTMEQLKQDLDNLVQWKNLIPVQDTSKVSSVEEFKNKQFRYQISDYSIEIERMIIKLETLHVETASLEPSLLERIKEAFIKIPQIINSDEKVANQWWKDLNSDFERLNKNYKDYLGSFYSLKAEEMMKTSAFLLYKDKFIEYLRNFIKELQQHIISIEGILKQINEHTENALLLKIFLHEKSIPKINNEATEEEIKENIESKWRNIKNWFLPSNAKESEATRLLDITNEIIRKITRYAAQISESRNSAANRKEEYKKLAQLFTTCKDINEAHKLSALCFGIFNPYHIKTNAPRSTESINSSPYDEIPSLYIIKPKIRNYKEKSERSPIKSNLEKKEITLQNILKSRQQEQELIQNYIKNGIIDFSNLPKIPQSIRISLLRWLSKGLNSPDFTSKTETGIKYKIVPPDLPNQKCTIVCDDGEFTMPAFKIIFRDGS

SEQ ID NO: 39063 - protein, 386 aa, Caloramator australicus RC3
MKELELLLDNFWIIKDEDKELFYQIKDAIPEFKNFLAEKLGYHIIQNTQLIKLEKIPGKAEAWMGIQEFDSPMEYAFLCLLLMFLEDKGKEEQFVLSSITEFIEANYPGEKIDWTLFRHRKSLVKVLRFATKMGMLKVDDGDESKFTNDASTEVLYENTGLSRYFTRSFSMNILNYTSYKDFEKEEELDIDKDKGVIRRQRAYRKLLMSPVVYKEGDFDPDFDYIKKQRSSIENDLEKYLGLELHVHKNCAMVVLPQNKTYKSIFPDGTTLNDIILQMNYMITNMVKTGKLKPDNDDIITISKPFFETMVKELKALNSAGWSKEYREMDFEKLYNEIIHFMEMLNMIKVSEKEIKILPLCGKVVGRYPDDFYSKEMEREVALDEAK

SEQ ID NO: 39064 - protein, 1357 aa, Caloramator australicus RC3
MKQNRWIIERAGLINFWYYDEEEFNFSDGRLLLRGANGSGKSVTMQSFIPLLLDGNKSPERLDPFGSKARRIENYLLGDEGSELEERTSYLYMEFKKKESGNYITIGMGFKAQRGKPIQSWGFAITDGRRIGHNFFLYKDIGDKVPLSKKELENRIGGGGRVVEAQKDYMKMVNDLLFGYEDIDDYDELIKLLVQLRSPKLSKEFRPTVIYEILENSLQPLSDDDLRPMSEAIENMDNIKIRLDELKESKKAAEKIKDVYDKYNRFMLLDKAKNLINIYNEYQKLLKNKQELEGSKENSKKEFETASKNIDELKIKQAFYENKKRQLEVHDSLKIKEKIKEVEDFIESLKKQKHEKISQEETKRQRERQLQFELNKLKDNKEILLKKVEDIILQMDDLYLEFDFDEQVFLKDELKNNIEVEYNFSFVKEKLSKHIKNLEEAKEGIEELERINKLYDEALKVLERAKQEKDYKEKKLDEAKLLLEEIKEELIEKIYKWHKENNELILSDETLVKISQVINNFNKDSSFDEVIVLLRDEFNKVEFLLNSQILKLKFQKESLEEKIKELNEKIAEWKNKKDPEPERKEAVIKNRERLKKENIPFIPFYKAVDFVDGLSEEIKSYIESALCDMGVLDALIVPKQYKEKIFEMDKDMADKYIFPSPAYLMHDLTQFLKVDKIDVDGIKEEDIVNSLKSIMIDEGSATYLNEKGEYSIGILKGKTNITEGVKFIGSSARKRYREIIIKDLEEQKSQLEREIQTIKEELEMIYQKLEILKKELNSFPRPDDLKIAINTVTAAEFELEKAIEDISIKEKEEIKIFERLKEIKQRVYELTNKINLKADLDTFKSALEASREYRELLYELENSHRKFLQNKENLKAAEENLKLIQEDIEIIIYDLNSIKLKLKEQELLLDSLKEQLKISNYEEIKNEIEDCIKNLREIPSLIEKEVEKRAKEEERYTKAIKELEEIDNKIKRKEILFNLHQDAFKEEYALGFIETPKDEDTIKLAQRIIKEIKQEDKQREDYINSLYSKFNENSPYLREYILKMDTIFEKNIDTEDEDIKEALFKTKRLAIRGKVRGREVDLYDLLEFIEEGINENENLLRESDRQLFEDILVNNISKKIRSKIYHAQEWVKKMNKLMESMDTSSGLSFSLRWSSKKAEGENQLDTNELVELLRQEGSIMKIEDLNKLSQHFRAKINEARRIQEELGKAKSFHSIIKEILDYRKWFEFKLYYKRSGQNPKELTNNAFYQFSGGEKAMAMYVPLFSAVYARYEGARMDCPRIISLDEAFAGVDERNIRDMFRLLTELELDFIVNSQILWGDYDTVPSLSICELIRQDNADFVTVIRYHWNGKVKELVC

SEQ ID NO: 39065 - protein, 431 aa, Caloramator australicus RC3
MERIKQECLKYFKSNKGYKRLFEKIREKYRMLGYLGGSIKLDNLTPEEQDALSGFFKRDFYNKKSATIKIENFLKALENTRFSGVDFEGVLMEYFDEKIISKKEEQNRLEREKEKFFSEILSCFSGTKAKEWLEYVLDKKENAYKLIIQKYERDKLGLKNSLLLTGEALNRLSFDINNTERLAIFSSNISKNPHTFDFDRDEGKLLLYGISYFLKEEYPENAQKRAELLYRAGIIDDEVSNYTIVSGLLAYKDGKLHEGWEGFYKNSEPMQLSLYNLSKIDKIIAPERVVYIFENPTVFSEILERTKGKKIALICTYGQIKLASIILLDKLMDNVYKIYYSGDFDPEGLLIADKLIQRYGDKITLWRYGIDDYKTIISNKKISPQRLKKLSNLKTKELIALAEEIQKTGLAAYQELLIEKYLNDIGTVREN

SEQ ID NO: 39066 - protein, 47 aa, Thermoanaerobacterium saccharolyticum JW/SL-YS485
MSDKIDFNVIRPIDEARYLTADNASRYRLIMRYFYQNYERLRYWLTK

SEQ ID NO: 39067 - protein, 1083 aa, Thermoanaerobacterium saccharolyticum JW/SL-YS485
MGKSLMKDILREISNTRKRFLSLFFIVLMGVGVFGGIKAASQDMKLTASKYAADYNLFDVQILSTMGLTNDDLNSIKSVNGVLSAYPFYTVDAVVDKNNKGFVVKVISVDPVKINNDKNYVNKPKLLEGRFPENNSECVVETKFLKDLGFSIGDTVTINLDSQNQNNIKNKKFKIVGVVETPYYISRDRGSSNVGNGQIQAFMMVPNSNFSMDAYTEIDVLVDGAKKFSTFSDEYYNFIQPVKDDLTKLGKTRSEIRYEEIKNKAQKEIDDAKKALEDKETKYNKELSDAKAKLDETKTTLQNSQIQLNKRQASFNEQMALNQKKIDDGKNQIANTQAAISQNEVELNSAEAEIQAKEKELNYDDNMKKLSSTYDELNSSLNQLNSEINNNPSLKDQLKPKVDELNGQIASISKQIDTLNASKKALDENMAQLNQKKSQLENAKAQLAASQESIKEQELALSEAKVQGQMQIDNAAKQLNDALLKLNDNYKKYEANKAEFDKEISEAKEKIASSEEKLKDLKKPTWYILDRKSNIGYVEYGDEADRIKALGNVFPTIFFLVAALVSLTSMTRMVEEQRTQMGILKALGYGRLAIMLKFVIYSSVATILGGFAGLLLGFNILPKIIFNAYGMMYTLPPVITEFNSYYAFVGISAALVSTTAVAALVCFNDLKEVPASLMRLKAPMAGKRVLLENVRFIWSRLDFMQKVTARNIFRYKRRFLMTVIGIGGCTALLLTGFGIRDSINIIVSKQFNEIFKYQMITTFKSDASKEDLKELTNVINSDKNIKESIMLNQSSVDVIKGNAKKSAFLVVAGDKNQFRDFIVLRNRNTGTEIPLKDDGVVITEKLSNMLKIKNGDYIYLDTGSGGKVKVKIDGIAENYLQHYVYMSSSLYEKVFNKKMQSNEILSKINDSSSTKEDEISQKILKSKAVMTVNFISSVKKTFQDVVNNLLSVVLVLIVSAGTLAFVVLYNLTNINITERIRELATMKVLGFYDEEVSLYVMRENFILTIIGILLGFVMGVFLHRYLMSTVEVDILMFGRNIEPMSFLYSALITMGFSILVSIVVHFQLKKVDMVQSLKSPEID

SEQ ID NO: 39068 - protein, 127 aa, Thermoanaerobacterium saccharolyticum JW/SL-YS485
MYTIFEEYRLIDTLESYFDKKLTSLLDMLYKNDTDIYYSGDFDPEGLQIAQRLFKRYPDRFHFWRYDVEDYIKALSDKTLFESRLKMIDKIDTVQLKPLTDKMRLLRKTGYQELIVDDIIKDVLAII

SEQ ID NO: 39069 - protein, 495 aa, Bacillus azotoformans LMG 9581
MDVTMKKIIEASYLTADSAAHYRTILRYFYHQHERMRDYISPEELLDYLRSIPVFLDYQEEQLHQQLAQLVKWNNLIARQDMTNAKTIEEYKKKRFRYQCTPYTVEIERMLVQLEKIGDTFQGSLERSQFDRLLQALTSLQTEIEHELKKPAEEYMRIWEDVFRYFQSIRTSTADYIAYINSEQTDQRMQTEAFLVYKNQFTTYLRDFIVSLQKTSLQIQQLLTELATEKMQPYFQKLIDHRMSIPRLEDVSTSKEDWLLEYTEYWDSLRQWFLGSIHHQSELDVLQWQTNEMIRRMTRYVQRIGERQQHFRSRKKDYLQLAKWFGESKNLSEAHKLSAVVFGSMTIKHLQLEEGTTENLHVDPWDETPTELTIKPRTTRYREKTKPGSFQANDEKKREQRKKYLEERGQEKRIIEKYVTQGTIELSSLSTVEPFVRKVLLGWIGKSMASKDRIVKTDYGFHVKVKLKQDQMITLKAEDGDLTMPNATIVFEEIR

SEQ ID NO: 39070 - protein, 386 aa, Bacillus azotoformans LMG 9581
MEQTQLFDEKAIQGMDLLFHYYWILRADQPEWYQLIREREKVLRRYISEKFGLRLIIHQHFIKLEKIPVEPESWMGIQDFQEQMDYAIFCCALSFLEGKEVDEQFLLSELCQDIQADYPSEFPLDWTVYIHRKSLIRAVKVLLDFQLIRTIDGDISRFDHNEEQEVLYEATVYSRYFMRTYPDDFSNYEHWEELLHDDWKLNQEDERRKRVYRKLFFSPGLQRQDQQDQDFLYIRNFRNRLAEDIEKHSDYKLHVFKNTAFLSISEARQYHQLFPNTKASTDLILQLSSYFHRNLQRFQPNENGELLLTIGEFEQIIDDVRNRFGIGWAKYFRDMSTNAICSELISAMNEWMMVEEDSSFIRIRPLVGIITGKYPVDFEGGEKIDD

SEQ ID NO: 39071 - protein, 1380 aa, Bacillus azotoformans LMG 9581
MTESKWIMHRAGLLNFWYYDDEIFQFTEGKLLLRGTNGSGKSVTMQSILPVLLDGKKSPDRLDPFGSKARRMEDYLLGEKEVVDRDERTGYLFLEYKMVDVERYITTGIGMQAKRNKGIKSWYFVITDNRRIGYDLELAHNQLGDRVPFSAKELENRIGQGGYVVHSQREYMELVNKYIFGFQSLEAYEDLIKLLIQLRSPKLSKDFKPTVIYEILESALPPLTDDELRHLSDTIENMDQTEQQLEQLEREFESSSRLVKQYDLYNQYILAERSGLWLNAKKRKEDAGKEVERLHALDEQYQAEIEQLKADKNRFTIQKEVAEAEKERLQNHEVWKLEKEITKKRELVDQLSQEIKLLDDRWNNKNEQYRKTRDDKDKTEDELGVQQKEMTEILEELRLDAEESAFQQHSVNAEDFERHQQAEFDFSVWIKEIGDHERLLTALQQLVDEQSRLLEEYSRLERQSSEKKKEIDEVRKNLDHLEEWFTEVKQKLEHLVFTWIEQHPKLVFSAEQIQEISRAIEGLYEENRYDLVREKLFHVLNDYITQLKTDMKLTENTIQAKAKEIEEAKAELQHWKSLKMPNPDRAKDTDESRLKLAEEGQAYLPFYAAVEFQDHVTEEQKERIEAALKQTGLLDSLITEQSLSPVHDRIIRTEPVVLGYTLADYLRPDLDDDSPISKKVVDEVLRSISLEPQDGGFHIDVDGTYSIGCMVGHAPHEGPSRFIGRSSRKRYQLEKVKEWEQQIEELEYQLEQLTSEWRAFDQALNDAEEWKQTIPTDVDLNDINIQIEKDYRQLEQLKESLQKLDDQWKIVHQRLEKIKLQLHQQKGQLNLSLTKEVITEAIEAAIHYREHVHKLNRIYEKCLFGRKRIQDLINRLIELEEEMDEIKGEQNSKEGQSNKEKAEITSIEQQLQLKGIDDIRSRIQEVQHLLTEADKEMNQILQSLPRKETERDICLKDLETAKTGFEFWSNMAIEWENLVKTEIMRGFIKLDGDLSDPVNLVSQLEGIAAKLDRSKLNEQLTKTFFNEQAFLTEYRMFEFPEEAERPEWFAKDWGLYFEPFINEWNQYKSRRLIQMEYKGQRVSPYHVLHSLQKELDDQKGWLDEQDRQLYEDIIVNTVGSILRNRIQRAEKWVREMDKIMEARDNSSGLTFSISWKPLTAESEQELDTKDLVQLLQRNSKFLNEEDLNRITKHFRSRITKAKELIQLRNEGSTLHQVLKEVLDYRKWFTFVLSYKRVNEPKRELTNNAFFKFSGGEKAMAMYIPLFTAAYSRYKEAAAMAPYIISLDEAFAGVDENNIRDMFEVVEQLGFNYIMNSQALWGDYDTISSLAICELVRPKNADFVTVIRYLWDGKKRSLVWDETMNDDGAQEEFVEELITNE

SEQ ID NO: 39072 - protein, 429 aa, Bacillus azotoformans LMG 9581
MSKNVQVFRNEPGFIKLFILFKEKYRSLGRVGGTVSIRSFTEGEMESIAGFMGLPAYDLLEKGKVALLDFEKALLHTPFADYSLIQLMEGVLEETILTKNEEHEFNREKTRDFFNVLKTTLPEGDWWWSWIESKQPDTRWIWSLYKQNSDQLMEYLRNVYQAFLELPKDNSFERLPLFAQRTTGNPHYFDRDQTAGKLLIHCMYVDQLQNDGGMGMLEQGMPKSSEEVNELFAQYGLMKDDLWSFVTCSGLLAEDENGIHPVWQAASATNTVLNVPIKELLKVNKIRPVHGNKVWVVENSGVCSTIIDEVPSAPIICTHGQFRTASWVVMDLLAGSGYSIHYSGDLDPEGISMAQRLKNRYPNNVTLWRMDKESYEQALSEEDITSRLSKIEIINLPELEEVVNLIKLHKKAAYQEGLVTLLIRDILEN

SEQ ID NO: 39073 - protein, 493 aa, Bacillus bataviensis LMG 21833
MDSTMKKIIEASYLTADSAAHYRTILRYFYHQHERMRDFIAPEELLEYMRQVPSFADYQEEQLHQQLAQLVKWNNLIARQDMTNAKTIEEYKKKRFRYQCTPYTVEIERMIVQLEKLGDTFQGSLERSQFDRLFQALTTMQNELDHNKSAEEYMRIWEDVFRYFQTIRTSTADYIAYINSEQTDQRMQTEAFLVYKNQFTTYLRDFIVSLQKTSLQIQHSLAELTPERLQHFFQKLIEHRGAIPRLEDVSSSANDWLTEYKEYWFSLRQWFLGSATQQSELDVLQWQTNEMIRRMARYVQRIGERQQHFRSRKKDYLQLSKWFVECSDREEAHKLSAVVFGSMTIQHLQLEEATTENLHVDTWEEAPTELTIKPRTVRYREKTKPGSFISNEQKKKEQRELYLKEREQEKRLIEKYMNQGRITLSSLTTVEPFIRKVLLSWIGKSMANKNRVVKTDYGLHVKVMLDYEKMITLQAEDGNLLMPDATFLFEETR

SEQ ID NO: 39074 - protein, 386 aa, Bacillus bataviensis LMG 21833
MEQTQLFDEKATQGMDILFHHYWILRTEQPEWYQLIREREKVLRRYLDEKFGLRLIVHQHFIKLEKIPVEPEGWMGIQDFHEPMDYAIFCCALAFLEGKAVDEQFLLSELCQEIQTDYPGDFPLDWTLYTHRKSLIRAVKVLMEFRLIRTIDGDIGRFDQNEEQEVLYEASTYSRYFMRTYPDDFSSFQHWSELLKEDWKLNQEDERRKRVYRKLFFSPGLHRRDQQDPDFLYIRNYRNRLSEDIEKHSNYKLHVYKNTAFLSIAEPRQYQQVFPNSKASTDIILQLSKYIHGQPERFNANENGEMLMTEGEFEQVVDDLRKQFGTGWAKYFRDMSTSGIRTELLRAMKDWMLVEVDAETSLIRIKSLVGVMTGEYPADYLTGGTE

SEQ ID NO: 39075 - protein, 427 aa, Bacillus bataviensis LMG 21833
MSDKVQVFREEPGFLKLFRLFKEKYRSIGRVGGTVSLDGFSFDEVESIAGFLGQPVEAILNNGKVSLLSFEKELPQTGFVEYSLIELLEKVLGETILTKNQETGIEEEKEKRFFEKLRLSYPDGYWWWNWMESKSPDTRWIWSLYKQDSAGLMERLITVFKAFQDVPCMANRYEKLPLFAQRITGNPHFFDSNQLTGKLLVNCMQVDQQLKRQRESGMPKTTEDLNELLGLYGLMRDDLWSFVSCRGLLAEGEMGLHPVWQAASETDTVLNVPIKELLKIKRIWPAVGKKVWIVENSSVCSTIVDEVAEAPVICTHGQFRAASWIMLDLLVEEGCHLYYSGDFDPEGISMAQRLMDRYLGRVTCWRMDLESYEKSISAEDISGRLSKIDSITSPELVDVVNTMKIRKRAGYQEGLVFDLIQDINKTV

SEQ ID NO: 39076 - protein, 547 aa, Nocardia asteroides NBRC 15531
MSGAYHAAGARRSGTGPPEPAAATTNLSTVTDLADGLPSAVPALWDERLRLFSFATAEKRADYLRVLRAFDSARAAYVVLLHADDVAEWIARAETHTGDAPAGVPLPAGEIGPLLEQLHRWGVLERSYDGTRAATLAEYRNRHYVYQFAQAGFQAYRAVAGVLTARMDDASLSRLVLPELLTDLRTLAAANRDGDAERVYTTLRRLDAALTDMAARAAHFYLSLGDLVRTTEITPESFLAHKDALLAHMREFSMDLARFAPRLAAAIGEVEDTGVAELIARAASCDERVLLSPAEREADWRSRWDGLRTWFVATGGESSDTCEADRLREATMSAIAAVLSLLRRVTETRRGGVSRESALRHLAAWFVDTPTTGSAHALYDAVFGLGRPRHLALEHPDADLIPAGRSWWEAPPLEISRTLAETGRAPSAGAPARIARNDAGIRRLREAQLAAQRERAAAAASLATGAVHERVLDRRETEVLLRLLDAASTAWVPVSGKVDGTTGSDNGVTLTVRPCDGSTVIRTAAGLLHLNNRRLEVTATTRRGTPR

SEQ ID NO: 39077 - protein, 458 aa, Nocardia asteroides NBRC 15531
MRQQRRIDALALDSYQRAARVMLANHLVTRVYPDRIALPLIRRWATELREDLAELFGYRLEVTETTARLYPVHDRLDDSQPARSVNDRVFDRRRYAYLALALAALGRAGDQITLSELAEHVADYASRVDGLELSTERAADRDAFVDAVGWLGTRGALTLADGDAGGWASDPEAGEALYDIDRPVVFALFRPPRALQHLHSVRGLLADESEQAPAEQARRVRRALVERPVVYLAELTPVERALLGQDHLVSEVEYCTGLRAERRAEGVALIDTSGRLSDTRFPGTGTLAQVALLLIGEIADVVLDIDHPLPLRAAPDASSTLLDQLDAAIPAAGVFAPLAEDTESLDATGESGDEQAGDEEPPGYPYLEDAWVRGTVTALTDRYGATFAAQWQADVGGLTTEVVGLLSRLRLVRPVEGGLLVLPALARYRGAVVTVRVRRAEELFVTAAETDGTATGGN

SEQ ID NO: 39078 - protein, 1417 aa, Nocardia asteroides NBRC 15531
MSLIHGGVRFVPTRAGIVNLWDYRDQEFCFADGRLVLRGPNGSGKTKALEVLFPFVLDGRIEPRRLNPFAGEERTMKSNLLYRKQESAYSYVWMEFARGSWDDPEVVTVGIGMRATRSSDKVTRWYFVADGRAGVDFSLIGPDDRPLTRKQLAEQIGSDAIVDRPVEYRAAIDARMFGLGVQRYDQLINLILTLRRPQLAKNLDPRGLSQALTDGLRPLDEQLILDAARSFSDMEEVGRTLDGLVQADTATRRFVDVYRKYLAVQAKTDVDQVRARLDAVTNASTALFAATALRTRRDADRTAAEVRAEEADRAYEQAIADRENLQRSSAYEGKQQLDDLADAVRRLETSAAVHRDKAAEAGQTLQRRTEEAERAAEAVRTAAAALVRGEDALRAAAEEAGIEWTAPGADGRGDQLTATVRGHAEERDADVRAVRKALSRWESLAADRTRAQRLAERAVELRDAAAAEVAHAEAAVALARTESTAALRTWWQTHAAAFTSPADEPGSTGDLFAALESALAAAGTDDAPSPHEVLAEFCEPLQDRIRTRRQEAKSRAAAATTRREALVAEREQVAAERDDAPPPHPTDARTHDDLPGAPLWRAVRFADTVTPAEAAGIEAALQATGLLDARICDPALVPDTAGVRYLVPLPATDRPAGRTLADLLVVEDDSADLPIPAELVAGVLASIAVDESLAADGIRGVPATSGHPVIGTAGIFHHGLHVGRHTKTEAEFLGATARARRRELRQAELDAAIEAATTEVEAAQAEQASATADSARISAAVKALPRPSAITGAMRAVAETAGLMRSRSEAVAQTERDHDQAVGEATAMDKKLRATAQAHRTPTEARELDALAAAIRHFENTGTGLLRLRAEHEREREREREGADRHDEARALAEAFAEEAEAARLGVAEQQRKLETLREALGAGAADIDRELETARAAIETAKAEQRAARKAANAAIEAVGDAEAAYRTANEALATALTEVLAEVRSLAPYARPDLLSLLGASVEHRWPSTDAAWSTPDQLQYRIVAAGPETDPVVLPDEVAALYVDLERATAQVKATEAGRKSTRSAVTSALQEFDAALTASGRDYRLHWDAADGLTVVAVHDENGQAALADFAARIDAARRDQELLLTDAERRILEDALLTGLAQQIHERTSDARELITRMGAEMKQRRMSSGNTIGVHWVLADGQSEAARAMCKLLDRDTAALSPEDLGAVRAHFAAEIRAARTAHPERSYPEILAATLDYRTWRVFSFTLINGDGSEDKLTVARHSALSGGEQSVSLHLPLFAAAHVMLDSADPQAPRLLALDEAFAGVDDNGRSELLGLSVQFDLDLFMTGYDLWITYGHVPGCAHYDLAHSTAENTVSATLLVWDSGELLAEHDGGDLTTALGSPNRRRVPNTIEGGLTLAGMPGEPAPVG

SEQ ID NO: 39079 - protein, 610 aa, Nocardia brasiliensis NBRC 14402
MGDRPATTLFPVTDSADGAANATSVLWDDRLRLFSFATAERRTDYLWVLRAFDSARAAYVVLLHADDVAEWIERNGQAPRTPGQLGASSAPAATTSGVTARGTVGTDTTATLTADPATTPPEPADVVRQQPTEDNRAAENAADEGPASAAAWSDVQGDRPAAPRLTAAEIGPLLDQLHQWGVLERSYDGTRAATLAEYRNRHFVYQFSQAGFQAYRAVAGVLNARLDEASLSRLVLPELLADLHTLAAANRDGDAERVYRTLRRLDAALTDMAARAAHFYLSLGDLVRTTEITPESFLAHKDALLAHMREFSLDLARFTPRLAAAIAEIEETGVEDLIERAAGCDERVLLSPAERQADWQARWDGLRTWFVASGAGESVGTTEAERLREATMSAIAAVLSLLRRVTETRRGGVSRESALRHLAGWFTAAPSADSAHALFDAVFGLGRPRHLAMEHPDADVIPALRSWWEAPPLEISRTLAETGRPPSAGAPARIHRNDAGIRRLREAQLDAQRARAEAAKSLAGADVHNRVLDERETEVLLRLLDAASTAWVPVSGRVAGTTGSDSGVTLTVSEHPGSTVVRTAHGLLHLNNRRLEVRETTRTRANRNAR

SEQ ID NO: 39080 - protein, 471 aa, Nocardia brasiliensis NBRC 14402
MMHGRKIDSLALDNYQRAARVILANHLVTRTYPDRIALPLIRRWATELREDLAELFGYRLEVTETTARVFPIIDRLDAGKPARTPADRVFDRRRYAYLALSLAALGRAGDQTTLSELADQVAAYAGRVEGLELSTDRAADRDAFVDAVGWLTHRGALTLADGDAGGWASDPEAGEALYDIDRPVVFALFRPPRALQHLHSVRGLLTEEGAGATHAPTAADLARRVRRALVERPVVYLEDLAPAERPVLGHDRIVADVELFTGLRAERRAEGVALIDTSGRLSDIRFPSTGTLAQVGLLLAGEIADRVLDIDNPLDRRPAPPDAGEALAAQLDGAIPESTVFAPLAELRSVFEDHLAQDDSAAESERDESFEATYPLVESAWVRETMQALADRYGATFAAQWQADVPGLTTEVVALLERLRLVRSIEDGLLVLPALARYRGAVVTVRTKRTEELFVTAADTYGSDSTGTEGN

SEQ ID NO: 39081 - protein, 1394 aa, Nocardia brasiliensis NBRC 14402
MSLIHGGVRFIPTRAGIINLWDYRDQEYCFADGRLVLRGPNGSGKTKALEVLFPFVLDGRIEARRLNPFAGEERTMKSNLLYRKQESAYSYVWMEFARGNWDDPEAVTIGIGMRATRSSDKVTRWYFVADGRVGVDFSLIGPDDRPLTRKQLAEQIGTDAIVDRPVEYRNAIDARMFGLGTQRYDQLINLILTLRRPQLAKNLDPRGLSQALTDGLRPLDEQLILDAARSFSDMEEVGRTLEGLVHADSATRTFVEVYRKYLAVQAKTDVDQLRTRLDAVTHASTALFAATALRERREAERATAETRAEDADRAYEEALGDRENLQRSSAYEGKQQLDDLADAVRRLETSAGVHGDKALKARQTLDQRAQEAERARTAVHSAAAALSRGEDELRSAAEEAGIAWTPLSEAARADQLTTAVRSHAEERDADVRQVRQTLGLMEKAAAERTRAERLAERARELSEAAAAEVAHAEAAVVLARTEAAAALRSWWDEHRDVYSPIKDGLFEALDTALAQAGSEEATVAEVLAERGEPLLDEIRNRRQEARGRAATAAAQIAELTAERDRVAAQSDDAPPAFAARARSTADRPGAPLWRLVRFADDVPPAAAAGIEAALHAADLLDGWVCAEPPAQYDSDQFLVPLPDADRPKGRTLADVLVVEEDSDALTVPHQAVADVLASIALHEGKGDPAGGLAVSTAGGFRQGVQLGRHHKTDAEFIGATARARRRELRLTELAAALEAAAAAEQAATNDEAAATAELARISAAGKALPRATAVATALRAVSETAGMMRSRTEAAAQAERDLDQAVAEVTAVEKKLRAAAVKHRTPRDPRELDALAAAIRHFENTGTGLLRLRTEHEREREREREGADRYAEAKDLAEAFAEEAEAAKSGYQEQLRKLETLREALGAGAADIDQELAKARAKIEATKAEQKAARKAANEAIEAIGDAEAAYRTAHESLGTALTEVLADVKALAPYARPDLLRLLGAPADGRWPSSDAAWSTPEQLLYRIAQAGPEAEPQVLPEEVAELFENLSTATASVRASEATRKSTRSAVTAALQEFDAALAGSGRDYRLQWDAADGLTVVQVQDDDGMSALADFAARIDSARKDQELLLTDAERRILEDALLTGLAQQIYERTSDARELIAKMGAEMKQRRMSSGNTIGVHWVLADTLSDPARAMCKLLDRDASVLGADELATIRAHFASEIRAARAAHPERSYPEILAATLDYRTWRVFSFTLISADGSEDKLTVARHSALSGGEQSVSLHLPLFAAAHVMLDSADPQAPRLLALDEAFAGVDDNGRSELLGLSVQFDLDLFMTGYDLWITYPHVPGCAHYDLAHAAAENTVSATLLVWDSGELLAEHDGTDLTAALGSPNRRRTHTTIEGGLELTPVS

SEQ ID NO: 39082 - protein, 505 aa, Thauera sp. 63
MPYSDTSTDLFRHVSADKAGIYRNIMASFAAAKRQFRLHMRPDEVLAEARWSDGVPKLEEVQSALAQLTEWGNLEAQPDTARVASISDFYRARFLYRLSHGGEAVETAITAFAEALGRRAELQTVALEDIASRLKTLLALADAPALDAAKLHETLRDLVRVFESLADNAQAFMAGMARSIELQQADATAVVAYKQRLIDYLERFIGDLVGRSGAIAQHIALLHPRIDPLLWAAAQREARDAAPGDEQAQADALSQRQQAWRERWRGLRGWFVSTHHEPPQAEVLRSKARAAIPQLLAAVAALNERRSGRSDRSADFRVLAGWFATCGSDDDAHRLGRAAFALNPARHFSLNPGAGHELPATTPWAEAPPLSIHPRLREYGEAAPRGPLPKVRERSEERALLARQLREEHLQVEAARVRLATGRTTRLSEIGHLDPHAFSLFLSLLGEALTAQSSPDDVVERQTGDGLLRVRLEPLEAHTRAEVVTDAGVFAGRDHRITITATQAP

SEQ ID NO: 39083 - protein, 412 aa, Thauera sp. 63
MTTDSTAIGQQQALHQREEFTAALRALLMTPLMTPAHAEFAAVRRHADALREWFVREAGWPLHIERDAARLYKRPADVHDATRGLPGYERRRYVLLCLACAVLERADPQITLRVLGDRLLALAADPALAALGFSFTLQAQHERRELVAVCRTLLELGVLHRVAGDEEGFVHGGSEGSDSLHDALYDVQRRVLAGVLAASRGPSTWPADDAPATLEARLAALVAEPVPDSDEGRRTALRHHLARRLLDDPVIYLDRLDADQRAYFMNQRGTMATRLCDATGLVTEQRAEGLALTDEDGELTDVAMPAEGTEAHVTLLVAEFLTARANSRASTDEVAAFIAGARQRFGKFWRKSAREAGSEHELAATALERLQRLQLLERDGAEVRPLPALARFAVGEAELRPAAPATTGTLFD

SEQ ID NO: 39084 - protein, 1387 aa, Thauera sp. 63
MDTPDTLLDTPSDLATADARPALPQPTLARWQPLRLGLVELFHYDSEEFWFRDGHLLLRGNNGTGKSKVLSLTLPFLFDAQLKPSRIEPDGDAGKKMAWNLLLGKIDRRIGYAWIEFGRIADDGEPDYLTLGCGLSAAAARAQVDAWYFVLERRRIGEDLWLTSPARTVLTRERLKEALHEHGQVFDTAAAYRRAVDERLFQLGAVRYAALMDTLVQLRQPQLSKKPDEGNLSDALTEALPPLSAELLTDVADALNQLEEYRRELQDYEALAKAVGQFNQRYQRYAAINARRQARGLRSAQSGYDTASRNLNEARTELQTSQHAEARAKGRLDAAEAALLAGRTRLDQLQSDPGMKDANRLNQAERDSESRAADLVDATRMSDEATARLERERRALDERGTRRTQAEEALATAREGVAAAALASGIGEPWRDNPLAALPAAELATLGDLPLDTALQDLRQATQVRREQLALVQRRVAEVAQAEATHASRQQARDERQDEAEAAAARRSVADAAVETEGSRVVEAWQAHFANLQVLQVAEPPLSALATWVANLQGDNPARAALSSAQQRAADELAGQRAAQLAAQKTLHDEQATLRAEHERLAQGEDATPPPPYTRGTEARRQRAGAPLWQLVDFHEHIDAAQRAGLEAALEAAGLLDAWVTPDGRLQAADGAPPLHDTQWLERPRCDASLAAWLTPSASAATPAIDAALLTRLLEGIACSAQDDGRAEGWMAPDGRFRLGALAGAWAKPQATYIGYAARAAARARRLAEIDLRLGEIADASRRIDDALTELARRQERAAAEWKDAPSDESLRAAHADAAAREREFQTAKSRLDEAERQLRAACDALQSRRDALAADAADLRLPTDAAALEAVGAALLHFGETLHGLLRVAHELRLSATELARQQARTREAEADARQRAEQFAERGRLAQESQVRLATLRESIGAQVDELQRRLREARTAVSDGERHVKAESEALRTAGEARARGEQKVLDADATLQERAATRQHAITQLQGFAATGLLSAALPEAELPDLRAPWTIEPALTLARRTEQALAQVVDDDEAWTRIQSQISHDYGELGRALTALGQQAQADTSDYGMVVSVIYQNRPERPDQLTARLAAEIAQRRELLTARERTLLENHLQAEIAAEVQRLLQAAERQVDAINKELNKRPTSTGVKFRLLWQPLPEGGEGAPVGLEAARKRLLNTSTDLWSAEDRRVVGEMLHQRIAAERLKADAVGGSLLEQLAQALDYRRWHRFRVQRWQDGQWRPLSGPASSGERALGLTVPLFAAVSSFYSQASYAFAPRLVLLDEAFAGIDDAARAHCMGLIREFDLDFVITSEREWACYAELPGVAICQLQRREGIDAVHVSRWTWDGRARRREDDPDRRFPPE

SEQ ID NO: 39085 - protein, 397 aa, Thauera sp. 63
MTVDARLQRLLGGEPLAALRKRLRQRYARGAPADVLRLGSLSEAEHAALAALSGRPARPVRSMQIDVAEIDAALARAGLASSLRDALEQLDGPIIDAKAERLHVRWQWQQVVEGCAHPGLRSALQTSVGLGLLKRLCASQPEAGARLVLDADQVLRRLPAGGIPRAQLAVATLGNAHALDAGSPVATLVLSALRQGAAPDDDADRVRDLWAAAGVLVNELARPALTLNLPGPTGTEPGEPTYFSLRSLVRSPPAWAVTGRPVFICENPNLLAIAADQLGLRCAPLVCTDGMPAAAQRLLLTQLRVAGATLHYHGDFDWPGLCIGNQMIREHDARPWRFSTADYRAAVIGAPRPGRLLDDAAVTALWDDTLAGAMLAERLAIDEEGLADVLLDDLQHC

SEQ ID NO: 39086 - protein, 495 aa, Desulfotomaculum hydrothermale Lam5 = DSM 18033
MNNNLLKPIVELSYLNAQNVDRYRCIMRCFYERHRRLQYWLRPEEVYKGVLSYGLLENYTMEQCQQDLNQLVEWKNLVPQHDGGRSTTVEEYLRKKFRYMMTPYSVEIERLVVNLENIRGYGGSLEPSLFESIALSLQKMKELPPEITPQEALALWENIYETFTKLTENAADYIASLQSSKTEELMQTEAFLAYKNSVTGYLQGFVQGLQRHAYRIEGLLPLFQPEFLRDFFHNVRDALASRPQLDEPVTPEEYMHRLQTQWHSLNRWFLGEPGEKSDVYYLEQTTKDTIARIVRAALRIQERRRSGISRRRELDYLGQWFFSLTSIEEAHRLAAYAFGLYRCRHFQGEDDKDTESTDISMWQAGPNIRGLRSRSRKKGRSSGPDPVKSQHTRQQRAKEEYLAQQQRQAELLQKFLAQGTVTISDLDTVPAATRQVLLSWIGLCLANKSRQIRTPDGIEISLLLPDHRQRTILHCEDGELDMPDYTLYFRPTGDQ

SEQ ID NO: 39087 - protein, 392 aa, Desulfotomaculum hydrothermale Lam5 = DSM 18033
MARIARNNQEEIKNCFIALLNRPWVTKADDPELYQSIRSHYQELRDWFQEYCGFSLLLTRQLARLEKFPGQAHAWMGLELFSDPLDYTLFTYCLWYLEGKNETDQFLLTEMIEEIKNHLIGSQVSLDFTMYHHRQSMYRALKQLKTLKVLVAVDGDEAEWARVGNDKNVLYECSPLSRYVLRHFPQDLTTYQTPASLGELAYPDDQEGQVRRRRHRVYRRLLQEPVVHDWEWSQDERYYVLTQRHTILEHLSARFGLEGRRYREGLIFFHPDHSAEIELFPTAKNISDLVLLLAGEIRRLLNQSDTGIYTDERGCIPLTLAELEGLLLRLRERHKSLWSQQLRQAKSNELAQEILAHLTDWGLATVNSEQIILLNPALGRWNGNYLTDEDEE

SEQ ID NO: 39088 - protein, 1361 aa, Desulfotomaculum hydrothermale Lam5 = DSM 18033
MMRNRWQMNLAGIFNFWYYTDEVQFKLSDGRLVLRGANGSGKSVTMQSFLPLVLDGNKRPSRLDPFGSKDRKIDYYLLLEPDSGIQDRIGYLYLEFYHPEQQRYLTIGIGLRARRNANTGFWGFAITDNRRIGKDILLYERDYSQGQEQKIPLTRSRLEDVIGEGGQVVTEQGKYMEMVNKLLFGYGDLQSFQELLDLLIQLRSPKLSKDFKPTTIYEILSNALPPLQDDELRPLSEVMEDMDQINDRLEEVCLHRREAEKLQQVYNRYNKYLLYHQSSQLLQAKRQWDNQQSSTQELEAKLQEISRSLQERNERLTEQSTKLLEVNARHQVLAASEVLEKRHELNRLREEKERTNRQAERLAKSLMYWQGKQKEYRRDQEKYTAEAAEYTTRQQATLADLEDIAREFDFSRHDVYHRRWDRDMPREFNQWHNWQQDLSEQERQINQALEIARRVDHKKYERDLAEREVGNARQRRDTAEESYRFEEENCDLVQKSYQEQIFAWRKNLLELHLSDEELQKTLHRLSLFPEVSYESIKEPMLEAFDHRYLDLQKQKVALEQQRDRHQEEQNQLRAAWQEWKNHKEPEPPRSAARELSRRQRGEGAPLYALCEFREGVSEELKASLEAALQQSGLLDAWVSPQGLGILGTNEEEIWIAPNPQFFGYTLADYLYPTPPEDGSLKAEIIDQILRTISLGDISSGDNVGAAVNEQGYFRLGALCGKAAAKERAEFIGKETRHRTRLAEMARLEALMEQEQQNIDDCNRQIHRIEEALTRLTQEKSCFPAGDELQEAFSRLAQARREMESALEEERQKVELFRQASQAYQETAAELHTFMQGWTIPKNTAGLTAARDQLQTYRQLLGELHSHWSSYCMSQAALDRALAGLAEAAEKIAEETDELASLRETLHQINAQISAFEQALKDLGIEDIDRQLRELEQQRDALQREINALDKEIRQLEKEQGIEESRLSAARELLKEKETALNQARQAWLCEWNRRLVADWSEVTVSEANLPGLYRVAQQVLQQYRDEKYLQKSKDSITNDLFLAFQECRGNLHPYGPELMLDEEHRRNLVLFMRDRHNPLPPQALVQELKTTEEEQRLLLSQKDRELYEQIIIHSVGKAIRYKILRAEQWVQQMNRLMEQRDTSSGLRLHLKWEPRPAANEKELDTLQLVNLLKKDPQMLRNQEIEQMIEHFRSRITWAKQEADQHDTLRQWIYRLLDYREWFRFTLYYEKGEQSRRELTDSRFNALSGGEKALSMYIPLFAATYSRYNDCRPEAPKIISLDEAFAGVDDENMRDMFGLLTQLDFDYMMTSQVLWGCYDTVPKLSVYEIYRPKDARFVTLIQYYWNGFRRMLVDESMVEENA

SEQ ID NO: 39089 - protein, 429 aa, Desulfotomaculum hydrothermale Lam5 = DSM 18033
MLDYLRQPCFEKLFNLARKKIQSLNGLRGTVTLDNLSPVDQDLISGFLGKNCLGRTRLKIPLHEIDEVLKNSPLEMGLYPFLELYFNERILTSQEIYATRKYRWSRFFAQLQEQAQTPVTQDWLAQLWQGTGRGYRTLLALYQDNPQAALDEAFICVKALDYLATHPGENLRIPVFAAKLTGDPHALDLENSLGRLLYYGLLHFLDKPETDYTAEGKRTLFREAGLLDDDVSSNVLAAGLRVCQADPRFTVFDVANATGSPLILPLRFLAMPTRWQPGQKIYMTENPAVFSTILDVCPAAFLPPIICGSGQPSVAALTLLDQLVQAGCIICYSGDFDLKGLEIAIRLAQRYKQNFRPWCYDNETYLGVPHGKPAAANQINNLRKLDVPWDKQLVHRMSERKLFVYQESFIDKLINQFNNRHLKLAITKE

SEQ ID NO: 39090 - protein, 518 aa, Streptomyces ipomoeae 91-03
MSDEFDAPEPPAPEPVDEGAFGIDAFSLDDRLRLFHFASAEKRHEYLWLLRAFDRGRANYQVLLHASDAVGLLERLAVDHPAAGAVGAVGGPAGVQSLLDALSEWQVLDRSYDGTRAANLAEYRNRHYVYQFTQAGYRAYRAVEDVLGASLEDAQLSRLVFPDILGDLRALADANTAGDGEEVYRKLGRLDSVLNEMAQRAARFYLMLGDLARTNDTRPEVFLAHKDTLLAHMREFTAELGRYAPLLAEAVEKAAATGVDRMIEYAAEADERLFRSPAERLADWRHRWDGIVHWFAEREHSETERLQDATVTAIRSVLALLRRVTEARRGGVSRESQLRHLAQWFTSCESDEDAHALFQAVFGLGAPRHIAVPYADPEQIPGRTSWWEAEPVELARTLVQSGRTPALHGPGRIERDDDRRALLRAEQLKEQAERSGAANSLASDGVYGRTLDEPETRALLALLDVALAARVPASRRVTAASGSAHGVRLTLTPAEGSTTVDTVRGRLHLDGLRLEVTA

SEQ ID NO: 39091 - protein, 476 aa, Streptomyces ipomoeae 91-03
MNRVAEGVSPLELADYQKAVRLVLRHPLITPGYPDRAALATVRRWAEQLRTDLMEALGYRLVTTADTARLQRAQDGLDATRPALTRAGRPFDRRRYAYLVLALAALGRHGAQVALGELADAVAADAVRIDGLGLDTARKADRDAFVDAVSWLTERGALTLADGSATAWAGDPERAEALYDIDREILLAVHHPTRVLQHLTSVTALLDSGSALGLSAGRAAQRRDQARRARRLVLENPVAYYADADAELLGQLRAPALVEDLERLTGLTVERRAEGVALIDTSGRLSDIRFPGGGTVAQAALLLAARISAAVQRSGRHAPELLPAPTAAERLAARARRIDAALPARGLMSELAEPDAESGFKQSAYEAPADEGQEPAETRYPFVTDSWLRGRLKEITAEYGAGFAADLRGDPDRLLGQALDLLAAMSLIARVDGGALALPLLARYRGVTARVRTRAAAGPPSQTALFTDDATKDPTP

SEQ ID NO: 39092 - protein, 1374 aa, Streptomyces ipomoeae 91-03
MSTPAPTQAPTHSARFVPTRAGIINLWDYRDEEFSFAGGWLVLRGPNGSGKTKALEVLFPFVLDGRIDPKRLNPFAAEDRTMKSNLLFRGQDSALGYVWIEFTHRETGQAVTCGIGLHAQRHRDTPARWHFVADGRVGEDFSLLTHDDRPMTRKQLAAELGHELIASTADYRAAVDRRLFGLGSERYEQLLTLILTLRRPQLAKNLDPAKLSDTLTAGLRPLDDDLIAEAARSFDDMESVQRTLEGLVAADDATRAFLASYSTYLRVHARAAADRLTARRTETAERAAALRTATADLTAAREQQAAAEAHAESADASLAAQRARLDQLRSSAAYQAVEQLADLERLVRTCEQTARQATADRERRTAATGRARAEAEHAARLAAELDTAVSRDAAAVADHAHTAGLPWTPADAEPTCLADRSAALAAARHEGVRAVRAAQQAARGAEQTRDLARISLDRAQGAVTAAETAETAAESALESAREQARTALGQWTSAHGVLLSEAGAARLAEALELTGEAETPGEPVTLADAFTEATAPAVQELRDTLASLRARRTDVERRRAETEAERDRIAAEHDDAPPPARGRSLERALGDGVPLWRLVDFDDELTERQRAGLEAALEASGLLDALVTAEANPVAAGHSEGYLRAGAPVNGPSLADLLRPEIPENPQGEAAIPTAARITAVLRSVAVTGDLDAGIPHIGPDGRYAAGVLVGAHTKEHAEYVGATARARRRAARIAACETLLAELSSQSDELARTQARTDAALEAYAAARAALPRTTGITQALRELDRAAARLRATRDAADASQAAYDESVAACSVAERALRRTAAEHAIESERVDAVETATRAFEMAVRELAARRREHARQSEAAEAAADRLTAAAEDEEAATDAERAARRRHTEEAAGLEALQEAVGAEAQEVMRQVQETEDGIDALVREAEAARTAQHTAIAGTAAAEARRTAAAEAGAVAAAEEKDTARGLRPYAARELLDILRCPPGLAWPAQEADWAGEELPPAVAAVHEAILTATRDLTPTETSLKQSVTRLTKALDDLQARLAAAGQDYRPEWDGSDGVILVRVADEEGPLPVAAFAQKISSHRRDQAELLSESEQRILEDALLTRLAQQIHDRTVDARDLIRRMNTDMRKRTMSSGTTVGVSWLLADHLDDEQRAVCGLLDADAARLGPEGLTRVRTHFAAQIKTARARHRDQPYRELLAEVLDYRRWRQFAFQLVRPDRSEERLTRARHSRLSGGEQSVSLHLPLFAAAHAMLNSADPHAPRLLALDEAFAGVDDTGRGELMSLAAQFDLDLFMTGYDLWAAHASVSAAAHYDLAHTAVDHTVSALLLVWDGDRLLADDTGDLTAALGSPGTRRAPTPGEAAVVD

SEQ ID NO: 39093 - protein, 430 aa, Streptomyces ipomoeae 91-03
MSTEQSEGHGYDELRGEGWTRLLAAARRRLERTGGALDGDIGLTRPSDAERRTVIGITGRYRPETVGRLAVPLRDLDGYLYDRYGTGLLQTLGRLHGPLRDRPAERADEEARRDQALKSTHSSRLAGQGWFAAWLDRIAVDGTLTRLVRRGDTPLLDAAVRVLERLTGDEDHSADSPNRVRGVLPLPVLAEWATGDTKALVPGTPLEQLVLRALAQRAGDGRAVPRERAGRRALWESAGAIADDLASQVLVLNIGAEGDTVVCDWLRDAADFGIPFRITLHQLATDPVVPAARTIFVCENPAVLRAAAGELRSASRAAALVCTEGVPSAACHKLLGDAVRAGARLHWRADFDWAGLRITADAVARHGAGPWRMNAADYTAALGEGESTPLAGPPAASPWDPGLALAMEASGSAVMEERLLPALLSDLTRA

SEQ ID NO: 39094 - protein, 517 aa, Streptomyces ipomoeae 91-03
MRRVPPEMFRFTTVERSDLYGAVLDAFGVAGEHLETALGLDAVRERLRGVGWAAAVEDEELHEALRRLVQWELLDVVHNHAENYRMAEEYERRNLQYSLTRRGEAALAGVRHALEVLASTGALQTAVLEAIADRLDELCLLSGEPASADRRIYTTLRELEGHLEALVENTKAFNGELQRLLRAEGADLEVFREVKAATVAYLQEFLVNLDRRGQTVAAAVARVEERGTAVLRERALRGAELPPVAGEDPAAGWLESRRARWAGLRAWFLPDDGARPRIEQLHDIARRAIVSLLQVLERINESRRRSSSAVQDFRELARWFAAAPVEEDLHRLWSAAFGLGPARHAHLAHPDPELIPSSHSWSEAPPVRVSALLRTSGRTERFTRTARVRDVAAVRAERAERARAERAELARAWRVLETDGPVRLSAFGALDPAVFDRLLDLLGRALSARPDAGGLRRATTGDGRVEIALSPPPDERTAVLRTAKGALAGPDYVVHIMAAGGASAFPAFGAARQEAAG

SEQ ID NO: 39095 - protein, 448 aa, Streptomyces ipomoeae 91-03
MSTLANQLAAAEREEVARAIRLLLARPLLTEAADPAGFELVRRRREPLAQWFDYTCGWSLVVEPRRGYARLTKVRADPDGSRPARRARSGRAPFDRRRYVLLCVTAAELLSMPMTTIGMLADRVVQATAADRALAAFDPVHRAERTAFVDVLKLLESYDVLRVVDGTTEAYVESAEAKVLYRVDTTLLMRLPAAPVGASRLAVPPDEVPARFEELLTGLVRERRYGGTVVDGTADEAHGETAATDAQRNLRLRHSVLRRLFDDPVLYRSDLADDELAYVTSLTGRQILRRSVEQAGFLLEERAEGFLLVDPDGLATDVRFPDDTSTARVAALLLLEPLCAAPAGMLPEQLAEAGADLLRRFPRWAKAYQSEDGAARLSDDAVRVLRDVGLARRAGGRVVACPAAYRYRLTETTSSDPEDKPGPERGASPRETASATASRGVVAEGDQQ

SEQ ID NO: 39096 - protein, 1385 aa, Streptomyces ipomoeae 91-03
MSVTELPHPRRPESVEPAEAPAQAADAARSRWQPHRAGILNVWRYYDETFTFHQGRLLLRGQNGSGKSKALELLLPFLFDASLRPNRLSTFGGSERTMHWNLLGEGASGKTRVGYVWMEFRRVGDDGSERWFGCGARLQATVHTSGAHADYFTTGARIAHPDGVLLVNEAGQPLTRAALAEALRDRGDVHASATDYRTAVRRELFAGMGEQRYESLLSALLQLRQPKLSERLDPSLLSTLLSRALPPLGEGEIAELAEGFERLDRQREHLKRLDDEVTAAETVASRQRAYARRVLRAGSAALISATTEMDNLTRVARRSAEQLEQALAERESAQALREEQGLRAHALEETVEGLRESDAYKQGEELDRLRRRTEDMAAAAGRQRATAQAAQARAEEDQRYADEAARQARALDEHAREAAEEARRSARAAGLESIHHEARTILGADHVVPLPDGTGGEAGGSRPEGSGAAPTVGENGARQARRLLRGAVTARRQQVTLITEAMDDHDRAVRDRGAVEDLLDEARTRLAEAIARRDEASGAWDDALAAQGERLLAWAGGCAELRIADPGELVAGAATEAAVTALTEAAARPLEQEIATAEATARAARQGLRDERSRLEEEVRRLSGETDLPPAPPLTRTTVRTATAGAPLWRLVAFREGVPLSVQAAVEAALEASGLMDAWVSPYDGITLPGHDTRAEAALAVAAPGPSLLEVLRPEEAIPVPVDTVIRILAGVAYGTYLPGGHPAAVSADGAWRLALATGTWSKPEPAHIGALARQRARQRRIGELTERISETNASLAALDDQLRGLAARRARLDADRAARPDHRELDARRRDWDRAEERVAARDDAVRDAAGQLARRESEVEGTLRTLSRRAAEHGLPTDRDRLRELSADIDRFRDSADSWVDARLTATAAADRAHQLAAQAERSRRTAGEQAEVAAAAEAEAAGLKARLEAVEATVGEDYRQIVARVAEARAELRRCREEAGRAADLLLRLEGRIGELRATSGQDAERREQAVATRDGAAHRFRHLCLVGLAEDAGITPELDAGDGTKATLEAARATAAKWPGIPHAPRNLGDAATRLSEAVHEARRRLGARADLDLEPDDDIQLFTATLDGVRVGATGLLTTLTQERDRSRDDITTAERRLFDQILTGDIRRHLAARIRQAGELVDRMNGHLERVRTASNVAVQLVWDVRPDLPDSTRTARQLLLKDPGRVTETDREALHAFFRARIEEAKDGDTAASWEEQLGEVLDYTAWHRFTVRLDRANGTGWQPLTKKLHGALSGGEKAIALHLPLFAAVAAHYEAVPLAPRPILLDEVFVGVDTVNRGQVFALLTALDLDLMVTSDHEWCTYGELPGIAVHQLLTDGDDDAVTSARFVWNGTDLEAG

SEQ ID NO: 39097 - protein, 413 aa, Streptomyces ipomoeae 91-03
MTHPEPAPGERTLRRPELRPLWHTVHDRLSSGRPVTRVRLGPLDDAQREALADLLGLDRLPDVRPSVALARLEEAVTELCGRTVRETVTELVGPLDDRAGERRRQDGERAELWTWLDGHDIVRALPALADWVASCRATGLVDGSPERTRSLLTDALTVLAELPARAEPLPVFAARVLKGDSHALDDGTRLSTLVLRALATLHDTAPPQSAADRRALWARAGVADDDLSATVLVGGLRPSGDGPLARVARVCAEAGQAASLTLAQLRAPGEFTLDADPAPVVHAVENPSVLALAVRRFGPDCPPLVCTSGWPNSAAIHLLRLLADQGAVLRYHGDFDGEGIRIAAYLLDKTPARPWRMTAADYRAAVARTPHGPRPGRLTEAPWDPELTRAMTEHGIAVVEELVADVLLADLAM

SEQ ID NO: 39098 - protein, 514 aa, Thioalkalivibrio nitratireducens DSM 14787
MSYSTFSHLVADKAALYRRIMAAFVDAKAHFTVHLRPEDVRERTGIDTLEDVQAALAQLVAWGNLEADPDTSRVTSVEEFYRARFLYQLTRAGEAAEQALQVFDRELGRRGALQAVALDDIRLRLQSLLELSRQAHPDATQTQLLLRDLTHVFSDLAENARAFMSGLSRTLELRGDDQQALIAYKERLIGYIERFIGDLVTSSAEIAGTIRALDRDDDGRRPITPLLRLAVERELDDLAPDLADPLDIDAARDAERRRVNAHWEGHWEGLKAWFLDRPERRSQASLLRAQARRSISQMLEAVQRLNERRLGRSDRSADFRALARWFLECENDDQAHRLWRAAFGLGPARHLGVDAETLAQWRADPVPANQPWRDAPPLRISPRLRATGSYQKRGAMPRLQRRDRERAFLAQQMSREAAETRAARAALATGETLRLSELDGLDPGAFSLLLQLLGDALSHAAHPDHTVAATTGDGSLRIEMEPLGADTEAAIRTEAGTLSGRDYRIRITELEAAP

SEQ ID NO: 39099 - protein, 417 aa, Thioalkalivibrio nitratireducens DSM 14787
MPALPQPLPDVLERARAEERQRALRALLMQPLMDARHPAFALVRRHQAPLREWLAAETGWHLQVESEFARLYKRPAELRDATRGAALGSGTQTTPFSRRRYALLCLILADLERGDQQITLARLGTGLIQAAADPALEAAGLRFRLDHQDERRDLVATVRLLLDYGVLARVAGDEEAFVRDQTGSDALYDINRRMLAALLVSVRGPSLVEMEGPASDLEARLQALTESFVPDTQEGRNRALRHTLTARLLDDPVVYWDELPDDARQYLTSQRAAITRRIADATDLVPEIRAEGVAMVDPAQNLSDQSLPCEGTEGHVTLLIAAHLAEAPEGSRFTLDALAEQVARWRPQYRGYWRRSALAAGSERALARQAVEQLRRLRLVALGADEQIIPLPALARFAVEPARSPQGKPLAEAADAS

SEQ ID NO: 39100 - protein, 620 aa, Thioalkalivibrio nitratireducens DSM 14787
MQALQRLDQREHRIREEWRTQPEDGPLRTAYAEEASALRALESQTERTEAARRALEARSHEAAEQRQQRDELAADLALPSADEPLAAVARAVETYGAGIRELTRALRDQRREQLRLERMRQDLEQARAEARQATADAATAERNARNAETQRDTLRETIGADVAELEQRLAEVERRQAELKSERQSLGQGRTRIAREVGGLEADISNGEQQLVAIGDQRAVAITRLRELADAGLVPMATADRVTVDPELSWAPEPAVLLSRRMEQALAEVDESDTAWQRHQKGLHQHFAVLQGALGRHGHDAHIEQQDDLLLVRIIFQGRHHGPDALAAQLAREIERRRELLTARERELVENYLLDEVASHLQLRLMETERQVRQINDELAERPTSTGMRLRIQWQPLAEGQQAAGLTAPAGLEITRNRLLRQSMDAWSADDRRAVGEFIQGRIREARETDSAGALTDVLERALDYRHWHRFVVERWQNGRWRPAYGPASGGERALVITLPLFAAAASHYESAQPAAPRLIMLDEVFAGVDDDARAKSMGLLAQFDLDAMMTSEREWGCYPEVPGLAIAQLIRREGIDAVYVSRWRWDGAHRIRESDPQTPMEATAGPEKAAEGPATEELF

SEQ ID NO: 39101 - protein, 414 aa, Thioalkalivibrio nitratireducens DSM 14787
MSLDRERLQRLLGGAGTERLRRRLRERLGRGGGDTLTLTRSTPEERAAVERLLGRAPRSGSSLRVSLPEIDATLARAGIAPGLRAALEALDGPIRDQQAEQQAETRRWQALFEAVRERAAPLGLETWLDELAARGLLKRLARRDPTRAAALLEQSLTVLEALPDPGLNRSTLAARCLGDAHGLDPGQPAAALVRRALHRHWRGGIGDDRPDERTIWAHAGILVGGDITSTVLVYQLPVQGDTPGSRMLRIQNQAGEPTYLTLRQLLRHPPRWDCADREVFVCENPTVVAEAAERLGTECAPLVSTGGRPGAAVWLLLEQLRDAGARLQYRADFDWAGLSIMNSVLARFEAHPWRMDAATLQRHAEVSGPPLEGPTAAAPWDPDLAPALAARGTALHEERLLDELLADLSRPPDP

SEQ ID NO: 39102 - protein, 483 aa, Rhodococcus wratislaviensis IFP 2016
MKLFAFTTAEKRAEYLWVLRAFDHARANYVVLLHAADVARILDGLAGDDLAGQLGAGDVTPLLEQLHVWEVLERSYDGTRAATLAEYRNRHFVYQFSQAGYQVFRAVEDALAARLDDASLSRLALPDLLADMNDLAAANRAADNDLVYRKLNRLDATLSDMAGRAAQFYLTLGDLVRTTEITPETFMSHKDALLTHMREFSSDLSRYAPKLAAAIALVEDTGVETMVARAAASDERVFLGIDEREADWRARWAGLTHWFVGSEAGLSESERLREGTMSAIAAVLSLLRRVTETRRGGVSRESQLRHLAGWFAATPTEDAAHALFRAVFDLGRPRHLSMVHPDADIIPDTRSWWEAQPVEISRTLAETGRPPSPGLPARVQRNEGSVRRLREEQLTAQRLRAAAAQSLARGGVYERELDEAETDVLLSLLNAALTARVPVSGRVKSSTGSENGVKLTLSPHSESTVVRTARGRLHLDGLQVSVR

SEQ ID NO: 39103 - protein, 464 aa, Rhodococcus wratislaviensis IFP 2016
MKAREISPLALDSYQRAARVILSNHLVTQTYPDRIALPLLRRWATELRDDLMTLFGYRLEVTETTARLFTVSDRLDAGTPAKTSTDRTFDRYRYAYLALALAALGRAGNQITLSELADHVAADAAQVDGVDLSTERASDRDAFVDAVGWLAARGAIALADGDAGGWAANPDAGEALYDIDRSVVIALFRPPRALQHLRSIRGLLAGADSATEDDTSEFGTARPVDVKETARRVRRALVERPVVYAADLDDDELVQLALPRTAADVELLTGLVAERREEGVAMIDSSGRLSDVRFPGTGTVAQVALLLAGEIADRVLDPDAPETARMPLPRGRCDDLIEQVDSAIPQSGIFDSLAGHDGFEPADPAPADRLFPVVEDEWIAGTVRTLTERFGRTFAAGWQADPDGLGRAALALLERLRLTAAVPGGVLALPALARYRGVVVTIRDRTPEIDLFQSPANDSEEVTA

SEQ ID NO: 39104 - protein, 1385 aa, Rhodococcus wratislaviensis IFP 2016
MTSARFRPTRAGIINLWDYRDQEFSFADGRLVLRGPNGSGKTKALEVLFPFVFDGRIEPRRLNPFAGEERTMKSNLLYRGQESAYSYVWMEFCRGAKDDPEAVTVGIGMRATRTNDKVTRWYFVADGRVGVDFSLLGSDDRPLTKKQLGEQIGTDSITDRPLDYRAAIDARMFGLGVQRYDQLINLILTLRRPQLAKNLDPKGLSQALTDGLRPLDEQLVLEAARSFSDMEEVGRALEGLAAADQAAQSFVGVYAKYLRQQARTDVDHLATRLEAVRSGIAALHDAAADRARSQESRAAAEERFTAAERALDQANATLDALKRSTAYEGRTQLDDLAQAVSTLEKSTELQAEKARKAKATLEQRAEEHDKAGDAVARAVEALTHAEDELHLAAEDAGITWTALPENARTDQLTAALRGHAEERDGDIRAVRAALATVERAATERTRADEAARRGQEQLDTAKVAVLEAETAVESARSRCATELRSWWTEQSSLYAEIDAPASLFDSLDTALGRIGDDDAATLSETLTEQTTDAVDSLRLRRQQYDRDVAAAEEAIAEHESARAAIESEHDDAPPLSAARQDARSRLTGAPLWRLVRFTDGVDAAAAAGIEAALEAANLLDGWVTVDDALPDVESEQFLVALPAADRPTGKTLADVLEVEQDTGVPDDRVRGLLESIALESLDLCEGPVGVAEDGAYRQGIQRGRHTKSDAEYIGTTARARRRAARITELDSTLEETRATLDETRASADATAALLTRTTAAAQALPRTGSILTALKKVTESAGALRSRSDTATAVGRELDQAIADLSAKEKQLRATASTHRTPHVAREIDSLAAAVRHFEKQGEMVQRCRREHAKEVEHTRESEDRLHEARGNAEEFAEEAAIAEEVLAQQIQRLETLRDTLGAGAEQLDRQLEEAHARIEACKKEQRDARKADKDAGEAIGKAEGAYNTAVQTLRLALTETHADAARLAPYARRDLLELLGVDGGHTWPASSAAWMSAEQLVYRIQNAEGDTPILPPEVDALFHALDGATESVRVSDSARKSTRTALTTALQDFDAQLAAAGQDYRLQWDAPDGVTVVQVQDDEGYSSIGEFAARIASARSDQELLLTESERRILEDALLTGLAQQIHERTVDARELIARMGTEMRERRMSSGNTIGVHWVLADNLDDSAKAISKLLERDTSALGPDELATMRAHFAHQIRTARAAHPERSYPEILASALDYRRWRVFSFTLISGNGNEDRLTVARHSALSGGEQSVSLHLPLFAAAHVMLDSADPHAPRLLALDEAFAGVDDNGRAELLGLSVQFDLDLFMTGFDLWITYGGVPGCAHYDLAHSTAEHSVSATLLVWSDGELLAEHDGTDLAQALGSPLRRRVPTPAEGAFEFA

SEQ ID NO: 39105 - protein, 493 aa, Anoxybacillus flavithermus TNO-09.006
MDTSWLKPITEAKYLVVDNAYRYRAILRYFYTQHERMRQYLFPEEVYAFLKQFDEFQDYTEEELQQDLEQLVKWRNLIARQETGHIRTIEEFKKKRFRYQCSPYTVEIERMIRALEQLGETFGGSLEKTRFDRLYASLVRMESIIHDGFAEKREEMNQVWEETFDYFKKIIQNSADYIAYLNGENMEERMMSDSFLVYKEQFTAYLRDFIVALQKTSMQIEKLLEDLPEDGVRRFIEEVVAYQLAIPRFEGAILSREQLVEEKLDTWRSLSEWFLGRNGHESELSFLQKQTNEAIRRMTRVVQRLGERHHHFRSRKKDYLHLAKWFSSLETIEEAHKLSAVVFGCFHTKHIVAENDATENMYRDIWEEQPAEWLVKPRVRHYREKKKPEAMIDLRKEKEETMAAYLAAKQQEEEELTQLINDGKIVLQELPVVAPHIRKTLLGWIAKAMGREDRTVQTENGWKVKVVQREGTIILKAEDGTLMMPNYEIHLLD

SEQ ID NO: 39106 - protein, 388 aa, Anoxybacillus flavithermus TNO-09.006
MEKEFDEKAKEALTALFEQFWIVREKEPELFQKIREREKVLKRYVQEKFGYRLIVHRYFAKLEKIPAEPEAWMGMESFQEPLDYALFCCLLAYLEGKAVEEKFLLSDVCEEIKAMYPGETALDWTNYQHRRALIRVLKTAEQIGIIHHVDGEVEAFANQEDEEALYEVPVLSRYFMRSYPKDFIQYETIEQLLEEEWKMSPDDYRRHFIYRQLFLSPVVYRRQKDDPNFYYLRNFRHRLRDDIEAHTDFRYELYKNAALLTIPERQHVYTLFPDQKGTSDIILHFASVVRAHLDNYPPDEYGQIHVTMSDFRQLLHRCSEQYGEGWSKTYREMTTAQLASELLSALKEWKMAEYEQETGMVVLYPLLGRLVGQYPDDFTTKGRDDDDE

SEQ ID NO: 39107 - protein, 1379 aa, Anoxybacillus flavithermus TNO-09.006
MTNKWVLHRAGLINFWYYDEQYFEFADGKLLLRGTNGSGKSVTMQSLLPVLLDGKKTPDRLDPFGSRARKMEDYLLGEKEIVDRDERTGYLFLEYKRKQTDQYVTTGIGLRAKRQKNMDFWGFVIFDNRRIGRDLFLYKTEKSADGTEKIPLTKRELANVLGNGGTVVDSQKEYMELVNKHVFRFESMEAFQELIELLIQLRSPKLSKDFKPTVIYEILESSLPALTDDELRHLSETIENMDQTKQQLEQLERDEQSLKRLCAQYRAYNEYMIAEKASEWIKADKQVKRLAEEEKQWLAEEQEKQAHLVALSEYIQTLANEQDVLHQRELELASHEVFQAAKEYERVQQEIRDIHDKQQKLLRQIDEKEQLERRYKRQLEEDEDRRYQIEKQLTQQVEDLRHDAMESSFSSHALNEADFARQRQTKFDFTVWKREGQEYVEKLEQTIALWRRHDEMKARYEETSKEAGELQREVDELRHEEAKWLELLENEKARFQQEVFRWLEQCQDVSVPEPSVQLFLQRLHELYETYHVDEMKQPFTEAYYEALNRKNEEKMKQKHTCTLLEEKIASKEAEWNQWKTQKDPELMRDEQTIAARAELDEKGIAFVPFYAGVEFQDHVPEPLRERIESALYHAGLLDALITETDVEVTCDRVIVPRPVELAHTLADYLQPDVDEGCKVSKTRINEVLQSIVLADREMDGTFMLHEEGRYTLGLIKGHAPAREKALFIGRTARKRWRLEKIAALEAELHELRTQLHEGTDMLKQLEQTIAQITRWFRAFPTDRDMRAAFEEREKTKRMIISKQREWEKKNEKLAQLARDWQQAKQTLREQTEGLDLEFSKDGYEQALVFMKSYMRGLHELQMTHREFLHLLDMIHHRTEQLETLQQEIDETKGERHMLAKEQQKLELKRQEIERTLQLMGAEEVQAEIQRVRDRLAFLQREMPAKMNERIALEHELKAIREKCEQLSVKETFAKRLAEAWKRSFARELSLELVELHGSDWLEKAKEAMQQYGVLAKEARTSLVNRLNSVFFQESANLTEYRLSQEPVAAEEDNLFTDIELDEEMELKVSGWREKQDRIVLLLDYKGQRVSPFYVLREIEHDIFLQREYMKEQDRELYEEIILKTIGRILRSRIQRAERWVKDMNELMQQLDTSSGLVLFIQWKPRTAETEEEMDTKELVELLRMNSRLLKEEDLQRVTKHFRSKIHRARELLEERGQGNTLHQIIKEVLDYRKWFSFTLYYQKTNEPKRELTNQRFYQFSGGEKAMAMYIPLFAATYSRYQEAADDAPYIISLDEAFAGVDENNIRNMFGLVEQLGFNYVMNSQALWGDYDTVPALSICELVRPKNASFVTVIRYYWNGKIKQLVTDEKLAAMMRGGSH

SEQ ID NO: 39108 - protein, 410 aa, Anoxybacillus flavithermus TNO-09.006
MNRVEEAVQFFRGERSFHRLFCEMKKKYESLGRIGGTISVSSFSAEEKEAIASFFGKEMSRVSLAAFEQQLANTRFAGISLVELLSCYFGEPLVTKKEQQQEIEREKEAYFTRLMNTYRAQRDWLMAVEKQRFVQLAYQQNHHALEAALSAVCRALEQLPSTYVRLPVFAQKVANDPHMFDLHTLAGKLLLSALEFYTDTEYDLSSVEDVNELLQSYRLLREDVLNFVTCAGVMAETEKGRHPVFAAACATNTALNVPLREVMPLVRAYPSVGNNVFVVENAGVFSTLLDANVPLISTNGQLNLATRWLFDLLVKEGVTFYYSGDFDPEGLKMAQRLVERYGSSVRLWHYDCSDYLATKPTVPLSDERLAKLQSVTLHDLQPVKQEILRRKKAGYQEALVEQLRREVKGR

SEQ ID NO: 39109 - protein, 494 aa, Thermoanaerobacterium thermosaccharolyticum M0795
MSDKINFNVIKPIDEARYLTAENASRYRLIMRYFYQNYERLRYWLSKEDVYNYVKNFDLFYDYTLEKCEQDLKSLTEWKNLIAEQDTGRAQSAEEFKNKKFRYMLSEYSIEIERMTINLEKIKGYGGSLEPSLFQRLYENLKKIDDISKSDDLEAVHRWWKDFTSDFENIYHSAIDYIASLQSSNADELMKTDAFLIYKDKLTEYLRGYIKDLQRFSQVIVSLLNKIDKKSLDCIVEKLLLYEENIPRLDRDFDINDVKENILSKWENIVFWFRGNGDEDSEAYRLLEISNEIIRKITMYAARISENRLRTASRKSEYIKLSKIFANIDDIGYAHKLSSVVFGVFHTRHLYGDFDKRTESINESVWDDVPCKFLIRPKTRSYTQSTKTNAIIDRTENKEMCLKQYLEERHSEIEEISKYIIDGKIVLRELPIIKPFIRTTLLSWISKSLSQPKNIAKSEDGRRYKVSISRNKVITLNCTDGVLEMPDVTIEFLD

SEQ ID NO: 39110 - protein, 378 aa, Thermoanaerobacterium thermosaccharolyticum M0795
MEELEILLENFWVTKDDTEMFNRIRDNEKKLRSFVEDKLGYRLIVNPLLIKLEKIPDDAEEWMGIEEFQSPMDYAFLCLLLAFLEDMGVGDQFILSNITEYIEMQYDGIESVDWTLFKHRKSLVRVLNFAEKMKMIKVDDGEQERFADNREIEVLYENTGLSRYFMRIMSSEISEKMTMEDFMKDDRYEDNKVLERRHRVYRKLLLSPAVYYEGPDDQDFIYIKNYRNTIEKDFDDYLDSKLHIHKTSAYIIFDENKYATSYFPDNKNISDIVLQIAYVLREMIDSGDLNVGVNDRIEITEGQFMNIISDVKNRFKSGWSKVYADMNDDKLFSEITEFMESWKMVIYNDDTHSYTLMPILGKFIGEYRSDFKGAIQNG

SEQ ID NO: 39111 - protein, 1390 aa, Thermoanaerobacterium thermosaccharolyticum M0795
MDDRWIINRAGLLNFWYYDDEVFEFSGGRLLLRGSNGSGKSVTMQSFIPLLLDGNKSPERLDPFGSRARRLEDYLLGEEDVNGIDERTGYLYMEFKKGSKDNYISIGIGLKAKRHQSMDFWGFIIKDGRRIGIDILLYKMETGIDGKRVKIPLSKKELKNCIGNGGEVVDSQREYMELVNKNIFGFSSIDDYDELIKLLIQLRSPKLSKDFRPTVIYDILRASLSPLTDDDLRPMSETIENMDQIKLHLDSLNKNMKSLKKLKNEYDRYNKFMLYYKAEKLLMQKNELSKVQKQSEEIRQSIEKNNQDVLMGEDKISDLVSELQALKNKEIQLRKNDAFNTQRELAEEENILNQYRKDKDLKEVQLKKKKDRYFEIEEELKDLEGREYSIDKNIKDNLECMASISEEVNFDEHSFSEEELKKSYGKDFDFDFWNNSLKEYTGKVRKTLDALNDEAEANQKYNDALLEEDRLRKANEDLKRKVNEIEILFDEEKNRFIDKIYDWSDTNKLLKLNREDIEKLARIVLSYGETSVYEDLISSIRKPYDDIRGRLQMDMLKVKNELDLKNSQLNEKEEELRKWKETEDPEPERNEQVLENRKRLDKAGIAYVPLYKAIDFKNDIDDDTKGNIESALIDMGILDALIVSRSDLDRAMKMDKDMADKYIVPGTFNMKLNVLQYFNVVDSNSGVSPEEISDALSNVFIYEEENATYINDDGTYGIGILKGKAAGNSKSRYIGFESRRRFRDEMISSIAKEISIIKDEIRELIDRQLSIKSQLSDLDIEYKNFPEKDDLEEALKELKEAQSNQKFTEDKLNDATLAAKKFFDVLQEKRAVVRKLTSEIGIHADVKAYRDALGELDEYKNLLQKLQINYNSYITVLRSIETRKMQKQDIEYDIDNYKFEIDALDTKIKNSIEKINVLKETIEKLGIEDLQNELSQCMKRIDDIPKEINDLTAKTAALKERIVLQEKEYERLREEIRKNEDILNIYDIGLKDEITLGFIDEFTNLDDMYKLAKTVQSQYKEMFTKFDKDSATEKIRNAFYVCINELVEFGLSLDVVENEQSDVGMGTYQEIYKDLRRYQITAKVNDKKISLYGLYNMIDEDIKINENLMKEKDRQLFEDIIMHNVGRKIRSRIFKAEEWVKKMNDLMSQRDTSSGLKFQLEWKPKAATNEQELNTRELVELLKLDADMMKEEDFNLVVNHFRSKVESAKKIYEENSNTDTFHQIMKSILDYRDWFEFKLYFKKEGENRKELTNNAFYKFSGGEKAMAMYIPLFSAVYSMYQSASSHAPKIISLDEAFAGVDDNNIRDMFKLIEDLGLNFIMNSQVLWGDYDTVPELSIYELIRPKNASYVSLIKYKWDGKIRHLVTGIEESVEATDDFSYDEVAYTRVGE

SEQ ID NO: 39112 - protein, 425 aa, Thermoanaerobacterium thermosaccharolyticum M0795
MKAEDIDFFKRNKGYERIFKAIRDKYKSIGRIGGVIKLDDLTDSEKEILSNHFKKDFSKRKSANIDVNKFAATFLNTRFEEYSLIDILESYFDEKLTSKKDDMYQYANEKEKFFNRLLSDYEGTKCWQWLKSIYDNKAVGVRTINQRYDSDRTLLERDIKYVCDALNRLPVYEGKKLRLPVFSSHITRDPHGFDVNTDCGKMFINALSTIFGVSDVKNSEEIAELFYRAGIVIDEISNFVTLKGLLAYSADKCNEVFKAAYECNEVLQVPLYNLSEMDRVESPSKKVFVLENPGVFLSVCDFIKKPVPIVCAYGQPRLSLLVLLDMLYKSGTDIYYSGDFDPEGIQIAHRLFKKYPERFHFLRYDVEDYIKALSDKTLTESRLKMLDKIDIAQLKPLADKMKILKRAGYQELILDDIITDVLSMN

SEQ ID NO: 39113 - protein, 522 aa, Saccharothrix espanaensis DSM 44229
MLLEAMRVPPEMFRFTTGERAELYVVILHAFGEANERLETALGLDDVRARLRSVGWLDPLDDKDLTEALGSLRGWRLLDVTQNHAENYRTADEYERRNLQYSLTKRGEAALAGVVHAMGVLASTGALQTAVLDAIADRLGELVAQLGDPGVPDRRIFSTLVELEGHLEALRGNTKQFNGELQRLLRAEGADQETFREVKSATVAYLQEFTTNLEQRAHAIANRVGLVEDRGVALLHHRALVGAELPPTSGGDPAVAWLELRRARWEGLRAWFLPVDGGTPRVQQLFVVARRAIIALLQVLDRITESRRRSTSAAADFRELARWFAVAPAEEDLHLLWSTAFGLGSARHAHLAHPDPELVASSARWVDAPPVEVSALLRSAGRTERFSRTGRVRDVAAVKAARAESARAERAALKAAWDRLDTGGGTRLSQFGRLDHEVLERLLDLLGRALAAAPDRHGVHRATTGDGRVEILLRPPGAHREQAVLRTPRGVFTGPDYDVEVRTHGGRAARRPRSAADGTATG

SEQ ID NO: 39114 - protein, 415 aa, Saccharothrix espanaensis DSM 44229
MSNLANQLVIAEREEVARAIRLLLATPLIGAKTAPEAFDLVRRRREPVEKWFDYYCGWSLVVEPRLGYARLAKVRVATDPTRPARRHRTGRAPFDRRRYTLLCVAAAELLGVPVTTVGLLADRVVQASAADPVLPPFDTSSRAERMAFVDALRLLESFGAVEVVDGATESFVDSADAKVLYRVDVTLLMRLLAAPVGASQVAVAPERSYTDEVPSRFTELLTRLSRERRYGDADEPVSEVQRNLWLRHSVFRKLVDDPVVHRDDLTPAELAYLSSPTGGQLLRRAADQAGLLVEERAEGVMLIDPDGVATDSRFPDDSGNAKVAALLLLDLITSAPGPVAVEQLRTEADALLGRFPKWAKGYRGEDGATRLVADALDVLRAFGLVRLDSGVVRAQPAATRYAVTRTSADDVEDES

SEQ ID NO: 39115 - protein, 1358 aa, Saccharothrix espanaensis DSM 44229
MTVTELPRTESGAPPETVARWVPERAGILNVWRYYDEVFRFHKGRLLLRGPNGTGKSKALELLLPFLFDANLRANRLSTFGTSERTMHWNLMGEGATGTTRVGYVWLEFRFPGADGTPDKWFSCGARLAATKHTTTVHPDYFTTGQRIGVPGGLTLTDPNSAPLTTKALEAALGDRGTLHQNAADFRAAVRSTLFPGLSEQRYDALITALLQLRTPKLSQRLDPGLLSTLLSKALPPLGEAEISDLAEGFERLDRQREQLKRLDAEVQAAQHLRTRQRAYAQRVLRAAAAKLISATTELGNLADAAKLSEDEHRRAELRKQEAEERGELLEQRIVETEGRIQGLTGSEAYRKGEQLDRLRTRVREARATAGKRRADADQHRQVARTDAEAADTAARHAQARAVTAGALADGASTAAARVGLASVHAEIARVLADPSRSRALLRAAVQARAEQVEAVRAALNEHEVAVNSRRDAERALEQAREALAEAIERRAELAERREAALAELRAAVLTWVADCRELTFADPEALADLAASETAVLTEVDSAASRVLGAITREETLVGTALENAERDRDALRDEVRRLLTEEDLPPQPPHTRTADRITMTGAPLWRLVRFADAVPDDVRASVEAALQASGLLDAWVGHDGAVVGHDTFAAPGAVPPAPGRSLADVLVPEVDAPVAADVVARLLGGVAYGEVLPGAHPVAIGADGGWRTGNLHGTWRKDEAAHIGALARQRARQRRLTGLRERIAASEELIETHTAALRSLAERRSDVEADRRDRPDHADANAALEALTQAGSAVSSADGVVRRSLDGLAKSEQRVDRALRALTTTAAEHGLPTERNALTAVVAAVDAFRTASDAWIDEHAVLLTARREADRTAEQARRSRLAAEQREDEAAEAEAVARGLDSELDAVEGTIGVGYRQVLDELAGLREQLGSVRRDARANQSEIGTLAVRLGELTTQRATDARDRDRATEARDQAAVRFRHLSDGSLPADSGLDDLPAFRQVLTASSGVRAALDAARSVAAAWPSLPHSPKNLGDAAHRLAEEVHASREVLGGRADLELDSDEDVQVFSAMVDGVRVGASVLHDLLRSDAERSREDITAQERELFDRTLTGDTRRHLAARIRQAHDLVDGMNARLERVRTASKVAVRLVWEVSPELPPGTKAARDLLLKDPVRLTEDDRESLHRFFRDRVEQAKGDETATNWEQQLGQVFDYTAWHRFVVKVDRMNGTGWQPLTKKLHGALSGGEKAIALHLPLFAAVAAHYQAVAGAPRIILLDEVFVGVDSVNRGQVFALLSALDLDLVLTSDHEWCTYRELDGIAIHQLISGGDDDAVTTARFVWNGAEVVDEEVVGEEVTQDD

SEQ ID NO: 39116 - protein, 417 aa, Saccharothrix espanaensis DSM 44229
MGSGRVGGVRSVNGLDSAALRPLWRAVHERLSSGRQVSRVRVGPLDDEQRSAVADLLGGERLPGEYVVVSVAGLDELLRESVGAGVRDVVAALLGPLDDRAARRALADAARAELWEWLVRHPVVTAQPALREWVDAVRRAGLVGGSVERTRDELDRVLRVVAALPAPGVPLPVLAEAVLGDPHALDEGTRCAGLVLRALAALYGLDLPGDAQERRALWGRAGVVEDEVSSVVLAAGLRLGGVGGAVLRVCADAGHVAALTLAQVRATSFVGTPQDVWVFENPSVLTVAVARFGASCPPVVCTSGWPNSAVIVLLRGLATAGATLHYHGDFDGEGVRIAAHVMARTGAAPWRMATDDYLLALGVARVGTSVGRVTEAPWDGGLADAMREHGLAVPEERVTARLLDELDDCGRDVGGLP

SEQ ID NO: 39117 - protein, 492 aa, Saccharothrix espanaensis DSM 44229
MEPARLKLYAYLDARDHQRTYLAIMRLFTSTLLADLSAGEVAGALAGAEREGRVEPGESRIENVINRLRQLVEWGNLVQGRREVVASSIAEFQHGSVRYQVSKLAVRVQRDVDELLRVPEGAREVSRELLPAVERGLGQLGRSLSEALLSEAKRPREVLAEQVTTLFLQHAELAATVRDFYAYLGQVVTRHHLAPEEISGFRNLLVEYIQMVVEDVLRHTPAIADALAGLNAARTELLRLLGRADLGDRVERARGRSAEDWQELTDWFVDRTGRPSQVTALRDATARAIGSLLASVKRATSGGGLLPGRRAELLKLAAWFDGGTRSQAHELYAAAFGLYSARHLSPAPEHDSDNERTSWRDGPVHEVSVSVRSRSDRGARGRTSRILDDPMTEQSLLAEARDADERRAASVAELAAAAPCLSTTTLSGEALGVLCELLTLAMAQRDTAADAGSATDPVRGLRVTVAHEAGHSTQIHSHAGTLTLHDSTLVLD

SEQ ID NO: 39118 - protein, 412 aa, Saccharothrix espanaensis DSM 44229
MFDDLSDIDAANVVRCARTLLRRPLLRADGPDGELLTLVYRHRFALQDLFARQLGYRLVVERRYARLYKAGPGADDSRGVLGMSPRGYAYVALTMAVLTGIGRQTLLSRLVSDIRAAAAEAGIEVVDDVVDRRALTAALRHLVSLGVLHETEGTVDMQTEALITVDTDLLGQLLTGPVAEATSPRRLVELANRPGPRGVEHAVRRKLVENPVVLHADLPAEQSEWLRRNQRRESASLETSFGLRTESRAEGVLTADPEDYLTDLYFPGTSTVARIALLALPELLSGEPVSGRHPVDRAALVELCGRLVEDYPAAWSKQFTDDRERLADEVLELLRRMGLAVPTDGGWQLNAAAHRWIPEPDGDPEREVEQPPVTPEVPGWSLFDTPEDGARDAVPARHGRPGAGVPQDEENV

SEQ ID NO: 39119 - protein, 1355 aa, Saccharothrix espanaensis DSM 44229
MNRWRLHRGGIVNIWQYTEQTFDFSGGRAIFQGTNGSGKSRTLELLLPLCLDGDLRQVGSKGFDTVSLRRLMLDDYDGGPNRIGYAWVELVRGDEHLTCGLGVKASKTSQAITDSWRFVTSARVGHGLQLIGAERTPLGPAQLRDLIGADCVLEEAAFRAKIAETVYGVPGARYGDLLHLQRTLRNPDVGLKVLEGQLEQILSDALPPLDQAMVEQLATSFDDLESIRENIVRLSSADAALGTFLKTYGDYAFGGLRSSADRLGAAEDAVRKLERSSAKLAAALSGTAAERASAEHSLTSLEAGEQQAEETIGALKELPAFRDLQDLQTREKLVAEKRSSAIAALDMANKQRSQEDGSVDGVLRLLRRLADDLGTAEELVEPLRHHLRVAGLAEALAPDVPRVAVVDAVVRTESVRAKPDPEAEPLPIDRRVPPALSDLDLEPAAARTTEIASLARQRGALALALHRQAEELETAQRKVDALRQTARDAQQAATESSALRNQEAQELAEVALTWLDDVRSWQESGPGRPENALELPASVDPVAARKLTSAAREWVGPLVAVAREAAHGVTVRRGDLRGAIDALDAELAALRSGTARVPERGRYALAGREPAAGSPFYRLVDFQPDVDDTRRAGLEAALEASGLLDAWVTASGTTTPSPSSSSSDVLAVAAEPVTGPSLASVLTPAVDPGSPVPTDVVAALLASVSLAERTPSTAPASSTLEPGTFAVTPDGGWRAGVLTGAWRKDAAEFIGAGAREAARRRRIAELEDELAALRTELGEAETELAAAHGLVDQWENHLDRFPADRELVAKHGRLQAAQESADRAAKRAEELRAELDTAQSRGEAAQGEVVRQAGDAGLPATTEGLRQAQSAAAEAQRTADRLGDVLRRQCQSTVTDLTDAAHRYHAAVADRVAAEADAEARCVDYATQAGTLAELTDAIGGEAREIADQLSAAERSRREMRDELKGVRERVATAREQAAKLSAQLDAAGEQLASAQDARTRAVEQFKATVQAPGVLVAALPDVPEDVESVRAALAAADRRGAGEATVITKLQALQTSLAGSHDIAAEQHEGLLTVTVTGEDGARPVAVATRQVTTKLAEQRGFLDERYQNIFADYLIRDLAEWLRGQIAVAEDLCKRMNEVLGRARSSQGVHVKLAWKPSAALEEETRDALALVRLPYADRDPEQDALLRRVFTERIEAERDSHSGSYAEILSRALDYRTWHQFTVTVADTGPDGNPRERRLRQLSSGETRLISYVTLFAAAASFYDAVSGEFSPLRLVLLDEAFERLDDPTIARMLGLLVDLDMDWVITWPSGWGVSDKIPRMHIYDVLRPKNGRGVACTQTTWDGAALDRIDP

SEQ ID NO: 39120 - protein, 525 aa, Streptomyces viridochromogenes Tue57
MLGEEGRSVRRVPPEMFRFTTVERSDLYGAVLEAFGVAGEHLETALGLDAVRERLRAVGWAAAVEDEDLHEALRKLVQWELLDVVHNHAENYRTAEEYERRNLQYSLTRRGEAALAGVRHSLEVLASTGALQTAVLEAIADRLDELCLLSGEPASADRRIFSTLRELEGHLEALVENTKAFNGELQRLLRAEGADLEVFREVKAATVAYLQEFLVNLDRRGQAVAAAVARVEERGTAVLRERALRGAELPPVAGADPAAGWLESRRARWAGLRAWFLPDDGSRPRIEQLHDIARRAIVSLLQVLERINESRRRSSSAVQDFRELARWFAAAPTEEDLHRLWSAAFGLGPARHAHLAHPDPELIPSSHSWAEAPPVEVSALLRTSGRTERFTRTAKVRDVAAVRAERAERARAERAELARAWEALETESPIRLSSFGTLDPAVFDRLLDLLGRALSARPDASGLRRAITGDGRVQIALSPPPDERTAVLRTTKGTLAGPDYVVHITAVGGSSALRSVRAARREAAG

SEQ ID NO: 39121 - protein, 428 aa, Streptomyces viridochromogenes Tue57
MSTLANQLAAAEREEVARAIRLLLARPLLTEASDPAGFELVRRRREPLAQWFDYTCGWSLVVEPRRGYARLTKVRADPDGSRPARRARSGRAPFDRRRYVLLCVTAAELLSMPMTTIGMLADRVVQATSADRALPAFDPVHKPERMAFVDVLKLLESYDVLRAVDGTTETYVESAEAKVLFRVDTTLLMRLPAAPVGASRLAVPPDEVPARFESLLTGLVRERRYGGALADGTTDETHGETAVTDAQRNLRLRHSVLRRLFDDPVLYRTDLTDDELAYVTSLTGRQILRRSVEQAGFLLEERAEGFLLVDPDGLATDVRFPDDTSTARVAALLLLEPLCAAPAGLLPEQLAETGAGLLRRFPRWARAYQSEDGAARLADDAVRVLRDVGLARRAGGRVVACPAAYRYRLTETTSSDPEGSERSQGEQQ

SEQ ID NO: 39122 - protein, 1377 aa, Streptomyces viridochromogenes Tue57
MSITELPLPRRPEPTELDEAPATDDAISRWQPHRAGILNVWRYYDETFTFHQGRLLLRGQNGSGKSKALELLLPFLFDASLRPNRLSTFGGSERTMHWNLLGEGASGKTRVGYVWMEFRRVRDDGTERWFGCGARLQASVHTSTVHADYFTTGSRIAHPEGVLLVNEAGQPLTRATLAETLRDRGDVHASATDYRTAVRRELFAGMGEQRYESLLSALLQLRQPKLSERLDPSLLSTLLSRALPPLGEGEIAELAEGFERLDRQREHLKRLDDEVTAAETVASRQRAYARRVLRAGSAALISATTEMDNLTRVARQSAEELEQALAERESAQGRREEQELRAHALEETVEGLRESDAYKQGEELDRLRRRTEDVTAAAGRQRAAAQGARHQAEEDQRHADEAAGQARTLDEHAREAAGEAHRSARAAGLESIHHEARTIVDADSGVALPDSAGREQGSRVPRTTAENGARQARRLLRGAVTARRQQVTLVTEAIDAHDRAVRDRSAAEELLDEARSRLAEAIGRRDEAAGDWDDALAAQAERLLAWAEGCAELRITDSEELVARAADEAGVTALTEAAARPLEQAIATAEATTRAARQGLRDERSRLEEEVRRLSGETDLPPVPPPTRTTVRTATAGAPLWRLVAFREGVPPAVQAAVEAALEASGLLDAWVSPYDGITLPGHDTRAEAALAVTAPGPSLLEVLEPETDIPVPADTVTRILAGIAYGATLPGGHPAAVSADGAWRLALATGTWSKPEPAHIGALARQRARQRRIGELTDRIGETNASLAALDDQLRGLAARSARLDADRAARPDNRELDTRRRDRDRAEDRVAARDDAVRDAAGRLARCESEVAGALRTLDRRAAEEGLPTDRDRLRELSAAVDRFRDTADSWVDARLAATAAADRARQRAAQADRSRRAAEAQAEDAAAAEAEAAGLKARLEAVEATVGEDYRQIVARVAEARGELRRCREEAGRAADLLLRLEGRIGELRATSGQDAERREQAVATRDAAAQRFRHLCLAGLAEDAGITPELDAADGTKATLEAARATAAKWPSIPHAPRNLGDAATRLSEAVHEARQCLGARADLDLEPDDDIQLFTATLEGVRVGATGLLTTLAQERDRSRDDITTAERRLFDQILTGDIRRHLAARIRQAGELVDRMNGHLERVRTASNVAVQLVWDVRPDLPDSTRTARQLLLKDPGRVTETDREALHAFFRARIEEAKGSDTAASWEEQLGEVLDYTAWHRFTVRLDRANGTGWQPLTKKLHGALSGGEKAIALHLPLFAAVAAHYEAVPLAPRPILLDEVFVGVDTVNRGQVFALLTALDLDLMVTSDHEWCTYGELPGIAVHQLLTDADDDAVTSARFVWNGTGLEAG

SEQ ID NO: 39123 - protein, 416 aa, Streptomyces viridochromogenes Tue57
MTRSEPASGEPTLRRPELRPLWQSVHDRLSSGRPVTRVRLGPLDDAQREALADLLGLDRLPEARPSVALARLEEAVTELCGRTVRETVTELVGPLHDRAGERRRQEGERAELWTWLADHDIVRAQPALAEWVASCRAAGLVGASPERTRSQLTDALTVLGELPARAEPLPVFAARVLNGHSHALDDGTPLSTLVLRALATLYDTTAPQSAAERRALWARAGIADDDLSATVLVAGLRPFGDGPLARVSRVCAEAGQAASLTLAQLRAPGEFTLAVAPAPVVHAVENPSILALAVSRFGPGCPPLVCTSGWPNSAAIHLLRLLADQGATLRYHGDFDGEGIRIAAYLLDKTPARPWRMTAADYRAAVARTPQGPQPGRLTEAPWDPELTHTMTEHGTALVEELVADVLLADLAAAVR

SEQ ID NO: 39124 - protein, 493 aa, Anaerostipes hadrus DSM 3319
MKINEKLIRSLTETKYLNVDNTDRYRPIIRFFYLEYEKLRYWMYPEEVFEELHKEEYFKDYTEEQCRQDLEVLTRWGNLSAIQDTKRVTSIEEFKNKKYRYQLTDYSVEIERMVIRLENLSIEGASLEPTLLEKIRSSLSEISDILKEDDEHLYGWWEGLNSDFRRLNQNYQDYMRDLNSMKAEEMMKTKAFLLFKDRLIEYLRSFVKSLQLNATNIEQLLSKLPKDQIQMILERLTEYELSIPRIDVEVTRQQLWDKIHGRWASIENWFLGSTGSGSEAGKVFDTTNEIIRRITRYATRISEQNNSGANRREEYVKIAQLFRNCETLEEAHRLSAVVFGIEKPLHLKGDIKRETESINSGVYEEKPALFTVVPRVRIYREKSQRKGIVDRTKEKEKMKQENLKKLKQQQELLDSYVKGNRLEFACLPEIEPYVRDTFLMWLSKALECKEQQAKTEDGRTYYIEKPQQDRRCILKCSDGTFEMPAYTIVFNEE

SEQ ID NO: 39125 - protein, 378 aa, Anaerostipes hadrus DSM 3319
MKPLEILLSKRWILKDREKELYYQLKDEIGKSRDFLTEKLGYQAIITQNLIKLEKIPAYAQNWMGIQDFSDHLEYIFLCMILMFLEDRDAREQFVLSMLTEYIQANIKEEQIDWTIYSYRRHLVKVMKYCVKIGILEIDDGSEDSFIKSDEGEVLYQNTGASRYFMKNFSRDISDYQSQEDFLKEEWIGMNEDRGIIRRQRVYRSLLMSPGIYLNDDTEEDFAYVRHYRGMIEEELNRFFDCELQVHKTSAFLIMGEDSNLGRSFPEENTLSDIVLLWCNLFRQKIADGSIEVPAGEDIVISRQQFLTISEECKRQYGSGWIKTYREMTMGEFCKKLKEYMIFMEMIMEKYDQIIVYPIVGKVAGCYPKDFKGGETNE

SEQ ID NO: 39126 - protein, 1373 aa, Anaerostipes hadrus DSM 3319
MNNSRWKMNKIGLLDFWYYDDQEFYFLDGRMLLRGSNGSGKSVTMQSFIPLLLDGNMRPERLDPFGSRARKMENYLLEDGDERDERTGYLYMEFKRKDVENFLTIGIGLRARRGKKLDPWYFCITDGRRVGKDIFLYKDLKEKIAYSKMELRNRIGDGGRIFESQKEYAAYVNQVLFGFETMDEYREMLELLIQLRTPKLSKDFKPTVINDILGNSLQTLSEDDLRPMSEAIENMDGLKTNLDNLKESLEAAKQIEKVYDQYNQIVLYHKAAKYKKETVQYNKIKDQLKTLEITIKETKEKYEQELQHHEELSTEQSARQEERRSLEHNDATKLKEQEQALTKQISDLEQKIEEKQRQLEQKREKQIQNDDRLKRLQDEKEQSKEETKDIFDEMEECISEAAFDEFNFMKDEFEKSEDEGFDFHAHRQILERYQQKIQDGIDVLEKERKAQDQYDEHLKKLDEFRAQRESAERGYHQYENQFQEIKEELTEKVYHWEKDTKLLKLEDEQLQAISRMIKGYIFGTDEGKIYEIVRHQKYIKEDQLRDQQRILTAHKEDVETQLKEKRAQLEEWQNKKDPEPQLSEEVYENRELLKEYQIEAIPFYKAIDFADRLNDEQRNHLEEALYRMGVLNALIVEEEDRPRIESLDQGTCDTYIYGSVEHVKNNMLELLNIDNEENDILFYQKISNVLSSIGYISSNEKEASTWIHENGNFKIGILEGTITGNYQAKYIGAMSRERYRMEQEHLLEEICENLQHELDVKQEEIRQNNEQIILLHKEEETFPEFQDLKLAAKEFDQKEHILSMVEHQVKEQQEVVETSAKSLNAIHLEVQTICSGIYLAVRFDVFMKVKESLAEYQNLLMKLQLEHQTYLNRLSDIKGKQEYAQDIEVDIDEILYDQGQAKRQCREIKVQRDLVIDQLSLTDYEEIRHQLDQCLERIAKLPAEIERSIVRSTSLRKDLERFKQDLEMKNIDQEQQAIIVGFLKDAFCKELKQGLVELDLKADIQTEEGIRQLSNMICKTYRDIAERRTQNDAFALIQENFQKNKVYLHEYFPTIHTMFDDILVPESLGEFQINRINITGKYRGVTIEFKKLVERLNVDVEEQARLLSDRDRELFEDILANTLSKKIRAKIQSSKRWVDNMNQLMESMQTSSGLKLSLKWKSKKAGKEEQLDTRKLVDILQKDYDIMREEEVLQLSQHFRSKIDEARKMSSESDGVQSFHSIMKDVLDYRKWFEFQLEYQKTGEKKRELTDRTFFTFSGGEKAMAMYVPLFSAVAAKYEGAREDAPRMISLDEAFAGVDEMNIKDMFRLMVEFEFDFMMNSQILWGDYETVPVIAVYQLIRPENVKYVTVISYVWNGKVRSLVDKIGDEIERG

SEQ ID NO: 39127 - protein, 434 aa, Anaerostipes hadrus DSM 3319
MKLREDKNSEYNQLLQEAIIYFKKYPVFHKIFSGFCKKYESLGHLGGTVVIKNLTKDEKMQLSGFFQRDFYKNKTISISMQRMEKALKDSKFESLEWMDILEEYFDHKMIWKKEMLQKENEKRELFFALLLKEIKSDLVREWLNDRIRERSLIYQRLQKEYKNCPDTLKVLLRSIESGITNLPVFFDKKERLAVYAAQVTGNPHFFDSNTIAEIFLFDFISYHFHMQNGEGLSDMEYRNQQYYTAGIIRDDLSNYVTVYGIHAKDTDSILHSGIEGFFDRKEPILLTLYTLSRLKEVYGEKEIYILENPSVFSWLCQQYPEKSFVCTNGQLRFSAFVLLDHLSRTSDLFYSGDHDPEGLLIAQKLKLRYKERLTLWNYSMDLYEQNLSDVTLNKRRLKQLDQIFIEELQEIKEDMKYQKKAAYQEIMLENYILQ

SEQ ID NO: 39128 - protein, 426 aa, Rhodococcus sp. AW25M09
MGAANAFVEEDRLGLFSFAVAEKRSEYLAVLRAFDTARANYVVLLHSGDVADLLARGTGRQEPLTALDIAPLLDQLHAWGLLERSYDGTRAATLAEYRNRHFVYQFGQAGYKAYRAVEDVLGARLDDASLSRLVLPELLADMHELAEANRQKDGDRIYRKLSRLDSTLSEMATRAAHFYLVLGDLVRTTEITPESFLVHKDALLTHMREFSSDLTRYAPKLAEAIALVEATGIDDLIERAAVSDERVFLTVTERQADWTDRWAGLSHWFVSAESELSESERLREGTMSAIAAVLSLLRRVTETRKGGVSRESQLRHLAGWFAAAPTEDSAHALFHAVFGLGRPRHLSMVHPDADIISTSRSWWEAPPVEISRTLAETGRTPPPACRAGYSATTVASGDSANSSSTRSVRAVPRRSRWPPQEFTTAF

SEQ ID NO: 39129 - protein, 477 aa, Rhodococcus sp. AW25M09
MRAREISSLALDSYQRAARVALSNHLVTTTYPDRIALPLLRRWATELREDLLELFGYRLEVTETTARLFPVIDRLDDSQPARTSTDRIFDRRRYAYLSLALAALGRAGNQITLSELADHVAAEASQVDGVELTTDRASDRDAFVDAIGWLATRGAIALADGDASGWANNPSAGEALYDIDRPVVVAMFRPPRAVQHLRSIRGLLAGSDAPLEPDDLDSERTDPERPADPKETLRSVRRALVEQPVVYLTDLDRDARAALAASRTVADVELLTGLVAERRSEGVALIDTSGRLSDYRFPSTGTIAQVALLIAGEISDRVIDPDAPALAAYPLPDGDALIEQLDRAIPDGGIFGDLAEFGFPSDATTFADADSRQQYPLIEDSWLVTVVDDLVERFGRTFAAQWQTDRDGLRLRALALLHRLRLVHSVSGGVLVLPVIARYRDVMVSVRDRTPQDSLFAAEKPVSTEQPVSIESSEAED

SEQ ID NO: 39130 - protein, 1394 aa, Rhodococcus sp. AW25M09
MTAHSNRFRPTRAGIVNLWDYRDQEFSFADGRLVLRGPNGSGKTKALEVLFPFVLDGRIEPRRLNPFAGEERTMKSNLLYRGQESAHSYVWMEFGRGSREDPESVTVGIGMRASRHNDKVTRWYFVADGRVGVDFSLLGSDDRPLTKKQLGEQLGTDALTDRPVDYRAAIDARMFGLGTQRYDQLINLILTLRRPQLAKNLDPKGLSQSLTDGLRPLDEQLVLEAARSFSDMEEVGRALEGLAQADHAATNFVSVYSKYLRVQTRSDVEQVSRRLEAVTHATTAHFAAAALKDRRLLERSAAEVRFDEAERALDQAVADRETLQRSSAYEGKQQLDDLAESAAKLEISTAQQAERARKAQGDLAQRTTEAARADSELRDSVAGVSRAEEELQTAAEDAGIFWTPLPGTARSDQISTALRGHAEERDGDVRAVREALGTVEKASTERARAEKAASKARELLEAATTAVTEAEAAVDLEKAHFATGLRAWWSTNSALYSSAGITSATFEALDAALKDIGDDDAPSLESVLADRTADGVDAIRARQAQARVDVTTRTAELNALNDESALVRAQHDDAPPSFAARTDTRVDLSGAPLWQLVRFADAVCPADAAGIESALQAANLLDGWIHPVDDFPLESASEQYLAPLAEATRPTGTTLASVLEPEPGTAVPESRVLAVLESVALHRDDGAAPGGSVSVGVDGRYFQGVQQGRHAKSDAEYIGATARARRRQQRIAELDIAIDAATEALATATVEEQAARELVQALNAAAKRLPRATSIVKAQRAVTAAAGALRTSKDSSAAADREFDQAIADLSAKEKQLRTAAVAHRTPHIGRDIDALAAAIRHFEHQGSAVIRKRADHTREAERAREAMNRLDEASGLAEELAEEAAIADESYRQQVQRLELLTEKLGATAEQIDTDLDNARERIEKCRAEQRAARKADKEAGEAIGKAEGACNTALESLRGAVTETLGDAGRLAPYARKDLLTILGVHDVYAWPASESAWLTVEQILYRVQQADGPDDEVPVLPPVVRALHSALDAATASVKVSDSSRKSTRTALTSALQEFDSQLAASGQDYRLQWDAPDGLTVVRVQDEQGYSSVGDFADRIGAARSDQELLLTEQERRILEDALLTGLAQQIHERTVDARELIAQMSAEMKQRRMSSGNTIGVHWVLADNLDDGARAVSKMLDRDASALNQDDLAAMRAHFASEIRVARAAHPERSYPEILSTTLDYRRWRVFAFTLISGDGNEDRLTVARHSALSGGEQSVSLHLPLFAAAHVMLSSADPHSPRLLALDEAFAGVDDNGRSELLGLSVQFDLDLFMTGYDLWITYADVPGCAHYDLAHSTAENTVSAALLVWENGELFAEHDGTDLAAALGSPLTRRVPTPTEGGLEFDR

SEQ ID NO: 39131 - protein, 412 aa, Rhodococcus sp. AW25M09
MTDNSEWRGSAELAALLDAARKKLEANWLRVGGNITVDLSDAPELWRLCSAISRSNSSLHSRARSTRLDLQRFDEWLSHSLNGGLGLIDTLTQQAPLQDKKRIAADKAQVRSDALERAREVLGGGTDREWIEHWIASLLNQDGTLGGRVAVDALAVATQVLARLPVDGLSLTELAELASGDTKALSGGGAPKLVLDALSLRENVPRPVDPVGIRSLWETAGVSVDALSSRVLVLGYRVEESHTVARWLNEAADEGVPFPVTVDMLSRGGLTNSASVVFVCENVAVLAAAARTLGSACASLICTDGQPSAAVHRLLASRAPGTTIRWRADFDWAGVHMVTRAVSRYDAVPWRMDVDSYRAALDARNSEPLKGHPTDSPWAPELAAALRDSGRAVMEERLIPDLLTDLRLGPAN

SEQ ID NO: 39132 - protein, 496 aa, Geobacillus sp. GHH01
MDATWLKPIVETKYLSTENAHRYRAILRYFYIQHERMRQFLFPEEVYAFLKQHEEFADYTEDDLQQDLDQLVKWNNLIARQETSHVRTIEEFKKKRFRYQCSPYTVEIERMIRTLEQLGDSFGGSLEKTRFDRLYASLSRMEAIIASDFQEQADEMHQVWEETFDYFKKIIQNSADYIAYLHSENLEERMTSESFLVYKEQFTAYLRDFIVALQKTSMQIEQLLEDLPEKGVRQFIERVVDYERSIPRFADAPPPRAVQIEEKWETWRSLCEWFLGRDGRESELSFLQYQTNEAIRRLTRVVQRLGERHHHFRSRKGDYLHLARWFSRLESIEEAHCLSAVVFGCFHTKHLVADFGATDNIYRDVWDEPPAEWVTKPRVRHYGEKKKPQAIEDKEREKEEARLRYLEEKAREEAALRQLVTDGKIVLADLPEVTPYVRKTLLGWIAKAMGREGQAIKTENGWVVKVAAKEGTICLRAEDGELVMPNYEIHVLAGGE

SEQ ID NO: 39133 - protein, 398 aa, Geobacillus sp. GHH01
METAFDDKAKEALAALFEQFWIIRDQEPDLYQLIREREHVLKRYVEEKFGYRLIVHRYFAKLEKIPADPEPWMGIESFQEPLDYALFCCLMAYLEGKAVEDKFLLSDVCEEIRAMYPGDLPVDWTNYSHRRSLIRVLKTAEQIGLVRRMDGEIEAFAQHVEEEALYEVPVLARYFMRTYPKDLLQYESIDELLAEEWKASPQDYRRHRLYRKLFLSPAVHRTEGDEQDFYYLRNFRHRLRDDIEAHTPFRYELYKNAAMLTLPERQAPYTTFPDQKGTSEIILHFSALVRERLGEYPPDEYGRIRLTPEQFSAWLADCRRRYGAGWGKTYRDMSAAELVRVVLAALNEWRMADVEHDTGMIVLYPLLGRMSGRYPDDFDAKEGGEHGESMGASSCGAD

SEQ ID NO: 39134 - protein, 1373 aa, Geobacillus sp. GHH01
MANPWVLHRAGLINFWYYDEQYFHFADGKLLLRGSNGAGKSVTMQSLIPVLLDGKKTPDRLDPFGSRARRMEDYLLGEKDVVNRDERTGYLFLEYKRKTSDQYVTTGIGLRAKRQKSLDFWGFVLFDNRRIGYDLQLYKQEKTGEKIPLTKRELAALLGAGGTVVETQKEYMELVNKHVFRFETIDAFQELIELLIQLRSPKLSKDFKPTVIYEILESSLPPLTDDELRHLSETIENMDQAKQQLEQLERDERALKRLCDQYRLYNEYMIAEKAAEYVKAVKQAEQLAAEQHRLHDEEEKTRKALDELEESITRLGREEDVLRAREIDLAGHEVFQQAEKYEQLKAERQRLEERRERHEQTIAEKERQERQHRRRLDESEARLDDLEKKLEDELEQLRMDAEEGAFPLHETNEGDFHRHRQKQQEFSFAAWKQEADRHVERLEGLARLWRRHDEVKRRYEEASSEAGERRREMDEWRHQQWKWEELFEEEKERFEQAVLAWVEQGGIDVSETDIQAFLQQMGALYEQYSLDDLKRPFVQAYYDAVGKKKDEKWRLEHDIRLLEEKRAEREAELRQWREQRDPEPERDEQTVAARLALEEKGIPFVPFYAAVEFVDDVPDDVRERIESALSHAGLLDALITAREIDVACDRVLTPNPAHMAHTLADYLRPDKDAPVSMERIDEVLRSIMITDVEQEGGMTIDETGRYSLGLVRGHAPRRSKAMFIGRAARERWRLENIAALEAEIAAVGQEIDRLRGAHQAVEAAIQALADWLASFPSDRDVRTAFDEAQEARRQAESKEREWKRQEEKAALLAREWKQIKQQLHDESAELDLAFTLDGCEQAQLAMKSYVRHVHELEVLYRETRHTEAMIAQQRERLAALETEIDEAKGERNRLRDETERLALRIAEMERTLAQMGADDIRAEIARIQERLAFLRREIPRLVNERARTEQRLMRLVEEREKGAQREAFARELAAMWEKSFAREAALGLVDLDRSRSLLEQAKEAKQRYEAVLKETRSSLLARLNTVFFQESSNLTEYRASFEPLEEQTKPEWTAAAPDDEMAMKAADWREKQERHVIYLDYKGERATPFAVLAEVERDIVLQHEYMKEQDRELYEDVILKSVGRILRSRIQRAERWVNDMNKLMGGLDTSSGLVLSIQWKPKTAETEAELDTKELVRLLRIDSRLLKEEDLQRVTNHFRSKIARARELLEERGQGSTLHQIIKEVLDYRKWFSFTLYYEKTNEPKRELTNHRFYQFSGGEKAMAMYIPLFAAAYSRYQEAGDDAPYIISLDEAFAGVDENNIRNLFGLVEQLGFNYIMNSQALWGDYDTVPALSICELVRPRNASFVTVIHYRWNGRVKQLMVNDKEWETIET

SEQ ID NO: 39135 - protein, 406 aa, Geobacillus sp. GHH01
MSTAKEAAAFFRSEPGFKRLFAEMKRKYESLGRVGGAVSLQSFSKEERESIAAFFGKDVSRVSLIAFEKQLGQTRFAGVGLVELLEQYFGAPLVSNKERRQAEEEERDRFFARLTEEHHWVESVRPQRFVQTAYEADRRSLEEAIRLVGAALGYFPLPSYMRLPLFAQQVAGDPHAFDLSTLPGRLLLSALQATVPGDWDMASVESVNELLQSVGLLREDILNFVTCANILAETKDGPHPVFSAAWEANTALNMPLRDVLSLVRARPAHGGTVYIVENAGVFSTLLDTRAPLVSTNGQMNLATMKLLDLLAASGAKLYYSGDFDPEGLAMAERMQERYGPSVTLWRFSVDDYKAANPVVDLTPERLAKLASVTSTPLQPLKEEMAETKKAGYQEAIIGRLTEDING

SEQ ID NO: 39136 - protein, 497 aa, Amycolatopsis azurea DSM 43854
MDPFRVPPELFRFTDGSRSGLPLAILHAFGEANERLETALGIDDVRTELRAVGWMETLADEDLVSTLDQLRNDKLLDVVQNHAGDYRTASEYERRNLQYSLTRLGEAAYAGVVRANEVLNATGALQTATLEALGERLGELAKQLEDGTDRRVFSTLTEAEGHLEAFRDNTKRFNGDLQRLLHAEADLATFHEVKASTVAYLQEFLNDLEHHTHTIATRIKEIDDHGIERVHRRALNGAALPNPDQRWLDVRKARWDGLRAWFLPEDGATPRVEDLHQVARRAIITLLQVLDRITESRRRASSAVADFRELARWFTVVPAQEDLHRLWSTMFGLSSARHAHLAHADPEVVSTTASWLDAPPVEVSELLRSAGRTERFTRTGRVRDVTAIRAARVQQAIAERAELEAAWNMLDTGGIVRLSAFEKLDHTVFERLLDLLGQALGSAVGADGTRRSTTSDGQIEIVLRPPPKGALARLTTTSGVFRGPDYEIEISTAGGGA

SEQ ID NO: 39137 - protein, 406 aa, Amycolatopsis azurea DSM 43854
MSLTNQLVIAEREEVARGIRALLATPLIGERGAPETFDLIRRRREPIRQWFDYYCGWTLTVEPRLGYARLVKVRAAADPSRPARRLRSGRAAFDRRRYVLLCVAAAELLTVPVTTIGLLADRVARASGADDLVTTFDVASRAERLAFVDVLALLESFGVLETADGDAESFVDDPAAKVLFRVDATLLLRMLAAPVGPSQLAVPADDVALRFEELLEAVSHEQRYGLSSGRHEDTPSASDVQRNLWLRHTVFRRLVDDPVLYFAELTAEERAYLGSPTGRQLLRRAAEQGGFVLEERAEGVLLVDVDGLSTDERFPDDGSNAKVAALLLLDVLDEPRTTDYLRNATAKLLKRFPRWAKTYRGKDGVRRLTVDALAVLTGFGLVRAEAELVRPLPAAARYTDRNEEAP

SEQ ID NO: 39138 - protein, 1334 aa, Amycolatopsis azurea DSM 43854
MTVTRWVPSRAGILNIWRYYDEIFEFHDGRLLLRGPNGSGKSKALELLLPFLFDASLRANRLSTFGTSERSMHWNLMGEGASGATRVGFVWLEFGMAGDKWFTCGARLQASTHTSTVHADFFTTDLRIGDGLSLVNEAGQPLTKNALEEALGEQGTVHAGAAEYRAEIRAKLFPTLSEQRYDALITALLQLRMPKLSQRLDPSLLSNLLSRALPPLGQQEIADLAEGFERLDAQRERLGSLETEVDATRALAARQKTYAQRVLRAGAANLISATTELDELAAAARRSAEEHDEVAAKKEAAEEQAAKFEKDVEETEARLAGLTESESYQKGQELDKLRQRTLSVKEKAESLRSDADRLRAEADADEERSRAAKQVAKRQADLVRAQETEVASAATRANLAGVHDELVAGLREPEKPSEPTRLRPLLQAAVRGKRDQVETVGRALDKHERAVGRRHQAEADLDRVRSDFAASQEKLDLTTATRELALSDLRTRLAEWAIGCRELRFPDVEAIVRDAEAEVSLLGRISAVAETVLEDIIRREAATSAALATARAEHDELLVEAGVLETEDVLRPEPPRTRTADRTEMSGAPLWRLVDFAGSVPESARAGIEAALEGAGLLDAWVNSHGVVEGHDVLLETGSLPIASPRSLADVLVPEADAELSPAKVRRVLEVIAFDDVLPAGPAAIGADGGWRMGGLSGSWAKDAPAHIGAAARRRARERRIAGLRDEISGREKLIAELEGELAALRGRRELIKIERAARPGHDDLLAATGEMTTAEADLTAADAAVRHLETTVSALESEAKTALHELTGQASESGLPTERAPLAALATALRTYSDQGENWLYENGNLRTATQRAETFAEQADRSEGNAARREDEAAEAEAERTKLTAMLDAIEGSVGTGQREVLAEIDGLRTKLRELSGELRAANARAKELAVSLGALGVRRTTDARAREEAAKKQDAAALRFRKLATGIFPADGGIEDLPKFQATLSASDGVRSALDTARLVAAAWPSVPHAPSNLGEALHRLSEAVHTCRNTLSSRAELDLETDEDVQIFTAVVDGLRVGATELLKILYAEAEQSRHEITGRESDLFDKTLTGETRRHLAARIRQANDLVDGMNARLERVRTASRVAVRLVWQVSPDLPPGTKTARDLLLKDPDQLTTEDRASLHKFFRERVEQAKADDTATSWEQQLAQVFDYTSWHRFVVKVDRANGAGWQLLTKKLHGALSGGEKAIALHLPLFAAVAAHYQAAPEAPRVILLDEVFVGVDTTNRGQVFGLLSALDLDLMLTSDHEWCTYAELGGVGIHQLITGGDGDDAVTTARFTWNGHDLLPAEPR

SEQ ID NO: 39139 - protein, 510 aa, Rhodococcus triatomae BKS 15-14
MSESGPAPDDPSEHRRDDPSVRLADDVAAERLRMFAFATADKRADYLSVLQAFDHARTHYVVLLHAADVADTLTRIGRPALSAAEITPLLDQLHHWGVLERSYDGSRAATLAEYRNRHFVYQFSRLGYQAFRAVRDVLALRLDDAALSRLALPDLLADLRRLAEANGRGDGELIYRTLRRLDSTLSDMAARASQFYLTLGDLVRTTEITPEAFLTRKDALLTHMREFSSDLARYAPKLASAIADVEQTGVHDLLERAAVADERLFLTVAERQADWTRRWAGLTQWFVTASDGPSESERLREGTMAAISAVLSLLRRVTETRRGGVSRESQLRHLAGWFAGAPTEDAAHALFQAVFDLGRPRHLSTVHPDADVIPESRSWWDAPPVEISRTLAETGKPAAAGAPGRVQRNEASIRRLRDAQLAAQRARAEAARSLATGGAYDRVLGEEETDVLLGLLTAALTARVPVSGVVRASTGSENGVRLTLTPHEASTTVETARGRLHLDRLRVSVQ

SEQ ID NO: 39140 - protein, 446 aa, Rhodococcus triatomae BKS 15-14
MRAGQLWAREISPLTLESYQRAARVILANHLVTTSYPDPLALPLLRRWATELRDDLLELFGYRLEVTETTARLFTAADRLDPTAPATAGDRPFDRRRYAYLALALAALGRAGNQITLSELADHVAAEATQVPAVDLSPERFTDRSALVDAIGWLTTRGAIRLADGDASGWASDPDAGEALYDIDRSVVIALFRPPRALQHLTSVRGLLTVADEAGTTRETARRVRRALVQHPVVYADDLDDDERLQLALPRTAADVALLTGLVVERRAEGIALIDQSGRLSDIRFPGTGTIAQVALLLAGEIADRVQDPDAPPPVRIPLPDGRTDDLATQLDNAIPAAGVLRELADDVPEPRPSTSAPAVTYALIEDSWIDDAVSELTRRFGRTFAAQWQADPEGLRRRSVDLLDAQRLVRKVDGGVLALPALARYRGVVVTVRERALQPDLLTES

SEQ ID NO: 39141 - protein, 1385 aa, Rhodococcus triatomae BKS 15-14
MASARFRPTRAGIVNLWDYRDQEFSFADGRLVLRGPNGSGKTKALEVLFPFVLDGRIEPRRLNPFAGEERTMKSNLLYRGDETAHSYVWMEFARGTASDPEAVTVGIGMRASRQNDKVTRWHFVADGRVGVDFSLIGAGDQPLTKKQLAEQIGADAITDRPVDHRAAIDARLFGLGAQRYDQLITLILTLRRPQLAKNLDPKGLSQALTDGLRPIDDQLVVEAARSFSDMEEVGRALEGLTTADQATQDFVAVYTKYLRQQARTDVEQVARRFESVWTATAAVSEAVAGQDHRQKERTVAEERLVAAERELDLARAELETLQRSSAYEGKQQLDDLGAVVADLRRSTDQQADKSAKAQASLAQRADEATQSQARVTRATESLVRAEELLQEAAGDAGITWTALPDTARGDEITASVRGHAEERSGDVRAMRDALSALERAGAERSRADRAADRGREHLESATAAVKEAEAATALARTECQGMLRRWWAAHSALYARVGVSSAMFVALHDAVPTVGTDDAEGFPEILADHTTEPLDAVRGRRRDAEQTAARAAAARAECAADRARVASEHDDAPPAPPARTGDRSGLAGAPLWRLVRFADGVDAATAAGIEAALEAAGLLDGWVPAEDVPESTSELFLLPLPPGDRPGGRTLADVLVVEPDAGVPEFRVADLLASIALQDDSSANDVVGVGADGRFRQGVQLGVHTKPEAEFIGATARQRRRELRLAELDAAIEQAEAERATALAEHSEASDLLNALTAAGKSLPRPTGVLTALRGVAEAAGALRTRDEAAAVAQRELDQAIAELSAQERALREAAARHRVADPVRGLDALSAAIRHFETAGDDVVRCRRDREKDIERSREADDRYAEARDVAEEFAEESAAAQEKLLHQVQNLEMLREKIGAGADDIEADIDRARARIDAATAEQRAARKAGDVAVEAIGKAAGAYGAAVEALRSALTETRSDTARLAPYARRDLLDLLGVVGAHTWPASDAAWLSTDQLVYRIESEPDTPAPVVPAEVAALHAALDAATAEVKVSEGAGKSARSALTGALQEFDARLAAAGQDYRLRWDAADGVTTVSVQHDQGQSSIADFAAMIARSRDDQQQLLTDSERRILEDALLTGLAQQIHERTVDARDLIAQMAAEMRGRRMSSGNTIGVHWVLADNIDDGSRAVSKLLDRDTSALGPDELASIRAHFANRIRALRAAHPERAYPEILTEALDYRRWRVFSFTLIGGDGTEDKLTVARHGALSGGEQSVSLHLPLFAAAHVMLSSADPHAPRLLGLDEAFAGVDDNGRSELLGMSVQFDLDLFMTGYDLWVTYADVPGCAHYDLSHSTPEHSVSATLMVWDGGMLMQEHDGTDLTKALGSPGRRKMLEPGGLEFAEV

SEQ ID NO: 39142 - protein, 501 aa, Rhodococcus qingshengii BKS 20-40
MVEETSAPDYAAYADTNRLKLFSFTIAEKRAEYLWVLRAFDHARANYTVLLHAGAVAHILEKIGGSDPAADLSAAEVTPLLDQLHVWEILERSYDGTRAATLAEYRNRHFVYQFGQAGYQVYRSVEDVLAARLDSASLSRLALPDLLADMSELAEANRSSDGDLIFRKLKRLDSTLSDMADRAAHFYLTLGDLVRTTEITPQAFLTHKDALLTHMREFSSDLARYAPKLKEAIEHVESTGVDRMIRLAAASDERVFVPITEREDDWAARWRGLTAWFVSAESGISESERLREGTMSAIAAVLALLRRVTETRRGGVSRESQLRHLAGWFAATPSEDAAHALFQAVFDLGRPRHLSMVHPDADIISHSRSWWEAPPVEIARTLAETGRPPSPGLPSKVARNDGSIRRLREEQLAAQRTRSAAAQSLASNGVYQRELNEQETEVLLSLLNAALTARVPVVGRVKSSTGSENGVKLTLSPSDGSTTIKTARGRMHLDGIEVSVR

SEQ ID NO: 39143 - protein, 480 aa, Rhodococcus qingshengii BKS 20-40
MRAREITPLALDSYQRAARVILSNHLITSTYPDRIALPLLRRWATELRDDLLELFGYRLEVTETTARLFTVSDRLNPSAPARTSSERTFDRTRYAYLALCLAALGRAGNQITLSELADHVAADAAQVDGVELSTDRASDRDAFVDAVGWLGVRGAIALADGDANGWASNPEAGEALYDIDRSVVVALFRPPRALQHLHSIRGLLAAETSSASEDDGIPVDAKEIGRRVRRALVERPVVLAGELDQHELIALAQPKTASEVELLTGLVAERRAEGIAMIDPTGRLSDVRFPSTGTIAQVALLLAGEIADRVLDVDAPELPKLPIPHVSDDHLIEQLDAAIPEAGIFEDLADEDDDFVLPAGEPAEPPPPVTYPKIDDDWLADKVTELVDQFGRTFAAQWQADHNGLRKQALGLLQRLRLTHAVDGGVLVLPVLARYRDVVVSVRERDPQIDFAVDNSAPDPVDEFGPEPSPNGELSEVENV

SEQ ID NO: 39144 - protein, 1391 aa, Rhodococcus qingshengii BKS 20-40
MSNARFRPTRAGIINLWDYRDQEFSFADGRLVLRGPNGSGKTKALEVLFPFVFDGRIEPRRLNPFAGEERTMKSNLLYRGQDSAHSYVWMEFCRGSLEDPESVTVGIGMRATRTNDKVTRWYFVADGRVGVDFSLIGNDDRPLTKKQLAEQLGSDSITDRPLDYRTAIDARMFGLGVQRYDQLINLILTLRRPQLAKNLDPKGLSQALTDGLRPLDDQLVLEAARSFSDMEEVGRALEGLAAADQAAQSFIGVYTKYLRQQSRGEIEQVSTRLAAVTRGVAAMDESSLAQTRSREARAAAEERFNQAEQALENARANVEALQRSSAYEGKQQLDDLAQAVATLKLSTEQQADKSRKAQAALAQRGDEADKAASSVKRAAEALSRAEDELQAAAEDAGIVWTPLPDGSRSDQITAAVRGHAEERDGDVRVVRTALATVEKAATERTRAENSSRRGQELLEASKAAVLEGEAAVELARSQCASGLRAWWTDHSSLFSAVGADTSLFEALDAALAEVGDEDAPALSAVLAEHTVAGTETLRERRREAEAEISASHASIAALKSERKAVSAEHDDAPPAFHARSDNRSELGGAPLWQLVRFADSVEPDVATGIESALQAANLLDGWVCPDEKIPEHVSEQFLTALPVKQRPKGRTLADVLEVEGNADVPDARVQDILASISLVEAPGDSDASVAIGVDGRFWQGVARGRHVKADAEYIGTTARARRREARITEIDAALEELAAAVDTAKALVAQTNEQLSRINSAAKELPKTGSILRALKTVTESAGALRTRSEATETAQRELDAAIADLAAKEKQLRATASQHRTPHIGRELDSLAAAIRHFEKQGELALRCRREHAKEVELERESRDRLDESRANAEEFAEEAAIAEESLLQQVQRLETLRDTLGASAEQIDLDLAKARAKIEECKVEQRAARKAYDAAVLQIGTAEGAYNTAVETLRHTLTETRSDAERLAPYARPDLLELLGVKEHLSWPASSAAWMSPDQLVYRIQNEDRSEDAAHPPVLPEDVDRLYRALEAATSAVRVTDGARKATRTALTSALQDFDAQLAAAGQDYRLQWDAPDGLTVVRVQDDQGYSSIGEFATRIHDARGDQEQLLTESERRILEDALLTGLAQQIHERTVDARELIAQMGTEMRERRMSSGNTIGVHWVLADNLDDSSRAISKLLDRDASALGVDELATLRAHFATQIRTARAAHPERSYPEILSSALDYRQWRVFSFTLISGEGKEDRLTVARHSALSGGEQSVSLHLPLFAAAHVMLDSADPHAPRLLALDEAFAGVDDNGRSELLGLSVQFDLDLFMTGYDLWITYADVPGCAHYDLAHSTAEQAVSAALLVWSNGELLAEHDGTDLARALGSPLRRRVPTPAEGALDYA

SEQ ID NO: 39145 - protein, 488 aa, Rhodococcus ruber BKS 20-38
MADDRLRLFSFATAEKRAEYLWVLRAFDIARANYVVLLHAAEVGAILERTGSTDPAAALSAQDVAPLLEQLHAWGVLERSYDGTRAASLAEYRNRHYVYQFGRAGYHAFRAVEEVLSARGEDASLSRLALADLLADLTELAAANDAGDGELVHRKLSRLDTTLSDMAERAAGFYLMLGDLVRTTEVTPESFLAHKDAVLAHMREFSTDLARYGPKLAAALARVRETGIDRMLGFAAAHDERVLMPVPERHADWRARWHGLERWFVGAADVPSESERLREGTMSAIAAVLALLRRLTETRRGGVSRESQLRHLAGWFAAAPDERSAHALFDAVFDLGRPRHFSVVHPDPETVPVTTSWWDAPPVPIARTLAETGRTPSAGAPARVQRNESGIRRLRERQLATQRARAEAARSLAAGGVDERELSEPETEVLLGLLDAALSARVPVSGTVPGATGTQNGVRLTLSPAPEGTVVRTARGRLHLDGLRVSVQ

SEQ ID NO: 39146 - protein, 454 aa, Rhodococcus ruber BKS 20-38
MRARRISPLDRDSYQRAARLILSHHLVTTRYPDRAALPLLRRWATELREDLLELFGYRLEVTETTARLFTVADRLDPGGGARSVTDRPFDRRRYAYLALALAALGRAGGQITLSELAEQVASEAGQVPGVELAPERATDRDAFVDAVAWLAARGAIALADGDAGGWVSDPDRGEALYDIDRPVVAALFRPPRALQHLHSVRGLRTAGDRPDGGRSLGTAEVAQRVRRALVQRPVVYAEELDDEERLQLALPRTTAGIELLTGLVAERRAEGVALVDSSGRMSDLRFPGVGTVPQVALLLAGEICARVSEPGSEPVRWPRPADPEAELEAGLDAAIPAAGVFASLAGDAAPAEAPPVPQPAPTHPLVEDSWLAETAAKLADEFGRTFAAQWQADPAGLLDTALTVLERQRLVARVPGGVLALPALARFRGVVVTVRERDPRLALAGEDSNEAEMS

SEQ ID NO: 39147 - protein, 454 aa, Rhodococcus ruber BKS 20-38
MSSARFRPTRAGIINLWDYRDQEFSFADGRLVLRGPNGSGKTKALEVLFPFVFDGRIEPRRLNPFAGEERTMRSNLLYQGQDSAYSYVWMEFCRGRWDDPEAVTVGVGMRAARGNDKVTRWYFVVDGRVGVDFSLLDEADRPLTRRQLIEEVGADTVTDRPVDYRAAIDARLFGLGIERYEQLINLILTLRRPQLAKNLDPKGLSQALTDGLRPLDEQLVLEAARSFADMEEVSRTLESLAAADDAAQRFVAVYTTYLGQQARADVDRLGARLAAVDAGTSEWTASVAAFDRAGAERALTLERLEVAERDLEQTRATLEALQRSSAYEGKQQLDDLAQVVADLERTTAGQAEQAQRAQAELAQREEEARRAAEAAVDAAGAAHRAEDALAAAARDAGIEWTVPAEDTRGEQIAARVAACAEERAADVRAVRTAVAAADGASAARVRAEATAERA

SEQ ID NO: 39148 - protein, 497 aa, Amycolatopsis decaplanina DSM 44594
MDPIRVPPEMFRFTDGSRSGLPLAILHAFGEANERLETALGIDDVRTRLREVGWLETLDDEDLVKALDQLRTQGHLDVVQSHAGDYRTASEYERRNLQYSLTRQGEAAYAGVVRANEVLNATGALQTATLEALGKRLGELAKQLEDGTDRRVFSTLAEVESHLEAFRDNTKRFNGDLQRLLHAEADLATFHEVKAATVAYLQEFLNDLEHHTHTIATHIKEIDDHGVERMHRRALNGAALQNPDQRWLTVRKARWDGLRAWFLPEDGAAPRVEDLHQVARRAIITLLQVLDRITESRRRASSAVADFRELARWFTVVPAQEDLHRLWSTMFGLSSARHAHLAHADPEVVSTTASWLDAPPVEVSELLRSAGRTERFTTTGRVRDVTAIRAARVQQAIAERAELEAAWSMLDTGGVVRLSAFEKLDHTVFERLLDLLGQALGSSPGTGGTRRSTTSDGQIEIVLKPPQNGAVARLTTTSGVFRGPDYEIAINAAGGGA

SEQ ID NO: 39149 - protein, 406 aa, Amycolatopsis decaplanina DSM 44594
MSLTNQLVIAEREEVARGIRALLATPLIGERGSPETFDLIRRRREPIRQWFDYYCGWTLTVEPRLGYARLVKVRAAADPTRPARRLRSGRAAFDRRRYVLLCVVAAELLTVPVTTIGLLAGRVAQASAADDLVTTFDGAVRAERLAFVDVLRLLESYGVLRTADGDPESFVDDTTAKVLFRIDATLLLRMLAAPVGPSQLAVPADDVALRFEELLKAVSHEQRYGLSSGRHEDTPSASDVQRNLWLRHTVFRRLVDDPVLYFAELTVEERAYLGSPTGRQLLRRAAEQGGFVLEERAEGVLLVDVDGLATDERFPDDGSNAKVAALLLLDALDKPRTTDYLQKATAKLLKRFPRWAKTYRGKDGVRRLTVDALAVLTGFGLVRTEAELVRPLPAAARYTDRNEEAP

SEQ ID NO: 39150 - protein, 1328 aa, Amycolatopsis decaplanina DSM 44594
MTVTRWIPSRAGILNIWRYYDEIFEFHDGRLLLRGPNGSGKSKALELLLPFLFDASLRANRLSTFGTSERSMHWNLMGEGASGATRVGYVWLEFGMAGEKWFTCGARLQASTHTSTVHADFFTTDLRVGDGLPLVNEAGQPLTKNALEEALGEHGTVHDGAAEYRAAIRAKLFPTLSEQRYDALITALLQLRMPKLSQRLDPSLLSNLLSRALPPLGQQEIADLAEGFERLDAQRERLGSLQTEVDATRALAARQKTYAQRVLRAGAANLIAATTELDELAAAARRSAEEHDVVAAKKEAAEERAAKLEKAVEETEARLSGLTDSESYRKGQELDKLRQRTLSTREKAEALRADADRLRAEADADEERSRAAKQVAKRQADLVRSLETEVRAAATRANLAGVHDELVAGLDEPARLRPLLQAAVRGKRDQVETLGRALEKHERAVGRRHRAEADLDRARSDFSAAQERVDLTTATRELAVSDLRTRLAEWAIGCRELRFPDVEAVVRDAEAEVALLVRLGAVAETVLEDIIRREAATGAALATARAEHDELLVEAGVLETEGVLAPESPRTRTADRAEMSGAPLWRLVDFAGSVPESTHAGIEAALEGAGLLDAWVNSHGVVEGHDVLAETGTLPVASGRSLAAVLVPEPDAELSPAKIRRILEVIAFDDTLPAGPAAIGADGGWRMGSLSGSWAKDAPAYIGGSARRRARERRIAELRDEISRREKTIAELEGELAALRGRRELIKIERAARPGHDDLLAATGELTTAEAELTAADAAVRHLETAVSALEIEAKTALHELTAQASESGLPAERAPLTALATALRTYSDQGENWLFEHGNLLTATQRAELCAEQADRSEANAARREDEASEAEAERTKLTAMLDAIDGTVGTGQREVLAEIDGLRTKLRELSGELRAANADAKELAVSLGALGVRRTTDARAREEAAKKQDAAAHRFRKLATGIFPADGGIEDLPKFQATLSASDGVRSALGAARLVAAAWPSVPHAPSNLGEALHRLSEAVHTCRNTLSSRAELDLETDEDVQIFTAVVDGLRVGATELLKILYAEAEQSRHEITDRESDLFDKTLTGDTRRHLAARIRQANDLVDGMNARLERVRTASRVAVRLVWQVSPDLPPGTKTARDLLLKDPDQLTREDRVSLHRFFRERVEQAKADDTATSWEQQLAQVFDYTSWHRFVVKVDRANGAGWQLLTKKLHGALSGGEKAIALHLPLFAAVAAHYQAAPEAPRVILLDEVFVGVDTTNRGQVFGLLSALDLDLMLTSDHEWCTYAELGGVGIHQLITGGDGDDAVTTARFTWNGHDLLPAGAG

SEQ ID NO: 39151 - protein, 514 aa, Amycolatopsis decaplanina DSM 44594
MTADQEPQPFAHLSAPNAALYRDVLLTFARARDRFIVHMRPEDVTTDLGRPGDIEQVADALDKLVDWGNLRADPDTSRVTSVADFHRARYLYQLTAAGQAAEEALAVYDQALGRRGSLQSVALEDIAGQLRALVELAGARELDPAKVHLLLLALAERFTGLADNAQAFMASLRRVIDFADGDVEAFLAYKQRLIDYVNRFIADLANRGAEIATLLGKIEDAGVRELLMVAAKREAADVAPDDHENAAAIESCYATWRNRWRGLHDWFVSADSRRQSQARLLRGAAVTAITQLIDTVAALNERRSGRSDRSADFRTLARWFAEAPDDNAAHRLWRTAFGLSSARHLTVDNETVAAWEEEQPAPSTPWREAAGVHISPQLRRTGSYERRGQPNRVADRAEQRRILAEQAALEAEQVAAARKRLATPGPTRLSALGELDTRAFRLFLGLLGDALSARAPGDHEVRTTTSDGTMEVRLTLVRGGGTVSIDTEDGILRGPEHLIEIIDLIGNGRVEAIA

SEQ ID NO: 39152 - protein, 397 aa, Amycolatopsis decaplanina DSM 44594
MTVLGEEAVAQKRKALRALLAKPLLTAGTDDEVLRLVRRHAADLRDWLAMETGWRLLVGAESARLFKTVPTLTDQTHPARDGKGKPPFGRRRYVLLCLALAVLERADAQITLGRLAEGVLAAAGEPELVDAGVSFTMSRRDERSDLVAAVRLLLTWGVLERVAGEEDAYLSDNGDVLYDVQRRVLATLLTSGRGPSTINAADFETRLEELAHEPVADTDDLRNRALRHRLTRRLLDDPVVYYDELADDERAYLAGQRHAITHRIEEATGLVAEVRAEGIAMVDPDDELTDVRMPEQRTDGHATLLVAEYLAARNGPVPIERVLAYVRKIARDHASYWRRGVTEEGADEELLAIALHKLRALRLVEDSVGDPPMVRALPAISRYRLDAPTIRERKTGK

SEQ ID NO: 39153 - protein, 1345 aa, Amycolatopsis decaplanina DSM 44594
MTLPVPDRARWQPLRAGLVDLFYYDLEEFHFHDGRLLLRGNNGTGKSKVLALTLPFLLDGELSAHRVEPDGDRNKRMEWNLLLGGKHPHNERLGYTWLEFGRALPDGSTEYRTLGCGLKAVAGRGIARHWFFVTDQRIGHDLSLVSPTRVALTREKLKDAVEGHGQVYDTASEYRRAVDEALFGLGTHRYEALVNLLIQLRQPQLSKKPDEKLLSRALTEALPPLDPALVATVAEAFRGLDEERETLRALAEAKTAAEQFLTHYRRYSRIAAKRRAAPVRHTHSAYERLGRELGEAEAAYEKATLALEETQRLLDELATAKTQLETRLTALRSSPEMRDAEALKQVGEEAAKLGRFADLRKRDLLSAADNLRRRVEQAETAQRTAGTDAAIFEQAKEIAQEAAEAAYVADGHSAVIADEDERAGQALIERQTKAVDQLQRLINAATQAEAALRSARESVDRITAEQQSAAERITAAEESIAGHGAALVASYRSYLANTKQFTLSDVDELLDSLGTWNESLVGANPAASAVEEAVLRATAELGRRQATLDAERAGAASDRQAIIDEIARLEAGGHDAPPRPYTRAEDVRTGRPGAPLWKVVDFVPGVAAEHRAGLEAALEAAGILDAWVTPEGELHSTLTGDVVVKPGKTAPSGGLTAVLAPAVDRADPQAAALTDDVVGAILRSIGLGPGADTWVAVDGRFAVGVLNGAWHKDTAGYLGEGAREAARRERVHRLREESARLDRRLADLAAAADGLTAQRTALTAEHRAQPKDNDLREAHVVLAGEHKAKRRIDVRLGEAVTDSEECADEAERTRGKVIEFAGDVGLPTDPEELARVHKAVGDYRVALAGLWPAARALARAKAESAKAEHEKRAAAERHDEARESAAEARAEAEAVAERHRVLVETAGAGVDELYRKLAAVAAELDERDAREKRVREDERVLHEERGTANGRRETLRDSISTAVAERDQAISELRAFATTGLLTTALPESAFPDPDKEWAPNPAVALARAINAALEGVDDADRPWELVQQKVSAEHKLLTDALSRHGHSVGMTVRDGIIVVDVLFQGRAQDIPALVAALAVENEQRANLLSAKEREILENHLINEVAGTLQELIGNAEDQVRSINTDLEARPTSTGMRLRLQWRTSRTAPDGLDRVRDRLLRQTADAWSVEDRTAVGGFLQEQINREHAEDAAGGWVEQLTRALDYRSWHEFAIQRYQDGQWRSATGPASGGERVLAASVPLFAAASSFYSSSANPHTPRLVALDEAFAGVDDDSRAKCLGLLAAFDLDVVMTSEREWGCYPQVPGLAIAQLTRRDGIDAVLVTPWRWDGRERVQRQRPFPYVPSA

SEQ ID NO: 39154 - protein, 342 aa, Amycolatopsis decaplanina DSM 44594
MSVSLDEVDAVLRRSGSAPDGLDDVTRLLIGTVPVRATEAAAWTAAFGPLDKLVARRPMLATWRAWLDSTGLVRRLASDPEIASALITAAVRVLAELPLKGIALGRLAAETTGDAHGLDDGRPLATIVLSAARVLRGSPPSGDGTAGERRTSWAAVGVHRDELSSSVLCLGLPGGADTVTGRILALAKEAGEPSVLTLRQLSTARLGVGTRVVSVCENPIVLASAADELGPDCPPLVCVNGQPSAAVWRLLDLLAEEGAGFRYHGDFDWGGVRIGNTLRDRISWEPWRFDASSYITTTTTGGPLTGRPADATWDPELRPALERRGVRVEEELVLPALLEDLR

SEQ ID NO: 39155 - protein, 488 aa, Rhodococcus ruber Chol-4
MQHDRLRLFSFATAEKRAEYLWVLRAFDIARANYVVLLHAAEVAAILERTGSTDPAAALSAQDVAPLLEQLHAWGVLERSYDGTRVASLAEYRNRHYVYQFGRAGYHAFRAVEEVLSARGEDASLSRLALADLLADLTELAAANDAGDGELVYRKLSRLDTTLSDMAERAAGFYLMLGDLVRTTEVTPESFLAHKDAVLAHMREFSTDLARYGPKLAAALARVQETGIDRMLGFAAAHDERMLLSVAERHADWWARWRGLERWFVGAADVPSESERLRDGTMSAIAAVLALLRRLTETRRGGVSRESQLRHLAAWFAAAPDEQSAHALFDAVFDLGRPRHFSVVHPDPETVPVTTSWWDAPPVPIARTLAETGRTPSAGAPARVQRNESGVRRLRERQLATQRARAEAARSLAAGGVDERELSEPETEVLLGLLDAALSARVPVSGTVPGATGTPNGVRLTLSPAPEGTVVRTARGRLHLDGLRVSVQ

SEQ ID NO: 39156 - protein, 459 aa, Rhodococcus ruber Chol-4
MSARRISPLDRDSYQRAARLILSHHLVTTRYPDRAALPLLRRWATELREDLLELFGYRLEVTETTARLFTVADRLDPGGGARSVTDRPFDRRRYAYLALALAALGRAGGQITLSELAEQVASEAGQVPGVELAPERATDRDAFVDAVAWLAARGAIALADGDAGGWVSDPERGEALYDIDRPVVAALFRPPRALQHLHSVRGLLAAGDRRDGDRRDGDRSVGTAEVARRVRRALVQRPVVYAEELDDEARLQLALPRTTAGIELLTGLVAERRAEGVALVDSSGRMSDLRFPGVGTVPQVALLLAGEICARVSEPGCEPVRLPRPVDAEAELEAGLDAAIPAAGVFAPLAGDAAAADAPPGPRPAPEHPLVEDSWLAETVARLADEFGRTFAAQWQADPAGLLEAAVTMLERQRLVARVPGGVLALPALARFRGVVVTVHERDPRLALAGEDSNEAEMS

SEQ ID NO: 39157 - protein, 1381 aa, Rhodococcus ruber Chol-4
MSSARFRPTRAGIINLWDYRDQEFSFADGRLVLRGPNGSGKTKALEVLFPFVFDGRIEPRRLNPFAGEERTMRSNLLYQGQDSAYSYVWMEFCRGRRDDPEAVTVGVGMRAARGHDKVTRWYFVVDGRVGVDFSLLDAADRPLTRRQLIEEVGADAVTDRPVDYRAAIDARLFGLGIERYEQLINLILTLRRPQLAKNLDPKGLSQALTDGLRPLDEQLVLEAARSFADMEEVSRTLESLAAADDAAQRFVAVYTTYLGQQARADVDRLGARLAAVDAGTSEWTASVAAFERAGVERALTLERLEVAERDLEQTRATLEALQRSSAYEGKQQLDDLAQVVADLERTTAGQAEQAQRARVELAQREEEARRAAEAAADAASAAHRAEDALAGAARDAGVEWAGPGGDTGGDQIAATVAACAEERAADVRAVRAAVAAAEGASAARVRAEAAAERARAQRESARAAVDAADAAVESARAEASTLLREWWTGHRDAWSGVDGPEELFEALAAAIAAAGDDEAATPAAVLAERTASVVEELRFRGRGLEAEITHGRERIALLEAERDMIEAERDDAPPAFPASTAGTGTSGAPLWRLVRFADAVSAEAAAGLEAALEAANLLTGWVCGGAGDVPAGATVLVPAPPAQRPAGRTLADVLVVEPDTGVPAERVREVLASVAVPDVVTDETGPAVDERGGYRQGVQLGRYTKAEAEYIGATARARRRRLRSAELDAEIAEVRARVADAESARVAVGERLARLDGAAAAVPRTGAVLAALRKVSECAGALRTAGEAAAAADRDLDQVIAECSVKERQVRSVAARHRAPHTVRELEQLAAAIRFFESQGQAVLRARRERVAAIERAREAQARRDDTRVAAGASAERAVTAEESLRQQQQRLATLREALGADAQQIDAQLAQAHERIEAARAEQRAARRAHDEAVERLGKAEAAHVAAEQALRSALTETRADAAQLAPYARPDVLALLGISEELRWPSAAVEWPAPEQARLTRAAGDVPAVPAAVGALYAALAAATATVKGGDGARKAARSALTAALQEFDGQLAAAGQDYRLQWDAPEGLTVVRVQDEQGFSSVAEFAVRIGAARREQELLLTDAERRILEDALLAGLAQQIHERTDDARELIARMGTEMRQRRMSSGTTVGVRWVLADHLDDQARAVCRLLDREVSALGPEELARVRAHFAARIRAERAAHPERSYPEILATTLDYRRWRVFSFGLIGADGTEDRLTVARHSALSGGEQSVSLHLPLFAAAHVMLDSADPQAPRLLALDEAFAGVDDNGRAELLGLSVQFDLDLFMTGYDLWITYAGVPACAHYDLAHSVAEHTVGATLLVWSEGGLLAEHDGSDLAAALGSPGTRRVPAPVKGALEFA

SEQ ID NO: 39158 - protein, 517 aa, Ralstonia solanacearum FQY_4
MHDIKLQRDTPADLFRHISAEKAVLYRCVMDCFAAAKRQFRLHLRPDEILNEGNWDRIPEHAQPRIEEVQAALAQLTEWGNLESQPDTTRVASISDFYRARFLYRLSQGGEAVEAALTTFERTLRRRAELQTVALEDISNRLQTLLSLADSANPDAAKIHETLRDLVRVFESLADNAQAFMAGIGRSIELQQAEVTAVLAYKKRLIDYLERFIGDLVGRSGDIAQRLVALSPRVDSLLWLAAQREARDSAPDDDPEQLDAVARGWQAWRERWKGLRGWFVTTGHEPPQAELLRSKARAAIPQLLTAVSALNERRSGRSDRSADFRMLAGWFAACEDDSQAHRLARAAFALNPARHFSLNPALAPGVQDLPASTPWAEAPPLRIHPRLREYGEAAPRGALPRVQARDEQRRLLAAQLEQEHAEIEAARLRLATGRATLLSELGALGTHDFALFLKLLGEALTAQMSPDAPVEAQSGDGLLHIRLQPLASGTQAMITTPAGVFSGRDHTVTITRMEDLP

SEQ ID NO: 39159 - protein, 416 aa, Ralstonia solanacearum FQY_4
MSNDSHDIGRQQARHRDDERTQALRALLMTPLMTPAHESFAAVRRHADELRAWFARETGWTLHIERDCARLYKRPADLQDASRGLPGYERRRYVLLCLACAVLERADPQITLRVLGDRLLALAADPALASRNFHFTLGAAHERRELVAVCRSLVELGVLQRIAGDEESFVRSTGDAADGGDALYDVRRRVLAGLLAAVRGPSTWPAEQTPVSLDERLASLVAEHMPDSDDGLRTALRHDLARRLLDNPVVYLNTLDAELRAYFVNQRGAMATRLCDATGLVAEQRAEGLALVDEDGELTDVAMPAEGTEAHATLLVAEFLAGRSRADAQAPTTLDEITAFLADARTRYGSYWRKSAREPGAERELTTVALERLLKLQLVARMADRIQPLPALARFALGETDIRAPIRSATQSNLFE

SEQ ID NO: 39160 - protein, 1376 aa, Ralstonia solanacearum FQY_4
MTDTRSPALPIPTLTRWQPLRLGLVELFHYDSEEFWFRDGRLLLRGNNGTGKSKVLSLTLPFLFDAYLKPSRIEPDGDASKKMAWNLLLGRHERRIGYAWVEFGRVDEDGRHHYLTLGSGLSAVAARGQVDTWFFMLDERRINQDFWLMSPTRVVLTRDRLREALQDCGQFFDTAAPYRRAVDERLFRLGSTRYAALIDTLIQLRQPQLSKKPDEASLSNALTEALPPISNDLLADVADALNQLEEYRRELEEYEALERAVGQFNQRYQRYAATQARRQARNLRTAQTGFDNASRELNAAREALETTQAEEQHADQAWRQADTVLTTNRTRLEELQNDPAMADAKTLEKADADSRQRRKEANTARQTCYDMQTRLERERQATRTRAQRAEHAGRALAESREDAVQAAERAGLAPAYSANPLACADAHTLQPLALDTARQDLRRASIERREQVALLLRRCDETDHAEQTHARAQTQHDERADEAETAAAQREEADTAVDRQGHTLLDAWQRYLDGLRQLHCPDGADALEALAPWTVSLQGDNPARTALHRAQQAASLRLARRQAALQNDRHALEQERDTLRDERARLEQGEDTMPQPPHWRAPDIRAVRAGAPLWQLVDFRPGTPAADCAGLEAALQASGLLDAWVTPNGMLQDSDGGHAQLPHDAQWLTRERQPQSLAAWLRPAEAASDAPPRVDPTVVQRLLEGVACGAEDNPAAEAWIAPTGRFRLGALAGVWHKPGAEFIGYAARCAARERRQHEIDARLEAIDAALTLLAQDFAQLDADQREAADEWQCAPSDDSLRAAHVEAVSRAREFDMARQRLEHTDRLLRAAAEQWEQARTILERDAEDLTLPPARDALRAIDQALQMFGDCLHTLAVVVRELRDAQTEHAEQLQREQQAESDARHALEQSAEREALTDEAGIRLETLRASVGARVEELQRRLSDARGAVTSGETELRQRNDARRLAGEARARAEQKAEAADATLVERTAARQHAVGQLQGFSATGLLVTALPDAELPSMHAPWTIEPALALARRTEQALLHVKDDDEAWNRVQNQVSQDYTELGRALAALSHQAQAETNDFGLVVSIIYQNRPERPDQLSARLAGEISQRRELLTAGERQVLENHLQAEIASAVQKLLRDAERQVKAINDELDKRPTSTGVRFRLQWETLPEGADGAPVGLEAARRRLLNTSTDLWSAEDRRVVGEMLQQRVAAERSRADADQGGSLLDQLARALDYRRWHRFRVQRWDGQWRPLSGPASSGERALGLTVPLFAAVSSYYTQESYAHAPRLVLLDEVFAGIDDAARAHCWALIREFDLDFVVTSEREWACSAELPGVAIAQLQRHEGIDAVHVSRWTWDGRNRRREDDPNRRFPNA

SEQ ID NO: 39161 - protein, 434 aa, Ralstonia solanacearum FQY_4
MSSSEAKLQRLLGGPALLPLRQRLRHHFERQNDGETRATLQLTQLRAGEHEALALLTGRTSRPTRSMRIDITQIDAALQTAGICRSLREALERLDGPILNRAAARAAIQAAWSEVTQGREVDARLQAWLDTPAAGPQLKRLAKQNTAAAKTLLRQADAVLRGLPAVGLARAQLAAQTLGNAHALDAGQPVASIVLAAWRCAEAAMASSRQEEPTDPEREFDDDEAEDRDDKARLAHERTRDIWARAGVLVNELARPALMLNLPIADHVTPSWTAGEPAYLSLRQLVRTPPAWTVKGTPVFVCENPNLLAIAADRLGARCAPLVCTDGMPAAAQRALLTQLLHAGARLYYHGDFDWPGLRIANHVIRTWRAIPWRLAASDYKAAVKAAPHVRRDLDETDAVAVWDPLLTPAMRDHGLSIAEEAVADGLIEDLRLP

SEQ ID NO: 39162 - protein, 540 aa, Streptomyces davawensis JCM 4913
MPIRTLENMVGDELHEEPHDDDSGSQTWQRLSAYAYLSAPERLEYVAVMRVFCGTLLADLAVPDVLAKLAQSGHPAAALGAETLTARLEQLVRWGNLLRSTHTVTATSIAEYQRSRSRYQLSKLGERVQRDADEVLAGADAAREVSSELLTLVDRGLKEIANLAAAPGGGTDPQQALEKISTLFAQFSEFAESVRDFYAYLGQVLARYDLDGAEYQGFKELLLDYVEAITEDVSFRAPRIAAHLRAIWPHLPTLLSRIDAHASGLGALSDALPETRVQRSRGREMADWEGLRDWFADSDGHGSQVDQLRDATLRALQSLLANAKRMLRSASGEMSRRKDLLRLAAWFDAAEPEEAHDIAVAAFGLYGARHLGVAPDPDLSVPAYVSWWTGPVVDVPVALRERGSRAPRGRSAAVEDHGEQKRRLMEEARELAAARQAAAAELRSASGRFDQVRLGSAAMRLLLELLTAALGNAQLHRKDGDFQLDGGHADDADLGIRLTAWRTPGRHTLLRSVDGDLTADDLTLAVESTSAPAAAEEASA

SEQ ID NO: 39163 - protein, 447 aa, Streptomyces davawensis JCM 4913
MALPSTHDVALAAERRAAARLLLAHPLVTSNGPQSDTFPLIRRHADWLSQRFQQVFGYRLLVEASHARLFKAGLGPGSGHRLERPSTGTPFTPRTYTYLALALSVLVTAPEQILLSQLVADLRAAAVDAGIEISDTGRQAERRTLAAALRQLVDWGVLAETEGHVSAVAEERGGEALLTVDREIARVVVAGPLAQSRDGADLVRRAADPGFGGPRTYVRRRLVETPVVHLDDLTGAEREWLRTRQRRESQAFSELLGLEAEIRAEGIALADPDGDLTDLYLPGTGTVAQAALLLVGRLVDRLRPEDPGHPAVGGRLVIGVPVPDGLLTELLDELVEEYGRRSNWQRGLVEDRDGLLAAVLDLLVRMRLVAPVGRVRADGHGLPEGYEDAALDGRTVTDVSGARGQDRTDGWVLLAAAARFATTVAVTSRTEQPPADDVPQGSQEPTR

SEQ ID NO: 39164 - protein, 1406 aa, Streptomyces davawensis JCM 4913
MNRPPSAHRYRLHRAGIRNVWQYDEQEFAFGDGRLLLRGKNGAGKSKALEMLLPYLLDGDARALDATGTGRTTLPWLMLDGFEQTNRLGYLWVEFARTDDDGNNHHLTLGAAIRASQSTRTAKPFFFVTPLRVGEDLHLAPAGQPLPLDQLKSLVGPENVTDRAVEHRARVARHLFGLTDPARYRNLLHLLHRLRRPTIGDRIDSGGLVSVLAETLPALDDEVVEKVARNLDDLDSVRTDLQRLERTDEALRTFLTGYRGYLHGALRRRTAEVNGELERLAEHRRLAGEAVKKAAKLRTSEDELTARLDVLTAEAEAAETDLAALHASAAYRSLQELGEKRATVTALHSAAATAFKALRQAHSTQEEAGRRLTEEAGRLGGELAELETTHGELLREAERSGLDPVHLGEPGTVPVSPVAGAAAAELTSPDGDFHVVRHSEVLVVDTESCATGLHGWDTQLGAAGPVIRNRARAVTELTALIDTTHQAQREAHEADATRERLEEQADDARERAGHRREETAREGEAYAGAVRTWTERLESLTGLSLDAVHALTAHDPAEGPLPAHAPDDVADTARSAVEPWLAELGEQRIARAVAIRELAAEQDRLRQKRNDWEARTDPEPAPPPHRSAPRTPGTGAPLYRLVEFADDLEPTARAGLEAALEASGLLDAWVCGDGTVMDPATHDTLLTPGTPAAGPALAEVLHPVMAPGSGVLPEQVEGVLHAVALVTDGTTGTQAESAIGTDGFWKLGIARGRHTKQAAEYVGAEVRAETRRRALAELDRQLADKQAEVTQQEQELRILTEHRAQVADVLSHPPTGRPLTDAWARATEAERAAQVLAGQASAAARAAEEARARAVAARREAEATASAHDLPVDPAALGSVRLCLDRLDTGTQRLRRRLRVVGSSTDAHRRSREDFARALTSTGEAESDYSEPLARLDAARRTVRGLEEALDAPEQEILARENEAKRRLEAVGRQLPGAERDLNAVHDERVRAEEDERGRREALATQEAEAVASGRRLRTTLSLPGVSRGAGLDMQAEDQGGEVHSSQRGERSAEQSDAHPSGDGEHDRTKTLRLLVDDVRSRLDAERRDISDTALLNRHTELRDQLSGGYDATLEEHDGIKICRLVDDHGPHDIAVVGERIAAQATEARERLTEREREVFQRFLTGELGDHLSSQVLSAGALVAALNDTLSTVRTSHGLGVALDWKLADGVEADVKAAVDLLRSPSGLRTHDQSDQLRDVLQRRIEDARRADPGASYAAHLRTALDYRDWFTFTPWVVNDAAPGSRRKLSGRTGLSQGEQRVLSYLVLFAAAAAHFTSLAETAPHAPRLILLDDAFAKVDEPTHARLGRILVDLDLDFVLTSERLIGNWPDVPSLHIYECLRDPHVRGVATLHYTWNGRQRRLVSV

SEQ ID NO: 39165 - protein, 434 aa, Streptomyces davawensis JCM 4913
MTDARAEDEPSLPAEALAFLTRPGLKRLWTAARTRLERGGLRPVGTIRLPDLDAEERQALSLLLARPVTGPAVTIRLSDLDTRLRTSAVGLSLAATLTELGPPLTDRRAARDAAQAERTRLWSESEAALAATPLANQEWARQWLEGIRRGGTLMRQPSGTALTTIAQAIETLATLFPGTATDPTPATWGRGELATRTTGSAHGLDDGTLLARLVQRGIAVARGVDFPIDAPGRRALWRQASVTPDEVSSTVLTYGLRPTGTTWQEGALRQRADHRLEAHLTLRELRALQLSFPPGTRIHVCENPRVVEAAADTACTAPLICTSGSAATVVLTLLDALSAAGCTFAYHGDFDWPGIALANRIMERYQAEPWRMQAADYEYLATRAELHGTPPLSLTGTPIEAAWDAELAPTMDALGIALHEEAALDLLLGDLVEA

SEQ ID NO: 39166 - protein, 522 aa, Streptomyces davawensis JCM 4913
MLERDDSGVSESFNLDSLTVSDRLRLFNFTQRDDHVAYLWVLRAMNVLRAVHQLQVHPDDVANALSELAVAHDEVPSAADLNLRAMLDNLSSDNEQVLYRVEDAARCGNLAAYRNRQSVYQFTEIGYRVYCAVEEVIGSRVQDANLSRLVFADILADFKALATANREGDQDEVYRKLARLDNVLEDMTQRAARFYLTLNDVARTTDISPETFLRYKHALLAHMSEFTAELERYAPRLAEAVYEVEDTGVETLLERAAAVDERPMMRPAARLEDWRRRWMGLRQWFLADGPGETKAAQLQGATRTAISGVIALLRQVTESRRGGVSRTTQLRHLAAWAAAAPDEQAANALVSAAFDLRSVRHLSGAHDDDDQISPRATWWDAPGVEISISLFRHGKRPAPGGPQPVRTRRGAHARLREQQLAARAMDREAATDLLDHGPHDRVLSEAETRAVLKLLTRALQARTVVAGRLRSGTGSSDVLTLRLVPNERGSQLRTETGTLHLPGFALEIKPHGAMRRRRTEKP

SEQ ID NO: 39167 - protein, 472 aa, Streptomyces davawensis JCM 4913
MPAHRVAASVEPADLGSYQQAARLMLLHGVVTESYPRAKALALVLQWSDELAKDFRDLFGYSLQTSARHARLLRRLDAFDASQAFLTVKSKRPFDRRRLAYLCLILACLHRSRIEINLADLVKLLTPSANAIEHLGFDATAPGHKDAVVDVMDWLVDRGALRISDGSMEDWARDHDRGDALFDIDHDTCAALFRPNKPLQHLASAAGLLDTPTAGTGRDPRRRFAAQRARRLLIEYPVVYFSDTDAETAIALRQPTLAEDIARLTGLPVERRAEGIMLVDTTGHFTDKRFPGRGGAVNRTAGLVLAKIADLREDPDRAASLQYLLPAGPGEEQADLLSRIDMALPQAGTLAALTQDPHADAGWHADEADPDVPVHEGQTGLPFVEHGTLEQMINELYEEFGPSSFTNKWQADPGGLLAEAVTLLADLRLVHIVPGGILVRPAAGRYRNITAVLPRPEHGQFALDFPLEDTSR

SEQ ID NO: 39168 - protein, 1439 aa, Streptomyces davawensis JCM 4913
MTLIPHSRTAYEPEVRFKPTRAGVIGLWDYTDEEFVFADGRLVLRGHNGSGKTKALEVLFPLVLDGVLDARRLDPFSGEERTMKSNLLYKGQESAYGYVWMEFARTDPDGEVSEAVTVGIGMRVTKAMSTPARFFFVTDGRVGIDFGLLDAASRPLREKALEKLLGKKAIFDTAEAYRQEIDERLFGLGRERYSQLVNLLLQLRRPLLAKDLDPVKLSDTLTAGLRPVDDDLILQAARDFENLAEIQALLNALTGADTAVRNFLREYTSYLRAHARDRVDQVTGRIQDTAAQCEKIMEAAEDRRTSERQVTSAQQERDTAERQCNEVGARLAEYKNHDAIKQRDDLNELRDRVHTERRGIADSERHLNQAQKNLATLKGEAERAVQRHDELRKAASRHTHSLMDAARRCGILHDDATLDLGAELDTDVAGRVAARRSELEDVRAHLSAFEDATKDQDREQDHCDAASGELTEAEQQSAAAAETLTIARTTARQELDEFISRWSSGNDIAVLAAADGDALRAAIDAVGEPEATPLPEVFRSLTDQRRTRALTRVETLKREHSDTADALSSRQDERDTVAAEADDAPPPSDLRPAGRDERPGAPLWQLVQFADHVPDAHAAAVEGALYAAGLLTAWLHPDPALTDQALHDKVADAYLRPLPPAQRPTGSTLADVLVVEDQQLVDAAAVQAVLASIAVAEDISTTDDALRAPMVTTGSHFCLGIQVGAHPKEQPEYIGATARAARRRERLRLLDESIAALEAQLAGIEEQQRYAQEAFDDFDCARDELPRTQPITDAVGEVAVVAEKVAGARRRLIETRKRLDGAIARAHEKNRQLRHAATAARLPTVREELNNVAQAIDDFADAGKALSTCREQADAAERDITGRREIIAAHTESCAEQAEALQARKDEFAVQEERLRTQEATLEAPLQEILQQIADGEEQLTAAQKTYGRAKKDAEDQRDRLLKADHALEFGRTALATAVAEQVRTTLTLEPYARPDLLGLLEANAETVWLPHDMWPSPEQAVQALMDSLTSPDTSLTGMEAAQNVVPASVASLINALDEATRGRPITASLLKTVTTKISTAITALEAALLESDQGYLFEWEPAGDIILARVTDSEGPAPVADFARRLAEQLADQSVLLEDKERTVLEDGLLTGLAEQIHDRTVAARDLVRSMDADTRSKPMSSGTTVGINWVVSDALTDSQQAVNKLLDKDASGLGPAGLAELRSHLRSQIRAKAAADKKRSYQQVIAEVLDYRAWRKFELRLFRPGMSEAERKKGELLTKAKHSVMSGGEKSASIHLPLFAAAHAQYSSAYPTCPRLIALDEAFAGIDEKYRPDLLALTAKFDLDLFMTGYDLWITYPDVPQISHYDMKHDEASHTVSAMLLVWDGEQILDDLEYPGSDDLAAELLGFTPRRHVPAEAGLLADIPEDEPTNDDAEEAE

SEQ ID NO: 39169 - protein, 424 aa, Streptomyces davawensis JCM 4913
MTGSAEAYERYRAPEFRRLLAAARRSLERHGGEIKGSIGLANPTTAERNAIIGITGTYRSADVRRITIPLSALEQSVCNVTGMSLRDLLERIGPELRFRADERNALDQARQTILLEGEASRLHAEHSWYRQWLAGLASDGTITALINKKDTHLFSQAVRVLEHLYNRPGDAPPIMLPALADATTGDTKALNSGRGSLPTLVLRALAMARGIPLEPGAEARRELWDAFDVIVDDLASRVLVLNLPATGQGLGQWLTDAARYGTPFHVTLHQLITLPIAVNLPTVYVCENPAVLRRAAGELGVGSPPLICAEGRPSTAFHRLAQLIVEAGGTLRYHGDFDWPGIDMTNQLRARYQAEPWRMTAADYLSAVRADSDHVPLSGKAQGTLWEPGLAEAMKRENRAVYEEAVADVLLDDWKGPARAGGDG

SEQ ID NO: 39170 - protein, 443 aa, Enterococcus durans IPLA 655
MLKNYPEPYTEDELLTDLKRLWDYGNLNVIEEQAKKRTLEEFNTNDYTYSIESRTVDIVELSEEIEQRMDELVGELNGNKLRDIYTILERMPRLTDQEKIYKNYEDLKRVFQENNDNTVSYFGYLNKEITKGVLQSKEFIDVKINFLLYLKDYVLELEKQRPKIWSTLKNISEETKMNIANTHIKHRKEIASFSPEKINETDLKNQVFDQFNNIKVWFSNNEHSMYSKIYNQAEQMIQIFSNADVQYFNRHKMQRNRQADFRKVAEWMYQEGNVDEVAKMFVSIFGMMNMKHVKTSEQYIYDGDKFSSIWEISPELIELKPRNKVGTVPQNVQATKAYSSDRRKLRKLLLDNEIKQKERVLDYFDNGVLNLSEDIFMDEETRKIIRQWISNGITRKDHITNTVFGLKILVELDEEAEARIYSENGALTMSGVTLSILDFGKDE

SEQ ID NO: 39171 - protein, 381 aa, Enterococcus durans IPLA 655
MNESIFNLIQPLFENYIIYRKSNPKLYFHIRQNQIEISRNLKYYFGLKLTIQKEFIMVRHIPLEAKPYMAINDFKEINDYVFLMLLMAIIDAKRIDESFYLGDIVKDIVSIHPDKEMLDWTISLQRKSLVKALKLMTELGIIKLMDGLTEDFDTKFSKDDERPYALYELGDFSKFFFNNQSRIFDNFIEYQSFEEYKNSLKTEQQETLALRQRVYRQLIENIAINFNRNTADSEFVYMRRSENERSLKTFWDQTTYNFELYKDTAFLSTEKFSTNLAMFPTRMQIDEIILQLSEILRNEDTHEINEKGEKNLTYPAWEKVISQKLIKFYDQYWTTEFRGKGFDFLNTNLKKRLQEICFIYDDRNEELITIYPVFVRIIGAI

SEQ ID NO: 39172 - protein, 1385 aa, Enterococcus durans IPLA 655
MNNKWVINRAGFHNFWKYAGSFFFDFADGKLFLRGSNGRGKSVAMVSLLPPLLDGRVDARRMDPFFQSTDRKMGDILLEEQDILGIDSRIGYITLEYKRMNENGIEEYFTSGIGMKADRSNSNGSSSNLTRWYFAINGSPRVTEPNTDGFHVVEDNGDDTFSSLTKQVLKNKINGIGARFFDTPSSYGEYINKKIFQFTKIEEFNTMIKLLITLRASKLGDKSGPSSVTEILEHSMAELPEGELDVLKNVIEDMERIQEDQVNLTNELKSLSKVNRKYRDYLDEKLGQLATAWLRNKQEYEIFIHSIDSTKEGIAKLDAKFHNLEEKQNLSERSLSLLREEYERNTIASDNELTRRVSELEKELEQLNSDIEKKNSQLKKHENYLKKLQSRLEDAKKDLEGQTEQQKQNFIDLLDNASGFNYTKQHQKFLESLSSEDEKVIADIRRQKKLITDLQNNLSLIESCFKSINHSKSIVKKAEINHSKAIEELQIAKIQFTEATESLEEEKDRLYTEVVEWSNLTTFKIPSDYLNKSLSAIRKLYDNDTEFSDVMVPLEQAKRESINLLEQQLIPLQSQVEILQESLNQKKLEQDLLLKGKIVEPSRTEEHRHARETLKKSDIVFRSFYETVDFRENIEEDLKNTIESAVAESGFLDAIISTDANALIENDKLIIPQPFTLGERSNTLSHYLKIEKNLPDELSEIVGDILNSIQINEGDDPSLPIIYPDGTYQLSILKGKSNSQYKAAFIGESSREAERKRKLESLKNELSQLKEHQKICKEEITQLEQKRSLYEEDFEACPNDLKVRESLRLHKRAMDQVAVKSELERMQLDQKEIAAAELQKHRKKLFDLRSLINIDVSEETLTEIKQYSNNYYNILEDIVETIHQLRKLKNRSAEQETDYHYQKELCKDAIEDLGIVTHQLEDKTTTLKKIKEQREFKEVEEMSLRQEKLKKEIRNKEEEKGATDRLLGELESKINNSREKLDLLIKQKEGKLQLKEDWLKLYSSAIQKYSLDAKIDLHSFSKQFGRKIDRNKLMQISAALTKVIRENRDQLLVYNLESELRKVTIRSKNEDDLLEVLYENWDDYNNFESVEVDTQNMRNSPFLLEAMLRKEKEENDQAYQKDQEEMYRQALFGKLGKTTRELVVEGRNWAVKMDKMLQRVYGEKDDLQLELKLVPKPSQAEGVTSTSQLIDIWSNAEEGILREQDQKKVISFFKKGLDDAIVIVKENPGTTDLKEELKRVFDYRQWFFFRLNYKKNAKQKEFKRLTQEAFMKMSGGERAKSLYLPLFIAMRLRFESASENAPYIITLDEAFSGVDEEGRESMMGVAEELEFNYIMNSQEMWPEYPTVSSINTYEFKQGKSDPFVETVKYGWNGRVRSKIVGDEFE

SEQ ID NO: 39173 - protein, 428 aa, Enterococcus durans IPLA 655
MNLNKGTIEFFSKNKKTWESWFSLLAKRYFSYGTFGGYVNYEELGAVDLTPIKEFLGLSQVEFEAKNKFSIKKFIMRYNRSALAEKDSLENVIEYFIEQSLITKEKLCEQETIKRKEFDTLVDILLSDKSPLLVESTRKNLFEKWKDDQTVIESLEKAQFALNHLPNSFLQLPYFSNQLFHNAHELDTNSLTGEIFNSMLRKSFELSKTTRRKYYSKVELSEDVYTHVKLLRGDHTIYAFVQGIYSNDLTIWNAHAKERDSWIVRKGHVLNAKDLYTKNNKVFVVENDGVFQMLTEMFPNLPFLSTSGQPNYTVLKIVEKLVISDTMIYYSGDLDPNGLSMAQNILKLYPLNVKLVGMDAEIYSSKLKTKELTKNQIKLLDSILVPDLQDLKHRIYLEQKAVEQEALTESYIPLLEEWDSKISTTENE

SEQ ID NO: 39174 - protein, 495 aa, Thermoanaerobacter thermohydrosulfuricus WC1
MEDKLDLNVIKPIEEVKYLSAENASRYRLIMRYFYEQYQKFKYWLYKEDVYEYVSQFDMFADYTMEKCEQDLKALTEWKNLIATQDTSKASTIDEFKNKKFRYQLSPYSIEIERMTIRLESIVGYGGSLQPSLFERIYRNLIKINEMAKKEDLQEINRWWEDLNTDFENIYHNATDYIASLQSSNADELMKSEQFIIYKDKLIEYLRDFIKDLQRFSVAIESFLKKVSPEVVNSVVDKLCQYEMSIPRIDRVLNEEEVKEDLMDKWNNISFWFTGHNFEDGEAVRLLNISNEIIRKITMYAARIAENRMKAASRKNEYIALSKMFAKASNIKEAHLLSAAVFGCFYTRHIKGDFERKTESVNQSVWEEPPFKVIIKPKTRSYGNSVKTNAIIDKSADKTEMLMDYLNQKNIEDEIIASCIVGNRIRIKDLPVVKPFVRATILKWIGKAMARNSFTGKTEDGRTYRLHMPKNGERAVLKCTDGNLDMPDIVIEFVD

SEQ ID NO: 39175 - protein, 383 aa, Thermoanaerobacter thermohydrosulfuricus WC1
MEELQMLLENFWILREDRENFNKIRDAENKIKPFVEEKLGYRLIINPYIIKLEKVPSDVEEWMGIDAFQMPMDYAFLCLLLAFLEDKGPEDQFVLSNITEYIEAQYDGPDKVDWTLFQHRKSLVRVLNFAVDIGIIKIDDGDHERFSESEDTEVLYENTGISRYFLRSFNREITEDMKIEDFLQEDLNLSNPKDAVIQRRHRVYRKLILSPSVYSEGPDDQDFMYIKNYRNTIAKDLEEYLDAKLHLHKTSAFVLFNDNKYLKSYFPDKNKNISDIMLQVSKIIRQMIEDGKLAYNPDDTIDITEAEFINIILKVKERFSDGWYKSYREMSEKQLIEEVIENMESFKMIKRVEELHSIKILPMAAKLIGEYPPDFEKGEGADE

SEQ ID NO: 39176 - protein, 1388 aa, Thermoanaerobacter thermohydrosulfuricus WC1
MSEKLAERWMINRIGLLNFWYYDDEIFEFADGRLLLRGANGSGKSVTMQSFIPLVLDGNKSPERLDPFGSKARKLEDYLLGEEEVSGLDERTGYLFMEFKKEKKDSYITIGMGLKAKRHQNMDFWGFVILDGRRIGIDFFLYKMEIGDDGKRVKVPLTKKELKNRIGEGGEVVESQKEYMEMVNKYIFGFSSIEEYDELIKLLIQLRSPKLSKDFRPTVIYEIMKASLPSLTDDDLRPLSETIENMDQIKMHLDVLYRNMAAVKKLKNEYDNYNRYILYEKAGDLVKAYSDLYASKKEYDNLTKDIENYRSTIANLGNDIISLESEREALKKKEEQLSSGDAKRTQKELLEEEDRYKQYLEDKSKKEEELRNKQDKYYGLERKIKNTEEQKYKLDKELQDKLEDISSIAQDIDFMEHEFSVSELKKVYGKEFDFTYWKNELKKHKDKIKRAINALREEIEANKRYDAALKEQERLKKEREDRAKKLEEAERLFDEQKREYVERVYSWSQGNAELKLLSSQLEGLSRVILAYGEDKGFDDILAFVRKPYEEILNGIQQEILRLENQREVKENQLHEKEKLLEEWKNKKDPEPERDEQVINNRKRLKEAGIPYIPLYMAIDFKEDVDEETRGNIEAAIEDMGLLDALIVPKEYFEKALQMDSNMADKYVMPGSFNMMLNVSQYFKVVDNEEGVSPEDISDALSNIFVSEESGTTYIDSNGTYGIGVIKGKARDKVKSKYIGSESRKRYREELIKSIQEEIQAIKAEISAIDEEINAKKSRIQRLDYEYSAFPGKEDIEEAYRYLKTAKADYEYTSHKLDEQFFTVKNCFEDLQKKKAVVRELTSGINIHPDIDTYSSAYEYAEEYASGLNEVEILYNKYVLHISNEEMLLQQKQDLEYDIDNLKYEIDVLENKIQSSVKKIEMLKETLKELGLEEIEKELEICLKRLEEIPKEITNKSAEKAKLEERLQRSLKDLLNIEEEINLKEKIYNIVEEGLKRELALGFVKQDVEKEDMLKLSKSILSEYKGFFDKAGFDREKFTERLQNVYFETRNELLEYGLSIGNIFDEACEGDNERIKEAKNKQRRLNITANINGKIVSLYTLYSNIEEDIMANESLLRETDKILFEEIIMHNVGIKIRAKIFKAEEWVKKMNKLMSERDTSSGLKFSIEWRSIPASNEEELDTKELVDILKSDADMLKKEVFDKVVNHFRSKVERARRAMEEKNNTETFHKIMKEILDYRDWFEFKLYYKKEGESRKELTDNAFNKLSGGEKAMAMYIPLFSAVYSRYEGASPTAPRIISLDEAFAGVDDTNIRDMFKLIEDLRFNYIMNSQVLWGDYDTVPKLSIYELVRPKNAKAVLVMKYLWDGKVKHLILPEKEEVAALEVGAINE

SEQ ID NO: 39177 - protein, 431 aa, Thermoanaerobacter thermohydrosulfuricus WC1
MNKEELKYFKEKKGYKRIFEGIREKYRSLGRLGGVVKLDNLTEDEKEVLTNHFKKDYRTKKSASIDVAKFEESLKNTRFEEYTLKDILEYYFGEKLTSKKEDMEILAKEREEFFKELFSKYQECKCIDWLKSLYEGTAIGVRTVNQRYLNDKAGLKKDIIYVCDAINNLPVYKGEKKRLPVFSSQIARNPHYFDSNTEAGSMFINALCTLLGLNEVKGTEEISELYYNVGILIDEISNYVTLSGLLAYEGDTENQVFKAAYESNQVLQVPLLNLSKIERVISPSKKVYAVENPSVFTSLIDATSKVFPLVCTYGQPKLSSLLLLDMLYKEGTEIYYSGDFDPEGLMIADKLYKRYKDKFHFLRYDVEDYLKSLSNEVINDVRLSKLNKIESPLLFDVAKEMKIIKKAGYQELIIDDIINDIKLIEEGKGEW

SEQ ID NO: 39178 - protein, 493 aa, Anoxybacillus flavithermus AK1
MDTSWLKPITEAKYLVVDNAYRYRAILRYFYTQHERMRQYLFSEEVYAFLKQFDEFQSYTEEELQQDLEQLVKWKNLIARQETDHIRTIDEFKKKRFRYQCSPYTVEIERMIRALEQLGETFGGSLEKTRFDRLYASLVRMESIIHDGFSEKREEMNQVWEETFDYFKKIIQNSADYIAYLNGENMEERMMSDSFLVYKEQFTTYLRDFIVALQKTSMQIEKLLEDLPEDGIRRFIEEVVAYQLAIPRFEGAILSREQLVEEKLDTWRSLNEWFLGRNGHESELSFLQKQTNEAIRRMTRVVQRLGERHHHFRSRKKDYLHLAKWFSSLETIEEAHKLSAVVFGCFHTKHIVAENDATENMYRDIWEEQPAEWLVKPRVRHYREKRKPEAMVDRRREKEETMVAYLAAKQKEEEELAQLINDGKIVLQELPVVASHIRKTLLGWIAKAMGREDRMVQTENGWKVKVVQREGTITLKAEDGTLMMPNYEIHLLD

SEQ ID NO: 39179 - protein, 388 aa, Anoxybacillus flavithermus AK1
MEKEFDEKAKEALTALFEQFWVVREKEPELFQKIREREKVLKRYVQEKFGYRLIVHRYFAKLEKIPAEPEAWMGIESFQEPLDYAMFCCLLAYLEGKAVEEKFLLSDVCEEIKAMYPGETAIDWTNYQHRRALIRVLKTAEQIGIVHHVDGEVEAFANQEDEEALYEVPVLSRYFMRSYPKDFIQYETIEQLLEEEWKVSPDDYRRHFIYRQLFLSPVVYRRQKDDPNFYYLRNFRHRLRDDIEAHTDFRYELYKNAALLTLPERQHVYTLFPDQKGTSDIILHFASVVRAHLDNYPPDEYGKIRVTMSDFQQLLYRCSKQYGEGWSKTYREMSMAQLATELLSALKDWKMAEYEQETGMVVLYPLLGRFVGQYPDDFTTKGRDDDDK

SEQ ID NO: 39180 - protein, 1367 aa, Anoxybacillus flavithermus AK1
MTNKWVLHRAGLINFWYYDEQYFEFADGKLLLRGTNGSGKSVTMQSLLPVLLDGKKTPDRLDPFGSRARKMEDYLLGEKEIVDRDERTGYLFLEYKRKQTDQYVTTGIGLRAKRQKNMDFWGFVIFDNRRIGRDLFLYKTEKSANGTEKIPLTKRELANLLGNGGTVVDSQKEYMELVNKHVFRFESMEAFQELIELLIQLRSPKLSKDFKPTVIYEILESSLPALTDEELRHLSETIENMDQTKQQLEQLERDEQSLKRLCAQYRAYNEYMIAEKASEWIKADKQVKRLAEEEKQWLKEEAEKQTHLADLSEYIQTLANEQDVLHQREIELASHEVFQAAKEYERVQQEINDIHEKQQKLLRQIDEKEQLERRYKRQLEEDKDRLYQVEKQLMQQVENLRHDAMESSFSAHALNEADFSRQRETKFDFTVWKREGQEYVEKLEQTIALWRRHDEMKARYEETSKEAGELQREVDELRHEEVKWLELLENEKARFQQEVFRWLEQCRDVSVSEPSVQLFLQRLHELYETYHVDEMKQPFTEAYYEALNRKNEEKMKQQHACTLLEEKISVKEVEWNQWKTQKDPELTRDEQTVKARVELKEKGIAFVPFYAAVEFRNHVPDPLRERIESALYHAGILDALITETGVEVTCDRVFVPRPVELEHTLADYLQPDVDEACGVSKARIEEVLQSIVLADGEVDGTLILNEEGYYTLGLVKGHAPTREKALFIGRTARKRWRLEQIAALEAELHELRAQLHEEADMLKQIDQTIAQINHWFRAFPTDRDMRAAFEEREKTKRHLISKQQEWERKNEKLAQLARGWQQVKQTLREQTEALDLEFSKNGYEQALLFMKSYMRELHELQMTHREFLHLLDMIHHRTEQLETLQQEIDETKGERHMLAKEQQKLELKRQEIERTLHRMGAEEIQREIQRVRDRLAVLQREMPKKMNERIALEHELKAIREKCAQLSAKESFAKRLAEEWKRSFERELALELVELHDSDLLEKAKEAMQRCGALLKETRTSLVNRLNSVFFQESANLTEYRLSQEPVSIEETNPFADIELDEEMELKVAGWREKQDRIVLLLDYKGQRVSPFYVLREIEHDIFLQREYMKEQDRELYEEIILKTIGRILRSRIQRAERWVKDMNERMQQLDTSSGLVLFIQWKPRTAETEEEMDTKELVELLRMNSRLLKEEDLQRVTKHFRSKIHRARELLEERGQGNTLHQIIKEVLDYRKWFSFTLYYQKTNEPKRELTNQRFYQFSGGEKAMAMYIPLFAATYSRYQEAADDAPYIISLDEAFAGVDENNIRNMFGLVEQLGFNYVMNSQALWGDYDTVPALSICELVRPKNASFVTVIRYYWNGKVKQLVVE

SEQ ID NO: 39181 - protein, 410 aa, Anoxybacillus flavithermus AK1
MNRLDEAVQFFRGERSFHRLFCEMKKKYESLGRIGGTISVVSFSAEEKDAIASFFGKEMNRVPLAAFEKQLANTKFAGISLVELLSCYLGEPLVTKKEQQQEIEREREAYFTRLMNTYQAQRDWLMAVEKQRFVQLAYQQNHHALEAALSAVCRALEQLPSTYVRLPIFAQKVANDPHMFDLHTLAGKLLLSALQFYAGTEYDLSAVEDVNELLQSYRLLREDVLNFVTCAGLMAETEKGHHPVFAAACETNTVLNVPLREVMLFTRAYPSEGNNVFVVENAGVFSTLLDVNVPLISTNGQLNLATRWLLDLLVKEGATLYYSGDFDPEGLKMAQRLVERYGSSVRLWHYDCSDYLATKPTVPLSDERLEKLQSVTLYDLQAVKQEMLRRKKAGYQEALVERLKGEMKRR

SEQ ID NO: 39182 - protein, 508 aa, Mesorhizobium sp. STM 4661
MPKHIANDPADLFRHVSAEKAAFYRCIMDVFAAAKRQYRLQLRPDEVLAEARWPDGSPRVEEVNAALGQLAEWGNLESHPDTARVSNLSDFYRARFLYRLSPGGEAVESALAVFVQTLQRRAELQTVALEDIASRLQALQALAGTDEPDVAKIHETLRDLVRVFEGLAENAQAFMAGVARSIELQQAEAGAVANYKKRLIDYLERFMGDLVRRSDTIARLILALEPSIDALLGQVAERESRDAAPGGAQDQSDARDRVLQAWCERWKGLRGWFLSTGHEPPQAELLRARARSAIPQLLAAIAALNERRSGRSDRSADFRLLAGWFAACADNGEAHQLARAAFALNPARHFSLNAGADADLPASTSWADAAPLRIHPRLREYGEAAPRGPLPRVRDRAEDRAFLALQFAEESLQVEAARKRLATSHPARLSDLGELDTHAFGLFLGLLGEALSEQAGPEAPIERQTGDGLLHIHLRPLARDSHARIDTPHGVFAGRDHLITITPLQDGR

SEQ ID NO: 39183 - protein, 427 aa, Mesorhizobium sp. STM 4661
MKATNRSNDGRNIGLQQQHFQREEFRACLRALLMTPLMNPADDDFAAVRRQAEALREWFSRETGWILQVEREGARLYKRPGTVTDTMRGLPGYDRRRYVLLCLACAVLERADPQITLRLLGERLLELAADPMLDFTFTLEAQHERRELVSVCRSLLDLGVLDRVAGDEEAFVQAGGDQADALYDVQRRMLAGMLAAVRGPSTWAPGEAPFTLEERLRAMVDEHVADSEEGRRTELRHQLARRLLDDPVVYVETLDPEARAYFFNQRGTMAARLCDAAGLVAEQRAEGLALVDEAGLLTDVAMPAEGTDAHVTLLVAEYLAVGQRQRRKDGADTMQAPIMREHDIADFLHEAKSRYGRYWRKSAREPGAERELTTIAIERLEKLQLIVRKAGAVRPLPALARFALGEAEIHETRNVAAQAAGSLFGPT

SEQ ID NO: 39184 - protein, 1391 aa, Mesorhizobium sp. STM 4661
MNDRLNLFATPLEKPILPTPTRPRWQPLRLGLVELYHYDSEEFWFRDGHLLLRGNNGTGKSKVLSLTLPFLLDAQLKSSRIEPDGDAGKRMAWNLLMNSHDRRNGYAWIEFGRVAEDGTPHFLSLGVGLSATAARPQVDSWFFLLEDADGAPRINQDLWLTSEHRIVLTKERLRDALEGRGQVFDTAAGYRRAVDERLFRLGAKRYDALMDTLIQLRQPQLSRKPDETALSNALTEALPPLAPELLGDVAEALGQIEEDRRQLEEYQALAKAVGRFEERYRVYAGTQTRRQARLLRQAQTEFDNASRARGEAKARFDEVQAREALAQTARDDSEITLARDRARLDALRSDPTMQDANRLESAEKEAEARRQAMQKAAAAVEQTGRRLELSIEETGRTARRVEQAERALAELRRQSTLHADAAGIVDQHTANPLAALETSVLVELTQHAFDRACSELRNLVAGRREQIALLRRRHGEVARAEADHVRRREIQDERQVEAEEAAERRTQADAEIERQGRGLAESWDRHFIGLKQLQVDPNAKFAALTALAEWAVTLQGDNPARHLLQSAHDAASFALTQQRATLDGQRQTLEAELGTLEDERQRLEAGDDMVPPLPYTRDASVRDARQGAPFWQVVDFRGAVAVPQRAGLEAALEAAGLLDAWISPDGRLQSSDDGAPLYDTHVLERRKSSPSLADFLEVTVPAGCTVPADIVERLLSGVACADDDPVDTEAWIAADGRYRLGALSGAWGKPTAVYIGHAARAAARTLRLAEIAERLARLSDELAAVQAMAGQLILDREQADEEWRKAPADEMLRSAHLAAVASARAARVASERFAEADMRCHEAEQALKVVRERLATDAADLRLPESPEALSAVEAELDHYRDTQVRLEQAARELRLALLEWQRQLAREDETRGDLQQREQESAAARVEAEEALARLEVLRDMVGAKVEELQRQLAEARVTVETGEVALKLAGDVLRKAGETRAVASQQAETANNVLHERGEARAQAVSKLQQFAGTGLLSAALPLIELPDMEGLWTIDPALTLARRAEQELSNLKDDDDAWARVQRQIAEELTELQRTLGALGHQAQADPSDWGFSVDIIYQNRRERPGRLAGRLAEEIAQRSELLTANERTVLENHLQAEIAAEIQRLLQAAERQVDAINRELHKRPTSTGVRYRLLWQPLSEEEGAPVGLDVARKRLLNTSPDLWSAEDRRVVGAMLQQRISAERERADSSSGKDSGTLLDQLARALDYRHWHRFRVERWQEGHWRKLSGPASSGERALGLTVPLFAAVASFYSQGSYALAPRLMLLDEAFAGIDDTARAHCMGLIREFDLDFVITSEREWACYAELPGVAICQLQRREGIDAVFVSRWTWDGREKRSEADPDRRFSPA

SEQ ID NO: 39185 - protein, 433 aa, Mesorhizobium sp. STM 4661
MNDQVEPRLQRLLGGEHLASLRRRLRQRFERAPLGGAVDHIRVAGLSAEEHATLASLLGRPQRRSKSLRIDVRQVDADLLRSGIAASLRDALEKLDGPILHLAGMRLHLQTVWSDVIDGCSHPGLASLLLTPEGIGLLKRLSRQDAIAAAELCRRTEEVLRHLPAKGITRSQLAADVLGDAHALDNGRGVAALVLAVWRQTTTPAPDAIAPITDEGGGTARKSGEDVDLEPAGGAERARETWARAGVLVNELARPALFLNLPTSGSESDRRPPGEPAYASLRSLLRSSTRWDAAGRGVYVCENPNLLAIAADRWGAVCAPLVCTDGMPAAAQRCLLTQLAQAGAQLHYHGDFDWSGLHIGNHIMREHGARPWRFGAVDYIAAVRTARGLAHPLGGKAVEASWDGALAPAMREHRVAIAEEALVASLLQDLDDR

SEQ ID NO: 39186 - protein, 500 aa, Anoxybacillus flavithermus NBRC 109594
MIEGERKMDTSWLKPITEAKYLVVDNAYRYRAILRYFYTQHERMRQYLFPEEVYAFLKQFDEFQAYTEEELQQDLEQLVKWKNLIARQETGHIRTIEEFKKKRFRYQCSPYTVEIERMIRTLEQLGDTFGGSLEKTRFDRLYASLARMESIIHDGFREKREEMNQVWEETFDYFKKIIQNSADYIAYLNGENMEERMMSDSFLVYKEQFTAYLRDFIVALQKTSMQIEKLLEDLPEDGVRRFIEEVVAYQLAIPRFEGVVFSREQLIEEKLDTWRSLNEWFLGRNGHESELSFLQKQTNEAIRRMTRVVQRLGERHHHFRSRKKDYLHLAKWFSSLETLEEAHKLSAVVFGCFHTKHIAAENDATENMYRDIWEEQPTEWLVKPRVRHYREKKKPEAMIDRRKEKEETMTAYLAAKQQEEEELAQLIDDGKIVLRELPVVASHIRKTLLGWVAKAMGREDRIVQTENGWKVKVVQREGTIILNAEDGALMMPDYEIHLLD

SEQ ID NO: 39187 - protein, 388 aa, Anoxybacillus flavithermus NBRC 109594
MEKEFDEKAKEALTALFEHFWIVREKEPELFQKIREREKVLKRYVQEKFGYRLIVHRYFAKLEKIPAEPEAWMGIGLFQEPLDYALFCCLLAYLEGKAVEEKFLLSDVCEEIKAMYPGETALDWTNYQHRRALIRVLKTAEQIGIVHHVDGELEAFANQEDEEALYEVPVLSRYFMRSYPKDFIQYETIEQLLEEEWKMSPDDYRRHFIYRQLFLSPVVYRRQKDDPNFYYLRNFRHRLRDDIEAHTDFRYELYKNAALLTIPERQHVYTLFPDQKGTSDIILHFATVVRAHLAKYPPDEYGQIHVTMSDFHHLLNYCMEQYGEGWSKTYREMTTAQLAPELLSALKEWKMAEHEQETGMVTLYPLLGRLVGRYPDDFLMKGRDDDDE

SEQ ID NO: 39188 - protein, 1380 aa, Anoxybacillus flavithermus NBRC 109594
MTNKWVLHRAGLINFWYYDEQYFEFADGKLLLRGTNGSGKSVTMQSLLPVLLDGKKTPDRLDPFGSRARRMEDYLLGEKEIVDRDERTGYLFLEYKRKQTEQYVTTGIGLRAKRQKNMDFWGFVIFDNRRIGRDLFLYKTEKSASGTEKIPLTKRELANLLGSGGTVVDSQKEYMELVNKHVFRFESMEAFQELIELLIQLRSPKLSKDFKPTVIYEILESSLPALTDDELRHLSETIENMDQTKQQLEQLERDEQSLKRLCTQYRAYNEYMIAEKASEWLKADKQVKRLAEEGKQWLTEEAEKQTHLADLNEYIQTLANEQDVLHQREVELASHEVFQAAKEYERVQQEIRDIHEKQQKLLRQIDEKEQLERRYKRQLEEDEDRRYQIEKQLAQQLDDLRHDAVESSFSAHDLNEADFSRQRQTTFDFTVWKREGQEYVEKLEQIIALWRRHDERKARYEETSKEVGDLQREVDELCHEEAKWLELLENEKSRFQQEVFRWLEQCQDVSVQEASVQLFLQRLHELYETYHVDEMKQPFTEAYYEALNQKNEEKMAQKHACTLIEEKIAAKEAEWNQWKTQKDPELTRDEQTMAARAELAEKGIAFVPFYAGVEFQDHVPEPLRERIESALYHAGLLDALITETDVDVTYDRVLVPRPVELAHTLADYLQPDVDEGCKVSTTRIKEVLQSIVLADGGMDGAFMLNEEGHYTLGLVKGHAPMREKALFIGRAARKRWRLEKIAALEAELMELRAQLHEQTDRLNQLEQTIAHINSWFRSFPTDRDMRAAFEEREKTKRMMTTKQQEWERKNEKLAQLARDWQQAKQTLREQTERIDLEFSKDGYEQALLLMKSYMRGLHELQMKHREFLHLLDMIRHRAEQLETLQQEIDETKGERHVLAKEQQKLELKRQEIERTLQRMGAEEIQAEIQRVRDRLAFLQREIPAKMNERIALEHELKVIREKCKQLSKKEAFAKRLATVWKHSFERELALELVEFHGADLLEKAKEAMQRYGALAKETRTSLVNRLNSIFFQESANLTEYRLSQEPIVIEEENPFADIELDEEMELKVAGWREKQDRIVLLLDYKGQRVSPFYVLHEIEHDIFLQSEYMKEQDRELYEEIILKTIGRILRSRIQRAERWVKDMNELMQQLDTSSGLVLFIQWKPRTAETEEEMDTKELVELLRMNSRLLKEEDLQRVTKHFRSKINRARELLEERGQGNTLHQIIKEVLDYRKWFSFTLYYQKTNEPKRELTNQRFYQFSGGEKAMAMYIPLFAATYSRYQEAADDAPYIISLDEAFAGVDENNIRNMFGLVEQLGFNYVMNSQALWGDYDTVPALSICELVRPKNASFVTVIRYYWNGKVKQLVADELVGKGELIEPIR

SEQ ID NO: 39189 - protein, 408 aa, Anoxybacillus flavithermus NBRC 109594
MNRLDEAVQFFRGERSFHRLFCEMKKKYESLGRIGGAISVTSFSTEEKEAIASFFGKEMSRVSLAAFEQQLTNTRFAGISLIELLEHYFGEPFVTKKEQQIEAEREKEAYFTRLMHTYRAQRDWLIAVEKQRFVQLAYQQNPQTLETAISVVCRALEQLPSTYVRLPVFAQQVANDPHALDLHTLAGKLLLSALQFYAEKEYDLSSVEEVNELLQSCHLLREDVLNFVTCAGVLAETEKGRHLVFAAACETNTALNVPLREVMPLVRAYPSIGNTVFIVENAGVFSTLVDTNVPLISTNGQLNLATMWLLDLLVKEGVTLYYSGDFDPEGLKMAQRLVERYGSSVRLWHYDRSDYLATKPTVPLPDERLAKLQSVTLHDLQPVKQEMLRRKKAGYQEAIVEELRKDTY

SEQ ID NO: 39190 - protein, 491 aa, Clostridium clostridioforme CM201; identical to SEQ ID NO: 38974

SEQ ID NO: 39191 - protein, 378 aa, Clostridium clostridioforme CM201; identical to SEQ ID NO: 38975

SEQ ID NO: 39192 - protein, 1355 aa, Clostridium clostridioforme CM201
MKDRFKMNRIGFVNFWLYDEEEFEFVDGKLLLRGQNASGKSITTQSFIPFILDGDRTPSRLDPFGSSDRRMEYYFLGEEGKDESTGYLFLEFKKERSEEYRTIAIGQRAKKGKPMDFWGFIILDGRRIGYDLKLYKEIGSSKIPYDRREMKTELGDDNFFTTSQSEYKKAVNQYIFGFRKAEQYEQFIKLLVKVRAPKLSKEFKPTKVYEILNDSLQTLTDEDLRAMVDAMEKMDEIQESLEILKRAFDDVKIIRNEYTRYNQYMLAKKAQAYIAMKQKIETEQCQLDIQEQKRQETEEARNSKSRRLADLEEQKKLKGIERAGLLDADLEGIDRKLEQARGEKEEAAGKVADWESKIRDYQEMIWRGERRVKEIMACLEQIQQEIGEAKLELGEQQEIIQWDQHEAALQMIDRGDHEKSGEIVKSLDSLKKLLAECKREIHEYEERSRQYDELAAQLEKLHTEKAEAQQNFKAAQEDVVRCVDQWITDIYAAEKKSSQWSPDSGILPILVEKIREYQSAADAETVQALLRTDYERQRQGLMDLKSSLEYQKKIQEEELDQEKEKLTCLRNSGELEPERDESIERSRKALKRAGIKAVPFYKTVEFSKNLDETYCARLEAQLQKMGILDALVVSADDFENIRKRCPGFLDTVLYVKGNGGSGFSGLTVSEELEPALKETVQRILSNIYEDKEDGQGIYLGKDGTFKQGILAGKAGKTGSAEFVGVLARKRRKEQKIRELEGRISEITEIIVSLEKEITAVQEHLEKLQEEYQKLPGFSEINAALDQERECEYKLQRTCEECGKKEAQERQLIFKKNQQYQTMLQKCKPFPYGRTEEAYEEAYNALEEYSRIWQEIRQAMLQLRTAQENLSTEKDRNVQSEQLMDDAFAEKRSWSAKEKESEIQIRQFEEYLNRPEIAKKAGRLKQLKKELEEIGTECDTLKKDLVILGERLRVILEDEPKLKESLRQKIIAETCLRNYFEEELALKLVFDRESQGIFECAKRAVSVLRESDKNREPTDLLQALHQVYQRHNGSLVNYGTSLEECFDTPVEAALETEAAGAIRKRVRVVSSWNGKRVYLEEFYGILKQGIDETELLIQKKDRELFEDILSQTISRQLTDRIAESRKWVSDMSQLMREMDTSMGLIFSLDWKPRKAENDMELDTAELEQILLRDHMLLTIEDIERVAAHFRSRIRMEKLKLEEKGDMINYMDLVRDALDYRKWFEFHMYFRRGEGERRLLTNAAFNRFSGGEKAMAMYVPLFAAVNAQYKKAEQEDHPRIIALDEAFAGVDDKNISSMFELVHKLDFDYIMNSQALWGCFETVKGLRIAELSRPQDSQIVSVIRYTWNGREKILDVQ

SEQ ID NO: 39193 - protein, 432 aa, Clostridium clostridioforme CM201; identical to SEQ ID NO: 38977

SEQ ID NO: 39194 - protein, 493 aa, Clostridium innocuum 2959; identical to SEQ ID NO: 38955

SEQ ID NO: 39195 - protein, 376 aa, Clostridium innocuum 2959; identical to SEQ ID NO: 38956

SEQ ID NO: 39196 - protein, 426 aa, Clostridium innocuum 2959; identical to SEQ ID NO: 38957

SEQ ID NO: 39197 - protein, 491 aa, Clostridium clostridioforme 90B1; identical to SEQ ID NO: 38974

SEQ ID NO: 39198 - protein, 378 aa, Clostridium clostridioforme 90B1; identical to SEQ ID NO: 38975

SEQ ID NO: 39199 - protein, 1355 aa, Clostridium clostridioforme 90B1; identical to SEQ ID NO: 39192

SEQ ID NO: 39200 - protein, 432 aa, Clostridium clostridioforme 90B1; identical to SEQ ID NO: 38977

SEQ ID NO: 39201 - protein, 491 aa, Clostridium clostridioforme 90A8; identical to SEQ ID NO: 38974

SEQ ID NO: 39202 - protein, 378 aa, Clostridium clostridioforme 90A8; identical to SEQ ID NO: 38975

SEQ ID NO: 39203 - protein, 1355 aa, Clostridium clostridioforme 90A8; identical to SEQ ID NO: 39192

SEQ ID NO: 39204 - protein, 432 aa, Clostridium clostridioforme 90A8; identical to SEQ ID NO: 38977

SEQ ID NO: 39205 - protein, 491 aa, Clostridium clostridioforme 90A6; identical to SEQ ID NO: 38974

SEQ ID NO: 39206 - protein, 378 aa, Clostridium clostridioforme 90A6; identical to SEQ ID NO: 38975

SEQ ID NO: 39207 - protein, 1355 aa, Clostridium clostridioforme 90A6; identical to SEQ ID NO: 39192

SEQ ID NO: 39208 - protein, 432 aa, Clostridium clostridioforme 90A6; identical to SEQ ID NO: 38977

SEQ ID NO: 39209 - protein, 491 aa, Clostridium clostridioforme 90A4; identical to SEQ ID NO: 38974

SEQ ID NO: 39210 - protein, 378 aa, Clostridium clostridioforme 90A4; identical to SEQ ID NO: 38975

SEQ ID NO: 39211 - protein, 1355 aa, Clostridium clostridioforme 90A4; identical to SEQ ID NO: 39192

SEQ ID NO: 39212 - protein, 432 aa, Clostridium clostridioforme 90A4; identical to SEQ ID NO: 38977

SEQ ID NO: 39213 - protein, 491 aa, Clostridium clostridioforme 90A3; identical to SEQ ID NO: 38974

SEQ ID NO: 39214 - protein, 378 aa, Clostridium clostridioforme 90A3; identical to SEQ ID NO: 38975

SEQ ID NO: 39215 - protein, 1355 aa, Clostridium clostridioforme 90A3; identical to SEQ ID NO: 39192

SEQ ID NO: 39216 - protein, 432 aa, Clostridium clostridioforme 90A3; identical to SEQ ID NO: 38977

SEQ ID NO: 39217 - protein, 491 aa, Clostridium clostridioforme 90A1; identical to SEQ ID NO: 38974

SEQ ID NO: 39218 - protein, 378 aa, Clostridium clostridioforme 90A1; identical to SEQ ID NO: 38975

SEQ ID NO: 39219 - protein, 1355 aa, Clostridium clostridioforme 90A1; identical to SEQ ID NO: 39192

SEQ ID NO: 39220 - protein, 432 aa, Clostridium clostridioforme 90A1; identical to SEQ ID NO: 38977

SEQ ID NO: 39221 - protein, 494 aa, Clostridium butyricum 60E.3
MNIDKNVTKQIDEVKYLATENTYRYRAIIRIMYKSYEKMKYTIYKEEIFESLKIYDDFSSYTIENLKSDLDVLVSWKNLSATADTAKVNTIEEFKNREFRYNLSPGTIEIERMLIKLEHMTIENTSSLESSLVEKFLNLIEKMLFIKDEENKKVYEWFKDLNSSFESLYRNYQDYISKFYSPKNDELMKTTEFLIFKEGFIKYLREFIRTLQNNTNSIQKVFNNINEDTIMQTVHKVYLHEKEIQSLDLITDEKEFKDLNIGRIESMKEWFVSYKGREPLIEQLISNTNEIIRKITRYAANIADKKSNNANRKEEYKKIAKLFSECSDINECHKISSVVLGSFNIEKIMAEFQRETESTNSSIYDETPSDIIIKPKIRTYREKIIKNPIVNKEERKKEKLMKILKKRKEESKILHKFIHNNEIAFDSLPVINTEERVLLLRLLSKGRSRKREWSKNENGMEYKVVLCDGDNIKVACDDGNLSMPPYKIIFKEEL

SEQ ID NO: 39222 - protein, 379 aa, Clostridium butyricum 60E.3
MEELKMLLKNNIILREDKKEMYYKIKDGYKEFKNFITENLGYNLIIRSDFIRLEKLPGKSESFMGIEEFQNNIEYTMLMLILVFLEDKSKDDQFLLSHITESLSSNDIDIKFDWTDYSTRRSLIKVLKFSVKNSLIRVTDGDEDSFISDTNREVLFESSGVSKYIVRNFNDDILKAQTPSDLLSGKGVDFDTDKVVVRRNRVYRNLLLCPIVYRQSSPEDYEYIKNYKKYLEENFEKYLGWNLHVHKNGAMLVPSEKENGLKLFPNGKGISDVILFVLYEIIDEINKDKSRLNEEDILILNKVDFEQIVLKVKLEKSHGFSKEYREMSDGRFLYEIINEMILFLFIEEEKDVIKIFPLCGKIRGTYPEDYDGEVSCDEK

SEQ ID NO: 39223 - protein, 1348 aa, Clostridium butyricum 60E.3
MKNRFFINKLGLVNFWYYDVEEFKLSNGNLLLRGSNGCGKSVTMQSFIPLLLDGNKSPERLDPFGTRARTIANYLLDEDDTEKTAYLYMEFKNGESDSYITLGMGMKAVKNKPVQSWYFIVSDGRRIGKDLLLYRNAGEMIPLTKKQLQNELKEGNFYTESQKTYMEMVNKYLFGFDDIESYEELLNLLISIRSPKLSKDFKPTEIYKILTDSLKVLSDEDLRPISDSMENMDSLKDSLDENKNSLRAINNIKYHYDRYNTSLLLEKSRKFADTYKKLKDNHKEQDNLNKSYKEFRIKVDDALKEREFKDDELKSAEEKYEKLINKEEFKSKKELEDIKKNIEENIKEKSKKENDLKDKNGKETETRYDIKEISDSVEIIEKELTEIMKELDDTAKEINMQQCIGIGTQDISVLTETDLDFCDDSIRKLEKKLKEAEVYFKKLENQKEKTEEALKELDDSEKENVIKKKDMERAEEILLTEKENYKVNFNSLLNTNRLYTLDDKEKLKVFTFVDVIDDYNNIQDLNNVVQNYYNDKVNDKNACINIENKVIKEHEDKIRIIETEIDELKNNKEIEPERSEEVKANRKRLEKQKVKFMPLYKSLNFNKDITEEVRNYVERSLDNMGLLDALVIDPKDKEKAMEFEEGMEDKYIFSNPNIMSYNLRSMLCVDKALKGDELFSEIDNVLQSIFLDNNGTTCLNEKGYYKIGIIEGRSSNDYEQKFIGEASRKRHREKIIEGKMQEIKEIVKLIDKHKLSIEIILKEIDILGNEYKLIPNTDSIYEGVRMVKDLENDLKNLDNKIIKLKEKEFAERQKLNDIKSELMAYVQNLDNVKCIKDIEDSLEAADYYKENVTKAKIALNKFISKKSILKLRSDFLDDLLQDIDKLYYEINNLSEKIKSDTLKKNAIEDILSKCDISEIEKEMENCLNIKNNNPQIIKDLSTSIGSYQSSLEVIQGKIDDLVIKQENIKNECDLYENIFMEEYDLQYVCEKEDKEPYEICRKIISEAEESNDKNREHYSNNLTQAINTNSAMLREFNIKETTLFEHDEEDFNIKWFRQRRDFKGKIQGKDVNLLILRNEISKSIEELELLISEEERKVFEEILMNTISQKVKAKIFMSNNWVKKINELMSSMNTSSSLKLSLSWVPKKSESEGQLDISKIIEIFNRGDRNSDKDLRSLGKHFTEKVKEELRKYEGTGEVRNYHSIIKDVLDYRKWYEFKLYYVKNNERKKELTNNAFFQFSGGEKAMSMYIPLFSALYARYEKGRCDCPRIISMDEAFAGVDENNIRDMFRLLKELNLDYILNSQILWGDYDTVDNLAICELIREDNDDVVTVLKYLWNGKEKVLLDE

SEQ ID NO: 39224 - protein, 427 aa, Clostridium butyricum 60E.3
MNSLEKDAGQYLKDRNEYNKIMKSLLEKYKKTGKLTGKVKISKISEEESLVLGAVDYTLYGEKEVMLSVKKFISYFCSGKYEKTDFLEVMKFYFGEDALITKREINDEKNLLKEKFFIDIENSFKAVETKIWFESMLSIKKFGYTTVLKLYKENEKELKEILLNIDKGFCHIDSINEEYIPLAKFSSLITKDSHYFDIDNVSGKLFIHALGYLNDIRVESIEGRNEALMKARIVRDEVSNFTITYGLLVYDDNKEVVGYEWFRREKQPLLLNIYNLNDIKEIKGVHNKVYVFENPTVFYELLKKCKDIPVSLICTSGQLNASSIILLEKLRKSNTIIYYSGDFDPEGLQIASNIKYRYGDSVKFLGMNIENYNKIKGNISFAHRVGKLDSISSKELKSLAYEMKISCMAGYQELLSDYYFDFIRNNV

SEQ ID NO: 39225 - protein, 488 aa, Rhodococcus sp. EsD8
MQHDRLRLFSFATAEKRAEYLWVLRAFDLARANYVVLLHAAEVAAILERTGSADPAAALSAQDVAPLLEQLHAWGVLERSYDGTRAASLAEYRNRHYVYQFGRAGYHAFRAVEDVLRARGEDASLSRLALADLLADLTELAAANAAGDGELIYRKLSRLDTTLSDMAERAAGFYLMLGDLVRTTEVTPESFLAHKDAVLAHMREFSTDLARYAPKLAAALARVQETGIDRMLGFAAAHDERVLLPAPERQADWRARWRGLERWFVGAGDVPSESERLREGTMSAIAAVLALLRRVTETRRGGVSRESQLRHLAGWFAAAPSEESAHALFGAVFDLGRPRHFSAVHPDPETIPVTTSWWEAAPVPIARTLAETGRTPSAGAPARVQRNESGIRRLRERQLAAQRARAEAARSLAAGGVDERELSEPETEVLLSLLDAALSARVPVSGTVPGATGTQNGVRLTLSPAAEGTVVRTARGRLHLDGLRVSVQ

SEQ ID NO: 39226 - protein, 456 aa, Rhodococcus sp. EsD8
MRARRISPLDRDSYQRAARLILSHHLVTAQYPDRAALPLLRRWATELREDLLELFGYRLEVTETTARLFTVADRLDPGGGARTVTDRPFDRRRYAYLALALAALGRAGGQITLSELAEQVASEAGQVPGVELATERATDRDAFVDAVAWLAARGAITLADGDAGGWVSDPDRGEALYDIDRPVVAALFRPPRALQHLRSVRGLLAAGDGRDGDRIADTAEVARRVRRALVQRPVVYAEELDDDARLQLALPRTTAGIELLTGLVAERRAEGVALVDSSGRMSDLRFPGVGTVPQVALLLAGEICARVSDPESVPVRLPRPADAEAELEAGLDAAIPAAGVFASLAGDAGAGPADTTPAQQPAPTHPLVEDSWLAETAARLVDEFGRTFAAQWQADPAGLLEAAVTLLQRQRLVARVPGGVLALPALARFRGVVVTVRERDPRLAPAGEDSNEAEMS

SEQ ID NO: 39227 - protein, 1383 aa, Rhodococcus sp. EsD8
MSSARFRPTRAGIINLWDYRDQEFSFADGRLVLRGPNGSGKTKALEVLFPFVFDGRIEPRRLNPFAGEERTMRSNLLYQGQDSAYSYVWMEFCRGRRDDPEAVTVGVGMRAARGNDKVTRWYFVVDGRVGVDFSLLDAADRPLTRRQLIEEVGADAVTDRPVDYRAAIDARLFGLGIERYDQLINLILTLRRPQLAKNLDPKGLSQALTDGLRPLDEQLVLEAARSFADMEEVSRALESLAAADEAAQRFVAVYATYLGQQARADVDRLGARLAAVESGSAEWTASVTAFDRAGAERAQAHERLELAERDLEQARATLEALQRSSAYEGKQQLDDLAQVVADLERTTAGQAEQAQRARAELAQRDEEARRAAAAATDAAAAVGRAEDALAAAARDAGVEWAPPAEDAPGEQIAATVAACAEERAADVRAVRAAVAAAEGAAAARVRAETTAERGRAQLESARAAVATADAVVELARAEASNLLREWWVGHRDTWSVLGLPEELVEALAAAIAAAGDDEAATPAAALAERTAPVVEELRFRGRGLEAEITHARERIAVLRAERDLVEAERDDAPPSFPMRPTGSSDPSGAPLWRLVRFADDVSAEAAAGLEAALEAANLLTGWVCGGAGDVPAGAVALMPVPPAQRPTGRTLADVLVVEPDTGVPAERVRAVLASVAVRDAVTDETGPAVDERGGYRQGVQLGRHTKAEVEYIGATARARRRRLRVTELDAEIAAAQNRMAGAEAERAELDGRLAQLERAAAAVPRTGAVLAALRKVSECAGALRTAGEAAAAADRDLDQVIAECAVKEQRVRSVAARHRAPHTARELEHLAAAIRFFESQGQAVLRARREHVAAAERAREAQVRRDDARLAAEESAERAVTAEESLGQQQQRLGTLREALGADAQQIDAQLAQARERIEAARVEQRAARRAHDDAVERLGKAEAAHVAAEQALRSALTETRADAAQLAPYARPDVLSLLGISEELRWPSAAAWPAPEQVVDRLARAGGDVPAVPAEVGALYAALAAATATIKGGDGARKAARSALTSALQEFDGQLAAAGQDYRLQWDAPDGLTVVRVQDEQGFSSVAEFAVRISAARRDQELLLTDAERRILEDALLAGLAQQIHERTEDARDLIARMGAEMRQRRMSSGTTVGVRWVPADHLDDQARAVCRLLDREVSALGPVELASVRAHFAARIRAERAAHPERSYPEILATTLDYRRWRVFAFGLIGADGAEDRLTVARHSALSGGEQSVSLHLPLFAAAHVMLDSADPQAPRLLALDEAFAGVDDNGRAELLGLSVQFDLDLFMTGYDLWITYAGVPACAHYDLAHSVAEHTVGATLLVWSEGGLLAEHDGSDLAAALGSPGTRRVPVPVEGALEFA

SEQ ID NO: 39228 - protein, 512 aa, Amycolatopsis vancoresmycina DSM 44592
MDPIRVPPEMFRFTSGDRAGLDVSILHAFGEANERLETALSLDDVRAWLRSIGWLEALDDDELVRRLNQLRDWNLLDVVQNHSEDYRTAGEYERRNLQYSLTRQGEAAFAGVVHAMNVLAATGALQTAVLDAIADRLGDLVRELERGTNRRIFTALLELEAHLEALRGNTKQFNGELQRLLRADGADLTTFHEVKASTVGYLQEFLTNLDHRAHTIAVRIRQIEDHGVGLLQVRALAGAELPQLTAADPGPPWLEHRRAKWEGLRAWFLPADGSQPRVEQLHIVARKAIITLLQVLDRITESRRRASSAVADFRELARWFTVVTAQDDLHRLWSTVFGLSSARHAHLAHPDPELVSSVTPWAEAPPVEVSPLLRASGRTERFSRTGKVRDVASVRAARAEQARAERAELEAAWDMLDTGGPVRLSSFGTLDHGVFERLLDLLGRALAADPGRAGHRRSTTSDGRIEIVLRMPGDGSIATLATPRGQFRGPDYEVEIRTAGHRAVRRTAGGHP

SEQ ID NO: 39229 - protein, 414 aa, Amycolatopsis vancoresmycina DSM 44592
MSKLTNQLVTAEREEIAHGIRRLLATPLITERGQPEAFDLVRRRREPIRKWFDYYCGWTLTVEPRLGYARLVKVRTVTDPTRPARRLRSARAAFDRRRYALLCVVAAELLAVPVTTIGLLADRVVRATTADEVVPAFDTSSRGERMAFVDVLRLLESFGVVEALDGTTETYVDSAAAKVLYRIDATLLLRLLAAPVGASQLAVPIEDVALRFDELLAAVSRERRYGLASGAHDETATRSEVQRNLWLRHSVFRRLVDDPVLYFDDLSADEHAYLASPTGRQLLRRAAEQAGLVLEERAEGVLFVDPDGIATDSRFPDDTGNAKVAALLLLESLTGPATIEQLEIEAAALLSRFPRWAKTYQDENGPRQLATDAVAVLTAFGLAQQEAGLVRPLPAAARYAVGAARTTDSGGTTS

SEQ ID NO: 39230 - protein, 1357 aa, Amycolatopsis vancoresmycina DSM 44592
MTVSELPHHTTEEPAAHPARWMPTRAGILNVWRYYDEVFEFHEGRLLLRGPNGSGKSKALELLLPFLFDANLRANRLSTFGTGERTMHWNLMGEGATGTTRVGYVWLEFRFPGDPVRWFTCGARLQASSHTTTVHPDYFTTGLRIGSGGLSLVNEAGQPLTKNALEERLGSDGVVHGNASDYRAEVRATLFSGLNEQRFDALIMALLQLRMPKLSQRLDPSLLSSLLSRALPPLGQQEITELAEGFERLDAQRDRLKSLEKEVAATRTLAGRQRTYAQRVLRARAATLISATTELDNLAKAARDSAERHETTARRKDEAEHRADELAADLRTTEARKNGLMESEEYKQGQELDRLRSRTARAKADAKRIGLDAANKRAAADEDEKARLAAARTLDLQVEAIRAQELETRNAATRAGLTSVHQEVSARLEAEPGKARALLTGAVRSRRAQLDVVAEALNRHERAVDRRAQAETGLEMARTRLTGAQDKLTVAITERESALTTLGNELLAWATGCRELTISDPELLLAQLDSEPALLALVDSAAAPTLQDITRRETTTGSALDVARRERTDLVTALDRLRTERDLPPAAPRTRTTDRTTMNGAPLWRLVDFADRTQSRTAAAIEAALEGSGLLDAWVGPRGQIAGHDVFADPGALPPVDGRSLGDVLVAERDAGVEAAVVERLLRSIAFGAQLPADAPAAIAADGSWRLGSLVGSWEKEHASYIGTSARQRARQRRIDELTASVAEYDGLLASLGEELNALRTRREVIAHERATRPDHGAVTEATNLAFRRESERDAAEQHVRDRVAEVAAGDREVASALHELSRVAAEHGVPTDRAALGNLAAATTSYQDQAGAWLDAHTELVSFRHAAGAATEQARRSAAVASEREVEAATAAEEHESLAATLEAVDSTFGVDYREVLGEIEVLRNRSLQLSSDQRATTQLVTELAGKLGELKIQHRTDAEAHASSANRRDGAADRFRQLASGIFAADSGIDGQAGFDATLHASDGVRAALDAARLVAAAWPAVPHSPANIGDALHRLSESVHSCRETLKSRADLDLETDDDVQVFTAVVDGLRVGAAELLNILQAEAEQSRHEITERERQLFDQTLTGDTRRHLAARIRQANELVDGMNARLERVRTASKVAVRLVWQVAPELPAGTKAARDLLLKDPAGLADAEREALHRFFRDRIEQAKADDTATSWEQQLSQVFDYTAWHQFVVKVDRANGEGWKLLTRKLHGALSGGEKAIALHLPLFAAVAAHYQAAPQAPRVILLDEVFVGVDTTNRGQVFALLSALDLDLMLTSDHEWCVYSELSGIGIHQLITGTDGDDAVTTARFTWDGHELLTAAPSTGPRTPARA

SEQ ID NO: 39231 - protein, 346 aa, Amycolatopsis vancoresmycina DSM 44592
MDITLAKLDELLLDRTGLTTREVVAQLVGPIGDRAAERRRATDRRTALWDWLAAHPVVTAQPALAGWVGGIRRAGLIDGSVSRTKEELEKVLKVLGELPAAGRPLPSFADDVLGDTHALDEGKRCANLVLKALVAIYDVPPPVGAPERRAVWERAGIADDQLSSTVLAAGLRIGGDDLVGSILDICADAGVAATLTLQQLRTKPRLTGAPAEVWIFENPSVLTVALERFGASCPPLVCTSGWPSSAGILLLNRLHEAGSTLHYHGDFDGEGLRIAANVVARTGAVPWRMTSADYLAAVADGPSVGRVTDVPWDPRLAGQLAETGKTVPEERLAVVLLDEIARRTRT

SEQ ID NO: 39232 - protein, 490 aa, Rhodococcus rhodnii LMG 5362
MTSDADERLRVLSFATADRRTDYLRVLRAFDHAHRDYAVVLHARDVEAHVAHDTAAGASALTTAEIAPLLEQLHTWGVLDRSFDGRRATSLTEYRNRHFVYQFTPVGHQAFAAVDELLRSRDDDIALARLALPELLTDLTELAAATRDGDGELVYRKLNRLAATFAELTDRAARFYLAIGTIARTTDASIDTFLAHKDALLTHMREFGLDLARYAPTLRAAIDDVTAAGVESMVAAARHDGRVLLSLDERADHWRGRWLALSRWFVPDGSGPSEAQRLRDATTSAIAGVLSLLRRVTEGRRTGISRHTQLRTLAEAFAASPDDHTAHSLFRTVFDLSAPRHVGVAHEDADVAGAHDSWWDAPPVPLSRTLAETGRTAAPAGPAKLERDDDRVRRLRERQLETGRARRAAAASLAGGGVLGRTLSTAETDVLLRLLDTALSTRVTVSGRVADVSGGGDGVRIDVHFDDAAVTVIDTDRGRLHLAGFEVAVR

SEQ ID NO: 39233 - protein, 426 aa, Rhodococcus rhodnii LMG 5362
MSTRPGSTAPVPGGVDAESYRRALRTLLLHRVVTPAFPDRTALVAIRRWTSELRDDLHELFGYRLEVTETCARVWGVRDRPAPAVPATTSTDRPFDRRRYAYLALALAALGRGADQITLTELAASVVADTAHTSAVALDVDRAADRDAFVDAATWLVTRGALRLADGDASGWAADPAAGEALYDVDRAVVAALFRPDTVLDSPEAVARLLSATAPAPDENAAQRSRRLRRALVEQPVVYAAELGDADRLLLARPATAAAVAEPLGLVVEHRREGIALVDPAGRFSDVRFPATGTIAQVSLLLAGEIAEYAAPCDRGEDPPFVARPWLDDTVAALTRRYGRTFAARWRSDVPGLADAALDMLDRLGLIAHTDGGVLALPLLARFRGVTVAVRTLDGAELFAGPEPPTGPDSPTDPEPGPVATEEENT

SEQ ID NO: 39234 - protein, 1415 aa, Rhodococcus rhodnii LMG 5362
MSSDRFRPSRAGIVNLWDYRDQEFVFADGRLVLRGPNGSGKTKALEVLFPFVFDGRIEPRRLNPFAGEERTMRSNVLYRGQESAHAYVWMEFTRGDAEDPEAVTVGIGMRASRGTDRVARWYFVADGRVGIDFSLLGPDDRPLTRRQLADEVGADAIVDRPVDYRAAVDARMFGLGLERYEQLIDLVLTLRRPQLAKNLDPKGLSRALSDGLRPLDDALVREAAASFSDMEDVAKVLEGLVTADDAARAFVDVYGEYVRQHAHAAADAVSARLHAVRECAAALTDATARTHEAQRTRDDSAARVARAERDLEDATARQEALRQSAAYEGKQQIDDLAQFVARREQIAQRDRARADEAAAAAAQRAEALGAATERVEQTRTALTRAVDALAGAARDAGIDWAPPSEGESALALSVRDAALARQGDVAAVRDAAATAARASTDRTRAEESAERAERDAQGADAALADAEKAVERARVDVLASLRGWLADHRDLLATLDPAATGLADDLEQAVRDAGEPDAPLPADVVERRSAPATATVRARAAAAEARSGEIASLIADLESERTRIASEQEDAPPASATRTDDRTGRPGAPLWTVVRFRDGVSDADAAGIEAALTGADLLDAWVLPPGVPVPEIRSDRLLTTAATPPAATPAADGARSLADVLEPDLDTSTGCDTSTGLDAEAVETLLRGIRLVDLASGSAGPHDRQDDGPYTIGVDGRYRFGPAVGRHTSSRAGFIGATARARRRAERIAVLDDRLAASRDDAEAAAADLAHAHDLLTRFAAAAAAVPRTGPIVAARASLREAAGAATSVHRAHATARAGVDRAVADHATALRHLRERAAVHRIAVDAESLDAVAAAITWFERCGETAARARRDADDAARDAQRAGESADDTARVAAERSEDAAAVEFELTAERARLDALRDTLGADASRVDAELERLRGTVDAAKREVRDARTAHEAAVGDIGFADGAATAARGALRSAVDEILRDSRELAAYARTDVLRIVGAVAPGEHPPVWPDDAVWPDADALAHRLEVEAATADVLPAGAQWLHDALVAATEDVRSTEATRKAIRSKLTTALQEFDASLAATGEHYSLRWDNPDGLTVVEVHGDGGAESIADFSAHIGAARSEQELLLTDAERRILEDALLTGLAQQIHERTVAAREIIAAMATEMRTRRMSSGSTVGLRWVLADTLDDEGRAVAKLLERDATMLGADELTRVRAYFASRIRAERAVHPERSYPEILRTALDYRTWRSFAFSLIDPSGEEERLTVARHSALSGGEQSVSLHLPLFAAAHVMLASADPQAPRLLALDEAFAGVDENGRTELLGLTAQFDLDLFMTGYDLWVTSPEISACAHYDLSHSNAEHAVDALLVLWTGEEMHAEYTGARDLAATLGSPGRRRVLDTAGALDIEPAVTG

SEQ ID NO: 39235 - protein, 504 aa, Actinoplanes sp. N902-109
MGSEDADAWELAGLPGGVPQAAYLSGPLAAQYRLIVDVLLAQQEHTLTGVAAADLPGLLRAELGAHARVLDDPGFNLDARMRRLKAWQVVDIWQDRALRDEDFLRNLDRYQLTPAAADLHRAVLRMGQDVADAAAATFAPSVLTAHLTVLRDTAAGDPGAAAEAWSVIRTTHRAMADAAAGWQARLAAAQSGAPDPGKLTQVQETLRRYVEMWGAGIDTHSDTITGLLSELRAVTGWRRVAVHHLGAAADEPAVEGLVASYARTLDTLRRWFDGPQCQARRLRRQMRDTISPLVRGQRTLAAVGGHVSRRAELLALAGQLEATGDDVRGWELWCAATGLFSARHLPGVAPEPAGNPAATSFWDAEPVPVEARLRRHGPKATTGSAARIPDRSEGRRAAKARAAELQSAAARTEAAVAARSGQRLSQWREVAGAELDLLLTMLTVLAGARSDATGTRHARTGDDRWVLRAEPAEPQAPAAVLHTPDGRLVHPDIRLHITAAGRPA

SEQ ID NO: 39236 - protein, 370 aa, Actinoplanes sp. N902-109
MSTATREAQRAFTGLLERPLVTPATDPELLRLVLRHLQAVTDTARRLGYRVQRVGRAVRLVRVPVAGRVTAPPRPADAPGRRVLALACCLAACCEEIAGAVTLQRLSDLVRDLLAAPGAAVTGYDPDERAQRKALRDAAKLLEGWGVLRRRTSDDALLEEWTERGSGPGAGYDVDRDAVLLMTSPDVLDQALHPGGDDEPVRQLRALVETPVVLHADLSDEEAAALRSARSGAARLTGGHVEVRTEGMLLVLTDDEQQATVADWPRARAADWVALLMADLAGQAGTRAADGSVRLTAAEVDEVVADLVDWRGDYLNKAQKTVPGTVRADAEARLTELGLLRVHLDASWQLLPVAGRYRAPGITITSEGRP

SEQ ID NO: 39237 - protein, 1481 aa, Actinoplanes sp. N902-109
MTLPALGPAADDRQLTAWRDALTGGELPAPTRERWQILRAGVVNLWEFDVAEYWFADGRAQFVGANQSGKSTLMALTTLIMLAGDLDRQNIDTFGQSDKAFRYYVEPTDDARDRRDATATTNRGWAWVEYARLGPGGPEFYTTLLYAQAKRGVTAMPPAWLVCRGRARVRDGLQLATGQAVVEPRELAGTEGLTVFDSGRRYAERLATELFGFADTDRYTTVLEMLKVLRTPHLGQRLNPDWFTRQIRSALPPVARTEVAELAEGWQQLEQLRRDRDSAREARDAITAYVTRAWRPWADSVLRLHADELLDADTAVTRAAHDVTAATSRLEQARGELSTEATRTDELLRAARAAQTRYEELLRSKAYLDAAGRADHAGTLRKEAETARRHAGTAAADAARARSESERRAAHRDQARAAARTTRDRATAATEHAAAAATTAGLGDHAPQWAATGDLDRLTAAIATRRSAVAVLRKLLREAATAVTRWEAADDRATTARHDHETRSRTADTATEALAEALQHLSDDLERWSVATPGAPPVPVREQWLAHVTTAAAHPRPRAALRTLVTTDWLDPAITPLTEQIGTLRTRATTADQQAAEAETEATHLTTTADPTPATTPARWTRRPRPPMSARAGGPLWRLVDPHPGTGQATIDALEAALDAAGLLDAWLTPDHTWSPTRDTHDTVLTTATANPPSHEAAAAGAARTLADVLRPAEDAGELAGAVTAVLATIGYAPAGVELAGAVAVSADGRWRTPVAAGQAGAAPAGAELLGVAARVAARRRRIAELRERAGEARRAAEDFRAGAAALTERIAMVRADAAAAPDDADVVSAGSAVAAANAERERAEEALARAEREAARAKRHADDTAAEVAAHAGAHELPLTEERLDALATDLDQAAQAVADLGLALAGRAAADRDLAAGIEAAAEAADAAAQADQRAQDAAVEAEEAVLRAEEASVARDDQEQLDYARTLEKERAELDGLVDASRTRGNRLAEAAAKAAGLVEQRERELAAAHRRRDAALTAWWIPVDAGLAAARDLLTRADSGRPPGSGHGTDAEQSGEEGAGRSGEEGAGRSGEEGAGRTRLIGGAGAERSLAAALRQALAAATTLRPPTWPDAAVDKAKRAQTAMAKAVGSAVAELRTVLEAAGGRSVTIVDADDNAGLPGVLILVDASGAHLAPAEAIRHLDELVAELSAAHSGKLDQIYTELLASTFIDHLGDRVKKVSDLLSLVNKVLERHPTGANRTTLRLRRHPAEGQRAGWAVLRALEDGTIASPAAQEQIREFLGDRVREAQEAGQGSTLDWTEHLAALLDYRSWFDVVAEFRVEGSDFKPLTKQVHGVDSGGGKVVTLLQPLLATLVALYTESPAAPRPLWLDEAFEGVDPGNRATMLRLLVDFDLDFLLAGPAPLVAAAQVPAAAVWIISRAPAPAPGVDLSLMLWAGRTLEQIAVPDHAVRILAPRRPLEEGPDLFTTVDAGDPGDQG

SEQ ID NO: 39238 - protein, 497 aa, Amycolatopsis orientalis HCCB10007
MDPFRVPPELFRFTDGSRSGLPLAILHAFGEANERLETALGIDDVRTRLREVGWLETLDDDDLVKTLDQLKDQGHLETVQSHAGDYRTASEYERRNLQYALTRQGEAAYAGVVRANEVLNATGALQTATLEALGERLGELAKQLEDGTDRRVFSTLTEVEGHLEAFRDNTKRFNGDLQRLLHAEADMATFHEVKAATVAYLQEFLNDLEHHTHTIATRIKEIDDHGIERVHRRALNGAALLNPDQRWLDVRKARWDGLRAWFLPEDGATPRVEDLHNLARRAIITLLQVLDRITESRRRASSAVADFRELARWFTVVPAQEDLHRLWSTMFGLSSARHAHLAHADPEVVSTTASWLDAPPVEVSELLRSAGRTERFTRTGRVRDVSAIRAARAEKALQERAELEAAWNMLDTGGVVRLSAFEKLDHTVFERLLDLLGQALGRPPGAEGTRRSTTSDGQIEIVLRPPRNGAVARLTTTSGVFRGPDYEIEISTAGGGA

SEQ ID NO: 39239 - protein, 406 aa, Amycolatopsis orientalis HCCB10007
MSLTNQLVIAEREEVARGIRALLATPLIGERGSPETFDLIRRRREPIRQWFDYYCGWTLTVEPRLGYARLVKVRAAADPTRPARRLRSGRAAFDRRRYVLLCVVAAELLTVPVTTIGLLAGRVAQASAADDLVTTFDVATRAERLAFVDVLKLLESYGVLEAADGDPESFVDDPAAKVLFRVDATLLLRLLAAPVGPSQLAVPADDVALRFEELLEAVSHEQRYGLSSGRHEDTPSASDVQRNLWLRHTVFRRLVDDPVLYFAELTAEERAYLGTPTGRQLLRRAAEQGGFVLEERAEGVLLVDVDGLATDERFPDDGSNAKVAALLLLDALDEPRTIDYLQKATAKLLKRFPRWAKTYRGKDGVRRLTVDALAVLTGFGLVRTEAELVRPLPAAARYTDRTEEAP

SEQ ID NO: 39240 - protein, 1327 aa, Amycolatopsis orientalis HCCB10007
MTVTRWIPSRAGILNIWRYYDEIFEFHDGRLLLRGPNGSGKSKALELLLPFLFDASLRANRLSTFGTSERSMHWNLMGEGASGATRVGYVWLEFGMAGEKWFTCGARLQASTHTSTVHADFFTTDQRVGDGLPLVNEAGQPLTKGALEEALGEHGTVHDGAAEYRAEIRAKLFPTLSEQRYDALITALLQLRMPKLSQRLDPSLLSNLLSRALPPLGQQEIADLAEGFERLDAQRERLGSLETEVDATRALAARQKTYAQRVLRAGAANLINATTELDELAAAARRSAEEHDEVAAKKEAAEERAAKLEKDVEETEARLSGLTESESYRKGQELDKLRQRTLSTREKAEALRADADRLRAEADADEERSRVAKQAAKRQADLVRSLETEVRAAATRANLAGVHDELVAGLDEPARLRPLLQAAVRGKRDQVETIGRALDKHERAVGRRHQAEADLDRARADFSVAQERVELTTATRELALSDLRTRLAEWAIGCRELRFPDVEAVVRDAEAEVSLLGRLGAVAETVLEDIIRREAATGAALATARTEHDELLVEAGVLETEDVLAPEPPRTRTTDRAEMSGAPLWRLVDFAGSVPESTHAGIEAALEGAGLLDAWVNSHGVVDGHDVLAESGTLPVASGRSLADVLVPEPDAEVSPTKIRRILEVIAFDDTLPAGPAAIGADGAWRMGGLSGSWTKDAPAYIGGSARLRARERRIAALRDKISLREKTIAELEGELAALRGRRELIKIERAARPGHDDLLVATGNLTTAEAELTAADAAVRHLEATVSTLETEAKTALHELTARASESGLPTERAPLAALATALRTYSDQGENWLYEHGNLLTATQRAELCAEQADRSEGNAARREEEAADAEAERTKLTAMLDAIDGTVGTGQREVLAEIDGLRTKLRELSGELRAANADAKELAVSLGALGVRRTTDARAREEAAKKQDAAALRFRKLATGIFPADGGIEDLPKFQATLSASESVRAALDTARLVAAAWPSVPHAPSNLGEALHRLSEAVHTCRNTLSSRAELDLETDEDVQIFTAVVDGLRVGAAELLKILYAEAEQSRHEITDRESDLFDKTLTGDTRRHLAARIRQANDLVDGMNARLERVRTASRVAVRLVWQVSPDLPPGTKTARDLLLKDPDQLTAEDRVSLHKFFRERVEQAKADDTATSWEQQLAQVFDYTSWHRFVVKVDRANGAGWQLLTKKLHGALSGGEKAIALHLPLFAAVAAHYQAAPEAPRVILLDEVFVGVDTTNRGQVFGLLSALDLDLMLTSDHEWCTYAELGGVGIHQLITGGDGDDAVTTARFTWNGHDLQPAGH

SEQ ID NO: 39241 - protein, 239 aa, Thermobifida fusca TM51
MGDSVIREPADRRVKPPYGRAAVLRLASWFDQADAATAHRLFTAAFSLYPARHLSGSTEETIAVAASWWDVPPADTSAVRPARGGALAPAEDHSAQQVRLRDTAEAAAHWRRSAAEEVRSRLAELTPRTGRITLSQAALGVLVELLTRALGSGDATAAPVSAGDLELDIRLHVRHDADAVLVLSEDGGDLTLTGLRLCATPYARTEPEHGSDAVADTDTEPHTPVPAMSGSDDADNLAV

SEQ ID NO: 39242 - protein, 402 aa, Thermobifida fusca TM51; identical to SEQ ID NO: 38565

SEQ ID NO: 39243 - protein, 1114 aa, Thermobifida fusca TM51
MRQDTTLPKRYRLERAGIHNVWQYDNHIFEFGDGRLLLRGRNGAGKSKALEMLLPFLLDGDARRLDTTGTSRTSLRWLMLEGRTATETGDTTATQTDTTTLGYLWVEFARRGDDGQPQRRTLGAAVLAVPDQPDARPIFFVTDRRVGDDLTLIEGGRPLPIERLRAAVGPDNCYDTALGYRTRVMRDLFGLDDPMRYRNLIHLLYRLRRPTVGERLEAGELVSVLSEALPPMDDAVLDEVARNIADLESARARLTALRTAHEHATAFLTDYRGYLHGVLRQQAAAVREQITAFEERDAELARLEAELDTLVSAESKAQEERDRLRRTRDTAHSDAATLTASAAHPRQALSRGEREARYAAVAAYIRAAEAAWVASEHARSAESQAHHRIDRDCAAIERGIGGLRRLHFGLRDAARASGIDPARLGEVPQPVRVTLAPRESVTQVNLEGLEQAVERPPVQGLEIDALRRRLADLHDRLTHTDAAAAERETLVDDLYQRALELEAAERREADLTSEAEWADSHVEQARERERSAIDQVREASDDYAAAVREWCNALRAAAPDDVDIEGALDALEQRVEPPLDEDLRVLSADLPETVLHEAHAVVEPLLAQVRHTRDAALSEEHDLAAELAELAERRADETAPVTAPRPAWATAPRDADAGVPLYRAVDFADHLSPEERAGLEAALEASGLLVGLITPEGTVVDHDTRDLLLSPTAALSGRTLADALVPVEDESVKVDRAAVTALLSSIRLLGDEESPAPSGDGSSWFQPADASSGAENYVSLDGRWRLGVAWGRHHKATAEYIGEEARAQALERHRAKAERRIEMAEALLAEAQERRAEIDNRYESLVRINRSVPSGADLAAAWAVLDEARTWLAATVRAHAAARAAADAARSAALEQRASLAELALKHQLPAHYEELARIRGALGALRVQISAAHRDLEILAGRLEDYRRHVADWKRAREARIVAEDAASAAINDMITVRRETELTDRASAADPAQIENAIEQVRSRAHTADEALPAVERDAQRIRDERVAVETRHSAATVERAEQAHRALAAGARLRAMLATPTGEVDQGLLAAAGLRELAEPEGALAAYDAAESDPERSDDLTKRIRVLDTLI

SEQ ID NO: 39244 - protein, 490 aa, Lachnospiraceae bacterium 28-4
MKYLESIQETIYLSAGNAPQYRRIMRIFFIEYEKMHFQLYKEDVLELLREYPEFSDYAMEQLKTDLEALVGWKNLTPIQDPKRVYTIAEYKNKQYRYTMSEYAVEIERMTVKLENLFMDSGNLSMNYFVRIENALHEIEQIDRQELKAVNEWWSNLQEDFKRLNRNYQDYLREFYSGKSDKVLKSIEFVIHKDRFISYLQEFVQQLQNKSIRIENIIKKLSQKMVDGVLERVIESELAIPHPNSEIQDLRENAIRENIYGKWKSLSDWFISTDKHPSESQKVMDITDEVIRKIIQNAALIVQIQNWGISRKEDYKKFIQMFARCENVEAAHKLSAHIFGIQHVRHFKVNCPRSTDSINSSVFDELPSEYELKPHTRTYKPRIHKSGFESKALEKLAQRNQYLKKLEEDRKLVMKYIQDGQLDISRIDDCISVDTRETFLRWIAQANLTVSKNGRTEYGQAFRLIKQEGSHTLKCEDGKLVMPKYIFQFED

SEQ ID NO: 39245 - protein, 379 aa, Lachnospiraceae bacterium 28-4
MEAARALIENCWIDKKKNKELYVKVRRELTKCQKFFREQLGWTVINNEQILKVEKIPARAEGYMGITDFTESRDYCLFCAVLIFLEDKEEQEQFLLSELVDMLELQLKDVMDVDWTSFTQRKSLVRVLQFCENMRLLEAYEGSSDNVGSSIGQEILYENTGLSRYMAVNFAYSIAGFQSWEDFEKQQNQEGEADRGHYRINRVYRQIAAAPALYWNQSDNPDSIYLKNQRQWIQKNFSEYLGGQLHIHKNAAFLVMDEGESFGEMHPREAMLPELVLLLCGRIREKADEGVWKERYDGCIVVSTKEFQKEIYHCRDKYRLAWSKEYREMEDVKLLTAVISYMKSWMMIGECGEELVIYPAAGKMIGSYPAEFDAKEKNR

SEQ ID NO: 39246 - protein, 1345 aa, Lachnospiraceae bacterium 28-4
MSERWHMNRIGFVNFWLYDDEVFSFADGKLLLRGQNGSGKSITTQSFIPFILDGDRTPSRLDPFGSNDRRMEYYFLNDGEKEEATGYLYLEFKKGNRYRTIGIGQQAQKGKAMGFWGFVVLDGRRIGYDFNLYREVGNTKIAYTKQEMKKVLGENNLFTETQKDYMRFVNKHIFGFPRLEQYEQFIRLLIKVRAPKLSKEFTPKKVYEILNDSLQTLSDEDLRAMVDAMEKMDDIQDKLEGLKRAYKDLQIIRNEYVRYNQYMLGQKAAAYLEEKNMVDAARGKLEAEMEELKETKEKLEKSYKRAGELKAEKSLLEREKEAVGTIDLEEADEKLRQCRNRQEDAGKEFAMYCQSIESHRNAIREYDAAVRGIQKNIDAYQMEIEQLVHEMDELQELICFSGHGQILSLWKNSDGYDECKKIRSEIEKLSKNVEAALEELKKFKEIQIQWDRLSEECSSLEEKKAQAWQQVNDAETMEEALRDDLIEAYYGLEQHNQEFYLSKKELEQMAVYIQKYQGMPDYGNIRNLIGNIWEMKNQKLGSGLSALEAQKEKLAESLRVCREELKELEKVPEITPVRREILCRTREKLTENHISFLPFYEAVDFTEYASMQDRDLLECQLEDAGLLDALVVVQKDYTRAMKVLGAWSDKILCLEDSGKMRCRKLTAATEDMELRKMTERILSNIGEEDDCRIVLRPDGYFRHGALEGYSRPETEACYIGESIRREKKKEQIRKKTEELQLLQQELETSEQEISGVKKRIGILQEEFHGLPVFDELDEAIAMKKDLNWTFEKCSEECGKKQKEKESCEILKKQSAQRIITRCRELPYERNMESYEEILGAIHEYARQLESFQMAGMRFLAEEASKDMHKQLIEKEEDAIDIEDLHKKRAEQEIQEQKLQIEKLEEFLNAPENKERAERLKLIRDELDSKGKEETELGKKQAVWEEGVKRLEPGIEAQKNSVTEKVEKEARLRKYFDEELSLGLVFDRESKTIPEAAEQAKTIIRETDRNKSVAEIVSNMDRIFHAHIGNLVIYGTFMEDCFAEETTDAMVLRKRHRIVSYMQGRKLYFEEFYQVIKERIDETELLIRQKDRELFENILSDTLSRKLNVRIAESRKWIQDMSSLMRKMDTSMSLTFSLDWRAKTADGEGELDTAELEKMLNRDRELMTAEDIEKISAHFRNKIYTVKQIAEENGEVLSYSDLVREALDYRKWFEFKMFYYRNNDNKKELTNGAFNRFSGGEKAMAMYVPLFAAVNAQYKKAEQDDLPRMIALDEAFAGVDDKNISSMFDLVRKFDFDYIMNSQVLWGCYASVPFLRIAELLRPANSQVVTVIYYLWNGKQRIIEEQ

SEQ ID NO: 39247 - protein, 445 aa, Lachnospiraceae bacterium 28-4
MEEKNLEECALYFRNHKAYTRMFMEMKKKYIKYGKLSGRIFLNNLSEAECIALGKVFGRSLLPGDFEFSIAQLQAALDETKYCGVEVAALVEKYFNEKILSNSQRREEKTELNKRFWEEVLHEAGSRFGKDAGGTLWLNEVREQRKYGYQLIMREREKSRDGIKEVLMEVCSALTYLSPGDGNGKEYVRLAVLGAEITKNPHFFDRQNAAGRLLISALSFTYKTEEPKAQEDVLALYYAAGIMPDDISSYTTCYGIHFYEGEREHEAYRSFIRKGEKYVLTLSNLSRLTRADSNRKKVFIIENQMVFSQVCEEMGGEEYPIVCTSGQLRTASLFLIDLLLKSGCKLYYCGDIDPEGIEIADRVIERGSGQIFPWRMTTEDYYRSISNEMLTEKRLNRLDKITNVQLRELAQLLKTERRAGYQEHLIDWMVEDIKTEKLALFGFTN

SEQ ID NO: 39248 - protein, 511 aa, Streptomyces albulus CCRC 11814
MFRFTIGEKADLNGAVLEAFGVAGEHLETALGLDGVREQLRAVGWVADLADEELYDALKRLVGWGLLDVVHNHAEHYRTAEEYERRNLHYSLTRRGEAALAGVRHALEVLASTGALQTAVLEAITDRLDELTVLSGEPATADRRILSTLRELEGHLEALVENTKAFNGQLQRLLRAEGADLDVFREVKAATVTYLQEFLVNLDRRGEAVAEAVGRVEERGIAVLRERALRGAELPPVPGEDPAAGWLESRRARWAGLRAWFLPDDGTHPRIEQLHDIARRAIVSLLQVLERINESRRRSSSAVQDFRELARWFAAASEEDDLHRLWSAAFGLGSARHAHLAHPDPELIPSSRSWSEAPPVEVSALLRTSGRTERFTRTGKVRDVEAVRAERAERARAQRAELARAWQALELDGPVRLSSFGTLDPAVFDRLLDLLGRALATAPDASGLWRATSGDGRVEIVLAPPPDTRTAVLHTEKGTLAGPDYVVHVVAAGGTAAFPAPHTATRQEAAG

SEQ ID NO: 39249 - protein, 437 aa, Streptomyces albulus CCRC 11814
MSTLANQLASAEREEVARAIRLLLARPLLTKAADPAGFDLVRRRRDPLARWFDYTCGWSLVVEPRRGYARLTKIRANPDGSRPARRARSGRNPFDRRRYVLLCVTAAELLSMPMTTIGMLADRVVQATAVDRALPTFDPVHKPERTAFVDVMKLLESYDVLRTVDGTTEAYVDSAEAKVLYRVDTTLLMRLPAAPVGASRLAVPPDEVPARFEDLLAGLVRERRYGGAAADGTADEPHGEAAATDAQRNLRLRHSVLRRLFDDPVLHRADLTEDELAYVASLTGRQILRRSVEQAGFLLEERSEGFLLVDPDGIATDVRFPDDSSTARVAALLLLEPLCAAPAGLLPEQLAEAGATQLRRFPSWAKAYQSEDGPARLADDAVRVLLDMGLARRAGDRVVVRPAAYRYRLTETTSPAGNNDPNDTTTSSGVPAEGDEQ

SEQ ID NO: 39250 - protein, 1385 aa, Streptomyces albulus CCRC 11814
MSVTELPQQRGPEESAEAPSVRPPDAARNRWQPHRAGILNVWRYYDETFIFHQGRLLLRGQNGSGKSKALELLLPFLFDASLRPNRLSTFGGSERTMHWNMLGAGASGKTRVGYVWMEFRRVGDDGAERWFGCGARLHASVHTSTAHAEYFTTDCRIAHPDGVQLVNETGQPLTKAALTNVLRDRGEVHLSATDYRTAVRRELFAGMGEQRYESLLSALLQLRQPKLSERLDPSLLSTLLSRALPPLGDGEITELAEGFERLDRQRDHLDRLDAEVAAAETVASRQRAYARRVLRAAAAGLISATTDMDDLTRAARQSGDELDKALAERASTQTLRDDQERRAHALDETVEALRESDTYRQGAELDRLRRDTADLVAAAGKRRAAARSAKAAAERDRERADESAGHARTLDEHARATGNEANRAARAAGMESVHREVSTLLEQEPPASPADGRRNGTDGPRPDGSGTVARTADDEAARRARRLVRGAITARREQVARVTEAVEEHDRGVRDRGAAEDRLDTVRTRLGEAITQRDTAAGAWDDAVATQADRLLAWAAGCTELIVADPGELAARAAVEADVRGWVDAAARPRGQEIATARALVLAARKKMWEERDTLDEEVRRLRGETELSPPAPRTRTTVRTAAAGAPLWRLVAFREGVPVAVQAGVEAALEAAGLLDAWVSASEGITLPGHDTRAEAALAATVTGPSLLDVLRPEDDIPVPAVTVTRLLTGIAYGTTLPSGHPAAISAEGAWRLAPATGTWSKPEPAFIGVLAQQRARQRRIAELTGLLEEKDTALAGLEDQLHELGARAARLEADLSARPDHRELDERRRDLDRAEEKVAANDEVVRDATGHLGRCERRVADALRTLSSRAAEHGLPTDRDRLRDLAAAVDRFRDHADSWVDACLTAAGAAERDRRTAADADRSRRTADESAGEAAAAETKAAGAAARLEAVESTVGEDYRMVLARVDETRAELVRCRAEVRRAGELLVELEGRIGELNATSAQDVERREQAVAARDSAAHRFRHLCQAGLAEDAGVAPEADAGDGTKATLEAARGIAAQWPGLPHAPRNLGDAATRLSEAVHEARGHLGVRADLDLEPDDDVQLFTATLDGVRVGAAGLLTTLTRERDRSRDDISIAERRLFDQILTGDIRRHLAARIRRAGTLVEDMNAHLERVRTASDVAVQLVWDVRPDLPDSTRTARQLLLKDPGRITEADREALHTFFRGRIEEAKGNDTAGSWEEHLAEVLDYTAWHRFTVRLDRADGNGPQPLTKRLHGALSGGEKAIALHLPLFAAVAAHYEDVPLAPRPILLDEVFVGVDTVNRGQVFALLTALDLDLVITSDHEWGTYRELPGIAVHQLLTDGDDDAVTSVRFVWNGTGMEAG

SEQ ID NO: 39251 - protein, 453 aa, Streptomyces albulus CCRC 11814
MTTEDAATATAPVPGETTLRRPELLPVWQTLHDRLSSGRPITRVRLGPLDETQREALADLLGLDRLPDARPSVALARLEEAVTELSGCTVREVVAALVGPLGDRAGERRRQEDERAGLWTWLAGHDTVRAQPALADWAASCRASGLVGGSVERTRTLLTDALTVIAEFPGQAEPLPVFAARVLNGHAHALDDGVPLSTLVLRALAILYDTAPPQSAAERRALWSRAGVADDELSSTVLLGGLRPAGDGLLARVARLCTEAGQAASLTLAHVRSPGELTLPATPAPLVVHVVENPSILALALRHFGSNCPPLVCTSGWPNSAAIQLLRLLAHQGAVLRYHGDFDGEGIRIAAYVLEKTGAHPWRMTAADYRSAVVCHTHGPQPGRITGAPWDPELAEAMAEHDIAVVEELVADVLLEDLAAAARQEHPSGCAVRDAHLTLQATEEALRGAVDRC

SEQ ID NO: 39252 - protein, 489 aa, Enterococcus durans ATCC 6056
MNDEAMSLFKFLNTTNSKRYRMILHFFYMEHQQTSYLLKKRDIWEYMLKNYPEPYTEDELLTDLKRLWDYGNLNVIEEQAKKRTLEEFNTNDYTYSIESRTVDIVELSEEIEQRMDELVGELNGNKLRDIYTILERMPRLTDQEKIYKNYEDLKRVFQENNDNTVSYFGYLNKEITKGVLQSKEFIDVKINFLLYLKDYVLELEKQRPKIWSTLKNISEETKMNIANTHIKHRKEIASFSPEKINETDLKNQVFDQFNNIKVWFSNNEHSMYSKIYNQAEQMIQIFSNADVQYFNRHKMQRNRQADFRKVAEWMYQEGNVDEVAKMFVSIFGMMNMKHVKTSEQYIYDGDKFSSIWEISPELIELKPRNKVGTVPQNVQATKAYSSDRRKLRKLLLDNEIKQKERVLDYFDNGVLNLSEDIFMDEETRKIIRQWISNGITRKDHITNTVFGLKILVELDEEAEARIYSENGALTMSGVTLSILDFGKDE

SEQ ID NO: 39253 - protein, 381 aa, Enterococcus durans ATCC 6056; identical to SEQ ID NO: 39171

SEQ ID NO: 39254 - protein, 1385 aa, Enterococcus durans ATCC 6056; identical to SEQ ID NO: 39172

SEQ ID NO: 39255 - protein, 426 aa, Enterococcus durans ATCC 6056
MNKGTIEFFSKNKKTWESWFSLLAKRYFSYGTFGGYVNYEELGAVDLTPIKEFLGLSQVEFEAKNKFSIKKFIMRYNRSALAEKDSLENVIEYFIEQSLITKEKLCEQETIKRKEFDTLVDILLSDKSPLLVESTRKNLFEKWKDDQTVIESLEKAQFALNHLPNSFLQLPYFSNQLFHNAHELDTNSLTGEIFNSMLRKSFELSKTTRRKYYSKVELSEDVYTHVKLLRGDHTIYAFVQGIYSNDLTIWNAHAKERDSWIVRKGHVLNAKDLYTKNNKVFVVENDGVFQMLTEMFPNLPFLSTSGQPNYTVLKIVEKLVISDTMIYYSGDLDPNGLSMAQNILKLYPLNVKLVGMDAEIYSSKLKTKELTKNQIKLLDSILVPDLQDLKHRIYLEQKAVEQEALTESYIPLLEEWDSKISTTENE

SEQ ID NO: 39256 - protein, 490 aa, Enterococcus saccharolyticus subsp. saccharolyticus ATCC 43076
MEKVLTASYLVVGNVERYRQIMRFFYKRHRQMQGILYRPEILQMMQEEFSSNYGQLELDQDLEQLVIWGNLQKQQEMLRPKTIEEYRNKNFRYQITENGILIEEMVYQLIHQKHTARGALDEKGIRTLLRLLEKLINEPEDIVELWQKIREEFRKVGEDTANYIGYITSPEVDSRMKTEQFLVYKDKFVSYLRDFISTLQNLYHQFIVVVKQFDTIEQGKLIAGIYQKEQEVPMMDQITYEEVQEQVLGEIQALKNWFIGTADRPSEYENLMQQTDQMITKITGLIYYFGQEIHQYQSRNKDYLHLARWFYQAETLEDAQKMYAGIFGLEHSRHYYVNEGSNTTSNRADSWALLPGKLLFHGRGRGVGQERRAKSFTLNKVEQQKQLAEFKKQQIQFRQKIDSYFQEDYLDFSTIQSLDKQTRTVFLKWISLAISSYMPTAIQKQTVITQKITTELDFAVMVTVDLTQDITVSCEDGQLEMPKVEMRRVV

SEQ ID NO: 39257 - protein, 370 aa, Enterococcus saccharolyticus subsp. saccharolyticus ATCC 43076
MKPEEWRRAFKLLFENFWIVRTVDFDSYNFLRRHQNELQKELRRRFGMSLVIRQQYIQLLKRPHKLASWMGDIGFQSSFDYALFCCAMAYIEGLENETPFMLDELIRDLELLAPEEIFLDWTNYNQRKSLVRVIKKLQELHLIEKIQGEEENFEQSEMNQEVLFTTTTQARAFLSRAPQSYIAYESFEHYWQDLQTSRNLEGNQLLYQRLMMEPVIYRTAENEEIFVRLRNYYFHTQEYIEDYTDFYFELYRDYAAFTLEKREGWSEVFPSRRVVDEILIQLATILRADGADYSVYGVIELTVEDWEVLVRKLQQSYSSYWSKEFKEMSLEQLSVTLLNRAKSWQLIEENETISILPVFGRLIAEMEAKI

SEQ ID NO: 39258 - protein, 1359 aa, Enterococcus saccharolyticus subsp. saccharolyticus ATCC 43076
MSKWLINRVGLLNFWYYQNQIFEFANGKMLLRGTNGSGKSLTMQSLFPVLFDGDTSAYRLDSFGSRDRKMDEYLLGEKNVSEEDERTGYLFLEVKKENREEYLTVGIGLHARRGGKLSKWFFVVENNQRIGIDLELYEEIRKDELVPFTRIKLKNRLEGKGRLFETQHAYKKFVNERIFGFSTMEQFDELIALLINLRSPKLSKDFRPTVIYGILRDSLPKLKEEEVLTLSKTIEQLEGHQERLGSVTTEIRDLDRFAKVYIRWQEEFIGQIAEKWLEIRNTKNRRTRDVQTLSEENKQVMLELNQEEVLKIENNNQLKALEQIIEELHQHDGINLVRRGEELKETLDSIAQDIHNQTQNKQLKQQQLTDYQQTVDAQQQQREKYVKEMEEYLEDNECEGYATLLHLELLDSDYTKKFQATLSEKEYVYWQSEITKRKKHFQELSQRIQKFEYLERQLRTEERALGEIQQKLDELQRDMRHWQQTRQDEIEHWKQALESWRQHAAFPLSEKQSATISYQMNLLLEEEIREEQVLALVTESYQQALTDNQTQLVALESHCQEVEQKKQRLQQEIREWEAQKMPVVPQSKDRQKNRDQLTGKNYVPFYQSVDFLPSVSQNTKDGLEGALFASGLLDSLISTEGLLLADDSQILPKPKFFTTTLSDFLTVNQEIDPILQPLVADILQSVVVDEVDSELPSIFQEGHYYLANIKGQMPIDYQASYIGATSQARYRQTMIANLQQELAVWSEESHQLAMRVEENKTIRQAIQQSYQQRPKGTEVYEAIDQKNKVLNEWQSEQGVFERKQQEVNRYIQQMRQETIVLHDLAAGDGLALKSTVYQEMVTYAENYSANIKDAYTQYQLLSSNYQHMDSLQKTVRLYQREVEELIQMIDELNAAYHRHERFVKENLKQQEIANVEALQQQLHTARQEKHSRDELRNRTEDNIILLSQKVAENQVKLTANQEELALITYQERLWQQLFEKEVYQMTNDSNYQNQLVTLAREKRRTVDVKRLKSRSDNVIKQFSFIREQLPDYQPSLNTVTCVDIPSENQQLGEFLYYNQYQKPAFLSEGQTQTVFDLLEQLKAQKLTLQDLLQKDDEKLFKRVILESVGNILRVRINQSMEWIEKMNRLLQEQKNSSGLSLSIHWKGLASTSEKDLGTKKLVSLLQKPVTLLSETDRLAISRHFQEKVQLAQDIAQQNEENRSTLFQAITQVLDYRDWFEFELTYKRANEGYQSQTLSDKKFNQFSGGEKAISMYLPLFAAVHSRYSDAKEFCPKMITLDEAFAGIDDRNIAELFKACEQLGFNYVMNSQALFGDYPTVSQLMIYELLRPQNINLVTAIRYYWDGNQKHLLLEELIMDE

SEQ ID NO: 39259 - protein, 411 aa, Enterococcus saccharolyticus subsp. saccharolyticus ATCC 43076
MNNGDFFNKPIFFLLAKECHRRYYLNGDFGKSIQIKSLGKVDTLPLAQFLGYTPLEWRKKKQLSIPEFEQALTESILSWTIVDFITFLIKEELILKADVNKQNEDRYMQFLNKLETIDPLFCRQLTDKQLQSWFKKEEMSWDSFKIVADALKNLPKKYTRMPVFAFQQTGNPHAFDEGTETGNLFLQVLTTYSTADDSTEIAETEHKHQLLGEFYLLRDDIKNYVAASGLLGYKEDRNEMWYQACLTQCSWNIPLKEILQTTTIQPFVGNKVLVVENSGVYSILIDRFPDVPIICSSGQFTYAVWCMLRKLVASKTQLYYVGDMDPEGLIMAQKLLKLFPDHAQTIGMSLVNFTEACTEVKLNERRYKKLRAIEDVQLKEIAQYMQQTQTIAMQEGFIELLIEEITEVFVS

SEQ ID NO: 39260 - protein, 489 aa, Enterococcus durans ATCC 6056; identical to SEQ ID NO: 39252

SEQ ID NO: 39261 - protein, 381 aa, Enterococcus durans ATCC 6056; identical to SEQ ID NO: 39171

SEQ ID NO: 39262 - protein, 1385 aa, Enterococcus durans ATCC 6056; identical to SEQ ID NO: 39172

SEQ ID NO: 39263 - protein, 426 aa, Enterococcus durans ATCC 6056; identical to SEQ ID NO: 39255

SEQ ID NO: 39264 - protein, 490 aa, Enterococcus saccharolyticus subsp. saccharolyticus ATCC 43076; identical to SEQ ID NO: 39256

SEQ ID NO: 39265 - protein, 370 aa, Enterococcus saccharolyticus subsp. saccharolyticus ATCC 43076; identical to SEQ ID NO: 39257

SEQ ID NO: 39266 - protein, 1359 aa, Enterococcus saccharolyticus subsp. saccharolyticus ATCC 43076; identical to SEQ ID NO: 39258

SEQ ID NO: 39267 - protein, 411 aa, Enterococcus saccharolyticus subsp. saccharolyticus ATCC 43076; identical to SEQ ID NO: 39259

SEQ ID NO: 39268 - protein, 490 aa, Enterococcus cecorum DSM 20682 = ATCC 43198
MENKILQASYLTAENVERYRAMMRIFYVRQKELRGILFRPDVLELMQQYYQPDYSMKELEQDIEQLVSWGNLTKQQIMVQPKSIEEYLNSNFQYHISPEGQLFEELAEKLINIQNEVRGELNQNDFMELYHKIQEFNALSDESQLLPSWQKVIESFEKISSNTTNYISYINNNAINTHLRLESFIIYKDQFVRYLQDFIIIVQNLYYKLLHEIERISQEKFVSVAKASYEKNQLRSFGQNEETEEEMLQRIKGQYQALLYWFKDTEEKASTYQNMMEQTQIMIGKITDFARYYGSELKQYRSRKKDYLKIAQWFMQESDLNQAHKMFAGIFGLQHTRHFYVPESLQSTSNRDDLRDLAPAVLSLGTRGRGARSERKSKPVKFDLELQKQQQKEYLEKQEAQKQQVLQYFDGNKLDLKAVKVMDKKTRGIILKWISRGYYSSNHLLQTEYGFMVRLHIQKEDSIVLKGEDGDLQMPHIVIERMERNESGNF

SEQ ID NO: 39269 - protein, 373 aa, Enterococcus cecorum DSM 20682 = ATCC 43198
MNQETFSTCLNLLFENFWIIKTTQPEEYRLIKRYRKELDIELRKRFGLSLLVRPQFIQLFRRPFHLQEWMGIEDFKDVMDYVLLMHAMAYIEEQETNTYFLLNELIESIERDLPEDYHLEWTNYLHRKSLVRVLKKLIDLAILEVIQGEIELFEQNEDRNILYTITTQSRYLLGKTPNAFVKYEGFDDFWQEIQNNQLEDSNQALFTQLMCEPVLYRNAENEQDFIRLRNYQSVFARFVEEKTDYQFELTKDVAMFTLDKRDSSRDIFPSRKVLDEILVQLQTVLFDQEQQVDTYGVGLFTMSQWQLAVEKLKQDFQSFWSKEYKELKISELANRLLERAQEFQMVKVIDEVIYLQPVLTRMVAKMEDKRDEK

SEQ ID NO: 39270 - protein, 1352 aa, Enterococcus cecorum DSM 20682 = ATCC 43198
MKNKWQINRVGLQNFWYYQDQVFEFAQGKLLLRGSNGSGKSVTTQSLLPPLLDGITRANRLDSFGSTSRKIEDYLLGEEEVSGKDEATGYLFIEYKKTNSEEYFTSGMGLNFKRGGQLRKWFFAIDDHSRIGMDFNLYQSSVDGRIYLSRLQLKNLIVDGKHGKLFDDAKSYQRYINDRIFGFQSMEQYNDLIQLLIRLRAPKLSRDFKPSVIYEILQSSLPVLDSDTLLPLTQTIQNIDDNHDQLDTLLDETKQLSRFLRYYQQYQEELTAQIAENWLEKDAIVQDISAKLTQLKQSIDSLNQELSQKENQLKELKIRQPVLENTVSELKNHEGFQLIQRAKDLQDSFNKVRKRLEEIENQLHQKLEKKQETSKKIDELQTTMYQTEKELNDYLESASQYIEDLSLEYIHQNICAKLFEKLTREDEQYLMKEVTKKEQFIQKIIQQMRNLSKLAIEEKEKSNELAELQKILDELKRDQSQWQQGFVDEVQKWKEQINAWRAKSPVMIADEVIQQVYYQLDQIQVTDEFVSEVFLLPLKTVFEQANEQILHHIQSTNVIIEQKESKLRGLQVEIETWKNERDPIPARSLIRQENRNHLNESQKQYAFFELIDFKSDITDEQKNILEGTLYSSGLLDALVAKEKLDLADDIQIVANPQLLCSTLADYCEVAADTPGELVELVAEFLQTILVDEGKEGCPSIYLDGHFELAGIYGKMVPNYQASFIGKLSRERYRQQKIAELTEEVNQLAKEISLLQQQLETYRLEQSRQREYLSLIPDTEQIREAMKQYRSVSEKINVRIEEIQRKNQIYLALKQKIADVNREIMLQTQKERITPKLESYEEALVFLKNYQADMQASFRQYDQLYVQKKHEKELSQQLADIHQDIAIIEQSNQQYLQEENTLQQQITENTAQQELQNISEIKQRINEKEEELTEVKDKIEETRNQKEQLNMQLALEKSQYLLQQENYEKNAPVNILWKKLIQTHLQIEDTERLQREAQKIARPKDFDLLFKNERKLEDEFRYLADNVREYQPKMSREVDVSTDLTQEDDSIQTFKNYSQRLIATFRLDQQSLGPNELLSFLENQIAIVKNTLKADDEKLFKQIIFDSVGKVLRALIERAFIWVEEIDQLLKSRKNSQGLKLSLRLKNIGAQNEHELGTKDLIALLRKDPITLNESDSRLLVEHFQSKIQDAKELIADESTEGNLSSAIAEVLDYRKWFTFELQFRRANENYPWRPLSDNQFNIFSGGEKAISMYLPLFAAVYARYEEASDYAPYIITLDEAFAGVDELNIEDLFATCEELGFNYIFNSQALYGEYASVSALATYELIRPQNAPVVSTIKYLWNGHQKQVSPIE

SEQ ID NO: 39271 - protein, 413 aa, Enterococcus cecorum DSM 20682 = ATCC 43198
MSKLQAKKYFQEPIFVWLAQRLRKNYYHKKAFGSRVKLPNDVDLLPLYRFLGLGSVQSRSYQQLSIKQFEAALQQSKFELSLSEYVYLFDDTELIDKETEKQNYEASFQEFLQKLKPFSLDFEHLLSKKQLQEWFEKENLSAFQQVDIAFSQLPQDFTRLPFFAYQITGNPHAFDKSQPVGELFLQILSTKYLENIRQDSDFLAQAEIEQLLYQQVYLLKDDILNFVALHRISGYVNHQEVPVWRSIANSDMSWNASVRELLKVDELRPVNYPFVILVENSGVYSLLLERFPDLPLLCTSGQMKFAVWVALRKLTQQQKVQLYYAGDMDPEGLLMADKLSKAFLKRISFLAMDKEAFEQGKERKIYEMNRLKKMNQIENEGLKQLIPLIQQNQVCYQEGCIDYLIQQIEQILS

SEQ ID NO: 39272 - protein, 490 aa, Enterococcus faecalis 06-MB-DW-09
MPQFFDDPSDYKKMTEVTYLSADTNHIRYRMIMRYFFVQHERMRDFIYPEDIFAFMHKQSILNYTEEHLTQDLKQLVKWKNIAESYEVKNPRTIEEFNRRNSRYQILPISVEIERMMMRLENQGERFKGSLDVRSFEKLHHVLAEFIEAELDEQQLMDTWQELVSRFTTVKEATSDYMAYLSSEDADFTSERGKLLEFKEKFIRYLRDFILGSHQMAAKIRELLTQKNQVHKRLIQLSTLPEFSPRLEADIQTPEQKLFETQELFQSIHDWFIDRPIQLSEYSLLNQRTDEMIRKITRAIRDLGEERAQRSSRKKDYLHMAKWFHECSTLSEAHQLSATVFGVENSRHYWTQEVDSSDIYSDIWQLEPSVYYLKGRVREYKESTKSTSFTMKQSEKDALTQEYQAQQEKMRALLKTYLIDGEIQPSKHSLIPQEIRRTFLKWFAQGILSNGGLFTNEFGERLELKRLDGSFDLISNDGRLRIEDFKFVMK

SEQ ID NO: 39273 - protein, 382 aa, Enterococcus faecalis 06-MB-DW-09
MEKKEQIKEALKLLFNHYWIIRDQQMEEFALLKGVESELLQLVKERFGYALRFTPDYIKLEKIPVEPKDWMGIQAFQSPEDYALFCCLLAFLEEQSRSPFFLLSHICEELLRLYPIKDAINWQNFTHRKSLVRVLKKAKEFHLIEERDGMIEQFGQDESAEVLYHATGYGRTFMRPYPEDIASFADSTQLKAIDQQIFQQENAQRYLAYRRLFLEPTVLRSDIDESLVYYLRNQRKAINDFAENYTDMTFEVYKDVFQVTADNSNQPHVFPGTKALDDILLQLGTIVRTKYYVPESSGIISLSYSQWLQLVEELFQAYHNGWSKEYRETKPIDVLAQELLSYGSQWMLLREQADEVWLLPQLARFSGEYNDDFNKKEQLDEK

SEQ ID NO: 39274 - protein, 1363 aa, Enterococcus faecalis 06-MB-DW-09
MKNERWHLHRAYISNYWYFDEASFEFSKGKLLLRGANGSGKSITTASLLPLLLDGKIAPSRLDPFGSASRKIEEYLLGEKDLSTHNDRTGYLAMEYRYGDQEVYFTSGMGIRARRGKSLDRWYFILTDNSRIGLDFPLWHELGSNQRRPFSERELIGRLNNRGRITKKQKEYAEWINKYLFAFDSMETFNQMIQLQLDIRKPKLSKDFAPTEIYRILEEALPQLKDDDLHEVSDSLENIETSKNQLQQNEKDLVDLEALKHAFDDYHLQVQGKYATHTLRTKKKTAEFQQLLHEKMEMFEQAQKLLEQSIDKRVTLDSEQDLLKEKITALEHHDLFRLEKEQLQAKQQEKQLNVRLEKVTSNMLKTRNSQQQYQQDCNELERQLDQKNQEQQGFLLEMEDHVEGTGFKQHTLLVEDFNRLGYEMNLQYWRSALGNYQKAVGQLLDEVYRLQQTKQQKAATKESIDQLAKEHERLSFELHHYEEMFQSELTKTEVALAQWQKILPFSFSNQEWQQMLQRLNTLFSQTASYEQVKEPLIHAYQQYQLGQKEIIQEKRLELNQLDKIGKQLYDDLSTWRQKKLPEPQRRVEQTADRLRLHADDKKVVSFYEVIDFTEDITQDQRNRLEAALYNSGILDALVCEKPLPLEDEQQLVPNPQLMAHTLADYLEPAVGESGISEGYVLDLLQSIVVESEDPTVAAVDLTGTYHLGIYRGKASNRQKSQFIGKESQKQFLEAKIAEIEGQILRNEAAKEEKQKKIDAVQKKITNTQRLFEQMPDCKELEAIQQEINNRQKMVIENQQRQLFQEQQYLQFQEQQKVLQIQIRQLQETHDLIVSEDITALEKVKKQLADYQGAFEDFYDAFTGGKSLPNQIRQYKEFLATTRERYEQEAEEQQALDRQVAHLQKKIVSIEEQLALEGFEEIRQQIKAAVKKQEENQQQLHELNTTIIPQTTSRKDALEKEVRENKERSEFYELLYQTWLNVAERELLRYQQEHLPLNEVAEHYQGEETLKKAATMLKRVQREKMVPLGQYSPELVESAMTSIETLETREWSDTLISEVQLLQADSQNEVLYLLDEQNHRTSVMDICQQVQAKIEELKFFIDAEDHKLFEEILLNSIGNSIKGLISKTEQWVKKMNAVLKNTKDENRLRLSIRWVPKTSDREGEMHTTDLVRILRQPAAMLTTEDLERMIRHFREKINYAKTIQGNREEGEIQTLHEVMKEVLDYRHWFKFILRYQKDNEPERELTNPRFYKLSGGEKAVAMYLPLFTAMYARFEDAKADAPRMVCLDEAFAGVDELNIADLFGSLEDLGFDYLLNSQALWGDYDTVSSLNIYQLLRKANSTTVGLIQSHWKGKKEPLGEKNED

SEQ ID NO: 39275 - protein, 415 aa, Enterococcus faecalis 06-MB-DW-09
MKTELRKFFAAYESYHKVMEMAAAKYYRYGHFTGTIPLTTFTEKEQVEIADFLGVASSELLQKKKLTLKAWQKAYEESRFHQIAFEEAVELVTGQKLRTKGFEQAQKEAERKQYVDYFSECEGLEFVSPKRQLDFLRQQVTRTELDLLGRLIQALPKELTYLPVYAQQQLGNPHGLDRQMRIGKLFFTLLIDLCQLTRETNESATEYRSRIYQQQNLVVDDLMNFVTISNLVAKTQEGTDHPMWQGACEYQVIWNVPIKALLDIETVRPRQGNTVFIFENSSLYSALLTAFPVLPSICHQGQFRLAMWRILALFPETTHFFYASDMDPEGLQMADKIKQRYQERVQFLFMDQQSYLSYPSEKDISNSLPKLTSLIDPNLKAIAESMKEKKVASYQESLYEKYVDFLSKWEKSENI

SEQ ID NO: 39276 - protein, 496 aa, Geobacillus kaustophilus GBlys; identical to SEQ ID NO: 38981

SEQ ID NO: 39277 - protein, 398 aa, Geobacillus kaustophilus GBlys; identical to SEQ ID NO: 38540

SEQ ID NO: 39278 - protein, 1373 aa, Geobacillus kaustophilus GBlys
MANPWVLHRAGLINFWYYDEQYFHFADGKLLLRGSNGAGKSVTMQSLIPVLLDGKKTPDRLDPFGSRARRMEDYLLGEKDVVNRDERTGYLFLEYKRKESDQYVTTGIGLRAKRQKSLDFWGFVLFDNRRIGYDLQLYKQEKTGEKIPLTKRELATALGAGGTVVETQKDYMELVNKHVFRFESLEAFQELIELLIQLRSPKLSKDFKPTVIYEILESSLPPLTDDELRHLSDTIENMDQAKQQLEQLERDERALKRLCDQYRLYNEYMIAEKATEYVKAVKQAEQLAAAQHRLHDEEEQARKTLDELDESITRLRREEDVLRSREIDLAGHEVFQQAEKYEQLKSERERLQERWERHEQTIAEKERLERQHRRRLDESEARLDDLERKLEDELAQLRADAEEGAFSLHETNEDDFHRHRQKQQEFSFAAWKQEADRHIEQLEELARLWRRHDDVKRRYEEASTEAGERRREMDEWRHQQQKWEELLEQEKERFEQAVLAWVEQGGIDVSEADIQAFLRQMGALYELYSLDDLKRPFVQAYYDAVGKKKDEKWRLEHDIRLLEEKRAEREAELRQWREQRDPEPERDEQTTAARLALEREGIPFVPFYAAVEFVDDVPDDVRERIESALSHAGLLDALIAARDVDVDCDRVLIPKPVHMVHTLADYLRPDADAPVSAERIDEVLRSIVITDAEQEGGMTIDETGRYSLGLVRGHAPRRARAMFIGRAARERWRLENIAALEAEIAAVGQEIDRLRREHQAVGAAIQALADWFASFPSDRDVRTAFEEGQEARRQAESKEREWKRQEEKAALLAREWKQIKQQLHDESAELDLAFTLDGCEQAQLAMKSYVRHLHELEVLYRETRHTEAMIAQQRERLAALETEIDEAKGERNRIRDEKERISLEIVEMERTLAQMGADDIRAEIARIQERLAFLRQEIPRLVNERARTEQRLMRLVEEREKGAQREEFACQLAAMWERSFADEAALGLVDLDRSRSLLEQAREAKQRYEAVLKETRSSLLARLNTVFFQESSNLTEYRATFERLAEQKESEWIAAAPDDEMAMKAADWREKQERHVIYLDYKGQRATPFAVLAEVERDIALQHEYMKEQDRELYEDVILKSVGRILRSRIQRAERWVNDMNKLMGGLDTSSGLVLSIQWKPKTAETEAELDTKELVRLLRLDPRLLREEDLQRVTNHFRSKIARARELLEERGQGSTLHQIIKEVLDYRKWFSFTLYYEKTNEPKRELTNHRFYQFSGGEKAMAMYIPLFAAAYSRYQEAGDDAPYIISLDEAFAGVDENNIRNLFGLVEQLGFNYIMNSQALWGDYDTVPALSICELVRPRNASFVTVIHYRWNGRVKQLMVNDKEWETIET

SEQ ID NO: 39279 - protein, 406 aa, Geobacillus kaustophilus GBlys; identical to SEQ ID NO: 38984

SEQ ID NO: 39280 - protein, 496 aa, Geobacillus sp. WSUCF1
MDATWLKPIVETKYLSTENAHRYRAILRYFYIQHERMRQFLFPEEVYAFLKQHEEFADYTEDDLQQDLDQLVKWNNLIARQETSHVRTIEEFKKKRFRYQCSPYTVEIERMIRTLEQLGDSFGGSLEKTRFDRLYASLSRMEAIIASDFQEQADEMHQVWEETFDYFKKIIQNSADYIAYLHSENLEERMTSESFLVYKEQFTAYLRDFIVALQKTSMQIEQLLEDLPEEGVRQFIERVVDYERSIPRFADALPPRAVQIEEKWETWRSLCEWFLGRNGRESELSFLQYQTNEAIRRLTRVVQRLGERHHHFRSRKGDYLHLARWFSRLESIEEAHCLSAVVFGCFHTKHLVADTEATDNIYRDVWDEPPAEWVTKPRVRHYGEKKKPQAIEDKEREKEEARLRYLEEKAREEAALRQLVTDGKIVLADLPEVTPYVRKTLLGWIAKAMGREGQAMKTENGWVVKVVNKEGTICLRAEDGELVMPNYEIHVLSGGE

SEQ ID NO: 39281 - protein, 400 aa, Geobacillus sp. WSUCF1
MRMETAFDDKAKEALAALFEQFWIIRDQEPDLYQLVREREHVLKRYVEEKFGYRLIVHRYFAKLEKIPADPEPWMGIESFQEPLDYALFCCLMAYLEGKTVEEKFLLSDVCEEIRAMYPGDLPVDWTNYSHRRSLIRVLKTAEQIGLVRRMDGEIEAFAQHVEEEALYEVPVLARYFMRTYPKDLLQYESIDELLAEEWKASPQDYRRHRLYRKLFLSPAVHRTEGDEQDFYYLRNFRHRLRDDIEAHTPFRYELYKNAAMLTLPERQAPYTTFPDQKGTSEIILHFSALVRERLGEYPPDEYGRIRLTFEQFSAWLADCRRRYGAGWGKTYRDMSAVELVREMLAALNEWRMADVEHGTGMIVLYPLLGRVSGRYPDDFDAKEGEEHGESMGASSRGAD

SEQ ID NO: 39282 - protein, 360 aa, Geobacillus sp. WSUCF1
MILTRKRGRNMANPWVLHRAGLINFWYYDEQYFHFADGKLLLRGSNGAGKSVTMQSLIPVLLDGKKTPDRLDPFGSRARRMEDYLLGEKDVVNRDERTGYLFLEYKRKESDQYVTTGIGLRAKRQKSLDFWGFVMFDNRRIGYDLQLYKQEKTGEKIPLTKRELAALLGAGGTVVETQKEYMELVNKHVFRFETIDAFQELIELLIQLRSPKLSKDFKPTVIYEILESSLPPLTDDELRHLSETIENMDQAKQQLEQLERDERALKRLCDQYRLYNEYMIAEKAAEYVKAVKQAEQLAAEQHRLHDEEEKTRKALDELEESITRLGREEDVLRAREIDLAGHEVFQQAEKYEQLKAERQR

SEQ ID NO: 39283 - protein, 257 aa, Ralstonia solanacearum SD54
MARGWQAWRERWKGLRGWFVTTGHEPPQAELLRSKARAAIPQLLTAVSALNERRSGRSDRSADFRMLAGWFAACEDDSQAHRLARAAFALNPARHFSLNPALAPGVQDLPASTPWAEAPPLRIHPRLREYGEAAPRGALPRVQARDEQRRLLAAQLEQEHAEIEAARLRLATGRATLLSELGALGTHDFALFLKLLGEALTAQMSPDAPVETQSGDGLLHIRLQPLASGTQAMITTPTGVFRGRDHTVTITRMEDLP

SEQ ID NO: 39284 - protein, 416 aa, Ralstonia solanacearum SD54
MSNDSHDIGRQQARHRDDERTQALRALLMTPLMTPAHESFAAVRRHADELRAWFARETGWTLHIERDCARLYKRPADLQDASRGLPGYERRRYVLLCLACAVLERADPQITLRVLGDRLLALAADPALASRNFHFTLGAAHERRELVAVCRSLVELGVLQRIAGDEESFVRSTGDAADSGDALYDVRRRVLAGLLAAVRGPSTWPAEQTPVSLDERLASLVAEHMPDSDDGLRTALRHDLARRLLDNPVVYLNTLDAELRAYFVNQRGAMATRLCDATGLVAEQRAEGLALVDEDGELTDVAMPAEGTEAHATLLVAEFLAGRSRADAQAPTTLDEITAFLADARTRYGSYWRKSAREPGAERELTTVALERLLKLQLVARMADRIQPLPALARFALGETDIRAPIRSATQSNLFE

SEQ ID NO: 39285 - protein, 1379 aa, Ralstonia solanacearum SD54
MTDTRSPALPIPTLTRWQPLRLGLVELFHYDSEEFWFRDGRLLLRGNNGTGKSKVLSLTLPFLFDAYLKPSRIEPDGDASKKMAWNLLLGRHERRIGYAWVEFGRVDEDGRHHYLTLGSGLSAVAARGQVDTWFFMLDERRINQDFWLMSPTRVVLTRDRLREALQDCGQFFDTAAPYRRAVDERLFRLGSTRYAALIDTLIQLRQPQLSKKPDEASLSNALTEALPPISNDLLADVADALNQLEEYRRELEEYEALERAVGQFNQRYQRYAATQARRQARNLRTAQTGFDNASRELNAAREALETTQADEQHADQAWRQADTVLTTNRTRLEELQNDPAMADAKTLEKADADSRQRRKEANTARQTCYDMQTRLERERQATRTRAQRAQRAEHAGRALAESREDAVQAAERAGLAPAYSANPLACADAHTLQPLALDTARQDLRRASIERREQVALLLRRCDETDHAEQTHARAQTQHDERADEAETAAAQREEADTAVDRQGHTLLDAWQRYLDGLRQLHCPDGADALEALAPWTVSLQGDNPARTALHRAQQAASLRLARRQAALQNDRHALEQERDTLRDERARLEQGEDTMPQPPHWRAPDIRAVRAGAPLWQLVDFRPGTPAADCAGLEAALQASGLLDAWVTPNGMLQDSDGGHAQLPHDAQWLTRERQPQSLAAWLRPAEAASDAPPRVDPTVVQRLLEGVACGAEDNPAAEAWIAPTGRFRLGALAGVWHKPGAEFIGYAARCAARERRQHEIDARLEAIDAALTLLAQDFAQLDADQREAADEWQCAPSDDSLRAAHVEAVSRAREFDMARQRLEHTDRLLRAAAEQWEQARTILERDAEDLTLPPARDALRAIDQALQMFGDCLHTLAVVVRELRDAQTEHAEQLQREQQAESDARHALEQSAEREALTDEAGIRLETLRASVGARVEELQRRLSDARGAVTSGETELRQRNDARRLAGEARARAEQKAEAADATLVERTAARQHAVGQLQGFSATGLLVTALPDAELPSMHAPWTIEPALALARRTEQALLHVKDDDEAWNRVQNQVSQDYTELGRALAALSHQAQAETNDFGLVVSIIYQNRPERPDQLSARLAGEISQRRELLTAGERQVLENHLQAEIASAVQKLLRDAERQVKAINDELDKRPTSTGVRFRLQWETLPEGADGAPVGLEAARRRLLNTSTDLWSAEDRRVVGEMLQQRVAAERSRADADQGGSLLDQLARALDYRRWHRFRVQRWDGQWRPLSGPASSGERALGLTVPLFAAVSSYYTQESYAHAPRLVLLDEVFAGIDDAARAHCWALIREFDLDFVVTSEREWACSAELPGVAIAQLQRHEGIDAVHVSRWTWDGRNRRREDDPNRRFPNA

SEQ ID NO: 39286 - protein, 434 aa, Ralstonia solanacearum SD54; identical to SEQ ID NO: 39161

SEQ ID NO: 39287 - protein, 280 aa, Blautia hydrogenotrophica CAG:147
MLKEISGEQAAEILERVVLCERDILFPGSKDKEAVKESVRENVFGGWAALRQWFLSETGPSECSRVLEITDEIIRKIIQNAALIVQAQSWSVSRKNDYQKFIRLFRECEDLEEAHCLAAHLFGIQQVRHFRVCKDRSTESIYSSTYEEEAMEFWLRPRRRRHGSRLERTGFEDKGERKKSQRREYLKRSEEELYTVTQYIQGGCLELSKIEGKISKETRALLLRWIETAMLSGSGRGVTESGKFYQLQRTDSRCTLHCEDGDFSMPNYILMFGAREDGDI

SEQ ID NO: 39288 - protein, 378 aa, Blautia hydrogenotrophica CAG:147; identical to SEQ ID NO: 38753

SEQ ID NO: 39289 - protein, 859 aa, Blautia hydrogenotrophica CAG:147
MTAAEDNQELEIGKKDLKKILGKIEQYQGPGDYEDIRSVLRAIWWKKKEVLERERRSLKEQQIEGRIKIQGLKEERDRRVSDRQEQAREFLEKKGISCLLFYETVEFAENLDSETRKRVEGQLAASGLLDALVIAEEDYKRAVRELRGIAVVLLNPGGFKEESSLKEERFPYLIPADVGSQTLRQAVGRLLSCLSRQKVKLDEKGFDGRLVLYDNGYFEQGILEGYGTWKKARYIGEKTREEEKQKILRERKCELAEAEKELENWDARLKYVEQRLFRLDEEYKAVPTFAELEKAIGRAQVRREALEWWEAEAQPQERAAAQAKRIYDECEKVATKLCRLLPYGRKLEDYIRVKEEISLYIAQLGEWERAKLRQEMEENRCFHVQELLEREEQEIRKNSDCLRRSECILQELDVLALGMEEHLKKTGAREKVRRLKQIKEELFDQEEQRQDTLISLAVLESEGAALEKEKGQLWLEAKEWAETEKREKECFEAELALGLVKEMDEVPKCERIQKAVQWMRSADENRSAAEMLAALMKSFHEHLGTLCGYGICMEESSQRRVDGFWGKRQVLMATWKGKKVSLEVFYRLLKETVESTELLIRQRDRELFEEILSDSLGRKLSRRIQESQRWVRAMSSLMREMDTSMGLTFSLEWKPRPAEGAYELEVQQLNELLLKEKGRLMAEDMEKITRHFRAKIYAEKQKLQDSGQVVNYMDLIRGALDYRQWFEFHMYYYRGQERRKELTNSAFHRFSGGEKAMAMYVPLFAAVNAQYQKAQNVDHPRILALDEAFAGVDDKNIESIFQLMQKMGFDYIMNSQILWGCYRSVKNLNISELYRPGNSGTVTVISYHWNGCERLLEEQ

SEQ ID NO: 39290 - protein, 494 aa, Ruminococcus torques CAG:61; identical to SEQ ID NO: 38897

SEQ ID NO: 39291 - protein, 1236 aa, Ruminococcus torques CAG:61; identical to SEQ ID NO: 38898

SEQ ID NO: 39292 - protein, 431 aa, Ruminococcus torques CAG:61; identical to SEQ ID NO: 38899

SEQ ID NO: 39293 - protein, 497 aa, Firmicutes bacterium CAG:424
MEIQDKMRKPMLEAKYLNVENTDRYRPIIRLFYLKYEKLKYWLYQEEVFEELKEDPYFADYTMEQCQQDLAALVSWGNLVTIQDTRKVTTIEEFRNKKFRYQLSETAVEIERMVIRIENLFIEGSSLEPTLLERIRINLGKLEEMSVKEDEKLHAWWNDLNNDFIRLNQNYQDYMRELNSVKAEEMMKTREFLLFKDRLMEYLRSFVKSLQVNVTAIEQELRKVQEETVKNVLKKVTAYELSIPRMDVEIDEQMIYEKMSGRWESMVEWFAGKDGQESEAGKVFDTTNEIIRKITRYATRISEMSNQGSNRREEYKKVAQMFAKCRDISEAHRLAAVVFGVEKPLHLKGEMHRETDSINSSVYEENPHVVTVIPRVRTYREKAKRSGIIDRSEEKEAMRKAEIQRLEEERKLLRSYIKNGRLEFANLPVIEPYVRDMFLLWMSKALEKKNHRAKTEDGQIYYIEQADTKEYCTLKCTDGEFQMPCYTMVFEEREQGI

SEQ ID NO: 39294 - protein, 381 aa, Firmicutes bacterium CAG:424
MKVLEVLLNRRWILKSRERELYYQVKEALASGEEKKFLREKLGYQVLINPYMIKVEKLPAAPENWMGISDFRDPIEYVFFCLVLMFLEDKEAEEQFVLSELTEYVQSQYEKEQIDWTIYRYRRHMIKVMKYCVACGILDVNDGSEEGFAKDDTSEVLYENTGVSRYFMKNFTQDIMGYTGPKDFEKEEWIDLNEDRGIVRRQRVYRRFLMTMGMYKDIDTEEDFAYVRNYRNMIQGELSELFECELQVHSSSAFLILGENCRLGRTFPEENTLSDIVLLLFQLLQEEIREGKIEVPLDEQIRIPKENFQRLIEKCKERFGAGFNKTYREMTFAEFYREVSDYMENLMMIEQAYGDVCIKPVAGKLIGKYPKDFRKEGGNDE

SEQ ID NO: 39295 - protein, 1366 aa, Firmicutes bacterium CAG:424
MNSGKWQINKVGLVDFWYYDEEAFDFSEGRMLLRGANGSGKSVTMQSFIPLLLDGNMRPERLDPFGSRARKMENYLLEEGDEREERTGYLYMEFKRLESEEYLTLGLGIRARKNKKLESWYFCITDNRRVGQDIFLYKDVENKITCSKIELKNRIGEGGKVMETQSEYAACVNRLLFGFETQEEYKELLELLIQLRTPKLSKDFKPTVINEILSTSLQTLSEDDLRPMSEAIENMDNLKTNLDTLNESIRGARQIEKVYDQYNQIVLYDKALLFSDAVKVYESCQSTETKFKEELTQKTTALKEEKQRYQELVQEEEILKGEKESLTKSDAAKLKEQELKLAEELREKEEEQKTKERQEQEKKDKLLEAEERLKKEQEKNEVIWEEMETCLEEMEEEMEEIPFDDFAFLKKELLEDKIPDYSFGSHTQLLKDYTEKVETGKESLTEEKNCQEKYDRYLKELDVCQEERNAAEREVQQYERLLQETKAELTEQVYLWERKNQELSLVPEIMQEMSRKIQEYEQGKDYSEIRELAKPKLYEKERSFTRERLLLEQNLEKESQKLQELEEELAEWQNQKDPEPQQPECVQENRRLLREKGIPYQQFYKTIEFGQDLEAEHADRLEEALLQMGVLDALIISEEYRESVLALDSGVCDRYIFSDVSHVQENLNKVLDVDNGEHDILLYQSISNILSSIGFGRKTEQGTSWIDEQGNYRLGVLEGTVTGEYRARFIGVRAREQYRKEKIEELERLCKETKQQVEEIKAALEKNQRRLEQLQKEWTEFPKDEDLKTAAKELADWEYRMELAVRRVGEQQALTEKERKKLDEIRVKVRELCGKCYLSPRLDLFAAVLESLYRYKELLSDLQVAYGKYQNGIRYVESQREYREGIELDLDDIRYDLNRILLKVRELEGFLDSVRKQLALTDYEEIKERLDYCMQRLVLLPGEREGCVGRQNRLEKDADVLQEKIQENEKKKAELLERKEKYCRVFELEYRLGYVEQTFQETEDMGTLAKEVCSRFAGSFGNKKQSDVFGSLQEAYHQNRGYLLDYQITLSSLFGELDEESSFLDMSVKRIDISAKYRGTAVKFKELLEKLCEDAEALAKILNERDRELFEDILANTISKKIRAKIQASRRWVEKMNALMESMQTSSGLKLSLRWKNKRAEKEEQLDTRALVELLQKDAEIMRTEEIEMLSRHFRSKIEEARKIAGDMGAVQSFHATMREVLDYRKWFEFQLECQKTGEKKKELTDRVFFTFSGGEKAMAMYVPLFSAVVAKYTGARPDAPKLISLDEAFAGVDETNIRDMFRLMVEFEFNFMINSQILWGDYDTVPALAIYQLIRPENARFVSVIRYLWNGKKKVMVMDKIEEEV

SEQ ID NO: 39296 - protein, 427 aa, Firmicutes bacterium CAG:424
MAKMEPKKLAECLDYFRQRPVYEKLFLKFREKYTSLGHMGGKVVLSGLTLEEKQQLGGFLQKDYTENKTVTVSAELLEKRLGESRFSGISGETLLRAYFGKKLTVKKEEKQKEEEKRNACFEQILEGQEENPAGKWLKEVLENRGSGYELLMQQYRENPGKLRKILENVMRASEQLHYIKKKQLLAVFAAQATGNPHYFDTGETAEKLLILFLKSQFPGSYEKGISPAEERNHLLYQARILKDDLSNETLAYGLHAWKQDGSMHEGIEGFLKEQEPVRLTLRSLGGISEIRAQQKEIYVVENPAVFSVLTSRNPACAAVCVSGQPRLATLLLLDFLKENHRFWYAGDFDPEGLLIAQRLKERYGEALDFWKYEVQWYEQYLSSVRLSESRIKKLEHVYMQELQGIKEGIQKRKRAAYQEAMLQVYLE

SEQ ID NO: 39297 - protein, 516 aa, Clostridium hathewayi CAG:224
MKEKPTIKSLGNISELKYINADNVTRYRAIMRYLYLQYERLSYWLSPEQIYSGVMEWNILKNYTLEQCQLDLDQLVSWKNLTYRHDGTRARTVEEYLRKKYQYLITPYSIELERFLERLEGVKGYGGSLEPTLFDKIADTILDIYEHKGDYEPKAALEVWNSLYDSFQKLNQTSMDYIASLHTGTAEDLMMTSSFLMYKDSITLYLQDFVQALQRRSYRIEGNLKLINRDMQTRFFKCVLEGEWLIPKVEEFFTREEYQQNLERRWRQLCRWFCGDDHTQSEMFLLEQASKDAIKKIVRSTLRIQEKQRSIVSRRQDLDFLGKWFYHLEDVKEAHKLAAYAFGIFPTRHLQGEDNRSSDSQDISMWDEAAIERVIRSRSRKRGGKGSGESETIADNHLKKEALRQELVAYQKQELAFLIEMTKKGSVKVSELQCISAVARIQLLNWIGRCISSEGQAFYTSEGIKVTLYMPEEKHYVTLDCDDGTLGLLDYSFVFEIENQETWQNLLRGMAGDLDG

SEQ ID NO: 39298 - protein, 394 aa, Clostridium hathewayi CAG:224
MADGIEQRGFEDHTDMEERRKICMNALLNRPWIERDKDPQLYHWAREQYLEIRNWFANYPGYSVIMNRKLIKLEKVPVEAKSWMGFEGFKEPIDYALFTYGLWYLEDKSAGDQFILTTMVKEIKEFMNEQGLNVDWKNYFHRLSMARALKKLKSLNVLRSIDGQESDWASDAENHDVLYECAPCASYVLRTFRRELSSYQSMEELSDLPEEEDKKKRQLMYRRYLLESFVGLDLWEQDLFYFHGQKNHLIGQLDKMFGWGGTKYKEGLLFFYPELVSDMELFPTLSAISDLVLLFCGKIRTMYELGEVKTESVSLGKIRLTRGRIEQILLELQYENGYRWTKEYRSMKSSQLADAVCEHMEQWEFGSWQDDMFFLLNPVGGRYYTQYGEVEIEE

SEQ ID NO: 39299 - protein, 1362 aa, Clostridium hathewayi CAG:224
MKRWRMNRMGILNFWLYDEEVFELEQGRLLFRGANGSGKSVTMQSFIPLVLDGDKRPERLDSFGSRDRRMEYYLLGDSETGHMDRTGYLWIEFYNEDKQSYKTIGIALRARRGAAQMVFWGFLLEDGRRINQDLHLYDYPNWLETKKKVPLTRKALTEAIGAGGIVVQEQATYRELVKKHIFGFKDNNDSYKDLLKLLLEIRSPKLSKEFRPSSIYSILTNSLPALTEDELGDLSDVLEDMDQISERLEELQIQIQELEGLEKQYDNYNKVLLYHVSLDLKVLNHSFNERKKELDDCKKKLDITIACGIALKTQILKAELEIEKMQSELDYLQQSEGLEKPIELERLHTDYKKLNERYVAVKKRMADNERRVEAWQNEIAEKKVLRDELFQNQDSLLEELESYARVMEFYEHDIYHRQWQQVGDDYARCADNWNQDLLAHQVKLKTAVLIGEREREASLDMAKEKERWGEFYKKKSLAEEEYLSAEEKFSAGKMQLKECVIGWRQGLSQLEVSNENVGNILAALSELGKDNRNYETVRTSVYNLFLDQYQQLTNKVLVLEQQFREFEEKRELLQAELNSWRSHKEPEPLRSLSRNKCRGERAERMGAPLYTVCDFSDELTEAEKAQLETTLEQAGILDAWILPGGRMGYFAHEKDEEIWIEPCENPGVVTLSDVLAPCPSDESGLTKEDIALVLSSFTWSGEMDNMQGSMTSAAFNQIGREGFRLGALAGRNSTKEQAEYIGSENRQKAKRRMIDQLEQQVLELENKQDAIQEKIYQEHEKQDILTAEKESFPDDGEIQLCLDHLTSKWHLFQAAIKQEKEAEIIYHKKEADWKERKVELTEITSAWTRLKTLSTLSEAMNCANDYKTSLSQLKTEYVHYRSLQNDCENYQGYIDEVNEQISDNQLELSGVRKSQVLLENQISQLEELIEAKGLRDIFNKIDKCKQTKNDLAKEVSKLHEELRENDKSQGSLGAQLDARQEHLSEITENLEAAIVQWQAELNLGLIENMDTYNLTERRDIMRLADQLVTEYKVVWGNMVKETVISDLITEFNKANVNLREYALERESLENGRAIIRSNRDRMNPMTPRELLKELREKEAEQKLLLTEQDKKLYSEIIIGSVGKSIQLKIHQAFDWIDKMDGLMKQRNTSSGLRLSLKWVPLPSRSESELDTETLVKLLLSDTERLDDSEINQMIEHFRKRILLAKESAKEEQGSLRKYINEMLDYRTWFTFRLDFRKGDQSNYRELTNSRFNVLSGGEKAMAMYIPLFAAANSRYSKAEDDAPKILALDEAFAGVDDSNMRDMFDLLTDMDFDYIMTSQVLWGCYDTVPSLAIYEIHRPKDIDIITLLHYRWNGKQKLYVEN

SEQ ID NO: 39300 - protein, 663 aa, Clostridium hathewayi CAG:224
MEHKRKITAEEYYSDPNLKRMLNAVFNKYRSYGSGRGKIKLVISSQAEAQRLQTFFGPRVRGLLGVGDQLSMEMSVIEEELGKRFMLTVPSLYEILFHEPLLTKKESLAKADTEWETLFTNVVEKLQNEENINIVDKAFCELTYDWLYRLWKKEPGSGYRILQAGMKDYNAALTSLKICLEALWYLLMDLERLEQENVKKSDKIYISMLATFVAGKHSLDEKKTLAGRLFFRALENVYSQRYRENGASDPLEHVPAFMRKRMMYRLYHLSDDTTSSLFHRFTLDIYESMKKETVNLGNVEDMGDFEIKSNLFLIENPSVFHYLVDCLIEYVKVNNIPKQLIRDRFPIIICTSGCFRAAVLEYVRICIERNSKCRVYFSGDFDRAGIEMMEKLKEYFPKNVSPFQMNAKTYLAGLNGKCRELSEKDREILAGKNSELARLIALHGKKVYQESIAYDLWEVLLREIQCVETVMYQTYEEGKRTMEKRKVEMFLSYCWQDDKIAADIFAYLNNVTNIHIHRDTIDIKKWDSIRDYMNNIENMDYIILLISDAYLRSRNCMYEVLEVMRDRKYKNKIFPVVVSKEIYNPTVVANYVKYWQDQQQQLEDTLSSLRIQNLGNLNQDLKIIQDIAANTADFLYLVSDMNNPEIAEINVEITKKLEEWGVI

SEQ ID NO: 39301 - protein, 496 aa, Ruminococcus gnavus CAG:126
MKIQEKMRKPMLEARYLNVENTDRYRPIIRLFYLKYEKLKYWMYQEDVFEELKEDPYFQEYTMEQCQQDLAALASWGNLLTIQDTRKVTTIEEFKNKKFRYQLSETAVEVERMVIRIENLLIEGSSLEPTLLERLRISLGRLGEMSQAEAEKRYGWWNDLNSDFIRLNQNYQDYMRELNSVKAEEMMKTKEFLVFKDRLIEYLRSFVKSLQVNVTAIEQQLRSVDREVVNQILQKVTEYELSIPRMDTEIDEQMIYDKMKGRWESISEWFSGKDGMESEAGKVFDTTNEIIRKITRYATRISEMSNQGSNRREEYKKLADIFGKCRDINEAHRLSAVVFGIEKPLHLKGELSRETDSINSGVYEEEAYAVTVTPRVRTYKQKARRSGIVDRSKEKEEMRLLMIRRLEEERKLLGSYIHNGRLEFASLPVIEPPVRDMFLLWLSKALERKNHRAKTEDGQMYYIERADVKEYCMLECTDGTFQMPAYTIVFEDGESK

SEQ ID NO: 39302 - protein, 381 aa, Ruminococcus gnavus CAG:126
MRTLELLLNRRWILKSRERELYYQVKEELSSGEEKKFLMEKLGYQVVVNPYMIKVEKMPAVPENWMGILEFKEPIEYVFFCLVLMFLEDKEAEEQFVLSELTEYVQSQYQEEQIDWTVYRYRRHMIKVMKYCVAVGILNVDDGSEEGFAKDDTSEVLYENTGASRYFMKNFTQDIMGYTSAKEFEKEEWIDVNEDRGIVRRQRVYRKLLMSMGMYKDAESEEDFAYLRNYRNMIQGDLAELFDCELHVHSSSAFLVLGEECRLGRCFPEGNTLSDVVLLTNQLIQKRVTEGRITVPLDEQICIPKEVFRAIVEECKEKFGEGFNKTYREMTFAEFYREVERYMEELMLIEIGADHVKIRPTAGKIYGKYPEDFLKNGGRDE

SEQ ID NO: 39303 - protein, 1363 aa, Ruminococcus gnavus CAG:126
MNSKWQINRVGLLDFWYYDEEEFDFLDGRMLLRGANGSGKSVTMQSFIPLLLDGNMRPERLDPFGSRARKMENYLLEEGDEREERTGYLYMELKRLESEEYLTLGIGLRARKNKKLESWYFCVTDGRRVGKDLFLYKDVENKITCSKGELKYRIGEGGKVMETQGEYAQCVNRLLFGFETQEEYKELLELLIQLRTPKLSKDFKPTVINEILSSSLQTLSEDDLRPMSEAIENMDNLKTNLDTLSESIHAARQIEKVYDQYNQIVLYDKALLFSDAGKAYENCMKNGKQITEDLAIHMEELRKEEQHYEALKQEEEILKEEKTSLDKSDAAQLKEQESKLKAELLERVKEQQTKEKQEQEKKEKQIDTEEKIKAETEKTERIWEEIESCLEEMETELEEIPFDEFTFLKNDILQDREKEQSFSSHHQLLNDYTKKVEQGKEVLLEEKNSQEKYDRCLLELDVCREERNLAEKEMQQYENLLHETKSELTEQMYLWEKQNQELHLLPETMQEISRKIESYEMGSDYSEIRELARPKLYELERQFSENRMVLERNLQEEQENLYQAETELEEWKNQKDPEPEQPDCVKANRELLKEKKIPYFQFYKTIEFDQILEEERRNHLEEALLEMGILDALIVPKEYREQVYALDKGVCDRYLFSDVAHVRESLQEVLEVENGENDILFYQNISNILSAIGFGDTHAEHGDSWIDANGNYRIGVLEGTITGEYQARFIGVRAREKYRKEKIEEFTGLCEQLRASVEELEKQLAENRARTEILQSEWKSFPGEEDLKTAAKEFSDREYKLERKNKRLWEHQELAEKERKALDEVRIRVREICGKCYLSPRLDLFTQAFLALHRYKEILSQLQVAHGKYQNSLRYIMSQRDYLEELELDLDDIRYEFNRICLKVREVEGFLASVQKQLELTDYEEIKERLDHCVERLGKLPGERETCVRNQAALRKETEVLQEKERENEFRQKELLEKKEKYQNVFEQEYQLGYAERVFVVTEDLEDQAKKICSRFAGSFGNKKQSDLFGSLQEAYHQNRGYLLDYQITLQSLFEELDGEGSFLDVTVKRIDILAKYRGMPVKFKELIEKMNEDAEVLKRLLSDRDRELFEDILANTISKKIRGKIQASKRWVEKMNTLMESMQTSSGLKLSLRWKNKRAEKEEQLDTRALVELLQKDVEIMREEEVESLSRHFRSKIEEARKISGDMGSVQSFHATMREVLDYRKWFEFQLECQKTGEKKKELTDRVFFTFSGGEKAMAMYVPLFSAVVAKYAGARPDAPKLISLDEAFAGVDETNIRDMFRLMVEFEFNFMINSQILWGDYDTVPGLAIYQLIRPENAKFVSVIRYIWNGKVKVMLTGEES

SEQ ID NO: 39304 - protein, 439 aa, Ruminococcus gnavus CAG:126
MKAEEKQKLMQECLQYFRERPVYEKVFQKMRGKYESLGHIGGKVVLTGLSLQDKSQLGGFLQKDYTENQSVTISAEAFEICLSKSRFSDISLEELLDAYFGKKLTVKKEERRKKQEERDAFFAEVQSGYEDTTGAKWLQNTLKEHTTGYEILQQQYNNNPEILREILKYVFEAVKQLPRMEEKELLPVFAAKLTGDPHYFDASTVAERLLFIILSACWQETKDRELSEAERKNQIFYRAGILKDDLSNDTLVYGIRAWKHNGNLHKGIEGFFQEREPVRLTLRTIGTFGGVHAEREKIYLFENPAVFSVFVKKYPDCAAICGNGQPRLATLLLLDFLKENHSFYYHGDFDPEGLLIAQRLKERYGESICLWNYRADWYERYLSDVNLSEVRMKKLEKVYLPELLEVKMQMQKRKRAAYQEAMLDMLEPEKNEWITRSVK

SEQ ID NO: 39305 - protein, 495 aa, Blautia sp. CAG:257
MKIQEKMRKPMMEAKYLNVENTERYRPIIRLFYLKYEKLKYWLYQEEVFEELKEDPSFAEYTMIQCQQDLAALASWGNLVTIQDTRKVSSIEEFKNKKFRYQLSETAVEVERMVIRVENLFIEGSSLEPTLLERLRISLEKMEEMASRNEEKLYGWWNDLNNDFIRLNQNYQDYMRELNSVKAEEMMKTREFLLFKDRLIEYLRSFVKGLQANVSAIEQKLRNMDRETVHQILEKATAYELSIPRMDVEIDDQMIFDKNQGRWESIVEWFSGKDGAESEAGKVFDTTNEIIRKITRYAARISEMSSQGSNRREEYKKVARIFHECRDIQQAHRLAAVVFGIEKPFHLKGNLQRETDSINSGVYEEAPGVITLTPRIRTYREKAKRTGIRDHSKEKEEMRASEIKRLEQERKLLKSYIKDNRLEFASLPEIEPQVRDIFLLWLSKALERKDHRAKTEEGQIYYIEQADVQEYCTLNCTDGTFQMPAYTMIFEEEKD

SEQ ID NO: 39306 - protein, 381 aa, Blautia sp. CAG:257
MNVLEILLNRRWILKSRDRELYYQVKEKLASGEEKKFLREKLGYQVIVNPYLIKVEKMPAVPENWMGILDFKEPVEYVFFCLVLMFLEEKEAEEQFVLSELTEYVQSQYEGEQIDWTVYRYRRHMIKVMKYCTACGLLNIDDGSEEGFARDYTGEVLYENTGASRYFMKNFTQDIMGYHSPEDFEKEEWIDVNEDRGIVRRQRVYRRLLMSMGMYKDSDSEEDFAYVRNYRNMIQGELSELFDCELQVHRNSAFLILNENSHLGRCFPEENTLSDIVLLFNRILQEKLQTGEIQVPLDEQIRIPREAFQRLAEECRERFGAAWNKTYREMTFGEIYREMADYMKELMLIEEKQDEIVIRQAAGKIMGVYPADFSLEGGQNE

SEQ ID NO: 39307 - protein, 1367 aa, Blautia sp. CAG:257
MNNSKWQISKVGLIDFWYYDEEEFDFLDGRMLLRGANGSGKSVTMQSLIPLLLDGNMRPERLDPFGSRARKMENYLLEEGDDREERTGYLYMEFKRMKSEEYMTLGLGIRARKNKKLESWYFCITDNRRVGKDVFLYKDVDNRITCSKAELKNRIGDGGKVMETQGEYAACVNRLLFGFETQEEYREFLELLIQLRTPKLSKDFKPTVINEILSSSLQTLSEDDLRPMSEAIENMDSLKTNLDSLNESINAARQIEKVYDQYNQIVLYDKAMMLTEALKNLEDCEKTEKELSESLMNREKLLIQEKQHYEALACEETVLKEESSSLAESDAAKLKDQEIKLTQDLDEKRKEERKKEAQEQEKKEKHLDAKERLRQENERNETIWADMEGCLDEMEEEMEDIPFDEFSFLRKELLEDRNPSYSFSSHNALLKKYTDKVEEGKEGLTEEKNCQDRYDRYLKELDVCQQQRDQAERSVQQYEKLFQETKAELTEKIYIWAHENQELKPEPDALREMTRKIQEYELGEDFLEIRDSVKGILFSKENELNREKLQLEQAHGKAQESFEELNAELESWNNKKDPEPEQPECVRQNRRRLKEQGIPYQQFYKIIEFDTGLTREQADRIEEALMNMGVLDALIISEEYREQVYSLDPGVCDKYIFSDVSHVKENLTQVLDVDNGEQDILLYHSISNILSAIGFGSREEQSGHSWIDREGNYRIGVLEGTVTKEYKARFIGARAREEYRKSKIEELTVLCEQEEKEIRMLEEAIVQNEERRNRLQREWLEFPKEDDLKTAAKALAECEYKLEISVRQLGEQQIITEKERKNLDQIRIKVRELCSKAYLTPRLELFVQTLDGLRNYKELLASLQVLWGNYQNGLRFVESQEAYLEELEQDLDEIRYERIRIQQKIRELEGLLDSVRKQLELTDYEQIQERLDFCMKRLLQLPKERENSVREQEALEGEIQTLEEKIKENGIKKQEFLKKQEKYQYIFQKEYNLGYVEKNFVITEDMDDQARKVCRMFAGGFGNKKQSDLFGNLQEIYHQNRGYLLDYQITLLSLFGDLDEDSLFYEKSVKRIDISAKYRGISVTFKELIRKLTEDAESLSALLNERDRELFEDILANTISKKIRIKIQASRRWIEKMNTLMESMQTSSGLKLSLRWKNKQAQREDQLDTRSLVELLQKDAEIMREEEVESLSRHFRSKIEEARKISGETGAVQSFHATMREVLDYRKWFEFQLECQKTGEKKRELTDRVFFTFSGGEKAMSMYVPLFSAVVAKYAGANEDAPRLISLDEAFAGVDETNIRDMFRLMVEFEFNFMINSQILWGDYDTVPGLAIYQLIRPENAKFVSVIRYIWNGKKKIMTTGSTEQRS

SEQ ID NO: 39308 - protein, 453 aa, Blautia sp. CAG:257
MTEGEKNKNLKECLEYFRERPVYKKFFSKWREKYAGLGYLGGKITLTGLDQEEKAQLSGFFQKDYTESRTVTISAQVFEKRLQNSRFAGISGEELLKAYFEQPLVIKKEEKQKELEKRAFYFNDIIKKSQGNTASVWLKLVLANHLPGYEILIQQYGGDPETFRSVLENFMAAVQRLTEMFREGNGCRELLPVFSAKVTGNPHYFDAGTAAEKLLTAFFSWQLSDTDSEKMTGAEEKNRLFYQCGLLRDDLSNEVLAYGIRGWKRDGSLHRGIEGFFLEKEPMRLTLHTMGSIEVIRAQRKQVYVVENPAVFSVLTARYPECAAVCINGQPRLAALLLLDSLKGSHRFFYAGDFDPEGILIAQRLKERYGESLHLWKYDKKWYLQFLSEVELNPRRLKKLEQVYIDELLEIRECMKKKKRAAYQEAMMEIYLDAVKSEESENGFVSSSADENE

SEQ ID NO: 39309 - protein, 494 aa, Roseburia sp. CAG:197
MQVTDKLTKALTEAKYLNADNVSRYRCIMRIFFENYEKLRYWLYQEEVYAQMVQDPFFADYKPEQCQQDLTMLVEWKNLNTIQDTKKVSSIEEFKNKKFRYQMSEYSVEIERLVLRLENLFIEGASLEPTLLERIRINIARFPQMAEEDINKVYTWWNDLNNDFVRLNQNYQDYIRDLNSVKAEEMMHTKEFLVFKDRLVEYLRNFIKGLQRNVGVIEEDLRTLEAGNKQQVFEKIVQYELLIPRMDVEVSRELLEEKTKGRFQSIYDWFVSSNGEENEAGKLFDATNEIIRRITRYAAQLSEKNAFGANRREEYRKVAELFLKCEDVQQAHRMSAMVFGLERPYHLKGDLVRETDSMNQGVYEESPFEVMLKPRVRTYREKSGRSAIRESAEEKQRTRRQMIEKQREDMRRLRELESGGKIDFSTLPVIESHVREILLKWISDAMENPAGAATTEEGQHYMLDMSRKEERCVVHCEDGNFTMPKLAIVFQEEA

SEQ ID NO: 39310 - protein, 381 aa, Roseburia sp. CAG:197
MKELEVLLNQRWVLKSENKELYYQLRDAIGDIRKYASDKLGCQVTENALMVKMEKIPVIPETFMGIQDFSSKEEYAFFCILLMFLEEKDTQEQFILSQLTEYISANMPGEPVDWTVYTSRRRLIKVLRYAVTQGIVSITDGADDAFMEDATGEVLYENTGASRYFMRNFSKDITDYGRPEDFLESDWFAMDEDRGIARRHRVYKRLLFAPGMYRRDGSEEDFEYLKYYGRRLTEDLEQNFDCHVHIHRGSAYVMLQDDGRMGNAFPGNNVLSDIILLCLSEIRTRIEQKEWKVQKDEICIVDMVSFEQMIQSVRQQHGQGFSKNYREMPDSEFISTVMSAMELWMFIKRDRPAHQVEIYPAAGKLQGRYPKDFTGGQKNEQ

SEQ ID NO: 39311 - protein, 1225 aa, Roseburia sp. CAG:197
MSKKELENRIAAGGQVFDRQVDYMEYVNRQIFGFDTVEEYKEMIDLLIQLRTPKLSKDFKPSVINDILSDSLQPLSDDDLRPMSDAIENMDQMTMNLKSRQEAQQAAQKIQSVYDKYNRLALYEKAKKYQDICSDIEAADREQKKRRTDIAESEKEIASLFDKYQEMQAKHDAMEKEKESLSKSDAVGLKDREAELVKEMKRQQGIIDSKNSALQGKQEQYREEEDKQKKEEDRKFEKEREICNLFEEMQTEADCMAFEEHSFFQKECEEHLEETIAFDTHEKQFSDVKNKIHKAFWILQETNLLEPRAEELLKQRDSIRKELDAIQREIAAKDMLFVQEQNAWKEALYAWNGSNTELLLDKEQLKDCCRYAEDFGEDADFAEVRKQVADIWFSYKNPLELQVHEKENVYEQKRLEKEQTEEDLTEWENAKDPEPERSDAVIKNRQRLDELQIPYQEFYKAIEFGDSLSEMECNHLEEALLHMGILDALVVDVSYREQVLTLSEGCEDRYLFVQKSHSGKSLLDVLELNDSMNDIFSNQRLTGILSNIAYDEDGVISVSPEGIYQMGVLCGTITGEHVAGFLGTRARERNRQEHIKACREKIQELQNIMKQLEDEKNVLENRMQKLEMEYQALPEDTDLRAAWKMLVQEQHRYEIKKTECSEVEENWKKLSEQIQEKKKKAMEIAQQLYLQCSYAVFRDAEEAAADYEKNLIALKSAHEMFLQSVRHIQDLAERLENIDADLEEIRYDLSGAQRQLAKVMQEHTSVVEQLKLTDYEQIRERLDACVAWLNDYPEELNQCAQKRAKVEEHLRTLCNQEEDWEVHRQTLEEKYIWRKKCYEAELALAYVPFPEDMQMDLANICIYLESDVKTLGKKNIIASLNQVYFENRGFLNEYQVMQGDLFTEFDENMPEGEQEAARQDFTARYQGTKLPFARLLVHLQEDIAQLQDLIKAGDRELFEDILANTVSRKIRGKINASNAWVEKMNALMGSMNTSSGLKLSLRWRSKTAESENQLDTKELVELLKKDYRLMSEEEAARLSTHFRSKVEEARRSAKDSGGMISFYQVMKETLDYRKWFEFQLFSQKKGERIKELTNSVFGTFSGGEKAMSMYVPLFSAVVAKYQGGRADAPRLVSLDEAFAGVDNRNIRDMFRLMTEFSFDFIINSQVLWGDCDTLDALAIYQLIRPENAKFVTVMPYVWNGHARELMENEEAVEQRRAEIEQTAGA

SEQ ID NO: 39312 - protein, 426 aa, Roseburia sp. CAG:197
MNRQQEHSCIAYFKSNPVWNRVFRGFWEKYRSYGTFSGKVVLQKLTAEEVEGLEGFFAKSFHGKKSATVSAERFAQALMNSRFSDMEPEHLLELYFQETLIGKKEERQLEEHKKDVFLEQWKKTYQGTPIEKALTQLLDVVQASHTKNLDEWEQLLRLGAEIYNCFPYRKNRTRYLAVFATEITGNPHAFDQGSSLGTFLYQVIQMELLRRKVFPQKSDIFPAFFRQKCFFAEGILIDDISNYVMLSHVKAQKKDGTFHAGMEGFWQEDDMVQVPLAVLSQWNRMFCIDNEMYIVENPSVFAGLCARSDESVSCMCMNGQPRLAGLVTLDLLAASGTVVYYAGDLDPEGLLIAQKISKYYAGEFHYWHMALEDYEKSKSNEIISEKRIKSLERITDVELFPVIEKMRIDRLAGYQEKIEYESCCQN

SEQ ID NO: 39313 - protein, 531 aa, Roseburia intestinalis CAG:13; identical to SEQ ID NO: 38744

SEQ ID NO: 39314 - protein, 381 aa, Roseburia intestinalis CAG:13; identical to SEQ ID NO: 38927

SEQ ID NO: 39315 - protein, 1369 aa, Roseburia intestinalis CAG:13
MNSRWQANKIGLINFWYYDEQEFPFVKGRMLLRGSNGSGKSVTMQSVVPLLLDGNMSPERLDPFGSRDRKMSSYLLEENDGREERTGYLYLEFKRKDSETYLTIGMGIRAKRNKPLDKWYFSLTDGRRIGKDFFLYKDMGEKVTLSKKELENRVAEGGRVFDRQADYMDYVNRQIFGFETADEYKEMVDLLIQLRTPKLSKDFKPSVINDILSDSLQPLSDEDLRPMSEAIENMDMMNMNLKGRREARGAAEKINAVFQKYNKLLLCEKADRYERTKQRLQKAAAEQKAYEDKYAECNRKIEELETEILQMNQKKETLEKEKESLNKSDAVALKGREAQLTKELEAHDKILADKKSFLAAKEAQYRDVTNQIKEEENRKYEKEKEVETLLEDMREEADQMAFQEFAFMSEELCADLENDYKFDLHRQQFEHTRQYINDGEKLLAELKSLDRRKDEMIQKREKQIRELDALQRKISEFENMLIQVENEWKEALYQWNENNVELKLEKELLRELSTFADTYEENSDYAVVRQKAADQWIKKQSKIETQINSILLEQETAKTELDEAKTELSEWENQKEPQPQRSEAVIRNRQRLDEAGIPYQEFYKVIEFGSELDEDACNHLEEALLKMGILDAIVVDEQYREQVLTPVKGCEDHYLFAGKTQAEKSLLDVLELNEEVNDIFSNQRLTKILSSIAYGGENDVSVSEDGSYHMGVLAGTVTGEYEAGYLGSKARERHRLAKIEECKNLILVLEEKIAGLERERNNLSERKDRLKSEYDALPGDTDLREAMKLLLAEEQKYELLRSENEKTGEQLTAFLEEIKEKKKGAIEIAEKLYLNCTYETFQSAKSAAEEYDKNLVELKSAHEMILRSAAYLRERKVHLEDLDLDMDQIRYDIRETEKQISSKQEERTSILEQLALTDYEAVKDRLDACISWLNAFPKEFQKRVTEKTQKTDEAKLIEANRISNADTIKVYEKKVEFYRKCYEQERGLFYVAVPEEITDDAGHIYDYLLTDIKDMEKNSIIADLNRVYFENRGFLTDYQLTQNELFAESDESEKIDDYTPKRLDITARYQGTKVTFASLLTHLDEDISELENLIKDGDRELFEDILANTVSRKIRGKINASNLWVQKMNTLMNGMDTSSGLKLSLRWRSKTAEKEDQLDTRELVELLKKDYRLMSEEEAARLSAHFRSKVDETRRNARDSAGMISFYQIMKETLDYRKWFEFQLFSQKSGERQKELTNSVFGTFSGGEKAMSMYVPLFSAVVAKYQGGRADAPRLISLDEAFAGVDNRNIRDMFRLMTQFEFDFIINSQVLWGDCDTLDALAIYQLIRPENAKFVTVMPYLWNGHSKELLDDEEKVEQRGIEIEQFDRA

SEQ ID NO: 39316 - protein, 426 aa, Roseburia intestinalis CAG:13; identical to SEQ ID NO: 38747

SEQ ID NO: 39317 - protein, 496 aa, Firmicutes bacterium CAG:94
MALQADLLESIPQTRYLSADSYVSYRAIMRTFYLEYQKMRYQLDKDALLALLQQDPLFAGYTAEQLIPDLDQLVKWKNLTPIQDPHKAYTIADFKNRQFQYMMTEAALEVERMTITLENLYTHSTGLSSSAFRRIQGALRAAEQLEKMSLKEVGEWWGELQEDFRRLRQNHQDYLREFYGPSAEKQMKSAEFLVYKQHLIRYLEDFVQDLQSSAAQIGALLESFSEEQVHRILTLVHKSALEVPRPHGDPGPFWQQELWQQEQGVWNSLMEWFTGKDSTARQVMDVTNEVIRRVVQNAAILVQMQNMGVSNKAELRHLMTLFAGVPSMEDAHRLSALVFGSQQCRHFIRNAERETERIDLSTYEEPPLDYALQPRLRTYKPRMDRSGFADKSAEKAAQRKKILEEERRLREKTLHYVHEGRLDFSALKEPVPPEVRSVFLSWVAMANLAPDGSGITQYGQRFFLEKRGEGTCQLVCTDGTLSMPDCVLVFKENGYV

SEQ ID NO: 39318 - protein, 388 aa, Firmicutes bacterium CAG:94
MYEFRFLLDRFWVTRAENKDLYFAVKRALPHYRRLVNEQLGWNLIVNEAVVKLEKVPAKAMAWMGIQEFQEKLDYCLLCALLLFLSDLDDGEQFLLSSLTEGLEALLAEVQPVDWTRFPHRKSLVRVLQYAQRTGMLLVYDGASEGFGSDQTQEVLYENTGLSRHFPTHFGRDTLHCASIEDYEAFLWEGEEADRGRQRIQRVYRQLALAPALYWSRQNRSDYEYVKNQRSWLNRHLGEAMGGELQIHRNGAFFVLDEESRFGLVHPREAAIPEAALLLCGQLREQVAAGVYPRQEDDTVFLTRREFQQELAQCRQRCGAGWGRRLRELPQEKLAQELVAYMAGWMLLEERDEGFLLYPAVGKWIGHYPAGYQGGPGEEKWDEPLEDA

SEQ ID NO: 39319 - protein, 1348 aa, Firmicutes bacterium CAG:94
MNRWKMHRLGFLNFWLYDCEEFWIRDGHFLLRGNNASGKSITTQSFIPFLLDGNKSPERLDPFGSRDRKMEYYLLGDGEREESTGYLYLELKKDGVEEYLTIGVGMRAQRGKGIDFWGFCLCDGRRIGKGGVSLYETVGGQMLPLSKQKLRNLIGDESNWAETPGTYKQLVNDRVFQFRDIRQYEQLIQLLIKVRTPKLSKESFRPSEVKKILNESLQVLTDEDLSAMVSTMERMDALEDTLRDFQTALRDAAIIRNEYSRYNQYILGRKGQAYLQAHNNALRLRNQLQDAKEALEQLEQEFRDQAQKQKDAESLFQQAKAQYAALGEDGLESQRKRMEEEEAACSQFAEQLAEERRQLENLHSIIDRCEVDLRQKERQLSEAQDQLECGIRELNGQNELLALGEEHQQYARALRQRSPRAESHSLSAALQQRKKHIGQVLACFRELSQAKETYDAACQALDEADAAEIQAKGALRDGQLLEQQERDNLLEAVARWQDNSQELRLSTEELPSLKRMVVQYRSPADWAEVSRFVGSRYLERLGRLQGEKNKEELQLKELRRAREEIRKTLTLLRGQPEPIPPRREQIQATRVQLMMRGIPHAAFYEVVDFAPELGQSQRDLLEAQLADAGILDALVIPRENLEEIRELLQEYPDRFLSPDPPVRDPITSLLPDGDLRFRETVLSCLRGISQSDLQAGTALLPDGRYRCGTIQGHSRQEGPAGFVGAAARRANRERQLRECEERLDRAEALVREKQSALDGLERRLARLQEEREQLPPATELDQALEILAQAQESFSAAQARKERCLDQERAAKQAVARVEQQIREGSRGLPYLRAEEAYEEALDAAESYQALLGALGVSYSDWIHTADAVEAAGDRIAELRDQADVQNRSAAQTQKQLELSRARVQAIQEFLDRPENRARAQRRAALDQEMEAQRLRMNEAEKRCAALEVERRAKGEQLRQRNELLCGAVLEEDELKRYFQEDLGLDLCPLPQGTLEQCAGEAWGKVRPEDRERTPERMGDALRNNYLQHNNSLLKYQPKIQLVFEDAAKPGWLRQRLCISLQWEGKDLSLYGFLQELQKKIDMTAALLEEKDRDLFENILAETLSHKLRARIEESQQWARNMTSLMGTLETSMGLTFRLEWKAKKAEGESQLDTEQLVRLLNKDRALLTREDSQRVSLHFRAKVKQARQEAVLQEQMTSYADLIRDVLDYRDWYEFHLLYQRDGDPRKELTDRAFNKFSGGEKAMAMYVPLFAAVSAQYQKGGPQCPLLLALDEAFAGVDERNISAMFELVGVLDFDYIMNSQALWGCYANVKSLDIAELHRPANASVVVILHYHWDGAQRALEEDSP

SEQ ID NO: 39320 - protein, 441 aa, Firmicutes bacterium CAG:94
MKEIAAACAAYFQEHPAYHRILVLLFQKVKSFGGPAGTVRLDDATPEECDAARALFGRSFSAPLRIKTADFEAALQNTPYRGVTLKEVLECYFHTAIQTKREIRSQEDARILRITKGAAASVESPLCLRWLEELSTHRGEGWQLIQKSLAKGEEAVGQALLQACKSMAWLEGHPGRRIRLAVLSAYATSDPHALDVNTLGGKLFLHLLSMGAGVRLPTEAEARAALYYNWGILCDSISSLVTQVGLRLYVGKEEHPAFYAFRLRNEACTLTLTNLAGLTGADSPSGRAYLVENQMVFSQLCDAAAGFHSPLLCTSGQPAIAVIRLLDLLVSAGTDLFYAGDFDGKGLSIALQLLERYPDRLRLWRMTGEDYAQCRSEVRASDKSRALLRSCENTVLAPVAQAIERSGFVGYQELLLPQLQRDLLQNGSGPRRVETGPKTCC

SEQ ID NO: 39321 - protein, 493 aa, Erysipelotrichaceae bacterium CAG:64; identical to SEQ ID NO: 38889

SEQ ID NO: 39322 - protein, 376 aa, Erysipelotrichaceae bacterium CAG:64; identical to SEQ ID NO: 39007

SEQ ID NO: 39323 - protein, 1344 aa, Erysipelotrichaceae bacterium CAG:64; identical to SEQ ID NO: 39008

SEQ ID NO: 39324 - protein, 427 aa, Erysipelotrichaceae bacterium CAG:64; identical to SEQ ID NO: 38892

SEQ ID NO: 39325 - protein, 493 aa, Clostridium sp. CAG:411
MRIADKLGKPISETAYLTAENVTRYRAILRFFYLQHERIRYWLDQDEVYEEMKKYEEFAEYTPEQCRQDLNALENWKNLIAMQDTKKITSVEAFKNRKYRYQLSEYAVEIERMTIRLENLSVEGASLEPSLLERIKEQIFDMITIAGETPAKVYAWWDNLQNDFKRLNQNYQDYMKSLNSARAEELMKSTEFLIYKDNLIEYLRSFVKGLHIHAGAIESRLKNTNTSVFEEILDKIVSYEMSIPRVDVIPDQKLITENEKGRLNSLLDWFVPRNGRESEATRLFDMTNESIRKITRFATRISEQFYMGANRKEEYKKLAQMFLQCEDMNQAHCLSAMVFGVEKCLHLRGDFQRDTDSINSGVYEENGLQITIKPRIRTFGEKTKRSHIQDHSVQKEQARKAAIEKLQNEKATVASFIKDKKIVFSDLPVISEHTRNILLRWLSKALEREDGKAKTEDGKVYYISNPKEKNNCIVECEDGYFQMPAFELVFEEV

SEQ ID NO: 39326 - protein, 384 aa, Clostridium sp. CAG:411
MNALSELCSKRWIIKEKDKEKYYQIKDTIGMWQELIRDKLGYRLIDNSYVLKLEKLPGEAQPWMGITEFQSKEEYVLFCLVLMFLEDKEKEEAFVLSQLTEYLQANYPEGQLEWTVFENRRKLIRVMKYAMKQGLILNNDGNEDDFASALETEVLYENTGISKYFARSFTQDISEFTKPEDFFQSDWMEMNEDRGIIRRQRVYRKLLLSPGVYREQDKDEDFAYIKSFRSSLEHDLEAILDGSLHVHRTSAFFILDEMENAGRSFPGNNNLSDAILLVFSMLQQEIKVGNYMVKNNETIVLSQDEFNRLLIRCKQTYGSGFAKKYREEMSEEAFAAFIKESMLEYGMIQVDPITEDVTVMPIAGKICGMYSKEFLEKEKIDVNQ

SEQ ID NO: 39327 - protein, 246 aa, Clostridium sp. CAG:411
  MOD_RES (225)..(225): Any amino acid
MLISEWVINRIGLVDFWYYDEEEFYFSDGRMLLRGANGSGKSVTMQSFIPLLLDGNKSSERLDPFGTKARRLENYLLEENDGREERTGYLYMEFKRRESDTFLTIGIGMCAKRNKRLDSWHFFINDGRRIGKDFFLYKDKKNKFTLTKKELINRLGEGGQVVDSPKDYMRIVNDRLFGYETVEEYKELVDLLIQLRTPKLSKDFKPTVLNEILSNALQPLSEEDXYSHYLRKILDLCRKRLKIWTS

SEQ ID NO: 39328 - protein, 491 aa, Clostridium sp. CAG:609
MELSSKLTKQITETKYLSVENTDRYRPIMRIFFENYEKLNYWLFKEDIFNELKNMQGFENYTLDLCESDLTQLYSWGNLTYFQDTENVMTVKEFQNRRFRYQMTDYAIEIERFVSYLETISVKTSSLEPKIFEKLRNLITKISTLSSSHDIHDCFEELNYQFTNMNENYKSFLKTFHEAKTEDLMKKESFIIYKEKVIKYLREFISGFQLNNLKIVDLIEKLPENFEETLMDNLIEYQKNIPNMEPDFDYNYLREINQGKWRSIIHWFKNDGSISESSRLKKAINDIIDKIMKNVSAIMEMQASSINRKEEYKHLLGLLCKSDTLEEIELLCPHIFGLINTKHLSKIEKSTESIDYDVKQLENVSIELKSHSRKIKERVEKKPIIDKSLAKQAQLNEIMSIRNKEKEILSGYIDNGKIEIKSLGKVSRFERRFILSLITAGIKSNDYVMDGEHGILYKVTKQSNDYVKLDSEDGMLEMPDFLIEFGGKDGK

SEQ ID NO: 39329 - protein, 382 aa, Clostridium sp. CAG:609
MENNINEEMSYLLNNLWISKTTQKEKYYKIKSNLTELREISGKLGCDIIANNKIIKLEKLPISIDSTFKIEAFDNKLDYVLYMCLLLFLQDKGLDEQFILSNFTDYTTNILSSFEGNNKPDWTKYKDRKSLVDVLKYAEKVGIIRLRDGNDESFADNELSEALYENTTLSHYVVRNFKFNVFNCYTPSDFLEEEKKTIDEKDYKKIISYRGLFFYPHLYLPELTEDARNYIKNIRYSIGNDVSKFLDGELILAKDEALVSMPDNRNSELFPDLNKSITDIVLLVCAELNNQEVENLIPKEQFKLILEKVFNEYKDYFSKLYRDLPTYKFDEEIMKYMESFKLIKITENYVQVYPICYFFEGYFKKEESVVNNFEYLTLDLEG

SEQ ID NO: 39330 - protein, 1333 aa, Clostridium sp. CAG:609
MDRYKINKIGLLNYWLYDEEEFYFCDGKLLLRGSNGSGKSVTMVSFFPLLFDGNKNPERFDTFGSRDRKIEDYVLPIDSDTNESTSYLYMEFYKKSENKYLTIGIGLKAVRNRNVDFWGFAITDNRRVKDGFMLYKDHLRKIPLTKKECQYEIGTGGEFVTSIKEYKSMVNRLLFGFENNSMYSELINLMLQLRSPKLSKDYKPTRLVDILSGVLEPIPDKDIQTISDSIESMNKYKETIDDLTEENKVINLLKNNFHDYSNIILYHKCNDYLKSKRELNEHEEELKILNDKLSELKKIVEESKKILIEYDLELNSLKESENKLADNDLNTLLESQKKLEIQLQEIKTKIIEKENSILNKENELKDTTKNIQKLEDEIYKNNKELNEIKETIECLIEDTGFSDINLNEESINETIENKKIIIKNIKSLAEKKYAEELKVDKLFNEISISENDIKNKNIESNKISRLLIDEANAIVDKYAQMQNNKVLTLTKEDVSKIEEIITNLDINTKNQVETIVNSKYNFILENLLKSKNITENNIRENEYQKEILSKELEDTKNVFDKYVYESEKKNKLESQGIKGKYLYELIDFKTNVDLNTRKLLEDSLRSLGILHTLIFKNKSLSIKTFGNLKQVDNSIIKYFDIIDKEYENETIQVLNSISIDSGETFISENGKYQMGIIQGTSDDNYKLKYIGKNIQEEYLKSLQKNIIEQIEETDTLISKYTKNLENINEDMNILSNEKNINVNYSNYEKYIIELQKINFDIELTRNSILTYHKDIEVISKIIKEIETNIFEKKENYNGDLSVEIIKNAEYSLNELSSKITSMRYCNNNIDVLNDSKNSFQNREESLYNDLEILKDELTENEAKINYYQKEIKINEEEINQDKYKDLKQKLETIKTRISFIEKDKDVKKEKLIRAEKDIEITESTINTKTQSIKDEKIITDCLYDIFKKEYNLGYSSYKNELTDIKSWFKNFKLEKFKAINDANDNFNDRINDYLYKLQNYAGKKIYKFDNLEMEEDYYKDIKDDNSKEKIKNILINAKRTDLGFKYQGLNLNLLELSDTLSIRLEETKNLLNNEDRRLFKDLLLNNVGDTIREKVRSSKIWVEEVKKIMEKMKTSSGLSFSISWVGKGKDAEDEMDTNEVVSIFEGSASSITDEDNEKIVKHFRSKIAQEEEKYDELEKNYVEIIRDVLDYRKWFQFKLFFKRNNGDKRELTDKEFSKFSGGEKAIAMYIPLFAGINAKFNSAKKDAPRIVALDEAFAGVDDINIEDSFRILDELNLDYVLTSQILWGDYSTIKSLSICELHHLSSSDVVSVLRYKWDGHKRLLINDESEYQN

SEQ ID NO: 39331 - protein, 399 aa, Clostridium sp. CAG:609
MNLEYFENKNLKQLFDALKEKYYKTSKLSGTIKIIPKTKEEVIEIEKLIRNGKYLKQNEINVIKINDIRTGISKTRFSSHSLEDILNHLYGNIISKKTIRENITKENLIKYNEFISKYIETSIMDILIKMPEKEIINYINKNEELLNNVCLALLNIPNVPTLLSVFSTDITKNPHYFDLETKSSNLLIKFLSQLNNEDVPKNRTQKINVLKNNNIVTDSYSNFVITYNLWGEDYLNILSNKKEPVILNINNIINLTKVNSKNNKILIIENPSPLDYITKIDTNYGIIIGGGNPNAALYELLDKFENHVFLYHGDYDPEGLLIADKLKQKYTNLELILYNEELFEKSKSDKKINPSRIKILDNVSSIPLQEITKMIKKTNTVGYQEKVISDIIKYLHDNK

SEQ ID NO: 39332 - protein, 491 aa, Clostridium clostridioforme CAG:511; identical to SEQ ID NO: 38974

SEQ ID NO: 39333 - protein, 1355 aa, Clostridium clostridioforme CAG:511; identical to SEQ ID NO: 39192

SEQ ID NO: 39334 - protein, 432 aa, Clostridium clostridioforme CAG:511; identical to SEQ ID NO: 38977

SEQ ID NO: 39335 - protein, 505 aa, Thauera terpenica 58Eu
MPFTDTSADLFRHVSADKAGIYRSIMASFAAAKRQFRLHMRPDEVLAEAHWTDGLPRLEEVQVALAQLAEWGNLEAQPDTARVASISDFYRARFLYRLSHGGEAVETALAAFAQALGRRAELQTVALEDIASRLKTLLALADAPTLDAAKLHETLRDLVRVFESLADNAQAFMAGMARSIELQQADASAVLAYKQRLINYLERFIGDFVGRSGAIAQHISLLHPRIDPLLWAAAQREARDAAPGDQQAQADALAQRQQAWRERWGGLRGWFVSTHHEPPQAEVLRSKARAAIPQLLAAVAALNERRSGRSDRSADFRVLAGWFATCGSDDDAHRLGRAAFALNPARHFSLNPDADNELPATTPWAEAPPLRIHPRLREYGEAAPRGPLPKVRERNEERALLARQLREEHLQVEAARARLASGRTTRLSEIGQLDPHAFALFLSLLGEALSAQSSPEGVVERQTGDGLLHIRLEPLEAHTRAEVSTDAGVFAGRDHLITITATQAP

SEQ ID NO: 39336 - protein, 430 aa, Thauera terpenica 58Eu
MTSDSTTIGQQQALHQREEFTAALRALLMRPLMTPAHAEFAAVRRHAEALREWFVREAGWPLHIERDAARLYKRPADVRDASRGLPGYERRRYVLLCLACAVLERADPQITLRVLGDRLLVLAADPALAALGFSFTLQAQHERRELVAVCRTLLELGVLNRVAGDEESFIHGGHGGPDSLHDALYDVHRRVLAGVLAASRGPSTWPADEAPATLEARLAALVVEPVPDSDEGRRTALRHHLARRLLDDPVIYLDRLDVDQRAYFMNQRGTMASRLCDATGLVAEQRAEGLALADEDGELTDVAMPAEGTEAHVTLLVAEFLSSRSSRGSGDRSGPGTPHAAPKDGYASTDEVAAFIASARQGFGKFWRKSAREPGAEHELAATALERLQRLQLLERNGAEVRPLPALARFAVGEAELRPAPPAATGTLFD

SEQ ID NO: 39337 - protein, 1414 aa, Thauera terpenica 58Eu
MNTLDSLFASPSAQARTDALPALPQPTLARWQPLRIGLVELFHYDSEEFWFHDGHLLLRGNNGTGKSKVLSLTLPFLFDAQLKPSRIEPDGDAGKKMAWNLLLGKLDRRIGYAWIELGRITDDGEPDYLTLGCGLSAVAARTQVVAWFFVLERQRIGEDLWLTSPARSVLTRERLKEALHDHGQVFDTATAYRRAVDERLFQLGAVRYAALMDTLVQLRQPQLSRKPDEGKLSDALTEALPPLSAELLTDVADALNQLEEYRRELQDYEALAKAVGQFTQRYQRYAAINARRQARALRSAQSGHDSASRSLNEARSAWQAAQQAEAQAQARLEAVDAALFAARTRLEQLQSDPAMKDANRLNQAERDAESRAADRADATRMNAEALARLEREQQALAERGTRQTQAEQALISAREDLTAAALASGTAEPWRSSPLAVLPAAALATLGEQPLDTARNELRQATVIRREQLALVQRRVSEVAQAEAVHASRQQTRDERQDETEAAAARRNVADAAVESEGSRVVEAWQEHFTNLQVLQVNEAPLPALAAWVANLQGDNPARAALSSAQQRTADDLAQQRAGHLAARQALHDEQATLSAEHERLTQGEDASPPPPYTRGAEARRHLAGAPLWQLVDFREHVDTAQRAGLEAALEAAGLLDAWVTPDGRLLGADSAAPVHDTQWLERQAHEASLAAWLTPSAAATRPGIDAAQLTRLLEGLACSTHDDGQAEGWIAPDGRFRLGALAGRWHKPQASYIGFAARAAARARRRAEIELRLGEIAEAAHRIDQALAELVRQQTRAAAEWQDAPTDENLRAAHADAAAGEREFQAARSRLEEAQRQLHAASAALQSRRDALAADAADLHLPTQSAALEAVGTALLHFGETVHGLFQVVHALRLAVSELARQQERTHEAEADARQRAEQLAERHRQAEETQVRLTTLRESIGARVEELQARLREARAAVSDGERQAKTEGEALRTAGEARARGEQKVSDADTTLQERADTRQRAIAQLQGFAATGLLSAALPAAELPDLRAPWTIEPALTLARRTEQALAQVVDDDDAWTRIQSQISHDYGELGRALTALGQQAQADTSDYGMVVSVIYQNRAERPDQLSARLAAEIAQRRELLTARERTLLENHLQAETAAEIQRLLQAAERQIDAINKELHKRPTSTGVKFRLLWQALPEGGEGAPVGLEAARKRLLNTSTDLWSAADRRVVGEMLHQRIAAERLKTDALGGSLLEQLAQALDYRRWHRFRVQRWQDGQWRPLSGPASSGERALGLTVPLFAAVSSFYSQASYAFAPRLVLLDEAFAGIDDAARAHCMGLIREFDLDFVITSEREWACYAELPGVAICQLQRREGIDAVHVSRWTWDGRARLHADDPDRRFPPEAEPPSGPLDSLHHEGAQASPGAARRAR

SEQ ID NO: 39338 - protein, 394 aa, Thauera terpenica 58Eu
MDPRLERLLGGETLAALRKRLRQRYERGVPAEVLRLGALSEAEHAALAALCGRPARPVRSMQIKVAEIDAALTRAGLASSLRDALEQLDGPIIDTTAQRLQVRVQWQQLVEGCAHPALAAVLQTSVGLGLLKRLCASQPEAGERLLLDANQVLRRLPAAGIARAQLAVATLGDAHALDSGKAVATLVLSALRHGAAPDDDADRARDLWAAAGVLVNELTRPALALNLPGPTGTAAGEPTYFSLRSLVRSPPVWAVTGRPVFVCENPNLLAIAADQLGPRCAPLVCTDGMPAAAQRVLLTQLRAAGARLHYHGDFDWPGLRIGNQVIREHGAHPWRFSSADYRAAVISAPRPGRTLDEAAVSALWDDTLADAMLAARLAIDEEGLADVLLDDLGH

SEQ ID NO: 39339 - protein, 493 aa, Anoxybacillus sp. SK3-4
MDTSWLKPITEAKYLVVDNAYRYRAILRYFYTQHERMRQYLFPEEVYAFLKQFDEFQTYTEEEMQQDLEQLVKWKNLIARQETGHIRTIEEFKKKRFRYQCSPYTVEIERMIRTLEQLGETFGGSLEKTRFDRLYASLVRMESIIDNGFGEKREEMNQVWEETFDYFKKIIQNSADYIAYLNGENMEERMMSDSFLAYKEQFTAYLRDFIVALQKTSMQIEKLLEDLPEDGVRRFIEEVVAYQLAIPRFEGAVFSREQLTEEKLDTWRSLKEWFLGRNGHESELSFLQKQTNEAIRRMTRVVQRLGERHHHFRSRKKDYLHLAKWFSSLETVQEAHKLSAVVFGCFHTKHIVAENDATENMYRDIWEEQPTEWLVKPRVRHYREKKKPEAMIDRRKEKEETMTAYLAEKQQEEEALAQLITDGKIVLQELPIVAPHIRKTLLGWIAKAMGREDRIVQTENGWKVKVVQREGTITLEAEDGMLMMPNYEIHLLD

SEQ ID NO: 39340 - protein, 388 aa, Anoxybacillus sp. SK3-4
MEKEFDEKAKEALTALFEHFWIVREKEPELFQKIREREKVLKRYVQEKFGYRLIIHRYFAKLEKIPAEPEAWMGIESFQEPLDYALFCCLLAYLEGKAVEEKFLLSDVCEEIKAMYPGETALDWTNYQHRRALIRVLKTAEQIGIVHHVDGELEAFANQEDEEALYEVPVLSRYFMRSYPKDFIQYETIEQLLEEEWKAAPDDYRRHFIYRQLFLSPVVYRRQKDDPNFYYLRNFRHRLRDDIEAHTDFRYELYKNAALLTISERQHVYTLFPNQKGTSDIILHFAAVVRAHLDNYPPDEYGQIRVTMSEFHQLLNRCMEQYGEGWSKTYREMTLAQLSSELLSALKEWKMAEHEQETGMVTLYPLLGRLVGRYPDDFLMKGRDDDDE

SEQ ID NO: 39341 - protein, 1378 aa, Anoxybacillus sp. SK3-4
MTNKWVLHRAGLINFWYYDEQYFEFADGKLLLRGTNGSGKSVTMQSLLPVLLDGKKTPDRLDPFGSRARRMEDYLLGEKEIVDRDERTGYLFLEYKRKQTEQYVTTGIGLRAKRQKNMDFWGFVIFDNRRIGRDVFLYKTEKSANGTEKIPLTKRELANLLGNGGTVVDSQKEYMELVNKHVFRFESMEAFQELIELLIQLRSPKLSKDFKPTVIYEILESSLPALTDDELRHLSETIENMDQTKQQLEQLERDEQSLKRLCGQYRAYNEYMIAEKASEWLKAEKQVKRLVEEGKQWLTEEAETEAHLVDLSEYIQTLANEQDVLHQRELELASHEVFQAAQQYERIQREIQNVKEKQQKLLRQIDEKEQIERRYKRQLEETNDKLYETEKQLDGQLEDLRHDALESSFSAHDLNEADFSRHRQTPFDFTVWKREGQGYVEKLEQILTLWRRHDEIKARYEETSKEVGDLQREVDELRHEEAKWLELLENEKSRFQQEVFRWLEQCQDVSVQETSVQLFLQRLHELYETYHIDEMKQPFTEAYYEALNRKNEEKMAQKHACTLLEEKIAAKEAEWNQWKMQKDPELARDEQTLAARAELDKKGVAFVPFYAGVEFQDHVPEPLRERIESALYHAGLLDALITETDVEVSCDRVLFPRPVEMAHTLADYLQPDVDEACQVSKTRIEEVLQSIVLSDREMDGAFVLNEAGHYTLGLVKGHAPMREKALFIGRTARKRWRLEKIAALEAELAELRAHLYEQTEMFRQLDEAIEQMKNWFRSFPTDRDMRAAFEEREKTKRTMFSKQQEWEKKNEKLAQLARNWQQLKQTLREQTEGLDIEFSKDGYEQSLLLMKSYMRRLHELQLTHQSFVHLFEMIERLTEQVGTLQQEIDDIKGERNVLANEQQKLDLKRQEIERTMQLMGAEEVQAEIQRVRARLAFLQKEMPAKTNERIALEHQLKAIREKREQLEGKEAFAKRLAGAWRRSFEREVALELVELHAQDAVEQAKEAIERYGAQLKETRTSLVNRLNSVFFQESANLTEYRLSQEPVVVEEASPFAEIELDEEMELKVAGWREKQDRIVLLLDYKGQRVSPFYVWNEIEHDIFLQREYMKEQDRELYEEIILKTIGRILRSRIQRAERWVKDMNDLMQQLDTSSGLVLFIQWKPRTAETEEEMDTKELVELLRMNSRLLKEEDLQRVTKHFRSKINRARELLEERGQGNTLHQIIKEVLDYRKWFSFTLYYQKTNEPKRELTNQRFYQFSGGEKAMAMYIPLFAATYSRYQEAAEDAPYIISLDEAFAGVDENNIRNMFGLVEQLGFNYVMNSQALWGDYDTVPSLSICELVRPKNASFVTVIRYYWNGKVKQLVTEARKGELIEPIR

SEQ ID NO: 39342 - protein, 413 aa, Anoxybacillus sp. SK3-4
MNRLDEAVQFFRGERSFHRLFCEMKKKYESLGRIGGTISVASFSMEEKDAIASFFGKEMSRVSLAAFEQQLANTKFAGISLVELLSSYFGEPLVTKKEQQQQAEQEKEAYFTRLIHTYRPQRDWLMEMANQRVVQLAYQQNPQALEAAISAVCRALEQLPSTYVRLPMFAQKVANDPHAFDLHTLAGKLLLSALQFYADTKYDLSSVEDVNELLQSYRLLREDVLNFVTCAGVMAEKEGRHPVFAAACETNTALNVPLREVMPLTRAYPSIGNIVFIVENAGVFSTLLDTNVPLISTNGQLNLATIWLLDLLVEEGIALYYSGDFDPEGLKMAQRLVERYGSSVRLWHYDRLDYLATKPTVPLPDERLAKLQSVTLHDLQPVKQEMLRRKKAGYQEALVEALRKEIKRNVDFV

SEQ ID NO: 39343 - protein, 521 aa, Alicyclobacillus acidoterrestris ATCC 49025
MTVDVGYNDEIDSVVLQRMSAMNRRQPRELWVKPVPEVKYLNADNVGRYRLIMRFFYDNYRKLKYWLKPEEVFAGISAWNLLDDYTLEQCQRDLDVLTEWRNLTSSHDGGRAGSIEEYLRKRYRYQMTPYAIEIERMLESLESIQGYGGSLEPTLLERIVVYVRTVAEHAGQFAPGEALQLWRDLQAAFRTLHENASDYLASLQTTRAEELMLTEQFLVFKDTLTNYLQNFMLGLQKYGAQVEGLIRRTDSAQWRTFLAAVVEDEMRTPSLDDVLSAEERLNGRLEEWAILTRWFVGSDIEESDVVFLERATKDTIGRMVRYAIAIQEKQRLGISRRRELDYLGQWFLRLDSVEDAHKLGAAAYGLMKPRHFQGEPPRWSDSPDLSMWDEAPMVRELTSRSRVRRKAGSTEPVRSREGEQAEARQVLLAQMEREAAVVRGFAELGNFHLSDLDVLSVEQRRVLLSWISRCLVNKARRFRTADGYHIELTLPESDERAELTFSDGQLDMPNFHISIREAARS

SEQ ID NO: 39344 - protein, 410 aa, Alicyclobacillus acidoterrestris ATCC 49025
MNASTRRKAPTRAEVKSDLQAVAMALLSRPWLTKQDDPDAFLLIKDHYEYLRDWFHEHAGYSLLVTRSFAKLDKIPGVFRSWMGIDGFHQPRDYALFTYGLWYLEAKSDGEQFLLTEMVEAIRNHLLGFGFDVDWALYDHRLSMVRALKKLRSLGVLTSIEGEETGWARDGATANVLYEASPLARYVLRRFPRELMAYGEIDELYEVEQTAVVPTSGDMMHNADVRSRRHKVFRRLLMEPVVYDFEWTDEERRYVQTQRSWITSQMEEMVGLEGRRFREGLYFYWPELMAEVDLFPTQSAASDVTMQFAAKLRDMLKEAPDSYPRDENGCLHLTRGEFEGILFSLRESSERYWTKEHREKSTTLLANDILEHMVEWNLAALDDTGTVVLLPGLSRYCGSYDDASVGNGGV

SEQ ID NO: 39345 - protein, 1384 aa, Alicyclobacillus acidoterrestris ATCC 49025
MANERWQMNRAGFLNFWFYTDQSFQLSDGRLILRGANGAGKSVTMQSFLPLVLDGDKRPVRLDPFGSKDRKIEYYLLGDAESGISDRTGYVYLEFIQPATDKTVTVGIGLRARRGANQVAFWGFSLTDGRRIGHDFFLYDVDVFEREGEKIPLDHAGLEAAIGAGGRVVKEQREYQQMVNQVLFGFKDEQAYKDLLNLLIQLRSPKLSKEFRPTTIYTILNDSLPPLGDDDLLPLSQVLQDMDEISDRLDELMLHQDAAKRLADAYERYNQMWLYETAKRTVDATKAADDAFQAAEEQVALLKLAEAEREETDQAFVQATKDRDKTETELELLKRSEGMELRIELDGTQNRVKDTARELKDTEERIAQNKEEVRRKQVRVDAEMRKLEDEEHKQRGWLTDMAEIAKDIEFSTHEAYAGGVSTSLEDLDEATWQRWLADVDRYRGELDHALDLIRKERAEADKLKEAERQMSVARERRDAAEKTVQERERDLSAAITLQEDLAFAWFKGLTELPLSEEAWRSLLNDLRRYGELSYDQILTPAKEALDTGRSKATEARLKFAHEKSLLEEQRTQLERELEEWRTFKEAEPPRTGARSDTRNRRVALAADKRISGAPLYKVCEFRDSVDEPTRAALETALFQSGLLDAWVSPEAPPVEDGDEDGWIRPNPAVFGYTLADYLMPTPSEESGLTPQFVEDVLRTILIANPDSVEDANTAAVTTFGQYMLGPLVGQSASKPSAEWIGFEARKRSRQAAMERLKEDISALTDRIGELDRDIAEIECRIRAMHAEFAAFPSEEPLRTHLAQLETAKRDFAHARDVEAKQTDAFKMQQAAWQKVKEILVSYISRWDALRIESDFQHALGLLRSYEQTCQSCRMSARLSARMRLEMGYLKDEIDRLEQHIDEDMSTETELRRRLSGLQTTITSLRARLEALGALNVHDQEHQLKERLEMLRRHIETLQDMKVERATKVTRLQERLREKREVLDKSERVLEACIERFRQEWQLGLTVHGRADGDETMALSGRQEVIQAARKAFRALRGVCEARNIQSITDQLREVFAVEKNTLLDYSLESRFDESLERLFVESRRDRNHSWTPFRIHQELTRMVEEQRILISEKDRELYEQILIHSVGRAIRDKINRAERWVKEMNHFMSLRNTSSGMVLSLDWKPRPARGERELDTERLVYLLRKSPSTLLDEEMEDMIEHFRSRIRMAKEESESGETLRSLIREFLDYRNWFSFTLYYRKGGMASRRELTDSQFNVLSGGEKAMAMYIPLFAATDSRFNDSRPDAPRLISLDEAFAGVDEENMRDMFELLTDMKFDYMMTSQQLWGCYDTVPALSIYEIFRPGDVDFVTVIPYYWNGHSRRIVDGDDWSSAQEAAATVEPVLE

SEQ ID NO: 39346 - protein, 436 aa, Alicyclobacillus acidoterrestris ATCC 49025
MDELMTYLQQPGFERLWRAVADKYQRHGRVGGRVQLTGLSDEEIDALSGLLAVNLDGRTEVAIQLSKIDEALLNSKFRIGVADVLVRLFPDMRTREEQLAEASASWTAFRDWAKAGVHRPAVLDWIERLSEGNAPGYRTYMDCYRAYQRIGRCDDWRIAMKALEVSLSPHRVWRLPVFAAEVTGDPHGLDRNTLAGKVFYWGLVALTADSDAADSSLISALQPTATSDSEHVDDLESTDTASDAPSEYMRSVYMKAGIRLDDVSSIVWVGNWAGLFEVPVALPLMALDNHVKEVPAVDSVYVVENPSVFAELIEQLPFGVPVVCTSGQPSVAALRLLDMAVAAGSKIRYNGDFDVKGLQMTLSLGNRYGDAFEPWYMDVYTYRLASNEKQPELSDREVQMLKSLNVDWDDELIPAMTLVRKKVFQEHIISKLLSDF

SEQ ID NO: 39347 - protein, 502 aa, Geobacillus sp. JF8
MDATWLKPIVEAKYLSTENAHRYRAILRYFYIQHERMRQYLFPEEVYAFLKQHEEFADYTEDDLQQDLDQLVKWNNLIARQETAHVRTIEEFKKKRFRYQCSPYTVEIERMIRTLEQLGDSFGGSLEKTRFDRLYASLSRMETIIASDFQEQRDELHQVWEETFDYFKKIIQNSADYIAYLHSENLEERMTSEAFLVYKEQFTAYLRDFIAALQKTSMQIEQLLEDLPEEGVRQFIEHVVDYERSIPRFAEALPPRPMQIEEKWETWRSLCEWFLGRDGRESELSFLQYQTNEAIRRLTRVVQRLGERHHHFRSRKGDYLHLARWFSRLESIEEAHCLSAVVFGCFHTKHLVADAGATDNIYRDVWDEPPFEWVTKPRVRHYGEKKKPQAIDEKEMEKDEARRRYLEEKEREEAALRQLVTDGKIVLAELPEVSPYVRKTLLGWIAKAMGREGQAVKTENGWVVKVVNKDGTICLRAEDGELVMPNCEIHVLSRGNENGNGV

SEQ ID NO: 39348 - protein, 398 aa, Geobacillus sp. JF8
METAFDDQAKEALAALFEQFWIVREQEPELYQLVREREHVLKRYVEEKFGYRLIVHRYFAKLEKIPAEPEPWMGIESFQEPLDYALFCCLMAYLEGKAVEEKFLLSDVCEEIRAMYPGDIPVDWTNYSHRRALIRVLKTAEQIGLIRRMDGEVEAFAHHAGEEALYEVPVLARYFMRTYPKDLLRYESLEELLAEEWKAAPQDYRRHRLYRKLFLSPAVYRTEGDEQDFYYLRNFRHRLRDDIEAHTPFRYELYKNAAMLTLPERQAPYTTFPDQKGTSEIILHFAALVRERLEECPPDEYGRLRLTPEQFSAWLADCRRRYGCGWGKTYRDMSAAELVREVLAALSEWCMADVEHDTGMIVLYPLLGRLSGRYPDDFDTKEGEEHHEPVGSSSRRAD

SEQ ID NO: 39349 - protein, 1372 aa, Geobacillus sp. JF8
MNPWVLHRAGLINFWYYDEQYFHFADGKLLLRGSNGAGKSVTMQSLIPVLLDGKKTPDRLDPFGSRARRMEDYLLGEKDVVNRDERTGYLFLEYKRKQSDQYVTTGIGLRAKRQKSLDFWGFVIFDNRRVGHDIALYKKEKTGEKIPLTKRELAALLGAGGTVVETQKEYMELVNKHVFRFESIEAFQELIELLIQLRSPKLSKDFKPTVIYEILESSLPPLTDEELRHLSDTIENMDQAKQQLEQLERDERALKRLCDQYRLYNEYMIAEKAAEYVKAVKQAEQLAAEQQRLHDEEERARTTLDELEESITRLGREEDVLRSREIDLAGHEVFQQAEKYEQLKAERQRLRERRERHERTIEEKERIERQRRRRLDEAEARLDDLERKLEDELEQLSMDADEGSFSLHETNEGDFHRHRQKEQEFLFAAWKQEADRHIERLEGLARLWRRHDDLQRRYEEASNEAGERQREMDEWRHQQRKWEELLEQEKERFEQEVLAWVERGGVDVSEADIQMFLQQVGGIYEQYSVDDLKRPFVQTYYAAVGKKNDEKWRLEHDIRLLEEKRAEREAELCHWREKRDPEPERDEQTEAARSALERQGIPFVPLYAAVEFADHVPDPVRERIESALSHAGLLDALITAREVDVACDRVLTPNPVHMAHTLADYLRPDEEAPVPAERIDDILRSIVIADVEQQAGMTLDEQGRYALGLVRGHAPKRDKAMFIGRAARERWRLENIAALEAEIAALGQEIERLRREHQAVEAAIEELADWFMAFPSDRDVRTAFEEAQEARRQAESKEREWKRQEEKAILLAREWKQIKQQLRDESAELDLAFSPEGCEQAQFAMKSYVRHLHELEVLYRETRHTEAMIAQQREQLEALREEIDEAKGERNQLRDDEEQLALRMSEMERTLKQMGADDIRAEIARIQERLVFLRGEIPRLVNERARTEQRLMRLVEEREQGERRESFARQLAAMWERSFADEAALGLVDLDRSLPLLEQAKEAKQRYEAALKETRSSLLARLNTVFFQESSNLTEYRAAFEPLMEQREHEWIAAAPDDEMAMKAADWREKQERHVIYLDYKGQRATPFAVLAEVERDIALQHEYMKEQDRELYEDVILKSVGRILRSRIQRAERWVNDMNKLMGGLDTSSGLVLSIQWKPKTAETEAELDTKELVRLLRIDSRLLKEEDLQRVTNHFRSKITRARELLEERGQGNTLHQIIKEVLDYRKWFAFTLYYEKTNEPKRELTNHRFYQFSGGEKAMAMYIPLFAAAYSRYQEAGDDAPYIISLDEAFAGVDENNIRNMFGLVEQLGFNYIMNSQALWGDYDTVPALSICELVRPRNASFVTVIHYRWNGRVKQLVADDKEWERVET

SEQ ID NO: 39350 - protein, 406 aa, Geobacillus sp. JF8
MSIAKEAAAFFRSERAFHRLFVEMKRKYESLGRVGGTVSLQSFSDEEREAIAAFFGKDVARVSLSTFEKQLGQTKFAGVGLVALLEQYFGESLVSKKERLQAEEDERERFFARLVEEHHWFATIRSQRFVQTAYETNRDGLEAAVRLVGEALRRLPLSSYMRLPLFAQQVAGDPHAFDLSTLSGRLLLSALQAAVPGQWDATSVESVNELLQSVGLLREDILNFATCANILAETEEGPHRVFSAAVEGNVALNVPLREVLPLARAHPACGQTVYIVENAGVFSTLLDTRAPLVSTNGQMNLATIKLLDLLAASGAKLYYSGDFDPEGLAMAERLLERYGPAVTLWRFSLDDYMAANPVVDLPPERLAKLASVASEPLRPVKEAIERTKKAGYQEAIIERLARDIKG

SEQ ID NO: 39351 - protein, 496 aa, Geobacillus sp. A8; identical to SEQ ID NO: 38981

SEQ ID NO: 39352 - protein, 398 aa, Geobacillus sp. A8; identical to SEQ ID NO: 38540

SEQ ID NO: 39353 - protein, 1373 aa, Geobacillus sp. A8
MANPWVLHRAGLINFWYYDEQYFHFADGKLLLRGSNGAGKSVTMQSLIPVLLDGKKTPDRLDPFGSRARRMEDYLLGEKDVVNRDERTGYLFLEYKRKESDQYVTTGIGLRAKRQKSLDFWGFVLFDNRRIGYDLQLYKQEKTGEKIPLTKRELATALGAGGTVVETQKDYMELVNKHVFRFESLEAFQELIELLIQLRSPKLSKDFKPTVIYEILESSLPPLTDDELRHLSDTIENMDQAKQQLEQLERDERALKRLCDQYRLYNEYMIAEKATEYVKAVKQAEQLAAAQHRLHDEEEQARKTLDELDESITRLRREEDVLRSREIDLAGHEVFQQAEKYEQLKSERERLQERWERHEQTIAEKERLERQHRRRLDESEARLDDLERKLEDELAQLRADAEEGAFSLHETNEDDFHRHRQKQQEFSFAAWKQEADRHIEQLEELARLWRRHDDVKRRYEEASTEAGERRREMDEWRHQQQKWEELLEQEKERFEQAVLAWVEQGGIDVSEADIQAFLRQMGALYELYSLDDLKRPFVQAYYDAVGKKKDEKWRLEHDIRLLEEKRAEREAELRQWREQRDPEPERDEQTTAARLALEREGIPFVPFYAAVEFVDDVPDDVRERIESALSHAGLLDALIAARDVDVDCDRVLIPKPVHMVHTLADYLRPDADAPVSAERIDEVLRSIVITDAEQKGGMTIDETGRYSLGLVRGHAPRRARAMFIGRAARERWRLENIAALEAEIAAVGQEIDRLRREHQAVGAAIQALADWFVSFPSDRDVRTAFEEGQEARRQAESKEREWKRQEEKAALLAREWKQIKQQLHDESAELDLAFTLDGCEQAQLAMKSYVRHLHELEVLYRETRHTEAMIAQQRERLAALETEIDEAKGERNRIRDEKERISLEIVEMERTLAQMGADDIRAEIARIQERLAFLRQEIPRLVNERARTEQRLMRLVEEREKGAQREEFACQLAAMWERSFADEAALGLVDLDRSRSLLEQAREAKQRYETVLKETRSSLLARLNTVFFQESSNLTEYRATFERLAEQKESEWIAAAPDDEMAMKAADWREKQERHVIYLDYKGQRATPFAVLAEVERDIALQHEYMKEQDRELYEDVILKSVGRILRSRIQRAERWVSDMNKLMGGLDTSSGLVLSIQWKPKTAETEAELDTKELVRLLRIDSRLLKEEDLQRVTNHFRSKIARARELLEERGQGNTLHQIIKEVLDYRKWFAFTLYYEKTNEPKRELTNHRFYQFSGGEKAMAMYIPLFAAAYSRYQEAGDDAPYIISLDEAFAGVDENNIRNLFGLVEQLGFNYIMNSQALWGDYDTVPALSICELVRPRNASFVTVIHYRWNGRVKQLMVDDKEWEMIKT

SEQ ID NO: 39354 - protein, 406 aa, Geobacillus sp. A8; identical to SEQ ID NO: 38542

SEQ ID NO: 39355 - protein, 504 aa, Saccharopolyspora erythraea D
MEPVRVPPEMFRFTSGDRAELYVSVLHAFGEANERLETALGLDDVRGRLRSVGWLDALEDSDLTSALEQLRDWNLVDVIQNHSENYRTAAEYERRNLQYSLTRQGEAALAGVVHAMSVLASSGALQTAVLDAISDRLGDLLEHGETGSDRQVFAILTELESHLDALRGNTKQFNGELQRLLRADGADLETFHEVKASTVAYLQEFVTNLEHRTHAIATRIGRLEDHGVEQLHQRALAGAELPQLSGTDPAPAWLEHRRARWEGLRAWFLPCDSTPPRVEQLHRVARRAIVTLLQVLDRITESRRRASSAVLDFRELARWFTVVPERDLHRLWSTVFGLSSARHAHLAHHDPELVSPSVSWSESPPVEVSPLLRTAGRTERFARTGRVRDVKALRAQRAERARAERAQLEAAWNLLDTGGAVRVSEFGELDHGIFERLLELLGRALSSAPDESGTRRGSTADGRIEILLRPPSDSAVAHLTTPRGVFSGPDYEIEINSLGARGHA

SEQ ID NO: 39356 - protein, 411 aa, Saccharopolyspora erythraea D; identical to SEQ ID NO: 38669

SEQ ID NO: 39357 - protein, 1330 aa, Saccharopolyspora erythraea D; identical to SEQ ID NO: 38670

SEQ ID NO: 39358 - protein, 359 aa, Saccharopolyspora erythraea D
MADLLGMARLPGEHTTVSVQVLDRILRESLGVGVHEVVTELVGPVGDQAADRRRAAIERDELWSWLEGHPVVAMQPALSDWVAAVRRAGLSGGSVTQTREDLERALKVLAVLPASGIPLPVLAEQTLLDTHALDDGTRCSGLVLRALAAIYDRPSPVDASERRALWEQAGITDDELSSVVLAGGMRVDGDSVVGRVLRLCADAGQPSSLTLRQIRASELTSVPERVWVFENPSMLALALNRFGAACPPIVVTSGWPSSAGVLFLRKLAAAGCELHYHGDFDGEGLRIAAHVIARTGARPWRMSSGDYLAAVADGPPVGRTTPVPWDDELAEHLTRMGTTVSEERVATTLLDELTQRHPA

SEQ ID NO: 39359 - protein, 556 aa, Saccharopolyspora erythraea D; identical to SEQ ID NO: 38672

SEQ ID NO: 39360 - protein, 1364 aa, Saccharopolyspora erythraea D
MSTEMELPNRWRLHRGGIVNIWQYAEHTFDLSGGRAIFQGTNGSGKSRTLELLLPLCLDGDLRQLGSKGFDTVSIRRLMLDEYPGGPNRIGYAWIELRRDAPGGGEEFLTCGVGVKASKTSQAISDSWRFVTGRRVGVNLQLVGSDRVPVGPAQLREMLGADCVLDDHAFRAKIAATVYGMPAARYGDLLHLQRTLRNPDVGLKVLEGQLEQILSDALPPLDPSLIERLATSFDDLESIRENIVRLSSADKALSAFLTTYSGYALGSLRERAEAMRSARTRLRSLRDELAKLEKQVAAKRGDRESAQRTVTELEQREGELESGIDALRSHPAYSELQNLRDRERLVESARSAAVTALDTASKHRAQEERSVESVLGMLRRLAGDADAAEQAAQRATQQLTTAGLDGGLVPRPPAVPTAQARTSPDQVRTAPDSDAEPATIDRHIAPEVDADALAAAMREAASRTGDAASVATERSALTLALHQQAVELDAQQDKVAELQRLARQAQLTATEAAGRRNQAQQQLSDAAAVWVEQAQRWGAGWPVPTADDPVPAPPRDRELVADRSATRDARERTRRWARPKLHEARGQVTEVEQELAELRERTRGWEQELAELRAGHERTPPRPAWADAERDESKGRPFYRLVDFSPSLNDDDRAGLEAALQASGLLNAWVSLDGSVVGLAELLAAPEKPAGSATLADLLTPAAEPDCPVPGEHVADLLASVATDGSAGLSVSADGTWRAGVLSGAWSKDTAEYVGAGARESARARRIAELEDELSQLRGRIADAERRHRDAGEHTSRLEQYLESYPDDSDLLTAHAKLATALESAQDAEHRAAQLREQHEQADQRWQAAHAELVRSAGEADLPADTRALDAAHRAASEARNGIDALREAIEARCLPTLADLREVSLHHDVAVADRMEAESQAERRCADYGEQAAGLAELTSAVGGEAQQIADKVGDLERERAELRSELPQARERISSLRESSARLETQLENKQSQLAGREQEEASTTEAFGTALRIPGLWAAAAVSDELPPELDDAAALLVESDRKGASETTVLNRFQALQQSLSGNYDISAGEQNGLLTVTVTGEEGPQPVADAARRVSERLGEQRGYLNERYQSIFADYLIRDLAERLRGQITVAEDLCKRMNEVLDGARSSQGVHVQLEWQPSAALGDDIRQTIELVRTPFADRSDDQDALLRRVFTDLIESERDSTSGGYAEILSRALDYRSWFAFTVRVRDTGPEGKPRVRRLRQLSSGETRLISYVTLFAAAAAFYDAVSVSAGGGGPLRLVLLDEAFERLDDPTIARMLGLLVDLDMDWLITWPSGWGVSPKIPKMHIYDVLRPRSGHGIACTHTTWDGRGLERADG

SEQ ID NO: 39361 - protein, 416 aa, Saccharopolyspora erythraea D
MADTDDVRARWDVEPLRGLWEKAREVLESPEQPSTFRLELPDEETQTAVGELLGRPMLGYGTRIKVSTLDERVRGAGLGVGLAEVLEILHGRPVSRTSSMSSTSSVADEPRAAVRAALAEHSLGDAPWADEWARWLHQYGRVPEDELDVVVRRAAAVLAELALDRAPVAWTSRADLAARTGDAHGLDSGTTLSRVVLRAAALAHDVAAPGNEHERRALWERCGVALDGVSATVLCWSLPLTGADDWSRSVLRRTAAGLPSHLTHLDLQAAPARLVEPGTTLTVCENPRVLEAALRDDIGHPLVCLSGQPTTAGLELLRRLADDGAVLRYHGDFDWPGVGVAGALRTQLGVEPWRMTAADYRRALDDAARDRIDLPSLIGAPVETPWDPALADLMATSGRAVEEETLLPALLAVLRR

SEQ ID NO: 39362 - protein, 167 aa, Peptoclostridium difficile P28
MDEAHRLSALVFGADTCMHLKNIASRDTDSIHSGVYQEASAFLALEPRTKVARKKHERKPATDYALDRRIQRLEYEAQREAEQKKIKELSKNGEIIFSQLPLLDKATRKALLGWVSKALAASDRRAKTDQGQHYHIEKEREGDCILHCEDGNLVMPCFKILFDEEQL

SEQ ID NO: 39363 - protein, 376 aa, Peptoclostridium difficile P28; identical to SEQ ID NO: 39003

SEQ ID NO: 39364 - protein, 1335 aa, Peptoclostridium difficile P28
MHRLGLVDFWYYVNEEFSFKDGHMLLRGSNGSGKSVTMQSFIPLLLDGNKSSERLDPFGTRSRKIENYLLEEGGERTDRIGYLYLEFKRSDSEVYKTIGMGMHAKQGRPLVSWYFVIEDNLRINREVQLLDHNLAITKQVLKNRIGDTQVMDSQKEYMDRVNQALFGFETSEEYKEAITLLLQLRSPKLSNSLKPTMINEILSESLQPLSEDDLRPMSEAISNMDNIKDQLDALKQSYASAKAVYQVFEQYSHAVLFEKYHIYQTVRQTAANLHEAYQKYEEELQRHQQETKQKQENRTQLAQEQALLTEEKLSLATDDLQRLVEDCTRLAAEKEDTIQKLQHKETQEEEKSDRLQELRVQHKTQSDRCEQALSEMKEAFDQLDVLQEELLLEDHLLLKEEMFQHPDTPYDFTYIGKRLDAKLRLLEEGLQLFNSYDVAKSHHKQLVEELEQQKQTNEQQEHLVAQLDEQCDRIVEEYKERISQWSANNQHLKLTDEEFHKMMHLLMQYEEQPDFYKLTDIIQQSYQTLYKEIIHLQIEQKEMAETCRMNLEQKSAELHMWQTQKDPSPAIAGEQEQARQLLKQHQIESRSFYTLLEFDEQMDEELRALCEEALLRLGVLDAQVVHASSRSLIETLASGSGDMYFFTQRNVRDLQPYYLKGTTPEQLAGEINTVLTSLHITYDGKLQLHDAMFQTGIVEGKLYQSVSARYIGENARQKYREQMILQLQKACDMLKKEYDQEMQKLTDLDKRLEQLEQEASAFVKEDDLHLALQQLNEGRRILQHDIACYHQMEERLRRHLEAMQGIEKQLRETAGKLSITLRRNVFEQQKDGYNSYRKLLQLVQTKQPIFIQSLDFVKSCETQIEDAFRDVSEFKAEIDTLRELIKKQNLLLQQKEKQLKDLGYEDKQKRLQQIEERLHKLPDLMQELDTRLGQLQSLVAATSQDLERTKQDIEHQDALVSTYFDVVKNEAALGYTNIPLCEDGQLIKEIRNLEKQTEVLKKPEALKMDLQTAYYNHRSNLQEYNLTFTTDDTWEELTDISARLDINARYQGTSLSFPELLDCLQRDVDLQNNLLVDSDRHLFEDILVNIISKKVRIRIQNSRAWVDTMNRYMNAMNTSSGLHLNLQWKSKKAESEEEMDTRQLVEILQKDVKVVKESDLKRLSSHFRSKIAAARNLQNIENNTLSFHQLMRQVMDYRTWFEFKIMAQKTGEAKKELTNNTFYAFSGGEKAMAMYVPLFSAVAAKFESAREDAPLLIALDEAFAGVDEKNIYNMFDLISKFKFDYIMNSQVLWGDYASVKGLAIYELFRPENARFVTVIPYEWDGHIKRMKGDLS

SEQ ID NO: 39365 - protein, 427 aa, Peptoclostridium difficile P28; identical to SEQ ID NO: 38892

SEQ ID NO: 39366 - protein, 501 aa, Rhodococcus erythropolis CCM2595; identical to SEQ ID NO: 38558

SEQ ID NO: 39367 - protein, 480 aa, Rhodococcus erythropolis CCM2595
MRAREITPLALDSYQRAARVILSNHLITSTYPDRIALPLLRRWATELRDDLLELFGYRLEVTETTARLFTVSDRLNPSAPARTASERTFDRTRYAYLALCLAALGRAGNQITLSELADHVAADAAQVDGVELSTDRASDRDAFVDAVGWLGVRGAIALADGDANGWASNPEAGEALYDIDRSVVVALFRPPRALQHLHSIRGLLAADTSSAAEDDGIPVDAKEIGRRVRRALVERPVVLAGELDQHELIALAQPKTASEVELLTGLVAERRAEGIAMIDPTGRLSDVRFPSTGTIAQVALLLAGEIADRVLDVDAPELPKLPIPHVSDDHLIEQLDAAIPEAGIFEDLADEDDDFVLPAGEPAEPPEPVTYPMIDDDWLADKVSELVDQFGRTFAAQWQADHNGLRKQALGLLQRLRLTHAVDGGVLVLPVLARYRDVVVSVRERDPQIDFAVDNSAPDPVDEFGPESSTNGELSEVENV

SEQ ID NO: 39368 - protein, 1391 aa, Rhodococcus erythropolis CCM2595
MSNARFRPTRAGIINLWDYRDQEFSFADGRLVLRGPNGSGKTKALEVLFPFVFDGRIEPRRLNPFAGEERTMKSNLLYRGQDSAHSYVWMEFCRGSLEDPESVTVGIGMRATRTNDKVTRWYFVADGRVGVDFSLIGNDDRPLTKKQLAEQLGSDSITDRPLDYRTAIDARMFGLGVQRYDQLINLILTLRRPQLAKNLDPKGLSQALTDGLRPLDDQLVLEAARSFSDMEEVGRALEGLAAADQAAQSFIGVYTKYLRQQSRGEIEQVSTRLAAVTRGVAAMDESSLAQTRSREARAAAEERFNQAEQALENARANVEALQRSSAYEGKQQLDDLAQAVSTLKLSTEQQADKSRKAQAALAQRGDEADKAASSVKRAAEALSRAEDELQAAAEDAGIVWTPLPDGSRSDQITTAVRGHAEERDGDVRVVRTALATVEKAATERTRAENSSRRGQELLEASKAAVLEGAAAVELARSQCASGLRAWWTDHSSLFSAVGADTSLFEALDAALAEVGDEDAPALSAVLTEHTEAGTETLRERRREAEAEISASHASIAALKSERKAVSAEHDDAPPAFHARTDNRSDLGGAPLWQLVRFADSVEPDVATGIESALQAANLLDGWVCPDEKIPDHVSEQFLTALPVKQRPKGRTLADVLEVEGNADVPDARVQDILASISLVEAPGDSDASVAIGVDGRFWQGVARGRHVKADAEYIGTTARARRREARITEIDATLEELAAAVDAAKALVTQTNEQLSRINSAAKELPKTGSILRALKTVTESAGALRTRSEATETAQRELDAAIADLAAKEKQLRATASQHRTPHIGRELDSLAAAIRHFEKQGELALRCRREHAKEVELERESRDRLDESRANAEEFAEEAAIAEESLLQQVQRLETLRDTLGASAEQIDLDLAKARAKIEECKVEQRAARKAYDAAVLQIGTAEGAYNTAVETLRHTLTETRSDAERLAPYARPDLLELLGVKEHLSWPASSAAWMSPDQLVYRIQNEDRSEDAAHPPVLPEDVDKLYRALEAATSAVRVTDGARKATRTALTSALQDFDAQLAAAGQDYRLQWDAPDGLTVVRVQDDQGYSSIGEFATRIHDARGDQEQLLTESERRILEDALLTGLAQQIHERTVDARVLIAQMGTEMRERRMSSGNTIGVHWVLADNLDDSSRAISKLLDRDASALGVDELATLRAHFATQIRTARAAHPERSYPEILSSALDYRQWRVFSFTLISGEGKEDRLTVARHSALSGGEQSVSLHLPLFAAAHVMLDSADPHAPRLLALDEAFAGVDDNGRSELLGLSVQFDLDLFMTGYDLWITYADVPGCAHYDLAHSTAEQAVSAALLVWSNGELLAEHDGTDLARALGSPLRRRVPTPAEGALDYA

SEQ ID NO: 39369 - protein, 501 aa, Rhodococcus sp. P27
MVEETSAPDYAAYADTNRLKLFSFTIAEKRAEYLWVLRAFDHARANYTVLLHAGAVAQILEKIGGSDPAADLSAAEVTPLLDQLHVWEILERSYDGTRAATLAEYRNRHFVYQFGQAGYQVYRSVEDVLAARLDSASLSRLALPDLLADMSELAEANRSSDGDLIFRKLKRLDSTLSDMADRAAHFYLTLGDLVRTTEITPQAFLTHKDALLTHMREFSSDLARYAPKLKEAIEHVESTGVDRMIRLAAASDERVFVPITEREDDWAARWRGLTAWFVSAESGISESERLREGTMSAIAAVLALLRRVTETRRGGVSRESQLRHLAGWFAATPSEDAAHALFQAVFDLGRPRHLSMVHPDADIISHSRSWWEAPPVEIARTLAENGRPPSPGLPSKVARNDGSIRRLREEQLAAQRTRSAAAQSLASNGVYQRELNEQETEVLLSLLNAALTARVPVVGRVKSSTGSENGVKLTLSPSDGSTTIKTARGRMHLDGIEVSVR

SEQ ID NO: 39370 - protein, 480 aa, Rhodococcus sp. P27
MRAREITPLALDSYQRAARVILSNHLITSTYPDRIALPLLRRWATELRDDLLELFGYRLEVTETTARLFTVSDRLNPSAPARTASERTFDRTRYAYLALCLAALGRAGNQITLSELADHVAADAAQVDGVELSTDRASDRDAFVDAVGWLGVRGAIALADGDANGWASNPEAGEALYDIDRSVVVALFRPPRALQHLHSIRGLLATETSSAAEDDGIPVDAKEIGRRVRRALVERPVVLAGELDQHELIALAQPKTASEVELLTGLVAERRAEGIAMIDPTGRLSDVRFPSTGTIAQVALLLAGEIADRVLDVDAPELPKLPIPHVSDDHLIEQLDAAIPEAGIFEDLADEDDDFVLPAGEPAEPPEPVTYPMIDDDWLADKVTELVDQFGRTFAAQWQADHNGLRKQALGLLQRLRLTHAVDGGVLVLPVLARYRDVVVSVRERDPQIDFAVDNSAPDPVDEFGPESSTNGELSEVENV

SEQ ID NO: 39371 - protein, 332 aa, Rhodococcus sp. P27
MRGHAEERDGDVRVVRTALATVEKAATERTRAENSSRRGQELLEASKAAVLEGEAAVELARSQCASGLRAWWTDHSSLFSAVGADTSLFEALDAALAEVGDEDAPALSAVLTEHTEAGTETLRERRREAEAEISASHASIAALKSERKAVSAEHDDAPPAFHARTDNRSDLGGAPLWQLVRFADSVEPDVATGIESALQAANLLDGWVCPDETIPDHVSEQFLTALPVKQRPKDERWPTSSRSKAMPTYPTLGYRTFSRRSVSSRHRATPMPASRSASTGASGRASRVAGTSRPTPSTSARQRGRVDAKLGSPRSTRLWKNLPRQSMQPRHW

SEQ ID NO: 39372 - protein, 535 aa, Candidatus Microthrix parvicella RN1
MNPLDSVPSAGEAQPSAKATTGADHRQAEASPMPDQGPGALHLRVLDGEERNKLRVLKAATETNAPIYLAILAVFVAARERYEVEIRTERIAAELTGAGIDVEGLDPALEQLRDWGNLTLTQDTVRVSRLEDFRRRRSLWQLTAAGQASHEAVLAVLGASDQGGSLQRTLFRDIRDNLALLADAIDRADAEQVYLRLRDLDGSLRELAANARDFHAAVAQLRREHDVDPARFLVYKDLLIDYLEQFLDHLMTQRGLVARGVEAVNERGIERLGELAAAGDDSAGLFDTGDRAALWRNRWTGLSDWFVSVGDRPSGADDLTAATTTAIRELLALLRQVTESARRSITRASELLVLARWFRRIDDRAAAELFDAAFGLGRPLHLSDGETDDESVAASDSWWDAPPVNVPVTLREHGRRPSPGRPAQATDYALTKAQLMAEHRAAQSARAEAAARLCARPVEGRVLSDAEATILFELLDRAAHLRSVGDEPGSDDPVRVEGAQATFRCDPDGMVIQTRRGSLTIGEHRLHIESVGATP

SEQ ID NO: 39373 - protein, 443 aa, Candidatus Microthrix parvicella RN1
MSAATGLIAPFDGTTAGPRAAVQIDAGELEDFQRTARLLLGHPLVTPTWPNPRALTTVRRWEVPLRNEFSRVLGFRLDVGRSSARLYRRAATTSVHRGPFTRTLRPLGHVACSFLCLVLAALEELGDQTTASRLADAVLRLRSGDDALPVDLTVYTQRRAFVDAVTWLEDRGVLGLRDGGADQWLDHDAEGDALYDVDRDCVSRLLVSSPSVLRGVGEAADFLVEPTAPGTEDRPQALRHRLARRLVEGPVMSYIDLGPEELAYVRERRTRLVRDLEQLTGCHVESRAEGMSLVDAQIEPITESKHRFPGGGTLTQAALLWGAALVDLAATGEEVAAEMVRDPEVRPAVAAERWVGDAAGEQAWEDIVEEYRSRFSSDYRESPDKLRREVRELLGRFGLLGVEDDRLRVHAALARYRPDTEAEIGVAARQNTLTSQLFGDDHS

SEQ ID NO: 39374 - protein, 1459 aa, Candidatus Microthrix parvicella RN1
MSETGTDHQANSDEVADRWRPHRAGVRNVWEYDDQVFSFADGRLILRGPNGSGKSNALALLFPFLVEGVMSADAMDPFAGGRSMRSLLLGVLRDDDAGSRKFRHEQRLGYVWMEFERTASGNGATPEHLTIGCGARATAASTNTASWFFVTDQRVGLDFELAPDGSPLTRGRLRDELGNAAVFDTAETYRAAVDRALLGLGADRHQKLTTLIRVLRRPQLAGKLDLRLLSEVLSGGLPSLDDRVLDDVAQSLDDLEATQRDLADLKVTRSIVDAFVPVYVAYLGGEALGRSAAVIDAAQVLRRANRTVVDAEAEATRLDGAIAENESKRRGAALERSAADGRRSAVLESPAYRDASSLVEVEGSVGRAAKVKRNAAEQRDACAGRAEAAQSAASTAAERAAESLSGAEAALTEVEDSADAADIAWTLTRDEARRPDRLEPGARVAERARRDDLKVVRAALVQRNEAARDHARAEEAASQALRAVDEADVAVAEAETSTRQRRTELSESVERWVAGAPWLAEVVDAAAEREARDPASVDAQPVDTAEVRERLAAAVGTVGESGAPSLSAAFREATDPARVGLIERRSASKGHIDTLTAAVGSLETQRDEVASETDPGPAPPTWRTEREPGRPGAPLWRCCDWAPGVDDHDRAQLEAALDASGLLDAWIEPDGDEPATRTSEGSADSWFASLSDAEPGDPTGLASVLVPSVPEGSGLDEQVVARVLASIELTDHGAINSGPRRGASGVSAGGRFALGPLRGRATKPEPEYVGATARAERRRRRLAELDALIVAAAEAVEVEIAVFQTLEAALVALRAASSTLPSEDGLLRSLNAERSARSHAEARREVAERAEEAESVAAGSAAAAESDLQSTAARHRLVGDDASLDRVTELVDRYAGAVRSALTIRRTAESDAERADQDAERAAEATQLLSNAERDLAAAAEEHSTLASRAATLRERLGDDAEAPLEALKRAQADLDEIEVRFDVLWEALGELQTSRGRAGEAADQARAAVARHEATLTARSERLPVLRRRDLLALLLPDHFPADAPAPDPSETRQGDGDAAPSIEADAGSSARPDHSVDASRGPEAHVVPSEELPVDAVAFARWLNGRLDGVAPTPQQREQNIAALDRAQKKVIDELHHGYDAAFPHDDDLVTVEINSDAGMVSLADLTAELARQDAALQSYLTEGDREVFERFLLNQVSHQLRRLLTDADEFVAGVNQALADVRTTSRLGVDLGWELNTDDPGIRQAVKLLRHDTEQMGEDERQALRSFFERVIRAQRAEDPTAGYRAALEKALDYRAWYEFRPYLRTADNKRVKLTRNQYRQLSGGEQAMALHQPLFAAAAAHYDRADPTAPRMIALDEAFAGIDEEMRGKLMGLTVAFDLDVILTGHELWGAYGEVPSVAVHDLLRRPPAEGVSVVSLRWDGHELIEDDELAGTATESLLQVAPDEGLFAFDPDGT

SEQ ID NO: 39375 - protein, 431 aa, Candidatus Microthrix parvicella RN1
MSDERRVAARAALRGAEYGPLWVKARRRLERNGLSLEGTPLRLDGLDLAQRPAIAGLLGTSAAGDKPLSVRLENLDGRLRRGAAAVGLVEWLEALDGPIRNRPAERAGAQAERETSWSRTEAHPMLVERGELRAWIAEVRRSGAATRMAGSVSAGAELASRVLDVVAVLPASHITLAQLGAQLTGDAHALDRDRALGRLVDSALRAISAVADEESDTGTRGEVTSVGGANDWRRRWARQGVICDDLSVSTLVLNLPTSGTDLIAAVLSDHASCGEPVRLTLRQLAEAELGIKKGTLVRICENPSVVAHAATTLEGDSAPLVCVEGQPNTAVLRLLDLLTADGAVFAYHGDFDWGGLRIAKAIIDRYDVNPWRFGVDDYLAAAPSGTLTLGPPATGVAAPWSPGLVEAMTAHNVAIHEEQVLDHLLADLTTR

SEQ ID NO: 39376 - protein, 488 aa, Rhodococcus aetherivorans; identical to SEQ ID NO: 39225

SEQ ID NO: 39377 - protein, 456 aa, Rhodococcus aetherivorans
MRARRISPLDRDSYQRAARLILSHHLVTAQYPDRAALPLLRRWATELREDLLELFGYRLEVTETTARLFTVADRLDPGGGARTVTDRPFDRRRYAYLALALAALGRAGGQITLSELAEQVASEAGQVPGVELATERATDRDAFVDAVAWLAARGAITLADGDAGGWVSDPDRGEALYDIDRPVVAALFRPPRALQHLRSVRGLLAAGDGRDGDRIADTAEVARRVRRALVQRPVVYAEELDDDARLQLALPRTTAGIELLTGLVAERRAEGVALVDSSGRMSDLRFPGVGTVPQVALLLAGEICARVSDPESVPVRLPRPADAEAELEAGLDAAIPAAGVFASLAGDAGAGPADTTPAQQPAPTHPLVEDSWLAETAAKLVDEFGRTFAAQWQADPAGLLEAAVTLLQRQRLVARVPGGVLALPALARFRGVVVTVRERDPRLAPAGEDSNEAEMS

SEQ ID NO: 39378 - protein, 1014 aa, Rhodococcus aetherivorans
RAAAAATDAAAAVGRAEDALAAAARDAGVEWAPPAEDALGEQIAVTVAACAEERAADVRAVRAAVAAAEGAAAARVRAETTAERGRAQLESARAAVATADAVVELARAEASNLLREWWVGHRDTWSVLGLPEELVEALAAAIAAAGDDEAATPAAALAERTAPVVEELRFRGRGLEAEITHARERIAVLRAERDLVEAERDDAPPSFPMRPTGSSDPSGAPLWRLVRFADDVSAEAAAGLEAALEAANLLTGWVCCGAGDVPAGAVALMPVPPAQRPTGRTLADVLVVEPDTGVPAERVRAVLASVAVRDAVTDETGPAVDERGGYRQGVQLGRHTKAEVEYIGATARARRRRLRVTELDAEIAAAQNRMAGAEAERAELDGRLAQLERAAAAVPRTGAVLAALRKVSECAGALRTAGEAAAAADRDLDQVIAECAVKEQRVRSVAARHRAPHTARELEHLAAAIRFFESQGQAVLRARREHVAAAERAREAQVRRDDARLAAEESAERAVTAEESLGQQQQRLGTLREALGADAQQIDAQLAQARERIEAARVEQRAARRAHDDAVERLGKAEAAHVAAEQALRSALTETRADAAQLAPYARPDVLSLLGISEELRWPSAAAWPAPEQVVDRLARAGGDVPAVPAEVGALYAALAAATATIKGGDGARKAARSALTSALQEFDGQLAAAGQDYRLQWDAPDGLTVVRVQDEQGFSSVAEFAVRISAARRDQELLLTDAERRILEDALLAGLAQQIHERTEDARDLIARMGAEMRQRRMSSGTTVGVRWVPADHLDDQARAVCRLLDREVSTLGPAELASVRAHFAARIRAERAAHPERSYPEILATTLDYRRWRVFAFGLIGADGAEDRLTVARHSALSGGEQSVSLHLPLFAAAHVMLDSADPQAPRLLALDEAFAGVDDNGRAELLGLSVQFDLDLFMTGYDLWITYAGVPACAHYDLAHSVAEHTVGATLLVWSEGGLLAEHDGSDLAAALGSPGTRRVPAPVEGALEFA

SEQ ID NO: 39379 - protein, 504 aa, Rhodococcus equi NBRC 101255 = C 7; identical to SEQ ID NO: 38794

SEQ ID NO: 39380 - protein, 470 aa, Rhodococcus equi NBRC 101255 = C 7; identical to SEQ ID NO: 38795

SEQ ID NO: 39381 - protein, 1390 aa, Rhodococcus equi NBRC 101255 = C 7
MASARFKPTRAGIINLWDYRDQEFSFADGRLVLRGPNGSGKTKALEVLFPFVFDGRIEPRRLNPFAGEERTMKSNLLYRGQDSAHSYVWMEFARGPQDDPEAVTVGIGMRASRQNDKVTRWYFVADGRVGVDFSLLGDDDRPLTKKQLAEQLGSDAITDRPVDYRAAIDARLFGLGAERYDQLINLILTLRRPQLAKNLDPKGLSQALTDGLRPLDEQLVLEAARSFSDMEEVGRALEGLAAADQAAQSFVTVYSKYLAQQARTDVEQVARRLESVDRARSVLDAAVALQSSRQEERLLAEDRFTAAERALEQARADLDTLQRSGAYEGKQQLDDLAAAVAQLKLSTEQQADKARKAQATLEQRTGEATRATESVRTATAALVRAETELAEAAEQAGIAWTPLPEGSRSDQIIAAVRGHAEERDGDVRAVRAALATVEKANTERERADRAADKGRELLEAAQAAVAEAEATVELARADCAAALRSWWTEHSADYAAIGVTADLFAALDKALAQAGDDDSPSLSTVLHEHVESALDEQRARRREAAAAQAAATARIAELQTDRKHVAAEKDDAPARFASRTGDRSELPGAPLWRLVRFADDVEPVIAAGVESALAAANLLDGWVLPTDDAPADIESEQFLEPLPEDRRPQGATLADVLAVESDTGVPEDRVRAILDSVSLDRDGSARDTHVGIGVDGRFWQGIARGRHVKADAEYIGTTARERRRAQRIDELDAEITAAEDARTAARAVEGDAKALLDTLAGAAKSLPRTGAVLAALKKLTEAAGALRTRSESTESSGQELDQAIADHTAKEKQLRAVAVAHRVSHHARDVDALAASIRHFESQGEQLLRCRREHEKELELHREAEDRLEEARGNTEEFVEEAAVAEENYAQQVSRLETLREALGASAEQIDADLEEARARIEVCKTEQRAARKAYDAAVEQIGKAEGAHNAAVEGLRSALTETRTDADRLAPYARRDLLDLLRVEGEHTWPQSAAAWLTPDQLVYRIVTEGDPDAPILPAEVAALYRAMDAATASVRTSENAKKSTRSALTAALQDFDAQLAAAGQDYRLQWDAPDGLTVVRVQDDQGYSSIGEFSTRIAAARQDQEVLLTDSERRILEDALLTGLAQQIHERTADARDLIAQMGAEMRERRMSSGSTIGVHWVLADNLDDTSRAVSKLLDRAPAALSADELATIRAHFAAQVRIARAAHPERSYPEILASALDYRRWRVFSFTLIGGDGSEDRLTVARHSALSGGEQSVSLHLPLFAAAHVMLSSADPHSPRLLGLDEAFAGVDDNGRSELLGLSVQFDLDLFMTGYDLWITYPGVPGCAHYDLAHSTAEQSVSAALLVWSGGDLLAEHDGSDLARALGSPLRRRVPATADGGLEFADA

SEQ ID NO: 39382 - protein, 496 aa, Geobacillus thermoleovorans B23; identical to SEQ ID NO: 38981

SEQ ID NO: 39383 - protein, 398 aa, Geobacillus thermoleovorans B23; identical to SEQ ID NO: 38982

SEQ ID NO: 39384 - protein, 1373 aa, Geobacillus thermoleovorans B23; identical to SEQ ID NO: 38983

SEQ ID NO: 39385 - protein, 406 aa, Geobacillus thermoleovorans B23; identical to SEQ ID NO: 38984

SEQ ID NO: 39386 - protein, 518 aa, Halomonas sp. PBN3
MGARLDYTPFSYVTAEKAELYRRVMRAFVEAKSHFLVHLRPEDVQQQIGEAELASVQSALTQLVTWGNLDAERDNARVTSVEDYYRALYVYQITRQGEAVEAALATFEQELGRRGALQSVALEDIRTRLRALLTLAQSDTPSATESQLLLRDLAGVFADLAENARAFMTGLNRTLEGQGSDVDAFLLYKERVIGYIERFLGDLTTASGEIAELIRALDGIGDAQAPVARLLRQAAERELTDLAPGESADDDERAKAFAEAWRRWHGHWEGLRAWFLDQPGRQAQARLLRSSARRAVTQLLEMVGRLNERRMARSDRSADFRTLARWFLECNNDGEAHRLWRTAFGLTPARHLVIDAETAEAWRQAPVPASMPWAEAPGMQVQARLRATGSYQKAGAPPKLRSRARERELLARQLAEEASAARAARRQLVERRAERLSELGELDDGAFRLLLNLLGDALAASPGDDSPVTTTTGDGSLRITLTPLGPETIATLHTEAGMLTGRDYRLEITDLEEDTWRS

SEQ ID NO: 39387 - protein, 429 aa, Halomonas sp. PBN3
MEELSDALTRQRQEEQRRALRALLARPLIRSDDPAFPLIRRHAATLRDWLARETGWHLQSERDFVRLHKRATDLGDTTRPATVGRGTQRKTFNRRRYALFCLLLADLERGDAQITLGRLGEGLDQAVDDPALAERGLAFSLDQQEARRDLVVVVRLLMALGVLVRVAGDEEQFLRRGLEGDVLYDVDRRLLAALLVTARGPSLVALNGADAELDLERRLHALSETFVPDTPDGRNREQRHRLARRLLDDPVIYFDSLDDDETAYLTNQRGPLLRRLQQATGLVAEVRAEGLALVDPEGELTDEKMPAEGTEGHLALLMAERLAESGPDGVTMEEAETWILQWQTDFRRYWRKSACEPGAAHGLARQTLARLASLGLVRRQAPSRSLGDGGRILPLPALGRFRVRAPSLPDASELPRHAQPDLSESLTDD

SEQ ID NO: 39388 - protein, 1384 aa, Halomonas sp. PBN3
MNELPEPQSPRWQPLRCGLVEIFYYDEEVFHFHDGRLLLRGNNGTGKSKVMALTLPFLLDGQLLPSRVEPDGDSAKRMEWNLLVGEYQERLGYTWLEFGRLGDEGPETFTVGCGLKAVAGRPVRSWFFTTPQRVGRDLFLIDNGRSVSRERLGQALGSVGQLYDRAADYRRAIDERLFHLGEQRYGALLDLLLQLRQPQLAKKPDPNRLSQALSDALPPLGRGLIGEVAEAYRSLDVYREEIQGLEETARAVEAFLGHYRHYAGIAVRRRADFLTAAHAEYERVRLQLGRDRQAHEEARGSREALGESRELLAEQQRELAARQRTLEASDAMRSAEALRNADELARQRRTRADEEGRRLGRERDSDRRAEARLLEAEASLKGGVANLEARRDESAALADAAGVGGDHRREIATRLSAETGEQVLPNARGVESLQHALRDLHRRRAEGVTHLNRRLDEVDKAERAFHRVEDEARREEETLASREEECQDATSARVEAAETLQTDWREHLAALKELAPEDPEAMLAELAPWCDHLSGDDPAESGLSMARDARREALGQQRHTLEQRHRELGVERAELEAEHQRLAAGEARVPPAPHTRGEGSREARPGAPLWQLVDFQTGLEARQRAGLEAALEASGLLDAWVLPDGELLAPGTWDTLLTPFADGAMRPAEESLTTALCPDLPEHSPVSQRVVKALLAGIGLGASDTVAWVSTDGAWRLGPLGGQWGKDEAVYIGHAAREAARRRRMAEIAHALEGLAIEVAGITAELEHLDACLEVIDQEWQGRPSAQALRDAHAAEAAARRARDTQAARLEHAQARREEAREALEAQRGELYIAAEDLRLPAEREPLARLQSALNDYRFAINELVQAITTWQQARQRHGELRDERQRAREVLDQGEREFAKAEEQAREAEVRRDTLRDTMGAEVQELERQLAVIQQRSEALATEQRELASRFETLLGEVARFAEKVTQGEQRLGELDERRAERIADFRALVEEGLLRVAAPERFMDQEAPTSWAADPAVRLARAAAQATAGIAADDESWHAHQGRLHEHIKLLTDVLSRGGHDCIAEARDDLLLVRIVFQGRRQDPDALYRQLNDEISQRQALLNARERELLENYLIDEVASHIQERITDTERHVREMNGELESRPTSTGMRLRIRWQPLSEGQSAGGMTAPAGLEDVCQRLRRQALDAWSAEDRQVVGDFLRRRIEEARASDEGGALQEILERALDYRFWHRFVVERHQNGQWRPAYGPASGGERALVITLPLFAAAASHYGSAHEQAPRLVMLDEVFAGIDDDARAKSMGLLAQFDLDAVMTSEREWGCYPDVPGLAIAQLVRREGVDAVHVTRWRWDGKRRTRDEVPASQALREVAEPAETITPGGMDSLF

SEQ ID NO: 39389 - protein, 420 aa, Halomonas sp. PBN3
MTSDVDHARLRRLLGGPELARLRQRLRGKLLREGGGRLTMSQASDSERATVERLVGRPPRRGKSLSVDLEALSRALARAGVAQDLRHALEALDGPLVDHRAVREESRRRWSELLDTYHPEAERLGVSSWLEDLRRGGQLKRLAGGSEGQGSHLLEQAITVLERLPAQGLTLSTLAAECLGDAHALDAGQPVSALVRRALARHWRGGVALDKPDERSTWAHAGVLLGGDITSAVLTLGLPVRDESGLEAALAHYYRLAEPSWLTLRQLLRHPPEWDVEGRDVYVCENPAVVAEAAERLGTDSSPLVATWGRPGAAVLTLLEQLEAAGACLHYHGDFDWPGIGIANALLARFSMRPWRMAAADLEADAHLAGKPLEGKPLDALWDPRLSTAMELRGQALHEEQLIETLLDDLRLRGDHTATG

SEQ ID NO: 39390 - protein, 490 aa, Enterococcus cecorum DSM 20682 = ATCC 43198; identical to SEQ ID NO: 39268

SEQ ID NO: 39391 - protein, 373 aa, Enterococcus cecorum DSM 20682 = ATCC 43198; identical to SEQ ID NO: 39269

SEQ ID NO: 39392 - protein, 1352 aa, Enterococcus cecorum DSM 20682 = ATCC 43198; identical to SEQ ID NO: 39270

SEQ ID NO: 39393 - protein, 413 aa, Enterococcus cecorum DSM 20682 = ATCC 43198; identical to SEQ ID NO: 39271

SEQ ID NO: 39394 - protein, 518 aa, Streptomyces sp. GBA 94-10
MRRVPPEMFRFTTGETADLNGAVLEAFGVAGEHLETALGLDGVRERLRAVGWVSDLQDEELHETLKRLVKWELLDVVHNHAQNYRTAEEYERRNLHYSLTRRGEAALAGVRHALEVLASTGALQTAVLEAITDRLDELTVLSSEPAAADRRIFSTLRELEGHLEGLVENTKAFNGQLQRLLRAEGVDLDVFREVKAATVAYLQEFLVNLDRRGETVAAAVARVEERGIAVLRERALRGAELPPAPGEDPAAGWLESRRARWAGLRAWFLPNDGARPRIEQLHDIARRAIVSLLQVLERINESRRRPSSAVQDFRELARWFAAAPEEEDLHRLWSAAFGLSPARHAHLAHPDPELIPSSHSWSQAPPVQVSALLRTSGRTERFTRTARVRDVTAVRAERAERARAERAELARAWQALETDGPVRLSSFSALDSVVFDRLLDLLGRALAARPDADGRRRATTGDGRVEVALSPPPDGRTAVLRTVQGTMAGPDYVIHVTAAGGAKAFPAARAATGQEAAG

SEQ ID NO: 39395 - protein, 437 aa, Streptomyces sp. GBA 94-10
MSTLANQLASAEREEVARAIRLLLARPLLTEAADPTGFDLVRRRRDPLARWFDYTCGWNLVVEPRRGYARLTKVRADPDGSRPARRARSGRAPFDRRRYVLLCVTAAELLSMPMTTIGMLADRVVQAMAADRALAGFDPVRRPERLAFVDVLKVLESYDVLRAVDGTTETYVDSAEAKVLYRVDNTLLMRLPAAPVGASRLAVPPQEVPARFEDLLAGLVRERRYGGATADGTADDTHAEIAATTDAQRNLRLRHSVLRRLFDDPVLYRADLADDELAYVTSLTGRQILRRSVEQAGFLLEERAEGFLLVDPDAIATDVRFPDDTSTARVAALLLLAPLCAMPAGLLPEQLAEAGAELLRRFPGWAKAYQSEEGPARLADDAVRILLDVGLAGRARDRVIARPAAYRYRLTETTGPAPKNDPPAVTTAGSAGEGDKQ

SEQ ID NO: 39396 - protein, 1377 aa, Streptomyces sp. GBA 94-10
MSVTELPLQRRPEETFEPSPVHEADTGRGRWQPHRAGILNVWRYYDETFTFHQGRLLLRGQNGTGKSKALELLLPFLFDASLRPNRLSTFGGSERTMHWNLLGQGASGKTRVGYVWMEFRRVGDDGTEHWSGCGARLHASVHTTTAHADYFTTTARIAHPDGVHLVNDTGQPLTKAALAEALRDRGEVHPSATDYRTTVRRELFAGMGEQRYESLLSALLQLRQPKLSERLDPSLLSTLLSRALPPLGEGEITELAEGFERLDRQRDHLDRLDAEVAAAENVASRQRAYARRVLRSGAASLISATTEMDDLTRNARVSAEEYEKACEERASTLALREELELRAHALDEIVEGLRESDAYQKGEELDRLRHDTEDQVAAAAELRTAARSAETEAEEDRKHADEVAGHARSRDEHARATADEAHRSARAAGMEAIHHEVKTILDAEGEVKSLGDGTANTPVRTGSGRSDAPGTAARRLLRGAVTARREQIADITDAIDAHDRAVRDRGTAEGLLEEARTRLADAIAHRDAAATAGDNALVAQAERLLAWARDCTEMRIPDLDELTARAAVEADVRELVETVARPLEEEITTERAGVGAAQQGLKQERDLLDARRRKLSGETDLRPVAPPTRTTVRTAAAGAPLWQLIAFHEDVPLAVQAGVEAALEASGLLDAWVSASEGLTLPGHDTRVEVGLATTAPGSSLLDVLRPEEDIPVPAGTVTRILAGIAYGTTLPGGHPAAVSSDGAWRLAPATGSWSKPEPAHIGALARQRAKQREIAELTELIAEKDASLATLADRLRELGARAARLAEDRTARPDHRELDACRRDWDRAEEKVAARDDAVRDATEHLAAREGDVAGALRTLSRRAAEHGLPTDRDRLRELGRDVESFRDLADAWTDARIDAIAAAERASETAARADRSRLRAEKQTADAVAAEAKAAGMTARLKAVEETVGADYRQIVARVAETRAERVRCGKEARQAAELLLGLEGRIGELRATSGQDADRQAKAVEARDGAARRFRHLCLVGLAEDAGVVPELDTGDGTKATLEAARAMAARWPQVPHAPRHLGDAATRLSEAVHEARRHLGVRADLELEPDDDIQLFTATLEGVRVGATGLLAALAQERDRSRGDISTAERRLFDQILTGDIRRHLAARIRRAGELVAHMNGHLEGVRTASKVAVQLVWDVRPDLPDSTRTARQLLLKDPGRVTESDREALHAFFRARIEEAKGSDKAASWEEHLGEVLDYTAWHTFTVRLDRADGSGWQPLTKRLHGALSGGEKAIALHLPLFAAVAAHYEDVPLAPRPILLDEVFVGVDTVNRGQVFALLTALDLDLMITSDHEWGNYRELPGIAVHQLLTDGDDAVTSARFVWNGTGMEEG

SEQ ID NO: 39397 - protein, 442 aa, Streptomyces sp. GBA 94-10
MIFRDHPVSGGTTSREHFASGDETLRRPELHPVWQTVHDRLSSGRPVTRVRLGLLDETQREALADLLGLDRLPDPRPSVALARLEEAVTELSGRTVREVVAELVGPLGDRAGERRRQEGERAGLWTWLAGHDTVRAQPALADWAASCRAAGLVGGSTERTRTLLTDALKVLVELPGQAEPLPVFAARVLNGHAHALDDGTSVSTLVLRALATLYDIAPPQSAAERRALWSRAGVADDELSATVIAGGLRPLGDGLLARVARLCTEVGQAASLTLAHVRSPGELTLPATSAPLVVHVVENPSILALALRRFGSNCPPLVCTSGWPNSAAVQLLRLLADRGAALRYHGDFDGEGIRIAAYVTEKTGARPWRMTAADYRSAIARNAHGPRPGRITGAPWDPELAEAMAEHDIAVVEELVADVLLEDLAAAACQQHPSGDLYAPGY

SEQ ID NO: 39398 - protein, 518 aa, Streptomyces sp. PVA 94-07
MRRVPPEMFRFSTGETADLNGAVLEAFGVAGEHLETALGLDGVRERLRAVGWVSDLQDEELHETLKRLVKWELLDVVHNHAQNYRTAEEYERRNLHYSLTRRGEAALAGVRHALEVLASTGALQTAVLEAITDRLDELTVLSSEPAAADRRIFSTLRELEGHLEGLVENTKAFNGQLQRLLRAEGVDLDVFREVKAATVAYLQEFLVNLDRRGETVAAAVARVEERGIAVLRERALRGAELPPAPGEDPAAGWLESRRARWAGLRAWFLPNDGARPRIEQLHDIARRAIVSLLQVLERINESRRRPSSAVQDFRELARWFAAAPEEEDLHRLWSAAFGLSPARHAHLAHPDPELIPSSHSWSQAPPVQVSALLRTSGRTERFTRTARVRDVTAVRAERAERARAERAELARAWQALETDGPVRLSSFSALDSVVFDRLLDLLGRALAARPDADGRRRATTGDGRVEVALSPPPDGRTAVLRTVQGTMAGPDYVIHVTAAGGAKAFPAARAATGQEAAG

SEQ ID NO: 39399 - protein, 437 aa, Streptomyces sp. PVA 94-07; identical to SEQ ID NO: 39395

SEQ ID NO: 39400 - protein, 1377 aa, Streptomyces sp. PVA 94-07
MSVTELPLQRRPEETFEPSPVHEADTGRGRWQPHRAGILNVWRYYDETFTFHQGRLLLRGQNGTGKSKALELLLPFLFDASLRPNRLSTFGGSERTMHWNLLGQGASGKTRVGYVWMEFRRVGDDGTEHWSGCGARLHASVHTTTAHADYFTTTARIAHPDGVHLVNDTGQPLTKAALAEALRDRGEVHPSATDYRTTVRRELFAGMGEQRYESLLSALLQLRQPKLSERLDPSLLSTLLSRALPPLGEGEITELAEGFERLDRQRDHLDRLDAEVAAAENVASRQRAYARRVLRSGAASLISATTEMDDLTRNARVSAEEYEKACEERASTLALREELELRAHALDEIVEGLRESDAYQKGEELDRLRHDTEDQVAAAAELRTAARSAETEAEEDRKHADEVAGHARSRDEHARATADEAHRSARAAGMEAIHHEVKTILDAEGEVKSLGDGTANTPVRTGSGRSDAPGTAARRLLRGAVTARREQIADITDAIDAHDRAVRDRGTAEGLLEEARTRLADAIAHRDAAATAGDNALVAQAERLLAWARDCTEMRIPDLDELTARAAVEADVRELVETVARPLEEEITTERAGVGAAQQGLKQERDLLDARRRKLSGETDLRPVAPPTRTTVRTAAAGAPLWQLIAFHEDVPLAVQAGVEAALEASGLLDAWVSASEGLTLPGHDTRVEVGLATTAPGSSLLDVLRPEEDIPVPAGTVTRILAGIAYGTTLPGGHPAAVSSDGAWRLAPATGSWSKPEPAHIGALARQRAKQREIAELTELIAEKDASLATLADRLRELGARAARLAEDRTARPDHRELDACRRDWDRAEEKVAARDDAVRDATEHLAAREGDVAGALRTLSRRAAEHGLPTDRDRLRELGRDVESFRDLADAWTDARIDAIAAAERASETAARADRSRLRAEKQTADAVAAEAKAAGMTARLKAVEETVGADYRQIVARVAETRAERVRCGKEARQAAELLLGLEGRIGELRATSGQDADRQAKAVEARDGAARRFRHLCLVGLAEDAGVVPELDTGDGTKATLEAARAMAARWPQVPHAPRHLGDAATRLSEAVHEARRYLGVRADLELEPDDDIQLFTATLEGVRVGATGLLAALAQERDRSRGDISTAERRLFDQILTGDIRRHLAARIRRAGELVAHMNGHLERVRTASKVAVQLVWDVRPDLPDSTRTARQLLLKDPGRVTESDREALHAFFRARIEEAKGSDKAASWEEHLGEVLDYTAWHTFTVRLDRADGSGWQPLTKRLHGALSGGEKAIALHLPLFAAVAAHYEDVPLAPRPILLDEVFVGVDTVNRGQVFALLTALDLDLMITSDHEWGNYRELPGIAVHQLLTDGDDAVTSARFVWNGTGMEEG

SEQ ID NO: 39401 - protein, 442 aa, Streptomyces sp. PVA 94-07
MIFRDHPVSGGTTSREHFASGDETLRRPELHPVWQTVHDRLSSGRPVTRVRLGLLDETQREALADLLGLDRLPDPRPSVALARLEEAVTELSGRTVREVVAELVGPLGDRAGERRRQEGERAGLWTWLAGHDTVRAQPALADWAASCRAAGLVGGSTERTRTLLTDALKVLVELPGQAEPLPVFAARVLNGHAHALDDGTSVSTLVLRALATLYDIAPPQSAAERRALWSRAGVADDELSATVIAGGLRPLGDGLLARVTRLCTEVGQAASLTLAHVRSPGELTLPATSAPLVVHVVENPSILALALRRFGSNCPPLVCTSGWPNSAAVQLLRLLADRGAALRYHGDFDGEGIRIAAYVTEKTGARPWRMTAADYRSAIARNAHGPRPGRITGAPWDPELAEAMAEHDIAVVEELVADVLLEDLAAAACQQHPSGDLYAPGY

SEQ ID NO: 39402 - protein, 353 aa, Streptomycetaceae bacterium MP113-05
MASLTHSPAPLASPASSADYAPFAHLTAPNAVLYRAVMRTFLAAKERFAVHLRPEDVHTGMAAGSRPTDPEAVVKALDALVGWGNLRADPDTARVTAVEDFYRKRFIYQLTRAGEATEAALGTYDEVLGRRGELQAVALHDIVTQLRALLVIAAEGEPDPAKAHVALSVLTARFTDLADNARAFMGSLQRTIDLHDVEVEAFLAYKDRLIQYLERFIQDLITLGGRIAALIGELEAQGRVGPLLELAAVREAADAAPEDAAQAEAAARERWAARWSGLAEWFVSGEGRESQARLLRGRALNSIPQLLAVVRQLNERRAGRSDRSADFRELARWFAHAPDDDARHRLWRGGVGP

SEQ ID NO: 39403 - protein, 425 aa, Streptomycetaceae bacterium MP113-05
MTGRLTEVLDGQREADLQRAARALLKEPLLTADGPHADAFRLVRRHAAALREWFERNAGWALRTDADTARLRKTPGVLTDSTHPAREVGRAALPFTRRRYVLLCLTLAALERGESQVALGRLAEQVVLAAADPELADAGITFTLERRDERLDLAAVVRLLLRFGVLRRVAGDEEAYVSGSGDVLYDVRRRVLAGMPATLRGPSLVESREAEARLAEMTAQSALDSDELRFRTIRWKLTRLLLDEPVLYYDDLADDELAYLTRQRGFLTARIGELTGLVAEVRAEGIAMVDPLDDLTDVRMPEQGTHGHITLLLAGHLAQAGRPVEAAELASRVRELAAEHGSFWSKSAREPGAEPELVAQALAKLVALGLVERTERGVVPRPALARYAVGEPVVREAKAAPGRSSARRAARRTAAPLGTTQKDEA

SEQ ID NO: 39404 - protein, 512 aa, Streptomycetaceae bacterium MP113-05
LLAALWPALREHTEAEHTVEGERVETARAEALVTELAERAAEAARLAAAADEHHATLGSTVGAAVAELQQRLAETAAQLRGCQDAQRRAQQEISDATGRCGHAEGRIERLGDDIGETTAARERAVAGLQRFTATGLLAVALPDTEVPGTDAGAWAATPAVNLARAVESRLSDVDDSDAAWERVQKRLSEEFGRLQDALSRHGHTATARPSEDGMRVDIVYQGRERAVPELAEALASEVAELTRILSAHEREILETHLITEVAGTLQELIGAAERQVRAMNTELEERPTSTGMTLRLVWRASRRAPQGLAQARERLRQSADAWSPQDRAAVGAFLQEQIARRQADDSTGSWLEDLTAALDYRSWHEFGVERHQHGKWVPATGPASGGERVLAVSVPLFAAASSHYASAGGAHAPRLVTLDEAFAGVDDDSRAKCLGLLHAFDLDVVMTSEREWACYPQVPGIAIAQLSRVDDIDAVLVTRWEWDGSERRRGTEPGPDSLPVPPPGDAGEPAVP

SEQ ID NO: 39405 - protein, 342 aa, Streptomycetaceae bacterium MP113-05
LDAVDAILRRSGVSPEGLAAAVVALTGAVPLRAEVRDAQDRAWETAYHPLDTLDAELGDWAVRVRKDGLVRRLASTPAAAGPLVDAAVRVLCALPVTPPTSRATFAARHLSHAHALDEGTPLAALVLSGIRALTTFPDGTGAEWRRAAWASAGLLKDDVSSTVLCLNLRGTPALDWMADVGEPAVLTLRALTRGPSASVVPAGRTVHVCENPAVLSAAADRFGRACPPLVCLQGQPSAAALTLLRALSAQGAELRYHGDFDWGGVRIATALRRSVPWHPWRYTATHYRVAVAGVAEPRELSGTPTATPWDPALAEAFAEHRIRVEEEMVLDDLLSDLAGVPA

SEQ ID NO: 39406 - protein, 584 aa, Streptomyces niveus NCIMB 11891
MTAQTPGHEPVDYGPFAHLTTPNSALYRQVMRTFLAAKERFAVHLRPEDVHAAMAAGSRPADVEPVVKALDALVAWGNLRADPDTARVTAVEDFYRKRFIYQLTRAGEAAEAALGTYDEVLGRRGELQAVALHDIVTQLRALLVIASDDEPDPAKAHLALSVLTARFTDLADNARAFMGSLQRTIDLHDIEVEAFLTYKDRLIQYLERFIQDLITLGGRIALLIGELEAQGRVGPLLGLAAAREAADAAPEDAEHAEAAAREKWAARWSGLAEWFVSAEGRESQARLLRGRALGSIPQLLAVVRQLNERRAGRSDRSADFRALARWFAGAPDDEARHRLWRVAFGLYSSRHLTVDADTLAERAAEPEPASTPWAEARPLRISPQLRRTGSYERRGKPRRVADRSEAKRRLAEIATRQAEQAGAARARLATGGPIRLSRLGELDPLAFELFLRLLGDALSTWRPGMTTTAATSGDGSMEIRLTALDDGSTAEVRTPDGVFSGPDHLVDIIELTETFGIGVLGGRGGVAVASAGQEGAGAAGPGPAPARGLVPRQEGLPRHVPAAPRRSALQNPVSYTSRDTQEER

SEQ ID NO: 39407 - protein, 414 aa, Streptomyces niveus NCIMB 11891
MTGPLTEVLDGQREADLRRAARALLKEPLLTADGPHSDAFRLVRRHAAELREWFERNVGWTLRTDAEAARLRKTPGTLTDATHAARETGRAALPFTRRRYVLLCLTLAALERGESQVALGRLAEQVVVAASDPELVATGITFTLERRDERLDLAAVVRLLLRLGVLRRVAGDEEAYVSGSGDVLYDVRRRVLAGMPAVRRGPSLIEAQDFDERLVEMTAQTALDSDELRFRAIRWKLTRVLLDNPVLYYDDLTDDELAYLTRQRGFITARISEVTGLVAEVRAEGIAMVDPLDDLTDVRMPEQGTHGHITLLLAGHLARADGPVQPARLASLVRELALEHGGFWSKSAREPGSETELVEQALQKLVALGLALRTERGVLPRPALARYAVGDPVVKEPAPARPTVRPGTTAKNER

SEQ ID NO: 39408 - protein, 1383 aa, Streptomyces niveus NCIMB 11891
MNPALTTLPTPAPGRWRPLRVGLVDLFHYDVEEFWFRDGRLLLRGNNGTGKSKVLALTLPFLLDGDLSACRVEPDGDPGKRMEWNLLLGGEHPHPERLGYTWIEFGRLDETTGEAHFRTLLCGLKAVAGRGIARHWFAVTDQRTGAGLDLLDATGTALSRDRLAEAIGARGMVYDTAKTYRRAVDEALFGLGERRYGALVDLLIQLRQPQLSKRPNEAALSRALTEALPPMDQAVVADAAEAFRSLDEEKDELRAAREAEQASSGFLDHYRRYARIASRRRARLPRTEHARYENLQRELLKAQGDRQQAQEDRKKAGERVAALDERAARLSAQDATLRTGPEMRDARALDRAAADVSRTAGELARAEADRRTAAETHTRALGRLATAGNRLTAAQETLETVQDRLAENGAAVRLDTPRTHGAPEAALRREADETTARRRRAVEHVEELITRAERTGEARRAAQLRADEAEEEVLHSGERLAEAEESVAEAGRALVNAAREHLSGCVELRIPGLPGVLDAVQNWATTLHGPHPARVAAAEAHRTLASHLADRAADLAHREAGRAQRQRLAAEELTTLEAGGQRGPSAPYTRTPDVRERALGAPLWRLVDFRSHVTESERAGLEAALEASGLLDAWVRPDGSAVAADGDDVLLDPLNQPGGELLGSVLCPAVDHADAGAAAVGEPTVERLLAAIGLAGKDGGTTEAVPGGSGGNDTWVSTDGRFRVGALTGSWTKDSAQYVGEGAREQARRARMRELRLTLAALEAEREQLAEELRAIGRRRGVLEAELAAVPGDDDLRHAHARVTAAADAIHRARVRHGERDADLTRATADAERAAAELTGTAADMNLPARMTGLGSVRQALADRTALLAAFWPALRERAEAEHAVSGEQAETDRAELRVSELAERTTEAVRLAAAADEQLTTLRSTVGAAVAELQRRLEETAAAVRDCVREQRRAQDDFGDADRRASHAEGRIERLVEDVTEATAARERAIAALQRFVSTGLLAVALPDAAVPDGDGGAWAATPAVNLARAIESQLSSTDDSDAAWERVQKRLSEEFGRLQDALSRHGHTATARPSEDGMRVDIVYQGRERPVPELAEALATEVAELTRILSAHEREILQTHLITEVAGTLQELIGAAERQVRAMNKELEERPTSTGMKLRLVWRASRRAPQGLAQARERLRQSADAWSTQDRAAVGAFLQEQIARRQADDNAGSWLEDLTAALDYRSWHEFGVERHQHGKWVPATGPASGGERVLAASVPLFAAASSHYASAGGPYAPRLVTLDEAFAGVDDDSRAKCLGLLRAFDLDVVMTSEREWACYPQVPGIAIAQLSRVDDIAAVLVTRWEWDGSDRRRGTEPGGPVAGQERAGVEDGTGDQESLWT

SEQ ID NO: 39409 - protein, 459 aa, Streptomyces niveus NCIMB 11891
MDMNPSEIPPSPTERGAGSRKPVELARPADVTGASPPAAPRGHDAGQIDAERLGRLLGDPGLAWLVERARHRMARGRPLTGTVALSHPDETQRRAAEGLLGRAPQAGRSLTVRLDTVDAILRRSGVSPDGLAPAVVALTGPVTPHAEARRSEERAWAEAYAPLGTLDGELGGWAGRIRRDGLVRRLARTPEAAGPLVDAAVRALRSLPVVPPTSRATFAARHLSGAHCLDEGTPLAALVLSGLRALTGFPDGAGATWRREAWASAGLLKDDVSSTVLSLNLRGTPALDWMADAGEPAVLTLRSLTRLTSTPAVPTTGTVHLCENPAVLSAAADTFGPACPPLVCLQGQPSAAALTLLRGLSARGADLLYHGDFDWGGVRIATALRRSVPWRPWRYTAAHYRAAVVRVAGAPDLAGSPAETPWDPGLAAALAEHGVRVEEETVLDDLLADLEKRTRRDPP

SEQ ID NO: 39410 - protein, 499 aa, Bacillus sp. 17376
MDVTMKKVVEASYLTADSAAHYRTILRYFYHQHERMRDFISPEEILEYMRSIAVFADYQEEQLHQQLAQLVKWNNLIARQDMTNAKTVEEYKKKRFRYQSTPYTIEIERMLIVLEKKVGDTFQGSLERSQFDRLLQSLSILQQELEGSLAKKAEEYMRIWEDVFRYFQTIRSSTADYIAYINSEQTDQRMQTEAFLVYKNQFTTYLRDFIVSLQNTSLQIKERLDELSPDKLGLFFDKLVEHRQSIPRLEDVSSSVEEWRTEYLEYWGSLRQWFLGSNLQQSELDVLQWQTNEMIRRMTRYVQRIGERQQHFRSRKNDYLHLAKWFVDTDALEEAHKLSSVVFGAMTIKHLQLDEVSTDNLHTETWEENPVMVPLKPRTNRYREKTKPGSMVSNEEKKRLQREQYLAERKQEQVLIEKYIDEGVIKLSAVSKVEPFVRKVLLGWIGKSMASKNGKVKTDYGMVVKVTIDREKMILLDAEDGTLKMPDVLFTFEGEGESR

SEQ ID NO: 39411 - protein, 388 aa, Bacillus sp. 17376
MIKLEQTLEFDEKAILGMDLLFNHYWILRSEQPEWYQLVREREKVLRRYINEKFGLRLIVHQHFIKLEKIPVEPERWMGIQEFQEPMDYAVFCCALSFLEGKSVDEQFLLSELSQEIQADYPGDLPLDWTLYTHRKSLIRAIKVLIDFQLIRTIDGDISRYDHNEEQEVLYEATVYSRYFMRTYPDDFTSYKHWNELLNEDWRLNQEDERRKRVYRKLFFSPGLHRIDMQDPDFLYIRNFRNRLSEDIENHSDYKLHVYKNTAFLSTDESRQYQNLYPDAKASTDLILQFSKHLHDYPEKYIPKENGEIVLTEGEMDGIILELRSQFERGWSKYFREKANSGIRNELLEAMKDWMMAEVEKESSLIKIKPLLGVLAGAFPADFEGSEE

SEQ ID NO: 39412 - protein, 1370 aa, Bacillus sp. 17376
MKGTRWVMNRAGLLNFWYYDEEVFHFEQGKLLLRGSNGSGKSVTMQSFLPVLLDGKKSPDRLDPFGSKARRMEDYLLGEKEVVDRDERTGYLFIEYKKQGSEQYITTGIGMQAKRNKGIKSWYFLLTDNRRIGHDFQLAQQHTGEKVPLSAKELENRIGQGGYVVHSQREYMDLVNKYVFGFQSIDAYEDLIKLLIQLRSPKLSKDFKPTVIYEILESALPPLTDDELRTLSDTIESMDQTQQQLEQLHRESESIYRLEAAYDTYNKYILAERAEQWQKALQRSNTAETKVNEYISQQQQLDQEIVRLRIELEKFQQQKHIAEQESNSLKHHEVWSLEEKRKDKLDESAVIANEIAGLQKRWDENNKKLRGEYQKKQAAEDELFQYDQKERELLAELALDADATAFHQHEVNVSDYVRTKEIGFDFTVWQKEAKDHLALLGELEKLAVEAVRLGDDQNHLQRQSSEKKKEIDELQKELDHYQTWFEEEHQKLESNVFFWMEKHPKLLYSNELRQGIARALQGLYERNRYDDVRSQLYVAIHNYEAEVKRDEALTKSRIQQKQNDISEAEAELLRIKTQKMLEPERATGTEKQREKLLNENTAFLPFYAAVEFQEHVTEEQRERLEAALMKTGILDSLITDQTFSPVEDAVLAADPRLLGYTLADYLMPDLDVDSPLTEELVDQVLRSIPLENDGTGFHIDQDGSYSIGCMRGHAPLGGPSKYIGRTSRKRHQRELIQTWTEKIQELYRELAGLKVELEHFNSELEKIDTWKREIPDDKVLLDINEQILSKKHELKNEREMLNRIDADWKRVYDKYTEVKRVLRDKGVQLNIPLTVDDLGSALSAGQSYIDFLHELKNNDVKVSSVKKLLQTSLERIDELEGELDELRGEQGRKESQLGKIKAMIQSINLQLQLKGIDEVRSRIQEVQYQLNEAEKEIDRIRSDLPKAESDQKRNQEKLDEAQTDLSFWKQMTEVWARMVEAEKKRSYFDIEGRDPAQIFAQFDPIFTKHERPKLSEQLTKVFLNEQAHLTEYRMFEYPEDTEIPSWFNDNLAEKYEPFMNEWNQLKGRRLIQMEYRGQRVSPYYVSSELKKELEEQQGWLDEQDRRLYEDIILNSVGIILRNRIQRAQQWVKEMDKIMADRDNSSGLIFSIAWKPLTAESEQEMDTRDLVQLLQRNSKFLNEEDLQRITKHFQSRIAKAKELIQLRNEGSTLHQVLKEVLDYRKWFTFVLSFSRVNEPKRELTNNAFFKFSGGEKAMAMYIPLFTAAYSRYKEAGEMAPFIISLDEAFAGVDENNIRDMFEVVEQLGFNYIMNSQALWGDYDTISSLSICELVRPKNADYVTVIRYQWDGKQKSLVIDEAPELEELVTNE

SEQ ID NO: 39413 - protein, 425 aa, Bacillus sp. 17376
MNNRLQVFRDEPGFRKLFGLFRDKFRSLGRVGGFVSLKGFKEAEVESIAGFLGLSAVELIDKGRVGLGQFERELAKTGFSDLTLVEILEEILEEPILSKKQETENNLKLENEFVNTLKLDIPEVGWWLEWISERSPDTRWIWSLYRQDEIMLSGMIREVSIAFLSLPKQGELERLPFFAQRTTGNPHYFDISESGGRLLLHFLTVNKKTSEDPEYLFPKSTEEINDLLAEYGLLRDDLWNFVTLQGMVAYYQGEIHPVWNAAVQTRTVLNVPMKELAKLETIKPASGRMVWIVENSSVASTIMDAVPDAAVVCTHGQLRAASWRLLDKLAEEECTLFYSGDLDPEGVQIADRLKKRYQEKLVLWRMDPLAYESSLSNEDIAGRIAKLDGVSSEEWKDVVMMMREKKKAGYQEALVDVLIEDIKQA

SEQ ID NO: 39414 - protein, 496 aa, Geobacillus sp. MAS1; identical to SEQ ID NO: 38981

SEQ ID NO: 39415 - protein, 398 aa, Geobacillus sp. MAS1; identical to SEQ ID NO: 38540

SEQ ID NO: 39416 - protein, 1373 aa, Geobacillus sp. MAS1
MANPWVLHRAGLINFWYYDEQYFHFADGKLLLRGSNGAGKSVTMQSLIPVLLDGKKTPDRLDPFGSRARRMEDYLLGEKDVVNRDERTGYLFLEYKRKESDQYVTTGIGLRAKRQKSLDFWGFVLFDNRRIGYDLQLYKQEKTGEKIPLTKRELATALGAGGTVVETQKDYMELVNKHVFRFESLEAFQELIELLIQLRSPKLSKDFKPTVIYEILESSLPPLTDDELRHLSDTIENMDQAKQQLEQLERDERALKRLCDQYRLYNEYMIAEKATEYVKAVKQAEQLAAAQHRLHDEEEQARKTLDELDESITRLRREEDVLRSREIDLAGHEVFQQAEKYEQLKSERERLQERWERHEQTIAEKERLERQHRRRLDESEARLDDLERKLEDELAQLRADAEEGAFSLHETNEDDFHRHRQKQQEFSFAAWKQEADRHIEQLEELARLWRRHDDVKRRYEEASTEAGERRQEMDEWRHQQQKWEELLEQEKERFEQAVLAWVEQGGIDVSEADIQAFLRQMGALYELYSLDDLKRPFVQAYYDAVGKKKDEKWRLEHDIRLLEEKRAEREAELRQWREQRDPEPERDEQTTAARLALEREGIPFVPFYAAVEFVDDVPDDVRERIESALSHAGLLDALIAARDVDVDCDRVLIPKPVHMVHTLADYLRPDADAPVSAERIDEVLRSIVITDAEQKGGMTIDETGRYSLGLVRGHAPRRARAMFIGRAARERWRLENIAALEAEIAAVGQEIDRLSGEHQAVGAAIQALADWFVSFPSDRDVRTAFEEGQEARRQAESKEREWKRQEEKAALLAREWKQIKQQLHDESAELDLAFTLDGCEQAQLAMKSYVRHLHELEVLYRETRHTEAMIAQQRERLAALETEIDEAKGERNRIRDEKERISLEIVEMERTLAQMGADDIRAEIARIQERLAFLRQEIPRLVNERARTEQRLMRLVEEREKGAQREEFACQLAAMWERSFADEAALGLVDLDRSRSLLEQAREAKQRYETVLKETRSSLLARLNTVFFQESSNLTEYRATFERLAEQKESEWIAAAPDDEMAMKAADWREKQERHVIYLDYKGQRATPFAVLAEVERDIALQHEYMKEQDRELYEDVILKSVGRILRSRIQRAERWVSDMNKLMGGLDTSSGLVLSIQWKPKTAETEAELDTKELVRLLRIDSRLLKEEDLQRVTNHFRSKIARARELLEERGQGNTLHQIIKEVLDYRKWFAFTLYYEKTNEPKRELTNHRFYQFSGGEKAMAMYIPLFAAAYSRYQEAGDDAPYIISLDEAFAGVDENNIRNLFGLVEQLGFNYIMNSQALWGDYDTVPALSICELVRPRNASFVTVIHYRWNGRVKQLMVDDKEWEMIKT

SEQ ID NO: 39417 - protein, 406 aa, Geobacillus sp. MAS1; identical to SEQ ID NO: 38542

SEQ ID NO: 39418 - protein, 661 aa, Frankia sp. CcI6
MLVQACQTRPSLQPPTTPQTPVFPSSVTGSRSPAVHAVAWWAILGGVTSDGQTGPAAGGDAPPRQPFAHLSAPNADVYREVLTTFARARDRFIVHMRPEDVIADLGRPGQTESIVAALDKLVEWGNLRADPDTGRVTTVADFHRARYLYQLTPAGQAAEEAIAVYEVAIGRRGALQSVALEDIAAQLRALVEMTAGDAADLDPAKVHLLLLGLAERFTGLADNAQAFMTSLRRVIDFSDGDVDAFLAYKQRLIDYINRFIAELANRGAEIATLLGQVEGAGVERLLLLAARREATDAVPDVPEVSGSGASGSGASGSGASDSGRTGAGRTDAERIRTAYDAAVAAALDGWRNRWRGLHDWFVSADSRRPSQARLLRGAAITAITQLIDTVAALNERRTGRSDRSADFRTLARWFAEAPDDAAAHRLWRAAFGLASARHLTVSQETVAAWQEDEPTPNTPWQDAPPMRISPQLRRTGSYERRGTPNRVTDRARQRRLLAEQAAREAEQAASARARLATDGPVLLSQLGVLDRQAFRLFLGLLGDALAARLAGDTEVETTSSDGTVLIRLTLVPGGGVARIETEDGVLDGPEHTVEIVDLAGAASRPAAWNDLNDLNDWSDSNDRNDRNRQNDLNGRMDGLAPVVLAGGPDRLELLETGRVSG

SEQ ID NO: 39419 - protein, 422 aa, Frankia sp. CcI6; identical to SEQ ID NO: 38568

SEQ ID NO: 39420 - protein, 1443 aa, Frankia sp. CcI6
MSTSTRMPATPAPASIPAPAPASASIPVPAREDRWQPLRAGLVDLFYYDVEEFHFHDGRLLLRGNNGTGKSKVLALTLPFLLDGELAAHRVEPDGDRNKRMEWNLLLGGRHPHPERLGYTWLEFGRLGGDGIPEYRTIGAGLKAVSGRGIVRHWFFVTRQRIGPQLSLVSPTRVPLTRDKLKEAVDGHGAVYDTASDYRRAVDEALFGLGGHRYEALVNLLIQLRQPQLSKKPDEKLLSRALTEALPPLDPALVVIVAEAFRGLDEERETLRALAEAETAAQAFLTHYRRYARVAAKRYAAPPRQAHSRYEQHGRDLAEADAAHQAAVEALTAAQQALTEVEEAKAALTARRDALRDSPEMRDAAALRGAEEDAGRLARFAAQRERDSRAAAEAAGDRKRRLTGAERTVQADAAGFDAAVRAAGLAAEAALVTGRHAAVLTELDGGEPPYRDARRSAEALVGQQGTAVNRLDGLLRAAADAGVALRAARDDLDRITAEQQAAAERIAAAEDLTAQRGAGLVVACTAYLAGCAYLRPADPDAALAALAGWVDTLDGSNPVATAVDGAARLATADLGRRQAVLDGEQTAARRELERLAEEIERLAAGGHDSPPAPHTRDEHGRDGRDGAPLWKVVDFVDGVPDEHRAGIEAALEAAGILDAWVGPDGRLHDPVSDDVLVTPGRPAPGGGLAAVLTPAIDRDDARAARLSDTAVAAVLATIGLRGGPGPAGGSLVHGPAANGTTANGTTANRTSGTETWVTVDGRFGNGVLTGGWRKETAGYIGEGAREAARRVRLDHLRADATRIELRLEELAAAAAELADRQLSLAAEHGARPSDGDLREAHAQLATEHKAKRRIDAQHQEAAAVAARRQQAAGEARAAAEEFAGDVRLPAEPAALADVRDALGDYRAELAALWPAAESLDRSRRAATEAEHELTLALERQEQTAEAVAEAQTQADAAAERHRVLVETAGAAVDELFRKLAAVDTELDRCGQREKQARAAERDALDARGRAHGRRETLREAITTAAAEREAAVARLRAFAATGLLAVAVPDLEIPDPAAGWAPYPAITLARAVNAALDDVDDTDRRWELAQQRVSAEHKVLTDALSRHGHSVGMVVSDGVIVVDVLFQGRKQDIPALVAALETETGQRAMLLSAKEREILENHLVNEVAGALQELISDAEGQVRRINTDLAQRPTSTGMRLRLQWRVARSAPEGLGAVRDRLLRQTADAWSPAERTAVGAFLQEEINREHSADTTGGWAEQLTRALDYRDWHEFAVQRFQDGQWRPASGPASGGERVLAASVPLFAAASSFYDSSGNRHAPRLVALDEAFAGVDDDSRAKCLGLLAAFDLDVVMTSEREWGCYPQVPGLAIAQLSRRDGIDAVLVTPWRWDGHERTRVDRPVPYQPERPDQPDQPQLLDQPDQPDQPQPLRPAQSGNTEPLPFE

SEQ ID NO: 39421 - protein, 434 aa, Frankia sp. CcI6; identical to SEQ ID NO: 38570

SEQ ID NO: 39422 - protein, 521 aa, Brevibacillus panacihumi W25
MEKTRSIRTYKAVTEAKYLSVENAQRYRAILRYFYEEQQRLRYWLRPEEILQAVKERIEPSDASSYNEDLLQLDLQQLHDWGNLQRKQSGKVNKIEDFKKKRYRYQATPYTIKFERLIEDLEEMGDAYGGSLEVTQFEKLVETLRWLTRLARVSFHRPGERPRYEMEDWSNEKLYDWWTELYEQFRKVTNNARDYMASLDSVQVEDAMMTEQFLLYKDKVTDYLRRFMMGLQRSSYQIEGLLVQVDRRLLQDLLHRVASYEVSIPRFEQTAWTKEDYTARFFEQWEGIWHWFLGDGSGRGSDLEDLQRETNEAIRRIARYAQRMGERQSSMRSRRADYLYLAKWFASHEEVEPAHCLSAAVFGITEMHHFWVEGPKSTEDIYCEIWDMPASDYDVKPRINGYRERTRPSKIDTKDEQKEAMLAAYLQQKAQRQSRLNELFAADRVSLRDLPIVEPFVRQTLLGWIGKSMASPAREGKTDDGRRFRLTEMGTGERIRLQCTDGVLELPDFVLYFLDESKVKR

SEQ ID NO: 39423 - protein, 407 aa, Brevibacillus panacihumi W25
MSEQQATDTRYTSRFDDLARQAAWELLRRLWIPRSDILVYQAVRDREMVLRSFFNEKLGFRLLIHYEFVKLEKFVSRGIRPWMGLPGLLEVRDYVFFCLLMAFLETKSVDDQFLLSDICEEVKASYPGQDVVDWTSYEQRKSLVRVLQLAREWELLVVVDGDDLGFTASEQADVLYEATPLVKYFLRAYPRDLMQFETAEDFMRIVESENETLARRHRVYRQLLLTPGVREEELDDGDWTYLRNQRNVIARDFDETVSMSLELYGHDAMLVHYGRSQSLTLYPDARAISDVVYFFARAVRGQIDMGELQRQKDGCILLTPVDFGNLLVQCRTDFGDGWGKALRDLSDKQLAKLLLEEMEAWGLVQRHEQEELIRVMPRLGRIMARYPKDYEKKLKNEGGGGTDGDTE

SEQ ID NO: 39424 - protein, 1428 aa, Brevibacillus panacihumi W25
MKAVVEQMETQNKINRWQLSRAGLVNFWYYGDESFDFADGKLLLRGTNGSGKSVTMQSLLPVVLDGKKSPDRLDPFGSKARRMEDYLLGEKEVTGRDERTGYLYLEFCKPYTAQFLTIGIGLRAKRNAQMDFWGFSIQDNRRIGKDFYLYRNVYNAETQEQERIPLAKRELEREISQGGRVVFSQSDYAEMVNKLLFGFSSADSYEDLIKLLIQLRSPKLSKDFKPTVIYNILENSLPGLSDEELRPLSDAIESMDRTKLQLEQLERDHKSLARIAKDYTEYNRFIWFDKAKGLADAVQAARSAQRKAQEYRQLLVREEEELTRLQSEQEALALEQLTLTAEHDRLKENDFAKAEAEQVEVDGQLKREESRLTAKRKESDVKREKVSQLHRTIDDIQLKMKQADADMADLLESMEDAVGENEFPVHEVARGEFERAQAGYSMELWQKESRQYRDQLQQTLDQAVKTAEAERNRLEAERALGDAQKMVDELQREQDKWERVVEEEKDGLIANLHQWQGEAQELKLSVEAVRETIRRITKFEASDRYEIVREPLNQSYQLFRQKIRDQLADLGRKVEDTKLDRQKAEAELHIWLAKKEPEPPRHEQTEVARTWLTNQGIPYVPLYEAVEYRPEVPEETRAAIESALKEAGLLDALIIPHTYLDRLDVWADQIKDRVIVPEPQLFAHTISEWLTPSPVEGLGVGKEDIEAVLQTVMTEKAGGSSVAAYVTASGTYGMSVLSGNAPVIEKSVFVGREARRRYRDEQLAFWRKKIEEFDLELERLGKDVQGMENRLDLLGQEYQQFPSGHDLLSALQAVEQIRQRLVIWQEEVQNRNRKVRAAVETLYREREKLKQGADGLTIPLDEDILRQALRSMQDYLEDLRQLETAYREKLNLTDRLRVTEGLHEDAIYDWDRLRGEENELQMGVEQLNQRLQSIDRMLASQGAEEIRARIRYCKERLRELPELMTATAGAIGNARAKCEQYKENQVEADKMAEVRQHLQTAWWKVFSDEYALGLWRYLDLFQEEAAAEGVQHQLDDFAIRVVKKLQPAMAEREREYYNNQLQRTFENERQIHLLEYQPTLDYVHEYKGEAAGEQHAEVYQLTHLWKELKTRSRRRTILLEYEGKRCHPYDLQEKLEHEIQMHRLYLTAEDRKIFEEVILQSVGRVIKHRIHRAEKWVERMNELMSQRNSSSGLTFSLKWLPRAAENELQMDTADLVEFLRKDPALMREQDIERITNHFRSHIDRAKRDISGAAEGSGETLHQIMKRILDYRHWFTFKLFHKREGEPNKELTDRLFFTFSGGEKAMAMYIPLLSAAYSRYLEADSLAPRIISLDEAFAGVDENNIRDMFELVEQLGFNYIMNSQALWGDYDTVSRLAICELIRPKNADVVAVARYLWEGGTLHVMNEEWTDWGDSEVAVSLEEDTDDEE

SEQ ID NO: 39425 - protein, 462 aa, Brevibacillus panacihumi W25
MTKNEDRQLRHQADSYFRSRSQGYDRLFKGLLRKYRSLGHFGGKLTLPRLSLEEADVLTGLLNKRFDPGSDGIIRVSDVESGFAKTKYAQLDLLSILEGYFGEPIVSKKEEQLLQEREWDLFWADLLETVAEEPCSKAQGWIQALAKHQGTGALAVSQWWSASAEELREALLTVVRAVRHLDRMADGEYIRLAVLATQVTGNPHGFDMQTQLGKLLLYAICYILEKVGPSNAEEMTQILYECQILRDDLSSQVAISGIVGQNTRGRGYLGSEKEVYGLPLRTVVKYAGFEPYLMEGGVKRVWIVENPAVFSSILDRWEHDYPEEALPPLVCSSGQFSLAVLALCDRLAAAGCQMFYSGDYDPEGFQMAIRLWRRYGDEHVAFWRYQEEDYTSKVQEIPIEERRWNQLRKLVEDEGSRDLPADLVKTMQTALREYKPVYQEALLDNLYLDIKTALVTRIVERA

SEQ ID NO: 39426 - protein, 518 aa, Streptomyces albulus PD-1
MRRVPPEMFRFTIGEKADLNGAVLEAFGVAGEHLETALGLDGVREQLRAVGWVADLADEELYDALKRLVGWGLLDVVHNHAEHYRTAEEYERRNLHYSLTRRGEAALAGVRHALEVLASTGALQTAVLEAITDRLDELTVLSGEPATADRRILSTLRELEGHLEALVENTKAFNGQLQRLLRAEGADLDVFREVKAATVTYLQEFLVNLDRRGEAVAEAVGRVEERGIAVLRERALRGAELPPVPGEDPAAGWLESRRARWAGLRAWFLPDDGTHPRIEQLHDIARRAIVSLLQVLERINESRRRSSSAVQDFRELARWFAAASEEDDLHRLWSAAFGLGSARHAHLAHPDPELIPSSRSWSEAPPVEVSALLRTSGRTERFTRTGKVRDVEAVRAERAERARAQRAELARAWQALELDGPVRLSSFGTLDPAVFDRLLDLLGRALATAPDASGLWRATSGDGRVEIVLAPPPDTRTAVLHTEKGTLAGPDYVVHVVAAGGTAAFPAPHTATRQEAAG

SEQ ID NO: 39427 - protein, 437 aa, Streptomyces albulus PD-1; identical to SEQ ID NO: 39249

SEQ ID NO: 39428 - protein, 1385 aa, Streptomyces albulus PD-1; identical to SEQ ID NO: 39250

SEQ ID NO: 39429 - protein, 453 aa, Streptomyces albulus PD-1; identical to SEQ ID NO: 39251

SEQ ID NO: 39430 - protein, 510 aa, Mycobacterium avium subsp. hominissuis 10-5606
MKLGDTSVAELPDDARRALTYLVVPESDEYIAIMAVLESSPSDLTPAEVTAALRDRGTDLDARVVEVRLEKLREWAVVSARSDQTHVRRVQDLLRRNFRYTATRHGRQVQRFYETVLADTTVMREIPLQSLNAVVSALEALAGADAPPDQQWARARVNEVFIAQDNLDASLVGAEDTLMGLADRFDLDDAHTAELKSLLVNYARRVAIELDRGSDRAAIALRALTPRFTELAQLTIEGSAASDLIGRDLLAASKGGDVRDWHGLVAWFDPMSGRAARFQSRMVMAIPTFHANLRRLHTAGESGTSRARALLLARGCLHPHFGPQLFLAALGDHPWRKLHGEADDPGAGRTPPWRDGPQVPVPPGLRTHGRAGVRGRAPAPIDDGPARAAVASERQRRLALHRQHLREILSTAPGSTLSDGAARVAFAALRAALRQTPSRGRRRATKDGLACTVFWTKTTTGLLRAPRWRVWLPGREFVFHSPAEQPSHPHAVGADPGGSAEIRLEGAVVA

SEQ ID NO: 39431 - protein, 411 aa, Mycobacterium avium subsp. hominissuis 10-5606
MTKPHTARLAIAPDAETEVATALRLLARQPWLIAGRDDAAISAVRRNLIGMRSVLNRLGWRLIVQRDVVRLEKSPPTRARLADWAVQAPNPLTCSWVFLLAAAAESLPHQVTIGQLVEAGKAAAAEASIPLTASRAERRAITRAVHELADRGVIEETDGQIDSYLNDDNAPVLLTIFHTRLLHLIANFDPTTDPSLDPGRWLDNVAREPDVGRRMRRRLVDDTCVHTIDLDEAESDWLSRRLRSDDGAPLAAAFGLAIERRAEGAAFVVPDDAFRWPSELGQVPFPAAGIIPHVAMLLADHIAIKGQTGGPGPGWRGMPRVAVLAELTRLAEQQTTGKGGWPAERAADPAGLLTDVQQLLTGVGLLRIVDCCWWLSPVMGRWEPPPTAPAPTPDREFGTKYRPEPCGGEPR

SEQ ID NO: 39432 - protein, 908 aa, Mycobacterium avium subsp. hominissuis 10-5606
MAIASDHETRQTNAELMVRQHRRTVAPVQQDASHKSQQADQADQHADNAAHERDRKTERALDAASTAVQEISRWASANADLTATPESDALDADTITQTAAAGPAALLGSASDWKDSARNIAAKTAAELRQTAKAYGQQADTKHAAATDARHRAEELRAGRMIPPPRPPWAGDADEDAFAYALQWKTGTDRRLQALVESALESAGLLGATLTEDGGWAHPWAVTATTPRAAHSLTTLIEADSQHRLAAAATDVLERITLVDTASAALSDVPAVIGTDGSFRFGVICGRAPGADDSATLPEPSHIGAAQRRAAALAEAERLDDTADHLDSEAAALEQAAEELRDHATRTQARAESFPSLKELAKAEQDRSAAARWAEQQRAVADKAAAEAETARRQANTVAEQWRTQAKSMGLSTDPDEVAATAESEARITTGLRNAAAALSAQQSTLLSLRTRADSHASDRAALTALHAAATTAHAAARKARLVYERMQGAHGKAAAELSARLTAARARAKETQELVGAAVVLKDEALVEEAKLEQAAADAIENAAAKQPAASAALAELRGLLAVQDVAEVVLRDAQHSSSDALIAQVTAAVEGKTKWGKKKVADTYETARAELRMWAVDRTEGHGDLDTYQCTYDGIAYTPCAAAALARRLADRAGEQLHEAEEAALRDFIVGRLPSAIGIAYTELLDWVDSVNTKMESASASSGVGVRVKVSLRDDLNPNRRTVYHLACKKSAATRTPEQDAELAAALKSLLDAADGETDTEKVKQAVDIRDWVRVDYFVHRPGQEPKRWTRNTGLSGGERRLVILAPMIASIAALYDNLPDTALRLAALDEVPAEVDDTGREGLARYIAELDLDVICTSYLWEGAPGAWDGVDGHDLEAGPDGVVVAFPMLVRGIEPLPGDPDESP

SEQ ID NO: 39433 - protein, 128 aa, Mycobacterium avium subsp. hominissuis 10-5606
MVARNPDCANPIRLVCTMGNPSQTEIAAIAGLAAARWNIAVRADFDPAGIRTVTAILNAVPTAKPWRMTATDYATSGPTAPIRELVPPTPWEPELAEQISATGCVAFEEALMEHLLDDLRRGAPPTAS

SEQ ID NO: 39434 - protein, 510 aa, Mycobacterium avium 09-5983; identical to SEQ ID NO: 39430

SEQ ID NO: 39435 - protein, 411 aa, Mycobacterium avium 09-5983; identical to SEQ ID NO: 39431

SEQ ID NO: 39436 - protein, 1478 aa, Mycobacterium avium 09-5983
MGAGLSNVWRYGDLVLSAPSGRLLLLGPNGTGKTTALEALWPFLLDLDKAKLRAGTSRTTTLTSLMREGSTDRKRIGYAWLTFAGPGDQAVHSYGARLVFSDGSTPNVKIEPFTIPGEPIKDMPLTGPGPGRPAITTAEAFREQVEATGGTVFKDEEDYLNALANHVFSTARRDLIALADRIRKVRNPSLLAGTSPDHAAQSLREALPGVSNDVIEATGEALAATNETRLAFQRDVEAAATLDTFAEVWSGHAAEVAGKLAAAAACARDVYDNARQAADRFQGRHRDAVTARERAEADLRVAEQDHDNAVAEVESIEKSPAYTTLERLADLANTSDARDSEAQAKVDNLHHRVRTLRRDGAHLATDAHQLAAAVTDITAAAANYDPHTAATAPTVVVSTRSHAILTVGEDAFDPGPPLELSIDPEQLDAAAQSWMAIASDHETRQTNAELMVRQHRRTVAPVQQDASHKSQQADQADQHADNAAHERDRKTERALDAASTAVQEISRWASANADLTATPESDALDADTITQTAAAGPAALLGSASDWKDSARNIAAKTAAELRQTAKAYGQQADTKHAAATDARHRAEELRAGRMIPPPRPPWAGDADEDAFAYALQWKTGTDRRLQALVESALESAGLLGATLTEDGGWAHPWAVTATTPRAAHSLTTLIEADSQHRLAAAATDVLERITLVDTASAALSDVPAVIGTDGSFRFGVICGRAPGADDSATLPEPSHIGAAQRRAAALAEAERLDDTADHLDSEAAALEQAAEELRDHATRTQARAESFPSLKELAKAEQDRSAAARWAEQQRAVADKAAAEAETARRQANTVAEQWRTQAKSMGLSTDPDEVAATAESEARITTGLRNAAAALSAQQSTLLSLRTRADSHASDRAALTALHAAATTAHAAARKARLVYERMQGAHGKAAAELSARLTAARARAKETQELVGAAVVLKDEALVEEAKLEQAAADAIENAAAKQPAASAALAELRGLLAVQDVAEVVLRDAQHSSSDALIAQVTAAVEGKTKWGKKKVADTYETARAELRMWAVDRTEGHGDLDTYQCTYDGIAYTPCAAAALARRLADRAGEQLHEAEEAALRDFIVGRLPSAIGIAYTELLDWVDSVNTKMESASASSGVGVRVKVSLRDDLNPNRRTVYHLACKKSAATRTPEQDAELAAALKSLLDAADGETDTEKVKQAVDIRDWVRVDYFVHRPGQEPKRWTRNTGLSGGERRLVILAPMIASIAALYDNLPDTALRLAALDEVPAEVDDTGREGLARYIAELDLDVICTSYLWEGAPVHGTAWTVTTWRLAPTVWSSHSRCWCAGLSPCPGIQTNLHDRQGLPPLRWLVCSRRPDHAAFARSWLAVGGRRRGRRSSRRPPLGHRAGHYRRCARQPVAACGSRWACSRSSATWPQVAHRTRCVDRTGARTRPYPHAGCRRSARHGQNSCHPRGRSQSTTCQSATAVRMPGRGLQ

SEQ ID NO: 39437 - protein, 128 aa, Mycobacterium avium 09-5983; identical to SEQ ID NO: 39433

SEQ ID NO: 39438 - protein, 496 aa, Ruminococcus gnavus CC55_001C; identical to SEQ ID NO: 38948

SEQ ID NO: 39439 - protein, 381 aa, Ruminococcus gnavus CC55_001C; identical to SEQ ID NO: 38829

SEQ ID NO: 39440 - protein, 1363 aa, Ruminococcus gnavus CC55_001C; identical to SEQ ID NO: 38950

SEQ ID NO: 39441 - protein, 439 aa, Ruminococcus gnavus CC55_001C; identical to SEQ ID NO: 38951

SEQ ID NO: 39442 - protein, 495 aa, Bacillus vireti LMG 21834
MDSTMKKIIEASYLTADSAAHYRTILRYFYHQHERMRDFIAPEELLEHMRSIPAFADFQEDQLHQQLAQLVKWNNLIARQDMTNAKTIEEYKKKRFRYQCTPYTVEIERMIVQLEKLGDTFQGSLERSQFDRLFQAITSLQNELENDLNKSAEEYMRIWEDVFRYFQTIRTSTADYIAYINSEQTDQRMQTEAFLVYKNQFTTYLRDFIVSLQKTSLQIQHSLSELTLERLQHFFQKLIEHRGAIPRLEDVSSSTNDWLTEYEEYWFSLRQWFLGSAVQQSELDILQWQTNEMIRRMTRYVQRIGERQQHFRSRKKDYLQLSKWFVECRDSEEAHKLSAVVFGSMTIQHLQLEEATTENLHVDTWDEAPTELTIKPRTVRYREKTKPGSFNSNEQKKKEQRELYLKEREQEKKLIEKYMTQGKITLSALSTVEPFIRKVLLSWIGKSMAAKNRMVKTDYGLHVKVMLDYEKTITLQAEDGNLLMPDATFLFEETR

SEQ ID NO: 39443 - protein, 388 aa, Bacillus vireti LMG 21834
MIMEQTQLFDEKAIQGMDILFHHYWILRAEQPEWYQLIREREKVLRRYLDEKFGLRLIVHQHFIKLEKIPVEPEGWMGIQDFQEPMDYAIFCCALAFLEGKAVDEQFLLSELCQEIQADYPGDFPLDWTLYTHRKSLIRAVKVLMEFQLIRTIDGDIGRFDQNEEQEVLYEASTYSRYFMRTYPDDFSSYQHWSELLKEDWKLNQEDERRKRVYRKLFFSPGLHRLDQQDPDFLYIRNYRNRLAEDIEKHSEYKLHVYKNTAFLSIAEPRQYQQVFPNSKASTDIILQLSKYIHGEPERFKANENGEILMTEGEFEQVVDDLRQQFGTGWAKYFRDMSTKGIRTELLRAMKDWMMAEVDSETSLIRIKSLTGVMTGEYPSDFQTGGTE

SEQ ID NO: 39444 - protein, 1369 aa, Bacillus vireti LMG 21834
MTEAKWVMNRAGLLNFWYYDDEIFPFSDGKLLLRGTNGSGKSVTMQSFLPVLLDGKKSPDRLDPFGSKARRMEDYLLGEKEVVDRDERTGYLFIEYKKAGVERYITTGIGMQAKRHKGIKSWYFVITDNRRIGYDFELAHSQLGDRVPFSAKELENRIGEGGYVVHTQREYMELVNKYIFGFQSNEAYEDLIKLLIQLRSPKLSKDFKPTVIYEILESALPPLTDDELRHLSDTIESMDQTQQQLEQLEREFASSSRLVNQYHSYNQYILAERAGKWQDALKRYTVAEEHVKGLTAQDEELTQEIKQEEEQKQQFAQQQEIALEEKKRLERHEVWNLEEDKRKKIENTKSLSSEINSLQKKWDHKNSQYNRLWQEREQSQNQIRQHESGMEDLLGELQFDAEEAAFSEHEVNVHDFERHQEEEFDFSIWIGEIGSHEQLLANLNQLADEENRLSEEHNRLQRQSSEKKKEVDAIRKNLDHLADWFTEEKQRLEHQVFTWIEQHPKLIFSNERRQEIARSIEGLYEENRYEQVREKLLAVVNDYITDISTKKKLMETKIEDKKHELEAARAELHHWKTLKMPNPDRAKDTEAFRLQLLEDGQAFIPFYAAVEFQDDVTEEQKERIESALKQTGILDSLITENALAPTHDRVIRPEPQLLGYTLADYLRPDLEADSLISNKLVDEILRSISLEQEGAGFHVDVDGSYSLGCLVGHAPNEGPSKYIGRSSRKRYQQEKIKECQETIEQLQLELEELKVQLSQYEENLLQAAQWKQTMPTDQELNDLNVQIEKTGHQLEEQKKVLFQLDEQWKQVHGHLQVIKIQLHQEGRQLNLSLTKEVLGQALISAKNYRDQLYSFKDLFQKCLFARKRIEDLTHRLFEMETELDDLKGDQNVKESQLRKEKAEIESIEQQLKLKGIEEVRLRIQQVQQELREATEGINHLLETIPQKKAKQETCQNELAAAKTSAEFWSNMADEWEQMVRADIARGFVEVVEMDPVKIVKQLESILGKYDRSKLNEQLTKTFINEQIFLTEYRMFEYPEETERPEWFSKEWGEYYEPFMNEWNQLQSRRLILMEYKGQRVSPYFVFTSLEKELEDQKGWLDEQDRQLYEDIIVNTVGVILRNRIKRAEKWVSEMDKIMESRDNSSGLTFSIAWKPLTAESEQELDTKDLVKLLQRNSKFLNEDDLNRITKHFQSRIGKAKELIQLRNEGSTLHQVLKEVLDYRKWFTFVLSFKRVNEPKRELTNNAFFKFSGGEKAMAMYIPLFTAAYSRYKEAGEMAPYIISLDEAFAGVDENNIRDMFEVVEQLGFNYIMNSQALWGDYDTISSLSICELVRPKNADFVTVIRYQWDGKQRTFVVDDEHVEELVTHD

SEQ ID NO: 39445 - protein, 431 aa, Bacillus vireti LMG 21834
MIDKVQVFRDEPGFVKLFTLFKEKYRSIGRIGGMVSLDGFSYDEVESIAGFLGQSVEALLEKGKVSLLSFEKELPLTGFAEYSLIELLEEVLGESILTKHEESGIEEEKEKRFLQELSFICPEGSWWWDWIESKPPDSRWIWSLYKQDAVGLMEKFITVFKAYQDLPCKENKYERLPLFAQRTTGNPHIFDNNQLTGKLLVNCLQVDQQLKGRRVPGMPKTTEDLNDLLGLYGLMRDDLWSFVSCRGLLAEGEMGIHPVWKAAAETDTVLNVPLKELLKIKRIWPAAGKKVWIVENSSVCSTIVDEVADAPVICTHGQFRAASWILLELLVEAGCHLYYSGDLDPEGVSMAQRLFDRYQGHVTCWRMDVESYDKTISDEDISGRLSKLESITAPELLEVVNVLKMRQKAGYQEGLVEQLVQDIKNEFNVLL

SEQ ID NO: 39446 - protein, 499 aa, Clostridium butyricum DORA_1
MNIDKNVTKQIDEVKYLATENTYRYRAIIRTMYKSYEKMKYTIYKEEIFEGLKIYDDFSSYTIENLKSDLDVLVSWKNLSATADTAKVNTIEEFKNREFRYNLSPGTIEIERMLIKLEHMTIENTSSLESSLVEKFLNLIEKMLFIKDEENKKVYEWFKDLNSSFESLNRNYQDYISKFYSPKNDELMKTTEFLIFKEGFIKYLREFIRTLQNNTNSIQKVFNNINEDTIMQIVHKVYLHEKEIQSLDLITDEKEFKDLNIGRIESMKEWFVSYKGREPLIEQLISNTNEIIRKITRYAANIADKKSNNANRKEEYKKIAKLFSECSDINECHKISSVVLGSFNIEKIMAEFQRETESTNSSIYDETPSDIIIKPKIRTYREKIIKNPIVNKEERKKEKLMKILEKRKEESKILHKFIHNNEIAFDSLPVINTEERVLLLRLLSKGRSRKREWSKNENGMEYKVVLCDGDNIKVACDDGSLYMPPYKIIFKEELKYGRT

SEQ ID NO: 39447 - protein, 379 aa, Clostridium butyricum DORA_1
MEELKILLKNNIILREDKKEMYYKIKDGYKEFKNFITENLGYNLIIRSDFIRLEKLPGKSESFMGIEEFQNNIEYAMLMLILVFLEDKSKDDQFLLSHITESLSSNDIDIKFDWTDYSTRRSLIKVLKFSVKNSLIRVTDGDEDSFISDTNREVLFESSGVSKYIVRNFNDDILNAQTPSDLLSGKGVDFDTDKVVVRRNRVYRNLLLCPIVYRQSSPEDYEYIKNYKKYLEENFEKYLGWNLHVHKNGAMLVPSEKENGLKLFPNGKGISDVILFVLYEIIDEINKDKSRLNEEDILILNKVDFEQIVLKVKLEKSHGFSKEYREMSDGRFLYEIINEMILFSFIEEEKDVIKIFPLCGKIRGTYPEDYDGEVSCDEK

SEQ ID NO: 39448 - protein, 1348 aa, Clostridium butyricum DORA_1
MKNRFFINKLGLVNFWYYDVEEFKLSDGNLLLRGSNGCGKSVTMQSFIPLLLDGNKSPERLDPFGTRARTIANYLLDEDDTEKTAYLYMEFKNGESDSYITLGMGMKAVKNKPVQSWYFIVSDGRRIGKDLLLYRNAGEMIPLTKKQIQNELKEGNFYTESQKTYMEMVNKYLFGFDDIESYEELLNLLISIRSPKLSKDFKPTEIYKILTDSLKVLSDEDLRPISDSMENMDSLKDSLDENKNSLRAINNIKYHYDRYNTSLLLEKSRKFADTYKKLKDNHKEQDNLNKSYKEFRIKVDDALKEREFKDDELKSAEEKYEKLINKEEFKSKKELEDIKKNIEENIKEKSNKENDLKDKNGKETETRYDIKEISDSTEIIEKELTEIMKELDDTAKEINMQQCIGIGTQDISVLTETDLDFCDDSIRKLEKKLKEAEVYFKKLENQKEKTEEALKELDDSEKENVIKKKDMERAEEILLTEKENYKVNFNSLLNTNRLYTLDDKEKLKVFTSVDVIDDYNNIQDLNNVVQNYYNDKVNDKNACINIENKVIKEHEDKIRIIETEIDELKNNKEIEPERSEEVKANRKRLEKQKVKFMPLYKSLNFNKDITEEVRNYVERSLDNMGLLDALVIDPKDKEKAMEFEEGMEDKYIFSNPNIMSYNLSSMLCVDKALKGDELFSEIDNVLQSIFLDNNGTTCLNEKGYYKIGIIEGRSSNDYEQKFIGEASRKRHREKIIEGKMQEIKEIVKLIDKHKLSIEIILKEIDILGNEYKLIPNTDSIYEGVRMVKDLENDLKNLDNKIIKLKEKEFAERQKLNDIKSELMASVQNLDNVKCIKDIEDSLEAADYYKENVTKAKIALNKFISKKSILKLRSDFLDDLLQDIDKLYYEINNLSEKIKSDTLKKNAIEDILSKCDISEIEKDMENCLNIKNNNPQIIKDLSTSIGSYQSSLDVIQGKIDDLVIKQENIKNECDLYENIFMEEYDLQYVCEKEDKEPYEICRKIISEAEESNDKNREHYSNNLTQAINTNSAMLREFNIKETTLFEHDEEDFNIKWFRQRRDFKGKIQGKDVNLLILKNEISKSIEELELLISEEERKVFEEILMNTISQKVKAKIFMSNNWVKKINELMSSMNTSSSLKLSLSWVPKKSESEGQLDISRIIEIFNRGDRNSDKDLRSLGKHFTEKVKEELRKYEGTGEVRNYHSIIKDVLDYRKWYEFKLYYVKNNERKKELTNNAFFQFSGGEKAMSMYIPLFSALYARYEKGRCDCPRIISMDEAFAGVDENNIRDMFRLLKELNLDYILNSQILWGDYDTVDNLAICELIREDNDDVVTVLKYLWNGKEKVLLDE

SEQ ID NO: 39449 - protein, 427 aa, Clostridium butyricum DORA_1; identical to SEQ ID NO: 39224

SEQ ID NO: 39450 - protein, 495 aa, Microbispora sp. ATCC PTA-5024
MGDRFRLFNFTHRDDYVVYLWVLRAMDRLRAVHRVQVDSEDVAAAMAELALAHDGVPVVDGSLRGRLDALAADGIVHRLEDASRAGSLERYRNRQSVYQFSELGYRAFTAVEDVLAARVRDANLSRLVFSDILDDLRSLAAANRAGDEEQVYRRISRLDRVMEDMVRRSARFHVTLGEIVTSTEASPELFLRYKNALLTHMTDVMAELDRHLPRLHRAVLDVEATGVATMMVRAADADDRPFLSPGERMEDWKRRWEVLRAWFTAEPGAESGAAELRRATRAAVSGVVALLRQLTEAQRGGVNRASELRHLAEWICDTPDEDAAYALAAAAFNLGSARHMGGAHDDVEQISPRATWWDAPGVEVALTPFRTGRQAGPGIPQPVRVDPRRRADLRREQIAARAAERRAARSLAERGPHGRALDEAETRVLLALLTRALEARSVVSGRLRSGDGSDDTVVLRLVPHSAGSSVRTPHGLLHLPGFALEIAPRAGTAHA

SEQ ID NO: 39451 - protein, 455 aa, Microbispora sp. ATCC PTA-5024
MPEPLAAAGVAPADLGGYQEAVRLVLTSDLITAVHPRPGVLERVLPWADQLTRDLRDLFGYTLIATTRQARLIRRFDALDPSRGKIFANRAGKPFDRRRLAYLCLVLGSFQRSRVEISLADLVRLFAPAANSIPGLGFDPLVPGHKAAVVDVIGWLVERGALNLSDGSVEAWARGDGGDALYDIDHDICAAIFRPSRPIQHLTSAAGLLDGLDGGAEARVRRLLLERPVVYYADLDAEAAAVLRRDDLVDNLARLTGLVVERRAEGVLLADPGGRFTDRAFPGRGGAVNRAAGLLLARIADALEEERSAPASTGTFERLEPPVEADVQRDLLARVDSALPQAGVVRDLAWSSGHTPPMPPDRPDPLVLLERHRLEALIDDLYETFGAASFTGAWQQDPHGLLDAALDLLADLRLVRPVPGGVLLLPAAVRYRNITMAIPAPPRGQTDLFEGGDPA

SEQ ID NO: 39452 - protein, 1390 aa, Microbispora sp. ATCC PTA-5024
MTRFKPSRAGLINIWDYTDEEFVFADGRLVLRGHNGSGKTKALEVLFPFILDGVVDARRLDPFSGENRTMKSNLLYRGQESEYGFVWMEFADGRRTVTLIVAMHAHRDRPDVKRTYFVTARRVGVDFGLLSEDARPLTDQQLKRVLEPGAARSNATDYRDAIDAALFGLGRERYTQLLDLLLALRRPLLAKDLDPVKVSDTLTAGLSPVSDDLIEQAARDFDNLAAVQRLAEDLAAADSAARAFLACYADYLRVGVRGCLDRIEARTEQAVRPAVLVGEARAEMRRADTAQQEAEEACAAAVAERKRLEARLDALKRHEAYTAQGELESLRTRVAQGSQEITRMREANARGARHVADLRREAAELDRELAEAREAAGRQAAAKAEAADLAGIPRDEGGDAPEIRARAVARLQDVEDVRRGLRKVEEAERERGRAEQAVQRAQQKIDAGGHACEKAEHALAEAVGRAEADLRAWAGRWTGRAELAEPVVPPGDGDTLAESLARLREPGAPSLGEVFGDLVETRRTALAAEAAGLDVTLERLTAEIARLAAERDEVASERDDAPPLARHADREGRPGAPLWRLVRFAEEVGHAGAAAVEGALEAAGLLTAWVHPDPRLTAEALEKAEPDAYLLPAPPGLRPSGPTLASVLVPEDQDAVPAEVVSGVLASIALTEEIDPASGTPAVSTRGQFGVGVHLGVRTKDAPEYIGATHRAARRAGRLAEYGREIGDRSGERERTVAARDSLRRRLDDLGRARRELRPIGRDIPGAAAALAQASALLAAARTELAEAATALDAATAEMDAERRRLRQTAADRTMPSAADEVEAVAAAIGDFTAAADRHAQQLAAVGRLDRDLTGRLRTVERLEAELAAASDDLADKEEAHLALAERLAAAEEALSAPLKEILDQIGDAERALAAATGAARAAEQRARDEHDALVKAKVSYEHGRASLVSALRELLDQLASFAPFTQPELRPVLGVAAAPVWPDAARWPEPERAAADVVERLAGEDAAMAVRAVLPDGAADLLALYETAAAGRQPGEGARKRARDRMSQALKEFGEALNACEEDYRLDWEQGESLVLVRVHDADGRHPVAAFARRVAERAEEQGVLLEERERRVLEDELLAGLSQQVFDRVMLAKDLVKGMDADTRSRPMSTGTTVGIRWVVSDRVTDDQREVSELLGRDDLGPARLADLRRLLRQMIHEYRAGHPRATYKEALSAVLDYRAWRSFELRLKVPGEEEVKLSRKRHSQMSGGEKSAAIHLPLFAAANALYGSAAPTCPRMIALDEAFAGIDDVYKPDLLGLTVRYDLDVFMTGHDLWVRYDTVPAAAHYDMHSDKASHTVSAMLVLWDGCELVDSAAGFSGNDELAGEILGFPPTRRVPEEDGVLIPAGGE

SEQ ID NO: 39453 - protein, 507 aa, Rhodococcus pyridinivorans SB3094
MSESGRARFGAMEDALVRDDRLRLFSFATAEKRVHYLWVLRAFDHARGNYSVLLHAGDVENVLTRLPGASGDDVPDSSEIPALLEQLHAWGVLERSYDGSRAATLAEYRNRHYVYQFGQAGYRVFRAVEDVLSSRGEDVSLSRLALPDLLADLNDLADANAAGDGELVYRKLSRLDATLSDMAERAARFYLVLGELVRTTEVTPKTFLAHKDALLTHMREFSTDLARYAPKLSTALDRVQATGVQKLSAAAARHDERVLLSFEEREADWAQRWWGVEHWFVGVGSEPSESERLRGATINAISAVLGLLRRLTEQRRGGVSRESQLRHLAGWFAAAPSEEAAHALFDAVFDLGRPRHFSVAHPDADIVPVTRSWWEAPPVEIARTLAETGRRPAAGAPGRIQRNDAGVRRLREAQLEKQRRRAEAARSLAAGGVRERKLSEPEAEVLLSLLDAALSARVPVSGRVRSDDASSGTQNGVKLTLRPSGESTVVHTARGRLYLDGLSVEVR

SEQ ID NO: 39454 - protein, 464 aa, Rhodococcus pyridinivorans SB3094
MRARSIPSVELDSYQRAARLVLTHHLVTATFPDRSALATVRRWATELREDLLATFGYRLEVTETTARLFTVADRLDAGAGTSTHTGRPFDRRRYAYLALAIAALGRGAGQITLSELAEHVASEASRVDGVELDTERAADRDAFVDAVTWLGVRGAITLADGDAGRWASDPDSGEALYDVDRVVVHALFRPPRALQHLESVRGLLGNAGAPQSDTAEVRRRVRRALVQRPVVYADDLDDDEALQLALPRTTDEVKLLTGLVCERRAEGVALVDTSGRLSDVRFPNTGTVAQVALLLAGEMCDRVLDPDAPAPPRIPVPAQTQDALVAAVDSAIPRSTVFTPLAASDTPIPDEQEQDDAARAPLEHPLLEDSWLAGTVGRLVDIYGRTFAAQWQADPAGLAEAAVDMLDRLRLVTRVPGGVLVLPAIARFRGVTVSVRERDPEIDLFPATTPPTVPAPDTTTTEIS

SEQ ID NO: 39455 - protein, 1386 aa, Rhodococcus pyridinivorans SB3094
MSSARFRPTRAGIINLWDYRDQEFSFADGRLVLRGPNGSGKTKALEVLFPFVLDGRIEPRRLNPFAGEERTMRSNLLYRGQDSAHSYVWMEFCRGRADDPEAVTVGIGMRATRGNDKVTRWHFVVDGRVGVDFSLLDDEDRPLTRKQLVDQIGADAITDRPVDYRAAIDARMFGLGAQRYDQLINLILTLRRPQLAKNLDPKGLSQALTDGLRPLDDDLIVEAARSFSAIEEVERTLESLAAADDAAQQFVKVYSKYIRQQARTAVDKAATRLGVVDTAVRSLREAAEARTEAATARTASEEQLLVAERDHEQARTTLEALHRSSAYEGKQQLDDLASAVKNLERTTAAQAEQANRAQAVVADRLRDHDSARDALETATAARRRAEDGLSAAAEDAGITWTGLDGIERTEQLSAAIDALAEERDADVRVVRSALSQLDGAAAARSRAEAAAVRARAQRDTASAAVEAGETMVELSRSEVAAELGRWWSDRAETFAAVGLSTPVFEALDTAFGTVGQDDAPSPAAVFAEHTGPVLDDLRFRRRVCGAEIESLGTRIAELEAERTAVAAESDDAPPTFPARTGNRDDLVGAPLWQLVRFRDDASAQDAAGIEAALQGANLLDGWITDGVGDLPDIESEQLLVPLAPGHRPSGPTLADVLVPETDTAVPEERVAAVLSSIAWATDPGPDARVSVDAHGRFRQGVQLGRHVKEQAEFIGATARARRRQRRIVELETTIAECRADVASLREQDREIGDRLTALDEAVKSLPRTGSVFAALRKVTECAGALRTASESASAADRDLDQAIAAVATKEQHLRSTAGRHRAPLTATELDSLDAAVRHFRSQGQALQRALREQVTCGDRLRDNDVRLDEARVSAENAAELAAENAETLANEQQKLETLRESIGASADRIDAQLDEARRRIEAAKTAERTARKAHESALERIGKAEAAHTGAEQTLRSALTEARADADALAPFARRDLLTLLGVESEHVWPSSAAAWLDADQLTYRIRQSPDDTVDVLPTEVVALFRALDAATDSVTASESTRKSTASALTSALQEFDAELARGRDYRLHWDAADGITVVQVQDEQGYTSVAAFAQRIARARQEQETLLTDSERRILEDALLTGLAQQIHERTVDARDLIARMGTEMRQRHMSSGNTIGVHWVLADHLDEPARAVCKLLDRDASMLAPEDLAGIRAHFAARIRAERAAHPERSYPEILAATLDYRRWRVFSFSLVGADGSEDRLTPARHSALSGGEQSVSLHLPLFAAAHVMLDSADPHAPRLLALDEAFAGVDDTGRSELLGLSVQFDLDLFMTGFDLWITYAGVPGCAHYDLSHSVAEHTVATTLLVWSGGELLAEHDGSDLESALGSPRTRRITRPVEGALEFA

SEQ ID NO: 39456 - protein, 509 aa, Rhodococcus pyridinivorans SB3094
MGEHIGRDLFRHLVADEADEYLAVMDCFTDLLLADLSADDIAVSCARRGVALDIAVVDARCRSLVRWGNLALTSGGTDGGGSHRRSAPETASTEVRARYRPTPAGLRVHRETGRLLSTSDDVRGVARVSLRCVADGLARIEELLVDDGNVPDRDELAAHVTALFAHHRMFTDSVADFYSHLAEILSRLEHSGRPEHSSDRERAGAVDDYAETKNLLLDYVDVIGSDVERLAPLVAGRLDRIRPRLDSLLAALRESGLPNTVPGSPGRRRTDWDELAQWYAEDAGPRRMREAAAEALNRLLVRTRRIMASTPGFSHRADLLRLARWFTESSDEQGHRLFAATFGAFPSRHLLLGPDETDPRVGAGMSWWRADPVVVPVSLRERGDHTSLGAVGRLPDSMPGRVRADELARRESRRRSDAVAELSAAGDLHGADLSAEARDVLLDVLAAALAGHLTTDGPVQVDDPDLGLSLTAEPGADTVVHSPDGDLTVHGFSLRTSVTASLDHSAAAP

SEQ ID NO: 39457 - protein, 381 aa, Rhodococcus pyridinivorans SB3094
MSTSYASTVSGDVSGRRDAARALLQQPIVTAASERETFDLVRRHAPALKSMFADRLGYRLVVEPTFARLIKAPLGPTSPHRALRHADGTEFGAITYACLALVCAALLEPGTGERVSVDDLLEQVRADARENGIVFGDPVSEERNLAAALRVLEEWGVIAESGHGDEVSGDEVRGDGPHLDVHRDLLSQLLDTPLHGMPGPAAALARHEHEPAALRLYRRLVEDPFVARDELDDESATILAGDRHELARMLENDFGLVLEVRAEGALAYDPAGVLTDEAFPGSGTLKHASLLLLAELTERFGDSAATTLHVDAHTLDSVLADLAAARSRTWKSIYVRDFALLRRDVVALLFRLGLARPHENGLELTAPAARYRPVPAESKCR

SEQ ID NO: 39458 - protein, 1408 aa, Rhodococcus pyridinivorans SB3094
MTHSSDPSALDENSPPRFPDRWRLHRAGIVNVWHYLDVEFVLSGGRMILRGTNGSGKSRALEMLLPFLLDADRRRMDATGAAKVDLDELMRTGASDTTDRVGYLWLELARPSGHLTVGAQVRHRADARRSDVHFFTTPLRVGTELHLVDDARIPLSRERLAELVGADNLTRDPERHRETVRKSVFGLHAETGRERYDGLLQLLHTLRSPDVGHRIDEGRLPQILSDALPPLTENMLAEAGGRLDLLGDTRQEQVRLEAAHAHVLRFHEVYRQYAADLLRAGAETARDLAQRVVETRRALTVAEAEAADLDAQAAAVDTRLKERRDQVAELDRAIRGLETHEMFRSADDLAQRQLAVDALRRAAEHATAAADRSRLQERRHTDHAARLLDELTCSVTRAARRLATVGRDLLSVGLPHDTAPTTLHFSADRPPAVLEPVRTGIDDTTEQVVRPVVATVSLDAGHVDEVRGAILRAAEATRRRRDQAGRRLLEARRLDAAAHAVREAEAAADRAARDAEQRAVEAAETDAGVGAAAAGLQHRWREWITADRTTALLPELDRDRVILMRRLSTRLDALIDSSPTDAGDTDSEDVDVDSALAELDSLPAAAARSALSDLVGAPADRERREREARTAREDLVREQAALDAIGEGPEQAPWHVRTDGVPLWRAVEFVDTLGDDDRAGIEAALLSAGFLTATVDGEGRLRALGGQVLVSPRGEPPAQPLSTVLRPDPEADVPRPAVEAVLNTIGFEDATAVASVSRDGRWHNGVLRGRHTAETPGCIGRPAREAATAARRVRLDEIRAELTRIDLAVEQLRVDYPDAAHRRAKIDAHLSTAPTSHALRSALERRRHAYAHVRSAANTAVELRERATTLRARWTAELDAHRTACEYFGVPGDVPELEALVAGCASAETLCTELARDLGDVLAAHVRFTDAAERCVQATAERIDSEEIAESCRYEWHAKAAVVAAQTAAVDVDAADLAQELRDSEAERARADEQFRRTVAHRDHLGRAVAEVLQRCAAARERLDRDRRELAAAAELLAAHLQLPELRGALEEDPESDSASARTVLPPVHLEDPDHVLSVARTLLATLPPRTGVDENAMLVALQQFDRDLTARFDIEHTVTHGAHRVRIAGAGDDTTPAGVSATLTRQVEDGRRALSQREHDVFTGFVLGGVADELRRRIERARQVIAAMNDSLADSRTTHGIGVRIEWRPGGEDADAARLTQLLTATERSPEDASELVGMLRRRVESAHTADPSAGYAQHLSQALDYRRWHEVEVTILGPEPDRERRISARAKISQGETRFVSYVALFAAADGYLSGLPDTGTALRLVLLDDAFAKIDDPTIGELMGLLVRQDIDFVMTGHALWGCVPEVPELDVYEVRRLADGAAVTTRVHWDGRVRQLRPLTELQT

SEQ ID NO: 39459 - protein, 47 aa, Thermoanaerobacterium aotearoense SCUT27; identical to SEQ ID NO: 39066

SEQ ID NO: 39460 - protein, 1083 aa, Thermoanaerobacterium aotearoense SCUT27; identical to SEQ ID NO: 39067

SEQ ID NO: 39461 - protein, 127 aa, Thermoanaerobacterium aotearoense SCUT27; identical to SEQ ID NO: 39068

SEQ ID NO: 39462 - protein, 499 aa, Bacillus boroniphilus JCM 21738; identical to SEQ ID NO: 39410

SEQ ID NO: 39463 - protein, 388 aa, Bacillus boroniphilus JCM 21738; identical to SEQ ID NO: 39411

SEQ ID NO: 39464 - protein, 1024 aa, Bacillus boroniphilus JCM 21738
MKGTRWVMNRAGLLNFWYYDEEVFHFEQGKLLLRGSNGSGKSVTMQSFLPVLLDGKKSPDRLDPFGSKARRMEDYLLGEKEVVDRDERTGYLFIEYKKQGSEQYITTGIGMQAKRNKGIKSWYFLLTDNRRIGHDFQLAQQHTGEKVPLSAKELENRIGQGGYVVHSQREYMDLVNKYVFGFQSIDAYEDLIKLLIQLRSPKLSKDFKPTVIYEILESALPPLTDDELRTLSDTIESMDQTQQQLEQLHRESESIYRLEAAYDTYNKYILAERAEQWQKALQRSNTAETKVNEYISQQQQLDQEIVRLRIELEKFQQQKHIAEQESNSLKHHEVWSLEEKRKDKLDESAVIANEIAGLQKRWDENNKKLRGEYQKKQAAEDELFQYDQKERELLAELALDADATAFHQHEVNVSDYVRTKEIGFDFTVWQKEAKDHLALLGELEKLAVEAVRLGDDQNHLQRQSSEKKKEIDELQKELDHYQTWFEEEHQKLESNVFFWMEKHPKLLYSNELRQGIARALQGLYERNRYDDVRSQLYVAIHNYEAEVKRDEALTKSRIQQKQNDISEAEAELLRIKTQKMLEPERATGTEKQREKLLNENTAFLPFYAAVEFQEHVTEEQRERLEAALMKTGILDSLITDQTFSPVEDAVLAADPRLLGYTLADYLMPDLDVDSPLTEELVDQVLRSIPLENDGTGFHIDQDGSYSIGCMRGHAPLGGPSKYIGRTSRKRHQRELIQTWTEKIQELYRELAGLKVELEHFNSELEKIDTWKREIPDDKVLLDINEQILSKKHELKNEREMLNRIDADWKRVYDKYTEVKRVLRDKGVQLNIPLTVDDLGSALSAGQSYIDFLHELKNNDVKVSSVKKLLQTSLERIDELEGELDELRGEQGRKESQLGKIKAMIQSINLQLQLKGIDEVRSRIQEVQYQLNEAEKEIDRIRSDLPKAESDQKRNQEKLDEAQTDLSFWKQMTEVWARMVEAEKKRSYFDIEGRDPAQIFAQFDPIFTKHERPKLSEQLTKVFFK

SEQ ID NO: 39465 - protein, 535 aa, Rhodococcus rhodochrous ATCC 21198
MKGTGCTSARVWRARHRGLRGTRAAPAYPVTVNETQPPAGPTDPGAGVQHDRLRLFSFATAEKRAEYLWVLRAFDLARANYVVLLHAAEVAAILERTGSADPAAALSAQDVAPLLEQLHAWGVLERSYDGTRAASLAEYRNRHYVYQFGRAGYHAFRAVEDVLRARGEDASLSRLALADLLADLTELAAANAAGDGELIYRKLSRLDTTLSDMAERAAGFYLMLGDLVRTTEVTPESFLAHKDAVLAHMREFSTDLARYAPKLAAALARVQETGIDRMLGFAAAHDERVLLPAPERQADWRARWRGLERWFVGAGDVPSESERLREGTMSAIAAVLALLRRVTETRRGGVSRESQLRHLAGWFAAAPSEESAHALFGAVFDLGRPRHFSAVHPDPETIPVTTSWWEAAPVPIARTLAETGRTPSAGAPARVQRNESGIRRLRERQLAAQRARAEAARSLAAGGVDERELSEPETEVLLSLLDAALSARVPVSGTVPGATGTQNGVRLTLSPAAEGTVVRTARGRLHLDGLRVSVQ

SEQ ID NO: 39466 - protein, 456 aa, Rhodococcus rhodochrous ATCC 21198; identical to SEQ ID NO: 39377

SEQ ID NO: 39467 - protein, 387 aa, Rhodococcus rhodochrous ATCC 21198
MSSAHFRPTRAGIINLWDYRDQEFSFADGRLVLRGPNGSGKTKALEVLFPFVFDGRIEPRRLNPFAGEERTMRSNLLYQGQDSAYSYVWMEFCRGRRDDPEAVTVGVGMRAARGNDKVTRWYFVVDGRVGVDFSLLDAADRPLTRRQLIEEVGADAVTDRPVDYRAAIDARLFGLGIERYDQLINLILTLRRPQLAKNLDPKGLSQALTDGLRPLDEQLVLEAARSFADMEEVSRALESLAAADEAAQRFVAVYATYLGQQARADVDRLGARLAAVEGGSAEWTASMTAFDRAGVERAQAHERLELAERDLEQARATLEALQRSSAYEGKQQLDDLAQVVADLERTTAGQAEQAQRARAELAQRDEEARRAAAAATDAAAAVGRAED

SEQ ID NO: 39468 - protein, 510 aa, Gracilibacillus boraciitolerans JCM 21714
MIVENNRMKDGKGECPMFKRVKEATYLTAEKAWSYRAILRYFFIQHERMREFLFPEEIYEYLNQYDEFSEYSEEGLHQDLDALVRWGGNLIARQELGKSRTVEEFKKKRFRYQCTPYTVEFERMLLELEGIGETFGGSLERTQFERLYQSLSKIADITLSQAPEKREESAQIWEDILTYFRQITQNTSDYIAYINSEEVEEQMQTEAFLVYKDQFTTYLRDFIVGLQGTALQIQDLLQSMTKEKLQTFFSQVVQHKQQVFRLEEIDGKKDPYEDYQQKWLSIKAWFLGNEHGESEYEMLLQRTNESIRRITRVVQRLGERHQHFRSRKKDYLHLANWFSAMDNVEAAHQLSSVAFGVFHTRHFLIDDHSTDDIYTDVWDEQPMEHETKPIVRNYREKSRAGAVISNQQKKEEMKRAHLEQKQRERQLIEQYVKNNQIKVEHLPIVEAHVRKLLLSWVGKAMARKDRTIKTELGKRVHVILSDERITLEAEDGKLEMPKAIFQFIDEEVDV

SEQ ID NO: 39469 - protein, 388 aa, Gracilibacillus boraciitolerans JCM 21714
MEEAGFDEKLQEALGLLFEQFWILRTEEPAAYQLVREREKSLKRYLSEKFGFDLIVHQHFIKLEKIPVDPKAWMGIQDFQTPQDYAVFCCGLAFTERRSVDEQFLLSDLTEDIQDMYPGDLPLDWTNYQHRKSLVRAMKKLVELRIMKTVDGDIDMFANDQEQEVLYEVTVYARYFMRSYPDDLFRYQTIREILDSEWQRHTADARRKRVYRKLLFSPPAVYRENDNDQDFDYIRKYRNRLRDDLEQHTSFQLEIYKNCALLAMTERKQRYTLFPDQKAIMNVALHFQDYLREHREHYSINAMGEIRITNNEFTQLIDIVKSQYGHGWSKKYREMTYTAIALELLQLYKEWELADVEDDTGMLVLKPAIARMTGHYPKDYLMEVNQHD

SEQ ID NO: 39470 - protein, 666 aa, Gracilibacillus boraciitolerans JCM 21714
MTKWKMNRAGLLNFWYYDEEIFTFANGKLLLRGSNGSGKSVTMQSFLPVLLDGRKSPDRLDPFGSKARRMEDYLLGEKEVVDREERTGYLFLEFKRQDIEQYITIGIGLQAKRNKKMKFWGGFIVTDNRRIGVDFDLYKVEQHGGEKQKIPRSRVELENVIADGGHVVQTQKEYMSLVNKYVFGFETLESYEDLIKLLIQLRSPKLSKDFRPTVIYEILEAALPPLTDEDLRHLSDTIEQMDQTKQQIEQLDREVSAINSLNQVYNTYNQYVITDQANEYLQANKRYRKEEKEYQQLETTRKQLEAEIQQLAEEIDKLWIELQTYEKKEERLRSHKVWDLEKERQQEQEKWKQVEITLVKKEHQLEDRRKKERKILDDQRNLEEQIEQRKQAIEDRLIDLDNDADEVSFAEAHQINQQDYDRYKQDNFDFTMWMKEASNHLQELENVANELHVFATLKERYQEKDKELANEQQQLDDVTYQKDEWLRLFEEDKEQKLNEIHQWLGQLAWLDVEEDVVQKSSRALRSLYEPDTYQAVIDPIRQVIFSYQQEQGQLLSEHKIDEKQLVEQIKEKEQELEEWKKKKDPEPPLESLSKEARQQLKQENIPFVPFYAAVEFQEHVTTDVRKRLEAALLDSGGVLDALITDRSETVKHDRILKPNPNMMAIH

SEQ ID NO: 39471 - protein, 504 aa, Nocardia nova SH22a
MDPIRVPPEMFRFTGAERSGVYTAVLHAFGEANEHLETALSLDNLRSRLPSVGRLEPVSEDELAEVLDQLRAWNLVDVIQNHSENYRTAVDYERRNLLYSLTKMGEAAFAGVVHALTVLASSGALQTAVLDAIADRLADLIRVVESGTDRQVYVVLAELEGHLEALRSGTKQFNGELQRLLRADGVDLAVFHEVKSATVAYLQEFLDDLDIRAHTIAIRIRQLEDFGVARLQQRALAGADLPAISGPDPRPAWLEQRRARWAGLRAWFLPADGCAPRIDQLRHVGRRAIVTLLQVLDRLTESRRRSSNAVADFRELARWFSIIPAGDDLNRLWSTVFGLSPARHAHLAHPDPELVSYTASWIDAPGVPVSPLLRSAGKTERMGRTGAVPDVSALRKERAAKAIAERAEIEAAWEMLDTGGIVRRLSEFEQLDHAMFQRLLDLIGRALGSAPDSECVRSARAHDGRIQIVLRPATDGAVAELRLPHGIFRGPDYLVEIRAVGVRR

SEQ ID NO: 39472 - protein, 418 aa, Nocardia nova SH22a
MSDLTNQLAIAEKEEVGRGIRYLLAEPLLTARSAPDRFDVVRRRRVPIAAWFDTFCGWGLIVEPRVGYARLRKVRASVDPTRPARRHRSQRAPFDRRRYVLLCVVAAELCTVPVTTIGILAGNVAAATANEPLIGGFDPVDRSERRAFVDVLRLLESFGVLEPVDGSSDSYVDSTHAKVLYRVDNTLLLRLLVTTSGPSQLGVPAEEVPLRLPDILGELTRERRYGAAAEPRGRHTDSPAAPDAQRNLWLRHSVFRRLIDDPVLYFDTLTDAERTYLATPTGRQMLKRAADTAGFVLEERAEGVMFVDPEALSTDQKFPDDAATAKVAALLMLEELTGPTTVEQLRGHAAELLQRFPRWARTYRTDDGPRDLVTDALAVLTQFQLVRTTTAGLVVPLPAAARYRVQQPRIADPTQEPS

SEQ ID NO: 39473 - protein, 1330 aa, Nocardia nova SH22a
MTAAAQVRWAPTRAGILNIWRYYREIFEFHEGRLLLRGANGSGKSKALELLLPFLFDASLRANRLSTFGTNERTMHWNMMGEGATGVTRVGYVWLEFRQQDRWFTCGARLQATSRTTSVHPDFFTTSQRIGEPGEEGVLVLTDSERPIGKSELDARIGEYGSVYENAAEYRNAVRTTLFPELTEQRYDALITALLQLRMPKLSQRLDPGLLSTLLSKALPPLGTDELADLAEGFERLDAQRERLARLDEESTAVAKLAHQQRTYAQRVLRAHAGELSSVTSELEALSEEARKAAGQHVAAKQHLTGIEQKLIELKQGHAKLVSRREGLMKSHAYQEGTKLGVLRENVAKAKRWHDDAERRTRAAIAAAASATEQYRNAQETAESWREAVVPAATEVQQAALSCGMSATVDEMAASSALPECSGLLRNSVAAREDRIRLVDRHIAEHEKKRALSEAEEKRVERARDNLVSADERLRTAGDERDRALESLRHDIEEWAQSCSELRVAAESLVSVADSDTGFAERVNEAVTDAREAIAAAIEACRRDKEGAVGERKQPAADREKLLAEQDVPPAVPRWRTADRSVMPGAPLWQLVDFAPAVDPAMAAAIEAALESSGLLDAWIGPRGEIAGHDIFAVPAAVADVTGWSLADMLIVHDEGTAEAESVRKVLAAISFGRTLTDGPTMAVAADGSWRIGTLHGSWDKPAVTYIGAEARRRNRERRLAELDAVIAEIDRRIQGYDLQLEKLAIRRRSVDAEMRAQPDRSALRSARTAVADADRHRDAADQAVRTAIADLARAQAAQTAALQDLHMCGAESGLPTETPALEALRNALKAFLGKAQTWLDYRRELQRAESDERARAGGADDADDEAQRSAEGEERAASDHRDAEEQLRAVEDSVGMEYHEVLNEIEALRTEISTATDSLEAERKREREWTGKEATLGTKAEAAAQAHRDKTAERDLIAQRFRELAGGNLPADAEIPESESFRDLLTGSGGVRAALDAARRVTAAWPTVPHTANNIGDALRRLSESVHECRTSLSARADLDLESDGDVQLFTAVVDGVRVGAAGLKDILRREAEQSRNDITQHEHELFDKTLTGDTRRHLASRIRQANALVDAMNEHLSRVRTASDVGVQLRWQVGKDLPPGTAAARELLLKDPAHLNDAAREALHRFLRDRIEEAKAADSATSWEQQLAEVFDYTRWHQFTVRIDRGRGEGFQELTKKLHGALSGGEKAIALHLPLFAAVAAHYHASPTAPRVILLDEVFVGVDTANRGQIFALLSALSLDLILTSDHEWCNYPELSGIAIHQIVTGDDSDAVTTVRFTWNGLELEAAA

SEQ ID NO: 39474 - protein, 402 aa, Nocardia nova SH22a
MGGTVHELSADLMTVWRALHHRLGSGTAVTSVRIGPMNTAEREALADLLGMATLSAEICTIRVDRLDSALTEAVGMTARQVAERLVGPIENRSAARAEQAAQRRELWDWLETHPVVLAQPALVEWARAMRRAGIVGGSVDKTRDFLADALAVLRAIPAAGVSLPVFAEQTARDPHALDNGTRLHAAVFRALAIIHDCDVPGDAVGMRGLWEMAGIADDELSSTVLVAGLWVTAPGSVLEGVLRVCVAAGSAASLTLQQIRGADRLTVVPEVVRVVENPSVLATALQRFGPSCPPMVCTAGWPSSAGIRLLDLLAAAGARLEYHGDFDGEGLRIAAHVIARTGAHPWRMGAADYLASVGQVGPPVGRVSEAPWDSDLAAHMRHTGVSVPEERVVGILLDELST

SEQ ID NO: 39475 - protein, 547 aa, Nocardia nova SH22a
MRRGGVRTGITLVPVTESADRLLPAEPVLFDGDRGEPRGPEIAGADRLRLFSFATADKRNDYLWVLRAFDQARAAYVVLLHAGEVADTLARTPGAPRPTATEIGPLLEQLHTWGVLERSYDGTRAATLAEYRNRHYVYQFSQAGYQAFRAVEEVVGARLDEASLSRLVLPELLADLGALAQANRAGDAERVYRVLKRLDAALSELADHAAHFYLTLGDLVRTTEATPETFLAHKDALLAHMREFSMDLARYAPRLATAIAEVDDTGADLLIARAAACDERILLDLADREADWRARWQGLRGWFVAVRERAATDADSTATTEAERLREATMSAIAAVLSLLRRVTETRKGGVSRESALRHLAGWFAAAPTTDSAHALFDVVFGLGRPRHLSMEHPDADVIPPHRSWWEAAPLEIARTLAETGRQPTPGAPARLVRNDAGVRRLRDAQLEVQRARAAAAMSLASTGIHDRILDERETEVLLRLLDAASTAWVPVSGRVGTSGSDSGVTLTVSEHPGSTVVRTARGLLHLDHRRLEVRENARARTGSGRS

SEQ ID NO: 39476 - protein, 467 aa, Nocardia nova SH22a
MHARTIDPLALDSYQRAARILLANHLVTRTYPDRIALALIRRWATELRDDLAELLGYRLEVTETTARLFPVADRLDGGRPARTPGDRVFDRRRYAYLSLALAALGRAGDQITLSELADQVAAYAGRVDGLDLSTERAADRDAFVDAVGWLAARGALSLADGDAGGWASDPEAGEALYDIDRSVVFAIFRPPRALQHLHSVRSLLSDDTEPGAGRTAAARRVRRMLLELPVVYTETLGAAERSTLGSDKLVAEVELLTGLRAERRGEGVALIDTSGRFSDLRFPSTGTLGQVALLLIGEIADLVLDTDHPLPRRERPGDAGRFADELDAAIPAATVFTPLATPEPADTDSTADEDDPEPVTHPFVGDDWIRATVHALTERYGSTFAAQWQADVPGLTAEVISLLARLHLVEVVDGGLLALPALARYRGTVVTVRTRAESELFASARSLGTHATDPVTTSPNNSGEATD

SEQ ID NO: 39477 - protein, 1407 aa, Nocardia nova SH22a
MDLMHGGVRFIPTRAGIVNLWDYRDQEFCFADGRLVLRGPNGSGKTKALEVLFPFVFDGRIEPRRLNPFAGEERTMKSNLLYRKQDSAYSYVWMECARGRKSDPEVVTVGIGMRATRSSDKVTRWYFVADGRVGVDFSLIGPDDRPFTRKQLAEQIGTDAIVDRPVDYRAAIDARMFGLGVQRYDQLINLILTLRRPQLAKNLDPRGLSQALTDGLRPLDDQLILDAARSFSDMEEVGRTLEGLVAADSATRAFVGVYRKYLAVQAKSDVEQVRTRLDAVTHGSTALFAAAALRLRRDTERTAAEHRAEEADRAYEQALTDRETLQRSSAYEGKQQLDDLADAVRRLETSAAVHRDKSTKAQQAADQRAEEFERAAAAVTTAVAALTRGEDELRAAAEEAGIAWAALPEQARTEQLTTTVRGHAEERDADVRAVRQALTGADAAAADRARAERAAERATHHRDTAAAGLAEAEAAVTLARSNTAAALRVWWDDRRELYSPAAGLFEALDAGLAQAGADDATGLSQVLAEHTEPLTEQVRERRRQARAAAEDAEQRASALRAEHRVIAAEQDDAPPPAPGRGGARAELAGAPLWRLVRFADDVDAGRAAGIEAALHAAGLLDARVCAEDAVPQEDSDTFLIPLPDSARPSAPTLADILVVEEGVGDGGDTPIAAVPRERVAAVLASIAVRENGVGAESAEAVAVAGDGAFRQGVQLGRQDKPQAEFIGTTARARRRERRLAELAEGIAAAEAAGRGAADEAEEAEALLSQLASAAKELPRAGAVTAALRAVSEAAGVLRSHTEAAAQAEQDLDQAVAAFTAADKKVRAVAAARNAPRDPAELDALAAAVRHFENTGTALLRLRGDSQRETERSREAADRLAESRDLAEAFAEEAEAARAGYEEQVRKLDTLREALGADAADIDRELEQARERIDAARAEQRAARKAAAEAIEAVGSAEGAYRAAHEALGTALNELLTDIRQLAPYARPDLLALLGAPTDSRWPSSPAAWSTADQLLYRIESGGPDTETAVLPPEVHALFDDLAAATTSVRAGEAARKSTRSAVTSALQEFDAALAAARQDYRLQWDAADGLTVVQVHDDDGVAALADFADRIASARADQELLLTDAERRILEDALLTGLAQQIHERTGDARDLIARMGSEMKQRRMSSGNTIGVHWVLADNLAESARAVCKLLDRAAADLTPDELATVRAHFASEIRAARAAHPERSYPEILATTLDYRTWRVFSFTLVTADGSEDRLTVARHSALSGGEQSVSLHLPLFAAAHVMLDSADPQAPRLLALDEAFAGVDDNGRSELLGLSVDFDLDLFMTGYDLWITYDHVPACAHYDLAHSAAENTVSATLLVWDSSELLAEHDGSDLTTALGSPNRRRTPHTVEGGITFDEALEPTV

SEQ ID NO: 39478 - protein, 510 aa, Mycobacterium avium MAV_061107_1842; identical to SEQ ID NO: 39430

SEQ ID NO: 39479 - protein, 393 aa, Mycobacterium avium MAV_061107_1842
MATALRLLARQPWLIAGRDDAAISAVRRNLIGMRSVLNRLGWRLIVQRDVVRLEKSPPTRARLADWAVQAPNPLTCSWVFLLAAAAESLPHQVTIGQLVEAGKAAAAEASIPLTASRAERRAITRAVHELADRGVIEETDGQIDSYLNDDNAPVLLTIFHTRLLHLIANFDPTTDPSLDPGRWLDNVAREPDVGRRMRRRLVDDTCVHTIDLDEAESDWLSRRLRSDDGAPLAAAFGLAIERRAEGAAFVVPDDAFRWPSELGQVPFPAAGIIPHVAMLLADHIAIKGQTGGPGPGWRGMPRVAVLAELTRLAEQQTTGKGGWPAERAADPAGLLTDVQQLLTGVGLLRIVDCCWWLSPVMGRWEPPPTAPAPTPDREFGTKYRPEPCGGEPR

SEQ ID NO: 39480 - protein, 1372 aa, Mycobacterium avium MAV_061107_1842
MTTIVPTPMEQSQPAPPAGNRARFGGRWRLVGAGLSNVWRYGDLVLSAPSGRLLLLGPNGTGKTTALEALWPFLLDLDKAKLRAGTSRTTTLTSLMREGSTDRKRIGYAWLTFAGPGDQAVHSYGARLVFSDGSTPNVKIEPFTIPGEPIKDMPLTGPGPGRPAITTAEAFREQVEATGGTVFKDEEDYLNALANHVFSTARRDLIALADRIRKVRNPSLLAGTSPDHAAQSLREALPGVSNDVIEATGEALAATNETRLAFQRDVEAAATLDTFAEVWSGHAAEVAGKLAAAAACARDVYDNARQAADRFQGRHRDAVTARERAEADLRVAEQDHDNAVAEVESIEKSPAYTTLERLADLANTSDARDSEAQAKVDNLHHRVRTLRRDGAHLATDAHQLAAAVTDITAAAANYDPHTAATAPTVVVSTRSHAILTVGEDAFDPGPPLELSIDPEQLDAAAQSWMAIASDHETRQTNAELMVRQHRRTVAPVQQDASHKSQQADQADQHADNAAHERDRKTERALDAASTAVQEISRWASANADLTATPESDALDADTITQTAAAGPAALLGSASDWKDSARNIAAKTAAELRQTAKAYGQQADTKHAAATDARHRAEELRAGRMIPPPRPPWAGDADEDAFAYALQWKTGTDRRLQALVESALESAGLLGATLTEDGGWAHPWAVTATTPRAAHSLTTLIEADSQHRLAAAATDVLERITLVDTASAALSDVPAVIGTDGSFRFGVICGRAPGADDSATLPEPSHIGAAQRRAAALAEAERLDDTADHLDSEAAALEQAAEELRDHATRTQARAESFPSLKELAKAEQDRSAAARWAEQQRAVADKAAAEAETARRQANTVAEQWRTQAKSMGLSTDPDEVAATAESEARITTGLRNAAAALSAQQSTLLSLRTRADSHASDRAALTALHAAATTAHAAARKARLVYERMQGAHGKAAAELSARLTAARARAKETQELVGAAVVLKDEALVEEAKLEQAAADAIENAAAKQPAASAALAELRGLLAVQDVAEVVLRDAQHSSSDALIAQVTAAVEGKTKWGKKKVADTYETARAELRMWAVDRTEGHGDLDTYQCTYDGIAYTPCAAAALARRLADRAGEQLHEAEEAALRDFIVGRLPSAIGIAYTELLDWVDSVNTKMESASASSGVGVRVKVSLRDDLNPNRRTVYHLACKKSAATRTPEQDAELAAALKSLLDAADGETDTEKVKQAVDIRDWVRVDYFVHRPGQEPKRWTRNTGLSGGERRLVILAPMIASIAALYDNLPDTALRLAALDEVPAEVDDTGREGLARYIAELDLDVICTSYLWEGAPGAWDGVDGHDLEAGPDGVVVAFPMLVRGIEPLPGDPDESP

SEQ ID NO: 39481 - protein, 143 aa, Mycobacterium avium MAV_061107_1842
MFITENPSVLAAAADMVARNPDCANPIRLVCTMGNPSQTEIAAIAGLAAARWNIAVRADFDPAGIRTVTAILNAVPTAKPWRMTATDYATSGPTAPIRELVPPTPWEPELAEQISATGCVAFEEALMEHLLDDLRRGAPPTAS

SEQ ID NO: 39482 - protein, 514 aa, Xanthomonas arboricola pv. pruni str. MAFF 311562
MTLPATAQADLFRHVSAEKAALYRCVMDCFAAAKRQFRLHLRPDEVLEDGDWSTLVSSATPRMEEIQAALAQLAEWGNLESQPDTARVASISDFYRARFVYRLSLGGEAVEAALAAFSRTLRRRAELQSVALEDIALRLKALLALADSAEPDAVKVHETLRDLVRVFESLADNAQAFMAGVGRGIELQQADAAAVLAYKKRLIDYLERFIGDLVARSGGIAQHILSLQPRIESLLWLAAQRQARDSAPGDEAEQLDAVTRGWQAWRERWTGLRRWFLATGHAPAQSELLRAKARAAIPQLLSAVATINERRSGRSDRSADFRMLAGWFAACEDDAQAHRLARAAFALNPARHFSLNPELASGAQDLPASTPWADAPPLRIHPRLREYGQASPRGALPRVQARDAERQLLAARLHEEHAQIEAARQRLANGRSTRLSEFGTLDPHAFALFLGLLGEALTAQSSPDAEVDVPSGDGLLRIRMQPLAADSRASIHTATGTFSGRDHLITITRTDAAP

SEQ ID NO: 39483 - protein, 422 aa, Xanthomonas arboricola pv. pruni str. MAFF 311562
MSPSDSRANSRSIGRQQARHRDDERRQALRALLMSPLMNPAHEGFAAVRRHADELRAWFARETGWTLHIERDCARLYKRPADLRDASRGLPGYDYRRYVLLCLACAVLERADPQITLRVLGERLLTLAADPALESRGFRFTLGAAHERRELVAVCRSLLEIGVLQRVAGDEEGYVRSSGEAAEGADALYDVRRRVLAAVLSAVRGPSTWPAEQAPVDLDARLASLVTEHQPDSEEGRRTALRHHLARRLLDDPVVYLDTLDAELRAYFVNQRGAMASRLCEATGLVAEQRAEGLALADEDAELTDIAMPAEGTEAHATLLVAEFLSRSRETTDAINRDDVIAFLATAREAHGSYWRKSAREPGAERELADLALERLQKLQLAACDETHVQPLPALARFALGEADIRQPAAPATAAAHPSLFE

SEQ ID NO: 39484 - protein, 428 aa, Xanthomonas arboricola pv. pruni str. MAFF 311562
MTDTTSPSLPIPTLARWQPLRLGLVELFHYDSEEFWFRDGHLLLRGNNGTGKSKVLSLTLPFLFDAQLKPSRIEPDGDASKKMAWNLLLGRLDRRMGYAWLELGRLGADGQPHYLSLGCGLLAVAARPQVDSWFFVLEQQRIGQDIWLMSPARAVLTRERLRDALQDHGQVFDTATAYRRAVDERLFHLGPQRYTALMDTLIQLRQPQLSKKPDEANLSNALTEALPPISTDLLADVADALNQLEEYRRELEEYEALERAVGQFNQRYQRYAATQARRRARSLRSAQTGFDNASRDLNDGRLALGAARAAETGATQAQQRAENALAGHRSRLDELQNDPAMTDAKALDKAAADAERQQRDAGAARTERQRRQTRFEQEQQATRQRAQRAEDAGHALAEARTQASAAAETAGLVSNYGASRWPTARRPP

SEQ ID NO: 39485 - protein, 517 aa, Ralstonia solanacearum P673; identical to SEQ ID NO: 38937

SEQ ID NO: 39486 - protein, 416 aa, Ralstonia solanacearum P673; identical to SEQ ID NO: 38938

SEQ ID NO: 39487 - protein, 1376 aa, Ralstonia solanacearum P673; identical to SEQ ID NO: 38939

SEQ ID NO: 39488 - protein, 520 aa, Kutzneria albida DSM 43870
MSEEREGREEDDLDRLSCYTYLTVELAHIYIPIMRIFTSTLLTDLSATEVHERLGGVGVDVDVDTVPELLKRLSTWGNLIPSNRVGTVVSIRDYERGRHRYQISQRGEMVQRQAEQVLTSSDAAREVSRELLSLISQGLLRLEDQLNQPGDIDLQLALECISTVFVQFTTFSESVRDFYAFLAQVLFRYDLDTAEYTGFKDLLLDYVEAVTDEIRQYSTPIAACLQWLFDKGRLTELLAAIDHRYEGLQRLSEHNPELQVQRSRGRDLADWHALRAWFSDNASEVDHLRDTTLHALHALLANAKRLIRSASGELSRRTGLLRLAKQFDHADQDLADALFVAAFGLYAPVHLGIEASADQLATAATSWWHAPAVAVPVSLRERGSRAPRGRIGLVEDHSKQQEALRLRAAQLVERRRVAAIELRQCGADFVTRPLSAEAAQLLRELLARALTAATPEPTTLTATDGDLDLRIWLRPAADASTRVCGADGVFEIYGHELFIGRMSCTFPDDQEGEESDGIRS

SEQ ID NO: 39489 - protein, 416 aa, Kutzneria albida DSM 43870
MAYDPDPDRAEDRRTAARALLRSPLMTPVTHPTAFPLVRQHAGWLQPQFKEVLGYQLVVEATFARLYKSGLGAASGYCLRRPSGVPFSPRCYAYLVLALSVLVTVPPYRLLSEFLVDLHTAASEAGVRVANPGSIHERRSIVAALRQLMAWQVISEVEGSVVDYAEDTNAKVLLQFDQELARYLAHRRINEATEDPAELIALAEQSGRGGTPHAVRRRLVETSVVYLDDLTADERAWLRHRQRREQQQFEEFLGLDMEIRAEGAALIDHQSVMSELVFPGTGTVSQAALLLISRLVEEHRPMHAGHPAAGRELVIGVPVGQDEITRILRELVDVHRRHWAADYVDGVAKLRVDVLNLLGRLRLLVPDQPTRADLDRSTPTENRPVTNVDGARGGGGEWVLLAAASRFAVSGEQGRS

SEQ ID NO: 39490 - protein, 1406 aa, Kutzneria albida DSM 43870
MNAALGALPMTEPAALRNPSRYRLNRAGVCNVWQYSDQEFRFGDGRLLLRGKNGAGKSKALEVLLPYLLDGDARRIDATGSTKTSLSWLMLDGIDPINRIGYLWLEFEQVDETGQLRWLTLGAAIKASKSTGEARPTFFVTPLRVAHDLTLVSAGQPLPVDVLRELVGAGNCFERPSEYRLRVMRDLFGLTEPARYRNLLHLLYRLRRPTIGDRIESGELQAVLAEALPPLDDEVITRVAHNFDDLAAVRAELSRLESVDEVLTEFLKHYRGYLHGVLRTRCEAVRSELASLADRRKDAGRAEQRVVRSTADEHRHVARHTELVDQRDQATAELTALRDSHAYRGLEQLRDRRSAVAAIAESVAAAWELVRLAHRSERSAAERVTVALNQLGTRVTRLKATQRVHQQQVTSCGLPAAVLGTAPELRTSSLAAAVEWAATDPTGRTETLRSDSVITADSATESLLGTWHTELTEGRRSCASRLRLAEDLDRLLAAMAAAESAADQARTERERLDAEVEQADAAASSALEATAVTSRDYQCTVLEWATHPLRLGADLSNLLAVVAVSTDQSLPAGDRVLDADTPAEVALLAQRALEPIQQHLEHARDDALVDEARVRAEFSAVQEELLSWQEHRDPEPPASPYRAGARLPGTGAPFYLLVDFRDDLPAGQRAGLEAALESSGLLAAWVTAGGHVLAPDTHETVLEPGVAVDGPNMGDVLHVVDAGSSGVSPAQVERILHGVELVPAGGRPRTANWLSTDGRWQLGVLRGAYTKRSVEFVGAAARAAARARRIAELESRRAELDSALLEHAQRRAVLELDCGLLRTAARTVPVGRELASAWTALEQRRSLLRAVISELSSARVVADRATQKANRARGAAGAAASADRFPVDRERLRAVRDQLARIRDGLDSFCQEVDQTSRDAGELPAVVEDWRCEATASEEARRGYTERHTMLVSAQLQLSTLEEAIGTAESDLLAIEHRAEDRYQQAVRQLPAVAQHRQVAHDDLIRARADREVALRLLRDQENVVIGAGGLLRTPLGDNALLLAADLSEITPAVDAYDSAAEADARDRLIALRALADATSGSLRGQSADVGDTGILRRHETVRDRLAGGYDIEVSEELGIKRFELRDDAGRHDIALVQQRIHDEAERARTRLTTREQETFERFLLGELGDHLARQILAAEALTKQMTETLKDVHTSHGLGASLKWQLQAGASANIREAAELLRGPAAMRTREQTARLRDILQEEIERHRQETPNEDYKAHLTRALDYRSWFEFDIRVTDAAKPGPGRKLNQRTAMSQGEQRVVSYLVLFATAAAHFGSLAKVAPNAPRLILLDDAFAKVDEPTHGRLLGLLVALDLDFVLTSERLWGCFPSVPSLHIYECLRDTQVRGVATLHFTWDGSNKRLVSL

SEQ ID NO: 39491 - protein, 426 aa, Kutzneria albida DSM 43870
MNARKSAVDWLAQPALARMWHAVRTRLERNGVEAKGRIQLVDLTDVEAEALGLLLGQRCNTALTRISLATLDRRLRDSAAECGLIELVGILAGPLQDLKGARAARAAQWAEVWTAGADLLAAHDLGDLAGWLETERSSGGLRRLDPGEAAEELRRAITVLARLSTGDRSVISRTELAAQVTGNAHGLDDDTVLARLVLRAIAVQRAQPVPVTAGDRRSLWRAADVLADQVSATVLTYGLAPHGQGWREGALRDRAAHNAEVHLTARDVCAIRWELPAHAREVWVCENPTVVEAAADARCGRPLICTSGNPATVVLLLLDALCATGARLHYRGDFDWPGIAIANRFLTRYRADTWLMDAVFYDSAVTLARDRGSPLWPLSEASVEASWDPELAPALAAIGVAVHEESVLEQLVDHLNPPERATSTGS

SEQ ID NO: 39492 - protein, 540 aa, Kutzneria albida DSM 43870
MGGVTSDQRDEESTVADVPRQPFAHLSAPNAAFYREVLMAFARARDRFIVHMRPEDVIADLGRPGETEQVVAALGKLTEWGNLRADPDTSRVTSVEDFHRARYLYQLTAAGQAAEQAIAVYEEAVGRRGSLQSVALSDIADQLRSLAELADRSADLDPAKVHLLLLALAERFAGLADNAQAFMASLRRVIDFADGDIDAFVAYKHRLIDYINRFIADLANRGAEIATLLSGVESAGVERLLLVAARREAADSVPDLPNDGTENDDPAAAYEAAIGESLAAWRNRWRGLRDWFVSADSRHPSQARLLRGAAVTAITQLIDTVAAFNERRSGRSDRSADFRTLARWFAEAPDDAAAHVLWRTAFGLASARHLTVTRETLAAWEEEQPAAATPWRDAPPVRISPQLRKTGSYERRGQPNRVADRAEQRRLLAEQADREATETSAARRRLCTHGPVPLSGLGELDTRAFRLFLGLLGDAMSARLPGDTEVRTTTSDGTMEIRLSLVEGGDTVRIATEDGVLSGPEHLVEIIELAGARRAVGAMA

SEQ ID NO: 39493 - protein, 407 aa, Kutzneria albida DSM 43870
MIDDEARAQRRAALRGLLVKPLLVAGVDDETLRLVRRHVAELREWLAAETGWRLAVDAESARLFKAVPDGGGGDGTRPARDGRGRPAFGRRRYVLLCLALSVLERADAQITLGRLAEGVLVAAGEPELADAGVVFTLSRRDERSDLVAVVRLLLGLGVLERVAGDEDAYLSDTRDVLYDVRRRVLAALLTGVRGPSTIDAPDHDQRLRELTDEPVPDTDDLRNRALRHRLTRRLLDDPVVYYDELSEDERGYLVGQRHAITRRIEEATGLVAEMRAEGIAMVDPNDELTDVRMPEQRTDGHLTLLVAEYLAAQVDTPVPVDRLRAHVRAMATEHQNYWRRGVTEPGADAELLAIALDRLRALRLVTDIPGERPSVLARPAIARYAVQAPTVRTGPAQRRSTRKADRT

SEQ ID NO: 39494 - protein, 1366 aa, Kutzneria albida DSM 43870
MPTPHRERWQPLRAGLVDLFYYDVEEFHFHDGRLLLRGNNGTGKSKVLALTLPFLLDGELSPHRVEPDGDRNKRMEWNLLLGGRHPHSERLGYTWLEFGRHRGDGTAEYRTIGAGLKAVAGRGIARHWFFVTSQRIGPALSLLSPTRVALTREKLRDAVDGHGAVYDTASDYRRAVDEALFGLGAHRYEALVNLLIQLRQPQLSKKPDEKLLSRALTEALPPLDPALVATVAEAFRGLDEEREALRGLNEAKAAAEKFLGHYRKYAGVAAKRGATPLRQTHSRYEQLGRELGEADAAYEHATQALESVQRRLDELAGARDTLEARRVALQQSPEMRDAEALTAAGQESQKLGRFASAREADRVSAVDVARRRERQLERARQTAETDDTALRSARDIAADAADAALITSGHASVLAALAADEPPYPNADRAGTALIESRTTAIARVEQLLERAGGAEAALRGARVELDRVTGERQAALDRITVAEGVTSECAGALLTAYAHYLAGASHVLITDQDDVLAALDAWTDAPAGPNPAAAVVDEAVRAATAELGRAQADADRRRADAERARDEVAEEIARLEEGGHDAPPVLYTRDQQGREGRPGAPLWRVVDFAEGLPDEHRAGIEAALEAAGVLDAWVTPEGELRDAVDDVVVRAGAVVPGGGLTAVLTPAIDRADATAATLTDAAVTAVLAGIGLGPGATTWVGVDGRFANGPLSGSWHKQAAGYIGEGARETARRARLDRLREQLAVILAQLDQLTAIETDLADRATALAAEHLAQPSDTELREAHVKLAAEHETKRRVDAQLTEAEATVAERAQLARTAWAEATEFAGDVGLPTDSDELAAVRAAVGDYRVALAGLWPAARAADRAREDVGNAELELDAAVEQREQAIAAAERSRSDADVAAERHRVLIETAGAGVDELYRKLDAVATELAERDKRERQAREDERRTRDERGTANGRRETLRESIAVAAAERDQAIVALRAFVGTGLLHTVLPDLDVPDPAEDWTPRSAIGVARAVNAALDAVDDGDRPWELVQQRLSAEHKVLTDTLSRHGHSVGMTVRDGVIVVDVLFQGRKQDVPDLVDGLTAETDQRGALLSAKEREILENHLVNEVAGTLQELITGAEEQVAAINTDLADRPTSTGMRLRLLWRVARTAPAGLSRVRDRLLRQTADAWTVEDRAAVGAFLQEQINREHAEDAAGGWAEQLTRALDYRGWHEFAIQRHQDGHWRPASGPASGGERVLAASVPLFAAASSFYTSSGNPHAPRLVALDEAFAGVDDDSRAKCLGLLAAFDLDVVMTSEREWGCYPQVPGLAIAQLARRDGIDAVLVTPWRWDGRERVEVERPTPYVPERPAPALTGDSAGTLFE

SEQ ID NO: 39495 - protein, 418 aa, Kutzneria albida DSM 43870
MRGAMDEPRLRRLLGGEDTAWLLDRVRRRLELGKPVAGTVTLASAGVEQRRAVERLLGRRAGSGRSLTVSLEEIDAVLRVSGAAPEGLAAATRALLGTVPDRAAEATAWMAVYEPLAELAERRPELAAWRAWLDATGMIRRLTAGPADAARLVTELVRVLDRLPAAGVALGRLAAETTGDAHGLDDGKALATLTLAAVRVLAGAAPTGDGSTFERRSAWAAVGVHRDELSSSVLCVGLPGGVTTLVGRMVALAREAGEPCALTLRQLNRERSDLGVRDGHVWVCENPIVLASAADELGTRCPPLVCLSGQPSAAVLRLLDLLAETGAQLSYHGDFDWGGVRIGNTLRDRFGWRPWRFDAPSYRAALASAPGGTLAGRPVDAVWDPDLRPALEHHGIHVQEELVLPDLIADLSAAATVP

SEQ ID NO: 39496 - protein, 523 aa, Kutzneria albida DSM 43870
MAQAWGAGPLVWPTVEQEQLYDQTTDRRLLLYAYLQPREHHRTYLTTMRLFASTLLADLSAGEVAAKLAAAERDGLVEPGESRIENVIARLKQLVEWGNLVPGRREVIASSIAEFQHGSVRYQVSKLAVRVQRDVDELLRVPEGAREVSRELLPAIERGLGQLGRSLSDAVFTEGGPGARRAREALAEQVTTLFLQHAELAVTVRDFYAYLGQIVTRHHLAPDEISGFRNLLVEYIQMVVEDVLRHTPAIADSLAQLARGRTELLRLLGPADGLGAEIERSRGRTTADWQELTDWFVDRPGRPSQVTALREATGRAIGSLLASVKRATSGGGLLPGRRAELLKLASWFDSAEPDQAHCLYAAAFGLYSARNLLPAPEHDGDDEHTPWRDGPVLDVTVSVRSRGDRGARGRTSRIMDDPITEHALLNEARQVDQQRAEAVSELVGAAPKIEDAELSSGALDVFCELLTMAMAQRERAEDTGSAADPVRGLRLTVTPEQGRTTRIATAGGTLTLHNASVVLEAGQ

SEQ ID NO: 39497 - protein, 413 aa, Kutzneria albida DSM 43870
MKDVLDGMSDIDAANVVRCARVLLRRPLLRAEGPDGDLLPLVYRHRAALQDLFSGLLGYRLVVERRFARLYKPGPGNDPSRGESSLSPRGYAYLALTMAALTGVGRQVLLSRLVTDVRSAAVEAGVRVTDDLPDRRALTAALRHLLSLGVISETEGTVAPWGSDGPAEALITIDTDLLGQLLSGPLLEAEDPAHLVELAARPGPRGAEHSVRRKLVENPVVLRSDLPQEQSEWLLRHQRRESALLERSFGLITETRLEGVAVTDPEDYLTDVLFPGSGTVSRIALLALPELIADPDPELFAEDDLPPQPRADGRHPIRLAQLRSICARLVEDYPAAWSRQATEDPDRLTAEVLDLLARMGLATEHPEDGWLVAPTAHRWVPVPDDTPARTAPPAPPPPQEEPGWSLFDEEGQS

SEQ ID NO: 39498 - protein, 1359 aa, Kutzneria albida DSM 43870
MTTSPRWTLSRGGIVNIWQYAEQVFDFSGGRAIFQGTNGSGKSRTLELLLPLCLDGDLRQLGSKGFDTVSIRRLMLDDYDGGPNRIGYAWVELHRAPGEYLTCGIGVKASKTSQQITDSWRFVTPARVGQDLRLAGPDRVPVGPAQLRELIGADCVFEDAAFRAKVAETVYGVPAARYADLLHLQRTLRNPDVGLKVLEGQLEQILSDALPPLDSSMVEQLATSFDDLESIRENIIRLSTADTALGAFLGTYSGYALSGLRSAGDRVLAGRKSLKSLRSELDSLERKLIAAREERVTAEEAVAQQESQDSQLEARIEALKELPAYRGLRDLQDREQLVARSRSAAEAALDTAGRQRAQEDRAVDAVLAVLRRLGQDIDAADELAGQARERLATAGLDAELCPQVPKMPSAEASSTTDKVRAKPDPESEPLAIDRRTLPPVQPQTLLDALSDAGRQAEQAASEARRRNALTLSLHERALKSDRQLRDVEELRRAARQAQLTATESAGRRNEAGQQLATAVDVWREQASRWTAGGPDSSVQYPMMPTAELLAEERGAARTARDNIRQWAAPKVHELRQQVVSAEQRLTELRATITEHEAEVVSLRSGGTNTAGDGAAFFRLVDFVPTLAEADQAGLEAALQASGLLTALVSADGKVSDPELAEVLAVAGPAAEGRSLAEVLVPAAEPGSPVSAEVVAKLLAAVGVAEDPAATTVPGLVVATSGAWRAGVLCGARAKSVAEFVGAGAREAARLRRIAELSEAVERLHTELAESERRCDEARERTTEWERHVEAFPDDGELIAAHARLTSARESAEESEARSQQLREEHGAAEDRWHASRAELVQAAAESGIAVADPETSTVDTEALERANRAASEARAAAEQLAEGLAGRCARTVADLMDAMNHHHAAVTDRTEAESAANALCTEYADRAHALDDLSSAIGSEAQEVSSQLSTLEEERRRVRRELPRTREHVVEVREQATKVETLLETKRSQLDSRGAEESSASTAFEEALAAPGIWTAAFPEQEPPADLDAALGVLAGAAERKGAGEGSVITKLQVLQTSLAGTHDIGAETTGGVLTVTVTGEDGPRPVAEAAKRVRERLAEQRGFLGERYQSIFADYLIRDLAERLRGQIEVAEDLCRRMNDVLDQARSSQGVHVQLEWRPSAALDERTKQALELVRTPLAERSEDQDDLLRQVITERIEAERDAHSSGYAEILARALDYRTWYSFTVRVRDSGPDGKPRVRRLRQLSSGETRLVSYVTLFAAAASFYDAVSSTEDELAPLRLVLLDEAFERLDDPTIARMLGLLVDLDMDWVITWPSGWGVSSKIPRMHIYDVLRPKNGRGVACTHTTWDGAGLDRDDP

SEQ ID NO: 39499 - protein, 526 aa, Actinokineospora spheciospongiae
MSSTPEQPRSWWRGVVASDWTVFSLPEDIVRDRYSALLAALEELSTRGPRSTVAEIVDRLRAVGFHDPLTDADLRALLDQLATWGFAEPFRDFAAPVRNYRGVVARQEAWALTRRGRAVVSAVRTAVASADRALQLPSKLLDSVEQTVRTLLAHADDKEAHGLLGADLGNVGTRIAELQRVTADFYDALGRLVQSDVTRDEVFGSNRDRVVEALRQFAREYDRGLVRVCAALDALRRVGHQHVVQCAVEHAGLLDSSAQQQWVTEQVSLLSALEAWFTPEGSIPALVESAHGAVNTLLNAIDRRYNARLRGADLSVDFRLLAHSLHRQADDEQARRVYAAAFGDWPAWHVLAGPAREDVDHSSTAAAGTTPFVVELTLREHERHGPPSGRPRKVADASTERSRALAEAREQAQRRGRRAAALLTPGEVGLEHFTDLDADSAAVLFDAIQSALDAVDPATGVGQVDADEAGVLVAVRVPVGAERSLVRLAEGDLDAPRLRVTVTAAESALPDPDTIGTGSKASRSVA

SEQ ID NO: 39500 - protein, 475 aa, Actinokineospora spheciospongiae
MRQDTLLPPDLADCARQLAARGRLLAERDPELYRTAVLGQEQLGKFFATELGWRVDVVEHADMVRLHKRRQDVPGTRGPRLRRESRDRPLAPRLVLIVVALVCEQLWRRPRITVNDLMQAVSQVCAADSADGLLPRFRIVPDEEVGKREARENRQSIVDALRLLDADGTIVFEGDLDHAVDEDGADGVVAASRDRLSARFSSLSPSLLKLSQLPPDRHVEALASDRVPDDADVDDGGAEDGGEEDWDTAAPGEHNARTATTVRRHRAVRRLVDDPGTDPVADDYLQSSTGRNRALNVLHALGLVGTVRRDWWQVGDPTGLGSTMDFPHGRRMERQAALALLRHLGTRPMLDGGEAPVTSAEIESLFERIRERLPRWAAAYDRQQAALARAAASELVDAGFLVDVAEPPDQATATPEPHWRPTPAARMWQVKVTEPDTSDSHHRSGGHHTSGGHQTSDGTVPKRPVVPDDSEGGLW

SEQ ID NO: 39501 - protein, 1661 aa, Actinokineospora spheciospongiae
MEGRWQPTRAGVLNSWKWTDERFHFANGWLAFIGSNGSGKSLTASGLVTVLLDGDTSQAALNVSGSAAGTLLSRHTDNREKEDKTGVWWLEYGRTDPDTATTEYVTTGLWLRSSGPTLLRAFFLVSGRVGHEIELQQDRNPVGIERISEQLAAHGGELFTDAARLRTKAGAVLRTVSPQGAYRAAVRLRLFAPLDEVQYDALLSVLRTLRSVRTAEKISAKDMLSVLTDALPALDQVKLAEIATAMQRIATQEARLVATRDQARKLTRTDRAYDRYRQAVALATAASLRSANTEFDNLTRSETAAENDLARATARADDGREALIQRKQERSQWEGKAGAAETLLRKHAGAELPFREQRARELDEAAEAAERRARTAIDQARAGGAKAAETARVAAEAQQSASGIAHELATTGRPLGAAGALENMLAATAGLTLPEALLPDAPDVELAVDELAVVPLVWVEAREEAVENVVTALGKVGTANQSAVDAGERLRLSQDIAAQRADQLTRHTADRAKAEQHLTATIAEWHRGCDHYPPVPDDLLAPDLVDNRVDPAGLAHWLAQQTDRIRQDIDVPGHRGSKQSADRAAEQAVVFAQQQKDKANTAADAVTGARRTLDDQVREADDEADRDAAALADAEAAHGRRVEAALSKRHDHFLALLDDTGAALEALRHWEREAERWRTGLRHLNGSALTIPISAATRLSRELRDARRSVAQPELEQSSPAVRVAGSALEMLAGHDDTALRSAVASAAQQTARRLHGKVVDADNVVRRLGQESAAVEADLAEARKAPSPPPAPAWRTRSDGHPLWSLVDFHDDVPTELRDYCEGALLAAGILDAVVTADGRARVGDTVLATDRPAADRSLAEVLFPERDAAIEPGRIQALLRAVDLVDVEAGVEVRSGVITAVAPPGHTSRFIGTTARERARAARVVELQTQLAVLEGALETATTVLRRCQDDETEAAEEQATLPGSALWQPAHATARATNGVAQRADRDATTEQQRAGAELDSAREAASTALRLRERKLSAAHTAFDKVVAAAENAANAAQVASDKAEEVRATAAEAAAALRNTVEEQAGADEERQRFPSSQALTEARAAEDDAERRSTDAQAQVVEATERSRLAKDRSRQEITALNRLADLGGGRMLPTGHPEIKKFRDDLQRLSHMVRSWQRVAERTLRLCEQARVATAASLEWAEHAETERASAAEARATAVSEAAAVADLRRMHGADYELLRENHDKARRALEAAVKAVEDTTNDIHGAELAEERARATLDGIAPRRADAEQERGRCLDRVHLLVEESFAKVEDGVPVDDSGRPANLTAALTWSTRLLDDQPRGQSREDLARAVEAHRSRLEAEAKRVSAELTRYDRQVTLQTIPRTDWRRAVVAAPEALVGEDLHTTVTTLEQTAEQLESDLRDDVKITLKTSMFTALRRDIATRRAAAQELVRQISSTLEGVRTGVARVGVKVEWAVRDDPDAKRMVGLINAIPSDDTFQQMYDVLRQRLEDATGDTWEARVAHTFDYRMWHEWRIDVTHASFSDGTTEVFRRLKPRSNPLAMFSTGEMRLATMLPLLAAAWSTYEAPGYQGPRLLFVDEVNAAFDPQNVRKLLALLREWEFDVLATAPEMSAMLKAEAEQVMIAQVTQMGRMRVSVPWLWSGSGQPVLVEGTA

SEQ ID NO: 39502 - protein, 527 aa, Actinokineospora spheciospongiae
MEADQETRPGADAQRRLQLYAYLQPREHHRTYLAIMRLFTSTLLADLSAGEVSSALAAAERDGSIDVGESHVDVVIPRLRQLVEWGNLVHGRRETIASSIAEFLQGSMRYQVGKLAVRVQRDVDELLRVPEGAREVSRELLPAIERGLGELGEALATAIARSDRDPGSLPARRAREQLAERVTTLFLQHAELAATVRDFYAYLGQVLTRHHLAPEEISGFRNLLVEYIQLVVEDVLRHTPTIAAALAGLAPHRARLLALLRPAEQLGAAVERTRGRGEADWQELADWFADRPGNPSQVTALRDATTRAIGALLATVRRATTGGGLLPSRRAELVRLAGWFDRATPDEAHALYAGAFGLHSARNLLPAPEHDGDDEHTPWADGPAVDVSVSVRGRGDRGARGRTSRIMDDPITEQGLLAAARAADERREAAAAELAAAAARADGIDGAVLSAPALRALCELLTLAMAQREGAADPGSATDQVRGLTLRLTPAPGRTTDIRSESGTLTLRDTAVDIARVQTARAARDAR

SEQ ID NO: 39503 - protein, 407 aa, Actinokineospora spheciospongiae
MRADTRSRVPAALTELSDIDAANVARCAKVLLRHPLLRVGGPDGDLLPLVYRHRVTLQEMFAALLGYRLVVERRFARLHKVGAGDDPTRGEAGLTPRAYAHLCLTMAALTGVGRQVLLSRLVADIRSTAAEAGIDLVDDLADRRALTAALRHLIGLGVITETDGSVAGLVGESGAEALITIHTDLLGQLLSGTSDAPSAAALIASGSGAGVEHSVRRKLVENPVTLHSDLSAEEADWLRRGQRRESVLLERCFGLVTEIRAEGVAVTDPEEYLTDVVFPSTGTVARITLLALPELLATEAAPRPDGRVPVTTRDVRETCVRLIEDYPAAWSRQATDNVDDLVDAVLDLLLRLTLIAESPEGWLLSPAAHRWLPLPDDTPATRATPGRSAVPEAPEPGWSLFDEEGSP

SEQ ID NO: 39504 - protein, 1370 aa, Actinokineospora spheciospongiae
MTTPEAGFGRWRLHRGGIVNIWQYREQTFDFSGGRAIFQGTNGSGKSRTLELLLPLCLDGDLRHLGSKGAGTVSIRRLMLDDYDGGPNRIGYAWVELHRTTPTGGDDYLTCGIGVKASATSQQISDSWRFITPSRVGTHFALASADRVPLGPAALREVLGADRVHDEAAFRAKVAETVYGVPAARYGDLLHLQRTLRNPDIGLKVQDGQLEQILSDALPPLDAGVVEQLATSFEDLESIRENIGRLSSADAAMGAFLTGYAGYALGALHASGTKADAARRTLDTAHAEIRKLRAKLDADTRAHAGAEARVAELDERDTELETSIDSLKSLPAYQGLRDLRDREKLVERTREAAAAALDNAAVRRNHADRAVETVLTVLRRLGGDVEDAGELARTTTVSLVAAGLDPSLCPPLPTAPDPVPRLTTDRVRAKPDPEAEPLEIQRRTPPEIAPDVLADALAAAADKVEAISSEVGGRAALAMSLHERALRLDRDRQDLERLQAKARDAQIEATEAAGRRNEARQRFAGSAEVWCERAAAWAKAGPFADDHAPRPPQPPTAADVLAAADATRAARDTARAWAAPHLAGLRQRVVAARQVVDDLVRRIQSTEARLIELRNGVDATPPAPPYASAERDPATGAPFYRLVDFAPGLDAAARAGLEAALQASGLLTAWVTADGTVDPELADVLAAAGDDVASPLSGALVPAVTGSPVAAAVVEALLGSVSYDADGPGLAVWSTGRWRAGVLRGALSKPDAEFVGAGAREATRERTTAELAAELERVHAERATAEAEARERTAAVAAWDAHLDAFPDDRELIGARATAEQARAQAEESARKADRRKGEHVAAAGRVAASQAELSRDAGAAGLTADTEALRHAQRSATAARDAAATLRDALAKRCAGTVRDLVEALHDHNAAVDDRAAAERVADEKCVVFHREAAALSELTSAVGGEAEEVSRQLAELERRRRAGRQELPEARKAAGELSNRVVKTQTLLDTRDGEIGGRRAAAEAAGRSFAEALAAPGVWEAALDEQRPGSDAEAFELLAAAVAESKRLPGEESALTKLQGLQASLAGTHNVLPERHAGILTVVVSGEEGPAPVAVAARRVADRLAERRGFLSEQYQGIFALHLVRELAERLSAQITVAEDLTRRMNEVLDSARSSQGVHVRLDWQPAAWLDEPTQEAIKLLRLPFAERTEEQDTRLQQVFTERIEAERDTATGGFTEILARALDYRSWFAFTVRVRDTGPDGKPRSRRLRQLSSGETRLISYVTLFAAAAAFYGAISAGVVASARLAPLRLVLLDEAFERLDDPTIARMLGLLVDLDMDWVITWPSGWGVSERIPRMHIYDVLRPRSGHGVACTHTTWDGSGMDREDP

SEQ ID NO: 39505 - protein, 376 aa, Actinokineospora spheciospongiae
MSDLAETFGRPEYAVLWKQARAAVQRGQVRFGFKTPDAASAAAVSELLGVPVTAGVGQTFPVAELQARLRASAFRCGLDDVLAAVHGREVVAGESGPSRDEWVDGLLRDALAGAGLGDRPWAGAWVDQVRRYAKVAPERLSGPAERAASVLARINLDPAAVPSVWVTRAELAGVELDRGRKVAALVLRAAALAHGVPLPKSAAEERRLWERCGVAADGLTSTVLWRGSVVALRDVASVDVVTARTVVWVCASPRLAEAAGGRDVVCVSGRLGIAARMLLSRLVSVGAQFRVHGDFDAAGLLVTGQVLALTDGAPWRMGAEDYRSALDWARAEGLDLPPLGTEPGPTPWDPRLGDALRAGWAVPEEMLLHLLLPDLV

SEQ ID NO: 39506 - protein, 532 aa, Kutzneria sp. 744
MAQRPGAGRLMWPTVEQEQHVQDTLVGAESTDRRLLLYAYLQPREHHRTYLTTMRLFASTLLADLSAGEVAAKLAAAEREGLIDPGESRIETVIARLKQLVEWGNLVPGRREVIAASIAEFQHGSVRYQVSKLAVRVQRDVDELLRVPEGAREVSRELLPAIERGLGALGKSLSDAVFTEGGPGAKRAREALAEQVTTLFLQHAELAVTVRDFYAYLGQIVTRHHLAPDEISGFRNLLVEYIQMVVEDVLRHTPAIAESLGQLARGRGELLRLLGPANALGSEDLAIERSRGRTIADWQDLTDWFVDRPGRPSQVTALREATGRAIGSLLASVKRATSGGGLLPGRRAELLKLAGWFDGATADQAHSLYAAAFGLYSARNLLPSPEHDGDDEHTPWRDGPVLDVTVSVRSRGDRGARGRTSRIVDDPITEQALLADARAVDKKRSEAVTELVEAAPTIEESRLSHGALDVLCELLTMAMAQRERAEDVGAAADPVRGLKLTVTPEEGRTTTIKTAGGTLTLHNASVALEAGA

SEQ ID NO: 39507 - protein, 413 aa, Kutzneria sp. 744
MKDVLDGLSDIDAANVVRCARVLLRRPLLRADGPDGDLLPLVYRHRTTLQDLFAGLLAYRLVVERRFARLYKPGPGVDPTRGEATLSPRGYTYFALTIAALTGVGRQVLLSRLVTDVRAAAVEAGVAITDDLPDRRALTAALRHLLALGVITETEGTVAPWGTEGPAEALITIDTDLLGQLLSGPLLEATSPDHLIELAARPGPRGAEHAVRRKLVENPVVLQTDLPPEQMEWLRRNQRRESSLLERNFGLVTETRLEGVAVTDPEDYLTDVLFPGSGTVARIALLALPELIADPDPELFADDVEPPEPRPDGRHPVTYGQVRVICAQLVEDYPAAWSRQATDDLDRLTNDVLDLLVRMGLAVDDPVDGWLVAPTAHRWAPQPDDTPARSAPPPPPAEPEEPGWSLFDGEGEQ

SEQ ID NO: 39508 - protein, 611 aa, Kutzneria sp. 744
MSTQRWTLHRGGIVNVWQYAEQVFDFSGGRAIFQGTNGSGKSRTLELLLPLCLDGDLRQLGSKGFDTVSIRRLMLDDYDGGPNRIGYAWIELRRGEDEYLTCGLGVKASKTSQQITDSWRFVTSARVGKDLRLAGPDRVPIGPAQLRDLIGADCMFEDAAFRAKVAESVYGVPAARYSDLLHLQRTLRNPDVGLKVLEGQLEQILSDALPPLDSAMVEGLATSFDDLESIRENITRLTTADSALTAFLGTYSGYALAGLRGFGDKVVSSRKSLLSLGSELESLERKLGSARDGRVTAEQAVAEQEARDSQLDARIEALKELPAYRGMRDLQDREQLVARSRSAAEAALDTAGRQRAQEDRAVDSVLAVLRRLGLDIDSADELAGHARERLMIAGLDGDLCPKVPPMPPTDAQVAQDRVRAKPDPEAEPLTIDRRLLPAIDPQSLLDTLSDAGRQAEQVATEARRRNALTLSLHERALASDRQLRDVEELHRAARQAQLTATEGAGRRNEAGQQLATAVDVWREQARRWAAEDGPQPPTAQRLTEDRGAARAARDSVRQWAAPKSHELRQRVVGTEQRLDDLRATITQYEAEVVALRSGGSDEQSDPSAFHR

SEQ ID NO: 39509 - protein, 322 aa, Nocardia seriolae
MRAWFIGDDEGGLTECERLREATMSAIAAVLSLLRRVTETRKGGVSRESALRHLAGWFTAAPTAEAAHALYDAVFGLGRPRHLSMYHPDADVIPAIRSWWDAPPLEIARTLAETGRPPTPGAPARLQRNDAGIRRLRQVQLDAQRARAEAARSLASADLYDRELDEGETEVLLKLLDAASTAWVPVSGRVPGTSGSDNGVTLTVSEHTGSTLVRTSKGVLHLNNRRLEVRETASLRARGSGARAGRGVPEPTTATIEEPTSRQADGAPESSATRQVPPTPSAHDVTDGSDSEHGSDAGTHIDSGSGDPGSTGGDPRSGGEVG

SEQ ID NO: 39510 - protein, 479 aa, Nocardia seriolae
MHARSIDSLALDSYQRAARVILANHLVTRTYPDRIALPLLRRWATELREDPAELFGYRLEVTETTARLFPVLDRLDGGRPARTTGDRLFDRRRYSYLALALAALGRAGDQITLSELADQVAAYTERVDGLELAPDRAADRDAFVDAVGWLAARGAVTLADGDAGGWASDPEAGEALYDIDRSVVFALFRPPRALQHLQSVTGLLGEEAGGSDTRSPAMALAARKVRRALVEQPVVYADELTEPERSLLAQEKLVTEVEYLTGLRAERRAEGVALIDSSGRLSDVRFPGTGTLAQVALLLAGEIADLVLDLDNPVQRRPRPDRPFTDLAEQLDTAIPVTTVFAPLADPVDVFGAHEDSEEDAEEPEIPDFPFVESSWIRDTVQMLTGRYGNTFAAQWQADVPGLTAEVVSLLERLRLVELVDGGLLILPALARYRGAIVTIRTRAESELFLSPTQLDSHAQTNSPAHNDADSSAQKGSGH

SEQ ID NO: 39511 - protein, 1487 aa, Nocardia seriolae
MADHIHGGVRFVPTRAGIINLWDYRDQEFCFADGRLVLRGPNGSGKTKALEVLFPFVLDGRIEPRRLNPFAGEERTMKSNLLYRKQESAYSYVWMEFARGSWDSPETVTIGIGMRATRSNDKVTRWYFVADGRVGVDFSLLGPDDRPLTRKQLAEQIGSDAIVDRPVEYRNAIDARMFGLGQQRYDQLINLILTLRRPQLAKNLDPRGLSQALTDGLRPLDEQLILDAARSFSDMEEVGRTLEGLIQADTATRDFVKVYHKYLAVQAKTDIDQVRTRLDAVTHSGTALHAAAALRRRRDTERAAAETRAEDADRAYEQALADRETLQRSSAYEGKQQLDDLADAVRRLETSAAVHNDKALKSRQTVDQRLEESERAQAAVTNASSALARGEDELRSAAEEAGIPWTTLPESARADNLTTTVRSHAEERDADVRAVRRALTLVDQAVTERTRAERAAQRAVEARESAAAELAAAEAGVALARSNTAVSLRDWWDTHREVYSPIRTGLFEAIDDALAMVGTEQAPPRDATSGGKAKKGRGTASGEAAGNRSATTGAGGAALEAAEARAALAIALDDDTAPATPAEVLAERTEPLTDEIRARRQEARARAAQATTRAGELRAERESVAAERDDAPAGFAARTDIRPDRPGAPLWRLVRFADAVPPARAAGIEAALQAANLLDAWVCPGEELPEHASDQFLVPLPPGERPSGRTLADVLVVEDDTDSLTVPRQTVADVLASIALHESDAADGKRASGKDDPAPGSGSAQRVSGAAAQPVASGGGVAIGADGRFRQGVQVGRHVKADAEFIGTTARARRRELRLAELAAAIEAAVTEAEIAAAAEQAATDELGRISAAAKALPRTTAVTAALRGVAEAAGMLRSRAEAAGQAERDLDQAVAEYSAADKKVRAIAADHKAPRDPAELDALAAAVRHFENAGTALLRLRGDHQREHERAREAGDRLEESKDLAEAFAEEAEAARSGYQEQLRKLETLRDALGAGAADIDRELEAAREKIDAARAEQKAARKAAAEAIEAVGTAEGAHRAAHDTLGTALTELLADVRHLAPYARPDLLSLLGAPAEIRWPSSDAAWPTPEQLLYRIENGDPEQAPKVLPDEVSALFETLATATASVRAGEAARKATRSAVTTALQEFDAALTAARQDYRLHWDAADGLTVVQVHDDHGLSALADFAERIGGARRDQELLLTDAERRILEDALLTGLAQQIHERTSDARDLISRMGTEMKQRRMSSGNTIGVHWVLADNLSEPARAVCKLLDRDSADLTPEDLSTIRAYFAAEIRTARTAHPERSFPEILAATLDYRAWRIFSFTILTADGTEDRLTVARHSALSGGEQSVSLHLPLFAAAHVMLDSADPQAPRLLALDEAFAGVDDNGRSELLGLSVQFDLDLFMTGYDLWITYPHVPACAHYDLAHSAAENTVSATLLVWDSDDLLAEHDGSDLTTALGSPNRRRLPHGLEGAIPLDEELETVG

SEQ ID NO: 39512 - protein, 511 aa, Nocardia seriolae
MDPIRVPPEMFRFTSGERAGLYAEVLHAFAEANERMETALGLDDVRVGLRSVGWLESLEDEDLSAALDQLRAWNLLDMIQNHSENYRTAAEYERRNLQYSLTRQGEAAFAGVVHAMALLASTGALQTAVLDAIADRLGDLLRELNSGTDRRVYTLLSELESHLEALRANTKQFNGELQRLLRADGVDLAVFGEVKAATVAYLQEFLTDLEHRAHVVAERIARIEDYGVARLHRRALAGAELPQLPGADPGIEWLKHRRARWDGLRAWFLPADGSAPRIEQLNLVGRKAIVSLLQVLDRITASRRRSSSAVADFRELARWFTVLPDSDALHRLWSTAFGLGSARHAHLVHPDPELVSPTAGWSEAPPVDVSALLRSSGRTERFSRAGKVRDVAVVKARRAESAARERAELEAAWDMLDTGGAVRLSAFGRLDHEVFERLLDLLGRVLGAAAGTDGVRRGSTADGRVEIVLRPPRDRAQARLTTPRGVFHGPDYVLEITARGRRNTGRTGRPA

SEQ ID NO: 39513 - protein, 435 aa, Nocardia seriolae
MSELANQLVIAERDEVSRGVRRLLAEPLITERGAPDAFDLIRRRRDPIAKWFDYYCGWTLIVEPRLGYARLVKVRIADGTRPARRLRSGRAPFDRRRYALCCVVAAELFAAPVTTIGLLADRVRTATAADPVLPAFDTASRAERMAFVDAVRLLESFGVLDAVDGSAESFVESSEAKVLFRVDTMLLLRLLALPIGPSHLGVPVEEVPLRFDELLTELSRERRYGPVASRDDETSGSSPTQRNLWLRHSIFRRLADDPVLYFDELSADERAYLASPTGRQLLRRAAEQGGFVLEERAEGVLLVDPDGIATDGRFPDDAATAKVAALLLLDELPGPTTREQLLRSGSALLERFPRWARGYRGADGVRELVDDALAVLASFRLVRVTRSGLDVPLAAAARYRVREIRTTGSEPLGQLEPAGLPEAAGQLSTEGRSFE

SEQ ID NO: 39514 - protein, 407 aa, Nocardia seriolae
MTDHLLSSLPADLAPLWRELHRRRTVGRPVVKVVVGPLDSAQRAAIADFFGMSRLPGEHLRIAVTEVESVVREVTGMSLREVLERLLGPIGDRGSDIRHADADRKELWEWLLEHEGVRGQPALGEWARATRRTGVFGGSVARTRIELERVLTVLRELPSAGTPLPVFADAVLGDPHALDEDRRLHGLVVRALAAVYGIDPPSNRAQVRLLWDRAGLTDDELSSSVLVAGLAVGGHGVAARVLNVCAETGVAASLTLQQVRASQRLEHVPPRVWVVENPSVLALALTRFGDRCPPLVCTSGWPRGAAVSLLRQLAAAGAELHYHGDFDGEGLRIAAHVVARVGAIPWRMNSAAYLATVGGDAPPVGRVSPVPWDPELSGHLLATGKSVPEERVAPGLLDELARTVARD

SEQ ID NO: 39515 - protein, 513 aa, Rhodococcus wratislaviensis NBRC 100605
MSESGSDPGRSPSGLRAARPAVPPPLRDDRLKLFAFTTAEKRAEYLWVLRAFDHARANYVVLLHAGDVARILNGLAGDDPAGQLGAGDITPLLEQLHVWEVLERSYDGTRAATLAEYRNRHFVYQFSQAGYQVFRAVEDALAARLDDASLSRLALPDLLADMNDLAAANRAADNDLVYRKLNRLDATLSDMAGRAAQFYLTLGDLVRTTEITPETFMSHKDALLTHMREFSSDLSRYAPKLAAAIALVEDTGVETMVTRAAASDERVFLGIEEREADWRARWAGLTHWFVGSEAGLSESERLREGTMSAIAAVLSLLRRVTETRKGGVSRESQLRHLAGWFAAAPTEDAAHALFQAVFDLGRPRHLSMVHPDADIIPDTRSWWEAQPVEISRTLAETGRPPSPGLPARVQRNEGSVRRLREEQLTAQRLRAAAAQSLARGGVYERELDEAETDVLLSLLNAALTARVPVSGRVNSSTGSENGVKLTLSPHSESTVVRTARGRLHLDGLQVSVR

SEQ ID NO: 39516 - protein, 464 aa, Rhodococcus wratislaviensis NBRC 100605
MKAREISPLALDSYQRAARVILSNHLVTQTYPDRIALPLLRRWATELRDDLMTLFGYRLEVTETTARLFTVSDRLDAGTPAKTATDRTFDRYRYAYLALALAALGRAGNQITLSELADHVAADAAQVDGVDLSTERASDRDAFVDAVGWLAARGAIALADGDAGGWAANPDAGEALYDIDRSVVIALFRPPRALQHLRSIRGLLAGADAVTEDDTSDFGTTRPVDVKETARRVRRALVERPVVYAADLDDHELVQLALPRTAADVELLTGLVAERREEGVAMIDSSGRLSDVRFPGTGTVAQVALLLAGEIADRVLDPDAPETARMPLPQGRIDDLIEQVDSAIPQSGIFDSLAGNDGFEPADPAPADRLFPLVEDEWITGTVRTLTERFGRTFAAGWQADPDGLGRAALALLERLRLTAAVPGGVLALPALARYRGVVVTIRDRTPEIDLFQSSANDSEEVTA

SEQ ID NO: 39517 - protein, 1385 aa, Rhodococcus wratislaviensis NBRC 100605
MTSARFRPTRAGIINLWDYRDQEFSFADGRLVLRGPNGSGKTKALEVLFPFVFDGRIEPRRLNPFAGEERTMKSNLLYRGQESAYSYVWMEFCRGAKDDPEAVTVGIGMRATRTNDKVTRWYFVADGRVGVDFSLLGTDDRPLTKKQLGEQIGTDSITDRPLDYRTAIDARMFGLGVQRYDQLINLILTLRRPQLAKNLDPKGLSQALTDGLRPLDEQLVLEAARSFSDMEEVGRALEGLAAADQAAQSFVGVYAKYLRQQARTDVDHLATRLEAVRSGIAALHRAAADRARSQESRAAAEDRFTAAERALDQANATLDALKRSTAYEGRTQLDDLAQAVSTLEKSTELQAEKARKAKATLEQRAEEHDKAGDAVARTVEALTHAEDELHLAAKDAGITWTALPENARTDQLTAALRGHTEERDGDIRAVRAALATVERAATERTRADEAARRGKEQLDTATVAVLEAETAVESARSRCATELRSWWTEQSSLYAEIDAPASLFEALDAALARIGDDDAATLTETLTEQTTDAVDALRLRRQQYDRDATSAEEAIAEHESARAAIESEHDDAPPLLAARHDARSRLTGAPLWRLVRFADSVDAAAAAGIEAALQAANLLDGWVTVDDALPDVESEQFLVALPAEDRPGGTTLADVLEVEQDTGVPDNRVRGILESIALESLDLSEGPVGVAEDGAYRQGIQRGRHTKSDAEYIGTTARARRRAARIAELDSTLEETRATLDEARASADAAASLLSRTTAAAQALPRTGTILTALKKVTESAGALRSRSDTATTVGRELDQAIADLSAKEKQLRATASTHRTPHVAREIDSLAAAVRHFEKQGEMVQRCRREHAKEVEHTRESEDRLHEARGSAEEFAEEAAIAEEVLAQQIQRLETLRDTLGAGAEQLDRQLEEAHTRIEACKKEQRDARKADKDAGEAIGKAEGAYNTAVQTLRLALTETHADAARLAPYARRDLLELLGVDGGHTWPASSAAWMSAEQLVYRIQNAEDDTPILPPEVDALFRALDGATESVRVSDSARKSTRTALTAALQDFDAQLAAAGQDYRLQWDAPDGVTVVQVQDDEGYSSIGEFAARIASARSDQELLLTESERRILEDALLTGLAQQIHERTVDARELIARMGTEMRERRMSSGNTIGVHWVLADNLDDSAKAISKLLERDTSALGPDELATMRAHFAHQIRTARAAHPERSYPEILASALDYRRWRVFSFTLISGTGNEDRLTVARHSALSGGEQSVSLHLPLFAAAHVMLDSADPHAPRLLALDEAFAGVDDNGRAELLGLSVQFDLDLFMTGFDLWITYGGVPGCAHYDLAHSTAEQSVSATLLVWSDGELLAEHDGTDLAQALGSPLRRRVPTPAEGALEFA

SEQ ID NO: 39518 - protein, 535 aa, Rhodococcus wratislaviensis NBRC 100605
MDAIADPVDPKPFAHLHQQNAAVYRQIMGAFVQAKRRFIVHLRPEDVRDALTAATGGAPELPAISDALSSLEHWGNLHSDPDTSRVTTVEEFHRARYLYQMTIHGDAAEEALDTYDQALGRRGALQSVALVDIAAQLRILLELARVAGPDPAKAHLSLLALVDRFKDLAANAQAFMGSLARTIDLQDAEAEAFLAYKDQLIGYLERFIKDLVGTGAEIAGLVEQLEQAGVGRLLDIAAERAAQDAAPGGPPDSASTDAEKTGEDPRQVERTNSRLLWQDRWQGFRVWFVSTPHHPSQAMQLRTQARASIPRLLQVVSALNERRSGRSDRAADFRTLALWFAEAPDEASMHRLWRSAFGLSPSRHLTVDADTLEARQEDPVSPGTAWNQAPALLISPRLRKTGSYERRGKPNKVIDRSEQRRYLADLAAREAQETAEARARLATPGPIRLSDLGALNPPEFRLFLGLLGDALATKVPGARRVETTTSDGTMAIQLVELDRPGTAEVRTPHGIFRGPDHLVEITDLTDLSRTEERSA

SEQ ID NO: 39519 - protein, 384 aa, Rhodococcus wratislaviensis NBRC 100605
MPGRAGDPPQAAAAVRRHASALREWFQTNTGWALIVNSELARLVKSVEANDAVPGEHTHPAVDTPSKQPFSRRRYVLTCLSLAALSRSDAQVTLGRLAEQVVLAAADPDLVDAGIVFTLEHRDERSDLVAVVRLLIDYGVLTRVAGDEDSFLNDTGDVLYDVQRRVLSALLATARGPSTVDADGFDERLTRLTEELPATTDDLQNRQIRHRITRRLLDEPVLYYDELTEAELAYLAGQRTSITGKIAVFTGLVAEVRAEGIAMVDPHDDLTDVRMPEVGTDGHAALLVADYLVAAGRTAVPVAELHEWIRKQSSIFVAQRVWRRSAGEPGAETRIVDTALGKLEALRLIRRISDAVHLRPAIARYSLGEPTVTGIPEPAGSTLA

SEQ ID NO: 39520 - protein, 1376 aa, Rhodococcus wratislaviensis NBRC 100605
MSTRTPTPLPAPSLERWQPLRAGLVDLFYYDREEFWFRDGRLLLRGNNGTGKSKVLALMLPFLLDADLSAHRVEPDADPKKRMDWNLLLGGAHPHGERLGYTWLEFGRLDPDGVAHYRTIGAGLKAVSGKGMLPPWFFVTGQRIGDDLSLIDHTGTALTKDRLAQALDDTGTRYDRAREYRRAVDETLFGLGEQRYGALVDLLIQLRQPQLSKRPTEKALSAALTEALPPLDQAILADVAEAFRSLQEDREALADLRESMEGTSSFLTHYRRYARIASRRRATVPRKAQSHFEKVSRDLADAEAAHAEAEQHSAAARAEIKRLEMQLAALHERDRALRDSETMDSASELEIAGAHARDRVADTERIFDEQRDAQAAVERLRARDETAHTRRADARTRLADARTDAQDCADDARIGPTHRQQVDDIIDLEAASGGEARTAAERLIGSHGRAIAHIRTLIEGARTAQRALAEARRRLVEIDSQADELGERVVAARAAVTAESTALVTNMRGHLDAARELHPVEPAELLAELELWAESIQGPNPAGLRLAATVSAAADEITRQRADLRSQTNTLQQRRADLAEEIARLDAGEDTAPPPSHTRAPGIRTDRPGAPLWRVTEFVGSAADTDRAGLEAALEASGILDAWITPDGTLLDPISGDVLLAPHEPRDTKGPRLSAVLRPAIDHDDTQSAALTEDTVAAAVSGIGLGADSDLHSWVDTDGRFRLGVLTGAWRKPTAEFIGRGARESARRARLVVLRQDLTAVDEQLSTLSDHDRTLAQRRETLTAEAAAAPSDDALRQAHSTEAALESEQLRLVESRSSATALVSTADAVHRGAADTLATDADDAGLPTDQAELDAIREALGNYRVAVAGLWPALAAAGAAADVSAEVRADLERSERAHAVIAERLAEATIVAEAAQERYRTLRETVGAEVEELEHQLSLVEADIEANRQTHRRASAANDTALEARGKADGLRGQLAEQLEAARATRTEATESLRRFVGTGLLTVALPELEVPDTASAWNPDPAVRLARRVDQELAEVDDGDDAWNRAQRRVVEEHKSLGDILGRQGNSTMAQLLDDGIVVEVAFRGRPITVSGLAAALSEEVADRERLLTEREREILENHLVNEVASTMQELISGAEAQVARMNAELDTRPTSTGMRLRLHWQPREDSPTGLAAAQQKLRQTADAWSEEDRVAVGTFLQQEITEARARNVGGTWLEHLSEALDYRSWNRFAIRRHQNGQWKSATGPASGGERALAASVPLFAAASAHYGSAGNPHAPRLVTLDEAFAGVDDNARAQYLGLLAAFDLDVVMTSEREWGCYPEVPGLAIAQLSRTDDVAAVLVTRWEWDGAGRSRAPEPSLAATPEAPAPTGQDGLWG

SEQ ID NO: 39521 - protein, 416 aa, Rhodococcus wratislaviensis NBRC 100605
MTADPDRLARLLGDSDLHWLVSRLRARIEHGRPLEGTVTLADPSPGQRAAVERLLGRRPRTTGSINVPLPQVEKVLTDSGSWSAGLAAAIIELTGSVTVRAEAEQRLEASWRDAFDPLATVVDRRTELLGWYERLSATGRVRRLTGTPEAASPIVAALARVVTNLPSSGEPLGRFAARVLGDAHALDDGRPLATLALGAARALAQLPDGPDTRDAAGRREVWASVGLLRDEVSSTVLALGLPGDAHSATGRALGEWREAGEPAVLTLRQLVRCEPQLMLAGRSVFVCENPVVVTSAADELGSSCAPLVCTNGQPGSAVLHLLRLLARSGATLRYHGDFDWGGITIANLMIERLDVQPWRFTANDYRQAVAAGLGGPLSDRRIEARWDAALSAEMESARRKVEEELVLDSLLTDLGR

SEQ ID NO: 39522 - protein, 529 aa, Streptomyces sp. PRh5
MTSPASGPRGSEHAPFIHLTVPNAALYRQVMRAFLAAKERFAVHLRPEDVHAALEPEHRPTDPDAVVKALDSLVEWGNLRADPDTSRVTAVEDFYRKRFIYQLTQAGEAAEQALSVYDEALGRRGALQAVALHDIVTQLRALLVIAAEREEGGPDAAKAHLALSALTGRFEALAENARAFMGSLQRTMDLHGVEVEVFLAYKDRLIQYLERFIQDLITLGGRIAVLIGELEQDGRAGVLLRLAAAREAADAAPEDAESAEEQAYERWAAKWSGLTAWFVSADGRESQARLLRGRALGAIPQLLAVVRQLNERRAGRSDRSADFRTLARWFAEAPDDEARHRLWRAAFGLYSARHLTVDADTLAERTARPVPASTSWAEAEPLRISPQLRRTGSYERRGRARRVRDRSEERHRLAEIAARQAEEIAAARARLATDDTIRLSTVGELDPVAFGLFLQLLGDALATWRPGMTSTVATSNDGSMEIRLTALADGTTAEIRTPGGTFRGPDHLIEITDLTRPGRAGRPPTGRDD

SEQ ID NO: 39523 - protein, 421 aa, Streptomyces sp. PRh5
MTTPLGEVLDGRRTAEVHKAARTLLKEPLLLARGPYADEFRLVRQHASELRDWFDRNTGWSLRVDAEAARLARTPGTLADPTHPAREASRGRAPFTRRRYVLLCLALAALERGEAQIALGRLAEQVVLDAADPHLAAAGVEFTMERRDERLDLAAVVRLLLRHGVLRRVAGEEEAYVSGSGDVLYDVQRRVLAGLLAARRGPSTIITEDFEDRLAELTAESALDSDELRFRAIRQRLTRRLLDDPVLYYEELTDEELVYLTRQRAFLTARIMELTGLVPEVRAEGIAMVDPHDDLTDVRMPEQGTHGHVTLLLAEHLAAMDGEVSRADLERKVQELAAEHGAFWSKSAKQPGAEAELVGQALERLTALGLAAATPKGIVPLPALARYAVGETVVTEPGQASSRTPRAPRTPRTPKRKAPQS

SEQ ID NO: 39524 - protein, 1381 aa, Streptomyces sp. PRh5
MTALPDPTPGRWQPLRIGLVDLFHYDTEEFWFRDGRLLLRGNNGTGKSKVLALTLPFLLDGDLSARRVEPDADPGKRMEWNLLLGGRHPHPERLGYTWIEFGRRDQDSGRARFRTLLCGLKAVTGRGIARHWYAVTDQRVGEELTLLDATGTALSRDRLAEAVAGRGMIYDQAKAYRRAVDEALFGLGERRYAALVDLLIQLRQPQLSKRPNETALSRALTEALPPMDQAVIADVAEAFRSLDEEKEELRAAGEAERAASAFLDHYRRYARVATRRRARLPRSEHARYEQLHRDLSQARTEREAAERQRAEAAERIAQLEETAVRLTAQDAALRAGPEMRSARELEQAAADARRTTDERARAEADRDQAAQANSRALGRLTGAEGRLAAAEQRVGSTLRQAGETARAARLHDVLGPHDTVPEAELRHAAEESVARRRRTLDHVEELAADAEQAAGERRAAARRLDEAQAEAAHTTERQVQAEASATQAGQDLVGAVREHLDQCTELDLPDPTGLLDALDDWGTHLHGPSPAREQTAAAHRAQAADLADQAAALGQRLAELAERRTAAERELAELEAGGQHGPEAPRTRTPGLRDRTPGAPLWRLVDFHDHVTPDQRAGLEAALEASGLLDAWVCPDGTLLEASGHDVLLSPLPSHAPPVGSVLADALRPAVDHGDPRATQVGEPAVSALLAAIGLGDTGAPGTWVAADGRFRIGALTGSWSKEAAVYVGEGAREEARRARIATLRGELDALAASTARREAERATVAARRRTLDAELAAVPDDAPLRHAHAVAAAAADAAHRARTRQEERAAELTEAARREAEAATALTETADAVNLPADRPALTAVRQALADHTAALAALWPALRDRAEARRAVADEQAEAGRTGERVAELDQRMAEAARLAAAADEHHTTLRSTVGAAVAELERRLAETAGALATCERDQKQARHEYSAADRRAGRAEGRIEQLDKDVHEAAATRAAAIAALQRFAATGLLTVALPEAPVPPLDDGSWAATPAIALARAIEAALSGTDDSEGAWERVQKRLSEEYKKLQDVLSRGGHSATARMTEDGMIVDLVYQGHGRAVPELAGALATEVQELTRILSAHEREILETHLLTEVAGTLQELIDTAERQVRAMNTELEQRPTSTGMKLRLMWRPSRKAPAGLAQARARLRQSADAWAAEDRAAVGEFLQAQIARAQAENATGSWLEVLTTALDYRAWHEFGIERHQHGAWVPATGPASGGERVLAVSVPLFAAASAHYATAAPHAPRLVTLDEAFAGVDDDSRAKCLGLLHAFDLDVVMTSEREWACYPQVPGIAIAQLSRVDDIDAVLVTRWQWDGAERARAPEPDRRMATVPAPAHSPAAPEPTPTESPAPDHDALWA

SEQ ID NO: 39525 - protein, 415 aa, Streptomyces sp. PRh5
MSASDTPAGLVDHGRLTRLLGDPGCAWLLDRIRRRMERAEPLTGPVILAAPTDGERAAAERLLGRAPGGGRSLSVRLDAVDTILRRSGVSPDGLATAVIALTGPVTLLSDARRREADAWHDAYTPLTGLCSERPELADWCEHIRVSGLVRRLARGPEAARALVASTATALRSLPADPAVSLPAFAARALGDAHALDDGTPLATLVHSGIRALTGFPDGTGAEWRREAWASAGLLKDALSSTVLTLGLRGTPALDWATGTGEPAVLTLRQLTRTPPREAPPVVHICENPTVLATAADTYGPACPPLICLQGQPSAAALTLLRHLHANRAKLLYHGDFDWGGIRIAAALLRRVPWRPWRYTTADYRAAADRSPRAPSLTGTPATAPWDPALRAALSELGVRVEEETVLDDLMTDLAP

SEQ ID NO: 39526 - protein, 500 aa, Paenibacillus polymyxa SQR-21
MSFLLNPVKEATYLSAPKAERYRPICYVFYQKYRQEYNSYMFLDEVYRELVTSEQFGSHFTNYTEKELEEDLKALVRWNNLIVHQDESHAQRIEDFYKRKNYYEVTQYTISLERTLEEMQHNLQAIRGGSFERVLADYILEDLTKFRKWKPMNNGALGDIRNIWRDLMSRFEALRNGTADFLSHVNSEPYERLIHTESFLPYKEKFVRLLSDFVIGIMEKKDLIEERLGFIDESEIEHIISAIVSYEAEQQINDKFEVELASERRRAEWLGFKGWFVEINGRKASSRFLIEQTRGTIQKIVRIADQISDKFNYFKSRKNDYLELARIFANTSNLRECHVIAGAMFGASTTKHFLVPRKSEDDNTKHVWECDPFELPLNKKTPGNRNGRTKLPVYEDPLAQMSLVQEHLEKTRMVQEQFNNLIKNGKITLNEIGVVYPKVRDLLLELLGQAMITKSLKSQTEDGRRFYLRLRSNKHIRLRSTDGTLTMDDYEFVFMEEQNG

SEQ ID NO: 39527 - protein, 383 aa, Paenibacillus polymyxa SQR-21
MDKDRLVLQECIEALFHYHWIHRDTQADLYFQILARKADIADTVREYFGYRLLLRNEFIKLEKIPVSSKMFMGIGGFTNSLHYMFFCCFLAYLEDKGEEQQFTLQNACDAIRMYYPEVATPFAWEERSHRRAFADVLQHSVKLRLVYVVDRDIDGFRDDEKHDVLFQTTPYFRHFAPLYLFDLSKIQNLSQLEEYIAKEIANGTTPKQRLLRRFFLESAVYDDELSEEEVKLLEDRDELERLNEMISEPFEYWHLERYHRTTMLTHAENRYGDYHPKDEQISNTAVQYATLIWDKVNGQEVTLDHNGRVLCSEHEAIKWFQEIKDLHSHGWTKSYTERPVTATWREVMEYMSDFQMADVLTGKQVVFYSAAGRVTGEYVSQSI

SEQ ID NO: 39528 - protein, 1354 aa, Paenibacillus polymyxa SQR-21
MDRFHLNRFGLINFWYHGDTVFEFSNGRLFVRGANAAGKSVSTTMAVPFLLDGDKRPSRLDPFGSQDRRMIDLLLGNKHVSKREEGIGYLYMEYRKGNTFVTVGIGLNGKRREGDNTMRTWYFILHNKRIGKDIQLYNENIVSGEVKKFPITRGDLADRIGGDGEVTDSQQRYVELVNQEIYRFNTEQEFKELIGVLLQLRSPKLSNAVKASEVSNVLSDALPELSQYELAPLSSSLESMDSLQEKKSRLGRELGVLTILVDAYDAYNQLSLYEKAKHLVSSEKRFNDSMKRMKDYKTAEAAELVTKIDLERQWREQSNIKETLQRKIVSMQGHPLFTLEEELGKVKEVLQESEKKLESKVDALEKNKAEQRKVENRIKQSEEKEYKAAKSREDALSEMESLAAEAYFIPHTALRQYFEARLESFSDTGFHNWHEALQEYHNKVEDIASQLHSMQSRLEHEDRMQRNVAAEEEQTEGLEAEIRASEKEIAECAALVEYAVKEWVEGARQFQVQPTEFLEAKEILQGIGDLLDDSSPTAITDWLNGLYNKRLTALQEERAKLMASISLLQKQIEEAESKLEELSAQTEIEPDFTASEVVKIERLRVQNIRAAYFYETVEFLEHIEPSVKEAIEGAITRAGLLTALVVHESDRSMAAASMTVVQKGSYKEENLLTYVRPTPIKGLSEDDISAVLQTISIVPHEEGYVLETGEFRSGMVGGLAPRYEDAYIGKSAREQIRARKLKELQKLREELMHKKDDLESECFSVEKQQRLLHTERDIFPSLEGLKDSLARHENKTRKRVAQLSLLERLQNDLRVYRNETQVARNALYYAAQELELPLTHASYQKALGDLARYQKKLTDLRVAHIGWLSELNLLSSLRAEKERLVDDFGSLMDEKTDLERSIARNRSLEAMYLERIEDFGDTDVKQEIEEARKAALAADELLENYRKQITNAEINMRTYTENHAKEQPQMEERLRLLNAWTKIFQEELSLGFVCSPQSASQIVEALEESCKALSSDVALSALKDAEGHAQHELVDYNLKQTRRTIPPEIQAKDKEDPYWQLLVQHCSRQFLVFSPQHVESTPREVHRDVDDQLKRISGHIQEEERKLFEKVLIDVIGTAILEKVRDAKRWEQDANVMLQRVTSIIQMRLEWVPLTSKEEDQISTTELLSYLSKESIYLTPSQKEKVRLHFMSKINEARKKCKDDASFSMFEEMKKALDYRRWFRFDMFITRKGIPEERFTNKVFGELSGGEKAMSIYSPLFAAIAAKYSYAASDAPRIISLDEAFAGIDSENIAQMFQLVHDFEFDYIMNSQVLWGCYETVDELSIAQILRPVDSPVLAVARYYWDGKEKHHLS

SEQ ID NO: 39529 - protein, 467 aa, Paenibacillus polymyxa SQR-21
MQDNRQLVEIFRRSGGFGRLFDLYRKKFESYGAFGTVQMRPTEEEEKALRGFLGVRYKGSRFPASDFEKAATEAGYSVSLLELLELYYSRQLSTKREQKELKLSAWTNLFFQVEREFINRFNISNTDLESFIQKTFNWFQRLKEGEAKGYRVLRTVFDRGTHAYLELLACLSALWHLLMRKDEMFKECGISTGKIRLPMFAAYVTEDSHAFDKTNALGRLLWSALNDINSQSIKLSGNVDNYMTVMPEYFFERQIYRDFDVLDDDLSSISHVFVPHLVKGTSPRTLNLREIEEMKQFPKYSSLYIIENPSVISYLVDETIHFLNLNKFSLEQLPLDFPVLLCTIGQARTASKVFIEKCLDANPSCVIYYSGDLDLPGIQMLNNMKEQFSAEFYAWRMEASIYRNYVAPKSKPLSDADLKILQGLESGLVKEMIQIKAKVYQESFGKELRSNWIREVSSVISKNQVDK

SEQ ID NO: 39530 - protein, 513 aa, Paenibacillus darwinianus
MDAGFSGLQPQSLRQVPELKYVNAENVVRYRAIMRFFYQEYKRLRYWLKPEEVFAGVSEWSVWPGYTLEQCQTDLDQLVEWQNLTARHDGGRSTTLAEYLKKKMQYLLRPYSIEIERLLETLEKVTGYGGSLEASLFDTIADKLFAVRRDAGQLEPETALELWNILYRSFVSLHENAADYIASLHTAKAEEMMVAEAFLVFKEKLTNYLQNFVQALQRSAYKIEGNLLRINDNVRDMFLEKVVEGELNKPRLEDVPDRQALLKELRQGWDNIQRWFIGEGGSPSELTLLERATKDAIARIVRSAIRIQERKRSGLSRKKELEHLARWFAGLHVMDDAHRLAGFAFGLFPTRHLQGEDLRDSDRADMSMWEERPTVRTLRSRSRKRGERQQSEPVRDNEQRKQREREAFLLRQAEEWNAIEALLAKGRVRISELGEVPSQTRLRLLHWIGRCMTAGSNHSFVTPEGVRVRMTNPRTEQRTVLVSEDGELHMADYELVFILTDAAREAAAARIEE

SEQ ID NO: 39531 - protein, 407 aa, Paenibacillus darwinianus
MAASGKSAVSRVGRSRAGAEQAAERKRACVHALLNRPWVAKSEDPELYFAVKDYYEELRDWFMDKAGFPLLMTRSIAKLDKAPVKALPWMGFPEFREPRDYVFFTYGLWYLESKTELDQFLLSDIVEEIRDQMAGEGLDADWTIYHHRLSMARALKKLKSLGVLHAVDGDEGDWAQNREKNALFECSSNTRYVLRRFPKDLTSYSRMEELSDPIPYADTQDGQAMRRRHRVYRRLLLEPAVPDAEWDEEEDLNYVRWQRRAIMDQLGKTFGWEGRRYREGLLFFHPELTSEAALFPTLSGVSDLALLVAGELRRQLYEEGSGTYTEPHGSIRVTRAEMETILYKLHLRHKEYWSKEFRESSSQELADLCIAHLEDWRLGSWEDSAHFLISPVLGRWNAEYANTDFDG

SEQ ID NO: 39532 - protein, 484 aa, Paenibacillus darwinianus
MADDQKRGAERTDARWRMNRVGILNFWYYDEEEFQLEDGRLILRGANGSGKSVTMQSFLPLVLDGDKRAHRLDPFGSRDRRIEYYLLGEEDGGKTDATGYLWMEFHRPDTGAFKTIGIGLRARRNAAQVQFWGFLLEDGRRIGYDFWLYDRNDWLERGDRIPLDRKDLEGRIGAGGQVVHDQGSYRELVNKQLFGFAETEAFQDLLQLMIQLRSPKLSKDFKPSAIYDILHQALPPLVEDELRPLSEVLEDMDQLADRLDEIRVHRKEMAGLQESYDRYNKHVLYLKAGELLEAKSEHDVYAARAQASALALEEAERDKTAAQGERGRIQERLQAISVERNVLEKHEAIGKQREFESASASLEDMEKQLERSREREQKSRLREDKLNRERAQSADRRLAARREQEATLEELESMAQEMEFAEHPVYHRYWMPDIPADESWREAWRRDVKGHRERVETAAGKARQERESAVLARERETELGEASR

SEQ ID NO: 39533 - protein, 483 aa, Rhodococcus opacus PD630; identical to SEQ ID NO: 38978

SEQ ID NO: 39534 - protein, 464 aa, Rhodococcus opacus PD630; identical to SEQ ID NO: 38979

SEQ ID NO: 39535 - protein, 1385 aa, Rhodococcus opacus PD630; identical to SEQ ID NO: 38980

SEQ ID NO: 39536 - protein, 676 aa, Frankia sp. Thr
MLVQACQTRPSLQPPTTPQTPVFPSSVTGSRSPAVHAVAWWAILGGVTSDGQTGPAAGGDAPPRQPFAHLSAPNADVYREVLTTFARARDRFIVHMRPEDVIADLGRPGQTESIVAALDKLVEWGNLRADPDTGRVTTVADFHRARYLYQLTPAGQAAEEAIAVYEVAIGRRGALQSVALEDIAAQLRALVEMTAGDAADLDPAKVHLLLLGLAERFTGLADNAQAFMTSLRRVIDFSDGDVDAFLAYKQRLIDYINRFIAELANRGAEIATLLGQVEGAGVERLLLLAARREATDAVPDVPEVSGSGASGSGASGSGASGSGASGSGASGSGASDSGRTGAGRTDAERIRTAYDAAVAAALDGWRNRWRGLHDWFVSADSRRPSQARLLRGAAITAITQLIDTVAALNERRTGRSDRSADFRTLARWFAEAPDDAAAHRLWRAAFGLASARHLTVSQETVAAWQEDEPTPNTPWQDAPPMRISPQLRRTGSYERRGTPNRVTDRARQRRLLAEQAAREAEQAASARARLATDGPVLLSQLGVLDRQAFRLFLGLLGDALAARLAGDTEVETTSSDGTVLIRLTLVPGGGVARIETEDGVLDGPEHTVEIVDLAGAASRPAAWNDLNDLNDWSDSNDRNDRNRQNDLNGRMDGLAPVVLAGGPDRLELLETGRVSG

SEQ ID NO: 39537 - protein, 422 aa, Frankia sp. Thr; identical to SEQ ID NO: 38568

SEQ ID NO: 39538 - protein, 1443 aa, Frankia sp. Thr; identical to SEQ ID NO: 38569

SEQ ID NO: 39539 - protein, 434 aa, Frankia sp. Thr; identical to SEQ ID NO: 38570

SEQ ID NO: 39540 - protein, 523 aa, Streptomyces sp. PCS3-D2
MDTTSPPAECLPDGYGPFAHLTAPNVLLYRAVMGAFLHAKERFAVHLRPEDVYAGLAGENRPTELDTVVKALDSLVGWGNLRADPDTGRVTAVEDFYRKRFIYQLTRAGEAAEQALSAYDEALGRRGALQAVALHDIVTQLRALVVLAAEEEPDPAKTHLALDALASRFGALADNARAFMGSLQRTIDLHDVGEEVFLAYKDQLIRYLERFIQDLITLGGRIARLILELEERGSIEPLLRAAAAREAADATPQDAAHAAQAAYERWAGRWAGLAAWFLSRDGRESQARLLRGRALGAIPQLLAVVRSLNERRAGRSDRSADFRTLARWFAEAPDDDARHRLWRTAFGLYPARHLTVDAETLAARRARPEPAATPWADAAPLRISPQLRRTGSYERRGKPRRVEDRQEARRLLAETAAKQAAETAAARARLVTRGITRLSGLGELDPLSFRLFLQLLGDALATWRPGMTYTAATSGDGSMEIRLTAPADGAVAEVRTPDGTFTGPDHTIEIVDLTETPGRGGAR

SEQ ID NO: 39541 - protein, 423 aa, Streptomyces sp. PCS3-D2
MTTPLAEVLDGQHAAERRKAARALLKQPLLLAHGAYADEFRLVRRHAGELREWFDRNTGWSLQVDAETARLGRIPGVPDDATHPAREVSRSAVPFSRRRYVLLCLALASLERGEAQIALGRLADQIVLDAKDPRLAAAGIEFTLDRRDERLDLAAVVRLLLHLGVLRRVAGEEDAYVSGAGDVLYDVERRVLAGLLATRRGPSTVRAETPEARLAELAAETALDSDELRFRAMRRSLTRRLLDDPVVYYDELTDAELGYLTRQRGFLTARINELTGLVAEVRAEGIAMVDPEDDLTDLRMPESGTRGHVTLLLAEYLTAVGGLVVPMVDLERRVVELAAEHGGFWSKSAREPGAEGDLAEQAVARLAALGLVARTADGVLPRPALARYAVGETVVLEPRTGTGPRTRTSGTTQVPAQRKAYLP

SEQ ID NO: 39542 - protein, 1388 aa, Streptomyces sp. PCS3-D2
MTTRPEPPAPARPRWQPLRTGLVDLFHYDVEEFHFRDGRLLLRGNNGTGKSKVLALTLPFLLDGDLSARRVEPDGDAGKRMEWNLLLGGEHPHSERLGYTWVEFGRRDAASGEEHFRTLLCGLKAVSGRGIARHWWAVTGQRIDHGPADARADGSLSLLDATGTVLSRDRLIEAVAGRGRVYDQAKAYRRAVDEALFGLGEQRYAALVDLLIQLRQPQLSKRPNEAALSRALTEALPPMDQAVIADVAEAFRSLDEEKEELRSAGAAERAAAVFLDHYRRYARTAARRRARLPRSEHSKYEQLLRALAEAQAEKAGAERDRAAAEERVAALTETRARLEAADAALREGPEMRSAREVDRAAKAAERAENDRTRALDDQEEASHRHTRALGRLGAAENRLRAARELSEDMLLRARETAAAARLDLPTDTGQAVAGLRAAVAEATDRRHRTLTHLEALADRAEAAAAGRRSAVLRLDETETGLTQAAEALGAAQDAARAAGRALVDAVREHAHRCGELVYADPAGLLDELQEWTRHQDGPYPARRRAAEAHRTTAAALADQAARAAHHRAALVSRTRDAEHELTALESGGRRGPQAPHTRTPGLRDQQPGAPLWRLVDFREEVAEQDRAGLEAALEASGLLDAWVCPDGAALAAEGHDVILAPDSGPVAGASLADVLRPAVDRGDAQAAAVGTEAVARLLEAIGLGGAREDTVPAGEGEAPGAGPTGTAVPHGTWVAPDGRHRVGVLTGRWAKPAAEYIGEGAREAARRTRIAALHAELSLLQRQSAAADAQAQVLAARRHTLDTELASVPDDAPLMRAHADAAAAAGTLRRARARRDGRAAEVTAAAERAESAAAELRETAADVGMPRERAELAAVRQALAELDVVLAGLWPALRERHEASRQADDEREEALRAGERAAELAVRAEDAAREAAAADERLATLRSTVGAAVAELERLLAETADTLRGCTADEQRARTEHTEADRRASRAEGSIEQLEKAVTEAAATRSEAVAALQRFTGTGLIAVALPDLAVPAADEGPWAATPAIALARALESELATTDDSDGAWERVQRRLGEEFKTLQDALSRHGNTASARMVEDAVIVEIVYQGRERAVPELAEALAAEVAELTRILSAHEREILETHLITEVAGTLQELIAAAERQVLAMNAELEERPTSTGMKLRLVWRPSRKAPVGLAQARGRLLQTNDAWTAEDRSAVGEFLQTQIARQQTEDAAGSWLEHLTAALDYRSWHEFAVERQQHGRWVPATGPASGGERVLAVSVPLFAAASSHYASAGSPYAPRLVTLDEAFAGVDDDSRAKCLGLLHAFDLDVVMTSEREWACYPQVPGIAIAQLARVDEVAAVLVTRWEWDGTARTRREDPVRPAHPEALWV

SEQ ID NO: 39543 - protein, 413 aa, Streptomyces sp. PCS3-D2
MDEARLRRLLGGADLAWLVERARRRLERGQPLTGPVSLAAPSPAERAAAERLLGRTPGVGKALTVRLDAVDAVLVRAGISAEGLGAAVTVLTGRVVPLDTARRNEQQAWEEAYAPLTDLAEDLPAHAAWAGRVRAGGLVRRLAGTPTAARALLEETVRVLRELPVAPARSLAVFAADVLGSAHALDDGTPVATLALSGARALTGHPEGAGAAWRRVAWASVGLLRDDVSSTVLTLNLRGTPALDWAADAGEPSVLTLRQLARRPPRTAPPVVHICENPAVLSAAADTHGPDGLPLVCVQGQPSAAALTLLTRLHELGAALRHHGDFDWGGLRIATTLSGHVPWSPWRYTAADYRAAVAAGGPGLRPLDGKPAPSPWDPDLALALSEQALRVEEEAVLDVLLGDLARSGGEALR

SEQ ID NO: 39544 - protein, 514 aa, Castellaniella defragrans 65Phen
MTPPAAAQADLFRHVSAEKAALYRCIMECFAAAKRQFRLHLRPDEVLEDGDWSALAGPAAPRLEEIQAALAQLAEWGNLESQPDTARVASISDFYRARFVYRLSLGGEAVEAALTAFSRTLRRRAELQTIALEDIAHRLKALLALADSAEPDTVKVHETLRDLVRVFESLADNAQAFMAGVGRGVELQQAEAAAVLAYKRRLIDYLERFIGDLVARSGGIAQHILALQPRIDALLWLAAQRQARDSAPGDEAGQIDAVARGWQAWRERWKGLRRWFLATGHAPAQSELLRAKARAAIPQLLSAVATLNERRSGRSDRSADFRMLAGWFAACEDDVQAHRLARAAFALNPARHFSLNPTLAPGARDLPASTPWAEAPPLRIHPRLREYGQASPRGALPRVQARDAERQLLAARLHEEHAQIEAARQRLASGRGTRLSELGTLDPHAFALFLALLGEALTAQSSPDAEVDVPSGDGLLRIRLRPLAADSRATIHTAAGSFSGRDHLVTITRTEAAP

SEQ ID NO: 39545 - protein, 416 aa, Castellaniella defragrans 65Phen
MIRSDSRAIGRQQARHRDDERSQALRALLMTPLMTPAHDGFAAVRRHADELRAWFARETGWTLHIERDCARLYKRPADLDDASRGLPGYERRRYVLLCLACAVLERADPQITLRVLGERLLALAADPTLESRGFRFTLGAAHERRELVAVCRSLLELGVLQRVAGDEEGYVRGGGEAAEGADALYDVRRRVLAGVLAAVRGPSTWPAEQAPADLAARLASLVAEHQPDSEEGRRTALRHHLARRLLDDPVVYLDTLDAELRAYFINQRGAMANRLCEAAGLVAEQRAEGLALADEDGELTDIAMPAEGTEAHVTLLLAEFLSRPREAADPISHDDVIAFLAEAREAHGSYWRKSAREPGAERELASLALERLRKLQLATCDDTHVRPLPALARFALGEADIRQPAAPAAAHPTLFE

SEQ ID NO: 39546 - protein, 1375 aa, Castellaniella defragrans 65Phen
MTDTASPSLPVPARARWQPLRLGLVELFHYDSEEFWFHDGHLLLRGNNGTGKSKVLSLTLPFLFDAQLKPSRIEPDGDASKKMAWNLLLGRHDRRMGYAWLELGRVDADGRPHYLTLGCGMLAAAARAQVDSWFFVLDRQRIGQDLWLMSPARVVLTRERLRDALQDHGQVFDTATAYRRAVDERLFHLGPQRYAALMDTLIQLRQPQLSKKPDEASLSNALTEALPPISGELLTDVADALNQLEEYRRELEEYEALEHAVVQFNQRYQRYAATQARRRARSLRSAQTGFDNASRELNEDRLALDTARTDEAGALLAQQRAETALAGLRTRLDELQNDPAMADAKALDKAAADAGQRQHEADAALGERQRRQARFEQEQQATRQRALRAEDGGRALADARAQAREAAGAAGLASIYETSPLACADAQALTAPVLESAQRELRHTAATRREQVAHLQRRCDEAEQAAQARDRAQDARDERADEAEAAATRREEADAAVERQGRDALEAWQHHLDEARQLRVPDSGGVLEALAAWTASLQGDNPARTALHAAQQAASLRLAQRQAALQAERHALEQEQAALHAEHARLQSGDDTQPPPPAWRAPDARAGRAGAPLWQLVEFAPAVPAGLQAGLEAALQASGLLDAWVTPDGRLQDLDGAPPPHDTQWLGRPSRPDSLAAWLQPAAPADATPAVAPAVLRRLLEGVACGERDDPAAEAWIGPGGRFRLGALAGAWHKPRAEFIGYAARAAARARRLAEIAQRLEMLDEALAQLRAGFAQLDADQRQAAGEWRSAPTDDALRAAHLQASTCVREFGEARLRLDQAEQALRQASQQWEAASQTLEQDAADLALPPAREALRTIDQALLAFGDRLHALAGAARTCHDALAEHRQQVERERQAQADAEQAAEQSVERDLLAENARIRLQTLRESVGAKVEELQQRIRDARLAVVRAEAERKSSDEALRHAGEARARAEQKVEAAEAVLAERIDTRQHAIAHWQGFAATGLLEIALPDAELPPHTAPWTIEPALALARRAEQALLQIKDDDDAWNRVQNQISQDYTELGRALAALSHRAQAETSDFGLIVSIVYQNRPERPDQLGARLAGEIAQRRELLTAGERQVLENHLQAEIASAIHKLLHDAERQVLAINEELAKRPTSTGVRFRLQWETLPEGGEDGAPVGLKAARQRLLNTSTDLWSAEDRRVVGEMLQQRIAAERSRADADQGGSLHEQLARALDYRRWHRFRVQRWDGQWRPLSGPASSGERALGLTVPLFAAVSSYYSQADSTHAPRLVLLDEVFAGIDDAARHHCWALIREFDLDFVVTSEREWACSAELPGVAIAQLQRHEGIDAVHVSRWTWDGQARRQASDPDRRFPPAA

SEQ ID NO: 39547 - protein, 439 aa, Castellaniella defragrans 65Phen
MSDDAMLPPDPHDEPPDSRLQRLLGSDALAPLRQRLRQYFERIGPDAAASTLRLAGLDPAAHTALCQLTGRPVRLARSMTLDIPRLDAALRAAGLADSLRSALERLDGPIVYKTRQRLELQARWAAAITSARVCPLLRAWLDTPSARPLLKRLSRVPERAAPLLDAADRVLRALPAQGQPRSQLAASLLGDAHALDAGRPAATLVLAAWRHHEQRHPTNRTAADDAETRRKEEGAEERRRDVWARAGVLVNELARPALFLNLPVADPAPAPGRPGEPSYLSLRQLLRTPPAWAVADWAVHICENPNFLAIAADRLGARCAPLVCTDGMPSAAQRILLDQLHTAGARLLYHGDFDWPGIGIANFVIRTWNAAPWRMGTRDYEAAAGTATHLRHELGTAPIDADWDPMLASAMRKHGTAIAEEAVATALLEDLCIPGTEEN

SEQ ID NO: 39548 - protein, 497 aa, Oceanobacillus picturae
MQQPFKKVIEASYLTADKAWRYRAILRYFYIQHERMREFLFPEEILAYLTDFQEFKDYTEEQLHQDLDQLVKWNNLLARQEMGRAHTIEEFKKKRFRYQCTPYTVEFERMLMEMEKGGNAFGGSLEKKEFERLFQALADIKSMINKKEFTDASECSQLWNDVFTYFRSITQNTSDYIAHINSEEAEERMQTEAFLVFKDQFTTYLRDFIIGLQQTAWKIQQLLQSMGTSHLQPFLHQVILHQQQVPRFEDIAADEQELMTEQEEKWHSLTSWFLGNAHRESELDSLQTRTNEQIRRITRVVQRLGERHQYFRSRKKDFIHLAKWFDSLEDINQAHELSAVSFGVFHTRHMFSDHVPTDDIYTDTWEEQPIRHETKPRIRQYREKTRAGAIVSQQQKKEAAKEDYLRDKMAEEETLNAYMQGNEIKLGALPIIEKHVRKMLLSWIGKAMAKKDHTFKTEHGRTVHVMVSKQERIQLQAEDGVMEMPAVTFRFMDEVKN

SEQ ID NO: 39549 - protein, 391 aa, Oceanobacillus picturae
MEITTFDEKARTGLRLLFEKFWILRSKEPEVYQQIREREKIIKRYVDEKFGFDLIVHQHFIKLEKIPVETKSWMGMQGFLEPRDYAMFCCALAFTENRTVDEQFLLSDVCEDIKDLYPGEFPLDWTNYNHRKSLVRVIKQLEKLSILAVVEGEIEQFALNEEQEVLYEVTVYARYFMRSYPKDLVQYKSIEEILEGEWERHETDVRRKRVYRKLLFSPAVHRESEQDPDFAYIRNFRNRLRDDMEEHTLFRFELFKNAALLVTDERKQELTLFPDQKAIMDVALHFSHFLRENKQEYLPDTLGNIRLTAVTFEQIISQLHAEYGKGWSKQYREGTVKQTMQELSALMKEWEMLERDPFTGEYLIKPLAGRISGHYPKNFDAEKGVTNEKTQ

SEQ ID NO: 39550 - protein, 1381 aa, Oceanobacillus picturae
MKKHNKWKMNRAGLLNFWYYDNEIFDFADGKLLLRGSNGSGKSVTMQSILPVLLDGKKSPDRLDPFGSKARKMEDYLLGEKDIVDREERTGYLFIEYKREDTNQYITTGIGLQARRHKSMNSWYFIITDNRRIGEDFALYETERHGGETQQIPLSRTQLENRVQDGGHVVRTQGEYMKLVNKYIFGFEEIDAYEDLIKLLIQLRSPKLSKDFKPTVIYEILEAALPPLTDEDLRHLSDTIEHMDQTKQQIEQLEREQDALNKLIKRYDAYNEYAIADRAHEYVEAKKRHTKEERLLNEKEAIEATLKEEIKRGQEQSVKLEQTKEVLEKKQERLRQHKVWNLEKERATEQEALEEVKKELERKNQQLTNKKNDELETKSRLKALDDELYNQEQQMGETLRDLEADAEASSFTGHSLNQQDFHRNKESDFDFKVWTQEAENHFQNLESITEGLRYYENLREQIVAFQKKLSDLTMERDKTKQVEQDWLALFEKDKQEKLDEIHRWAADHSFLPIEEKTLQQSARQMEQLYEPLSFETVRNPFVQVSNDFQMDVNQEIATKKSDLSTLEKEKTGKEAELAEWKAKRDPEPPNQREETREARKLLEASNHAFVPFYEAVEFQDHVPENVRNQIEAVLLDTGLLDALIAEEQTTITHDRIIKADPHMMAHTLRDYLTPDLAAERQVSSELIDEVLRSILVDEEVEGKISIQENGSYTIGIVHGHAVPVKSVRFIGKNARKRYREEQITRLEEEITGLNSNYQSIEQHVHALSEKVEDAKQAMIAFPVDHDLQVSFSTIKEKRFDLEQLQKSLQQVDRDMEITTKAYQEKKRELDRKTRELNITFSFTAYNEAKSIMRDYEKALRSLITTHTTYVLQQQNRRGVIERVDELMEEVDELQGELNERTDKESKLVGNIEEIVKQLEMQGVADIRNQIQEVQASLKQTEQELMHNRTTLPQNIARLETLTEEISQHHQKLHFQQQMIHVWADTIGQEMNYGFIDLPDDLQKMEERAKWIDKHFKQLLKEKDPASIEGQLTSIYFEQHSNLMEYRLSDQHVPAVEAPWMREQEWTDEQRMQIEHWRQKAARRLIQLDYQGKKVDPYFVRDRIDQDRLQQQHLLDDQDRQLYEEILFDSVGKKLRSRISKAQAWTEKMDKLMAESDSSSGLSFSIRWKPRTAETEEELDTKELVELLRRDSRLLKDEDMDMVIDHFRSKIERAKELVDIKGEGSTLLQVLKDVLDYRNWFSFVLSYKREREPKRELTNHAFYKFSGGEKAMAMYIPLFTACYSRYSEADPTAPYIITLDEAFAGVDEDNISVMFRIMEELGFDYMMNSQVLWGDYDTISNLSINELVRPKNSDFVTVIRYHWGGKKRSLLVKDQAETVTNR

SEQ ID NO: 39551 - protein, 427 aa, Oceanobacillus picturae
MDKQTKQAATFFKCERLYDSLFKQLRKKYESIGRIGGTIPIRLFSYEELEAIAGLFGKSVATLERKGTVSIVELAEALNDTRFSGVDLKALLDAYFGEELVSKKEQRLATAARITSFLERLAKSYPILTDWFAYIQTSTSEGRWILRQAEKSPDQFEQNVALLARAVTALPTHSERLPMFSQRITEDPHAFDLHTDLGKMFLYVLAVRTGDEKPVAIPKSTETINKLLQTSNIYRDDLLNFVTCANLLAVDQSGEQHPVWQATGASHTVQNVPLREIVSLSRIYPAQGKKVWIVENSGVCSTLLDYQRDIPIISTNGQFKLAALMVMDLLIKENCSLHYAGDLDPEGLQMAERLFNRYPDHVQLWHMDGKAYKESAPSKELSQERLAKLDTIEHKTLREVADAMRLSGKAGYQEALVAHMLVDIRSS

SEQ ID NO: 39552 - protein, 514 aa, Xanthomonas arboricola pv. pruni; identical to SEQ ID NO: 39482

SEQ ID NO: 39553 - protein, 1375 aa, Xanthomonas arboricola pv. pruni
MTDTTSPSLPIPTLARWQPLRLGLVELFHYDSEEFWFRDGHLLLRGNNGTGKSKVLSLTLPFLFDAQLKPSRIEPDGDASKKMAWNLLLGRLDRRMGYAWLELGRLGADGQPHYLSLGCGLLAVAARPQVDSWFFVLEQQRIGQDIWLMSPARAVLTRERLRDALQDHGQVFDTATAYRRAVDERLFHLGPQRYTALMDTLIQLRQPQLSKKPDEANLSNALTEALPPISTDLLADVADALNQLEEYRRELEEYEALERAVGQFNQRYQRYAATQARRRARSLRSAQTGFDNASRDLNDGRLALGAARAAETGATQAQQRAENALAGHRSRLDELQNDPAMTDAKALDKAAADAERQQRDAGAARTERQRRQTRFEQEQQATRQRAQRAEDAGHALAEARTQASAAAETAGLVSNYGASPLAHGEAATLTPAALASAQQDLRHTAAARREQVAHLQRRCDEAEQAAHERARAQDLRDERADEAEAAAARREEADAAVERQGQHLLEAWQSHLDAAQQLQVPDSGDVLETLAAWTASLHGDNPARAALHRAQQAASLRLAQRQAMLQTEQQALEQEQATLHAERTRLQSGEDALPPPPAWRAPSAREGRGGAPLWQLVEFAPAVPADLQPGLEAALQASGLLDAWVTPDGQLLDAGGAPLPHDAQWLGRPARPDSLAAWLQPAPPAEATPMVAPAVLQRLFEGVACGEQDDPGAEAWIGPGGRFRLGALAGAWHKPRAEFIGYAARAAARARRLAEIAQRLEELDLAHAQLQAGSAQLAADQRQAASEWQSAPTDDTLRAAHLQASTRVRELDAARLRLDQAEHALRSAIQQWEAASQTLEQDARDLALPPARDALHTIDRALLAFGDRLHALTSAARACHDALAEHRQQVEREQQARTDAEHATEQAAERDLLAEEARIRLQTLRESVGAKVEELQQRIRDARQAVSSADLELKSSNEALRLAGETRARAEQKVEAADAILSERIASRQQAIEHWQGFAATGLLEIALPDAELPPQAAPWTIEPALALARRAEQALLQVKDDDDAWNRVQNQVSQDYTELGSALAALSHRAQAETSDFGLIVSIVYQNRPERPDQLGTRLASEIAQRRELLTAGEREVLENHLQAEIASAIHKLLRDAEQQVLAINAELAKRPTSTGVRFRLLWETLPESGDGGAPVGLKAARQRLLNTSTDLWSAEDRRVVGEMLQQRIAAERSRADADQGGSLHEQLARALDYRRWHRFRVQRWDGQWRPLSGPASSGERALGLTVPLFAAVSSYYSQAGHAHAPRLVLLDEVFAGIDDAARHHCWALIREFDLDFVVTSEREWACSAELPGVAIAQLQRHEGIDAVHVSRWTWDGLAKRQEPDPDRRFPPAA

SEQ ID NO: 39554 - protein, 432 aa, Xanthomonas arboricola pv. pruni
MRADATLPPDPRLQRLLGDDALAPLRQRLRRYFERIGPNATASTLRLDRLAPDAHQALCQMTGRPLRPARSITLDIRQLDTALREAGPANSLRDALERLDGPIVDKTRQRLELQARWAAATDSIDACPLLQDWLNTSSAPPLLKRLSRASENAMPLLNAADSVLRALPAQGQPRAQLAASLLGDAHALDAGRPVATLVLAAWRHYERQHPTNHETGEDPEDAPKGEGTEERQRDIWARAGILVNELARPALFLNLPVATSQGALGHPGEPSYISLRQLLRASTMWSVADRVVHVCENPNVLAIAADQLGASCAPLVCTDGMPSAAQRILLDQLQAAGAKLLYHGDFDWPGIGIANFVIRTWNANPWRMSTQDYEAAASSTTRVRHELGAIPVNADWDIHLATAMQNCGTAIAEEAVATILIEDLRIPGPAEN

SEQ ID NO: 39555 - protein, 668 aa, Frankia sp. BMG5.23
  MOD_RES (316)..(316): Any amino acid
MLVQACQTRPSLQPPTTPQTPVFPSSVTGSRSPAVHAVAWWAILGGVTSDGQTGPAAGGDAPPRQPFAHLSAPNADVYREVLTTFARARDRFIVHMRPEDVIADLGRPGQTESIVAALDKLVEWGNLRADPDTGRVTTVADFHRARYLYQLTPAGQAAEEAIAVYEVAIGRRGALQSVALEDIAAQLRALVEMTAGDAADLDPAKVHLLLLGLAERFTGLADNAQAFMTSLRRVIDFSDGDVDAFLAYKQRLIDYINRFIAELANRGAEIATLLGQVEGAGVERLLLLAARREATDAVPDVPEVSGSGASGSGASXSGSGASGSGASDSGRTGAGRTDAERIRTAYDAAVAAALDGWRNRWRGLHDWFVSADSRRPSQARLLRGAAITAITQLIDTVAALNERRTGRSDRSADFRTLARWFAEAPDDAAAHRLWRAAFGLASARHLTVSQETVAAWQEDEPTPNTPWQDAPPMRISPQLRRTGSYERRGTPNRVTDRARQRRLLAEQAAREAEQAASARARLATDGPVLLSQLGVLDRQAFRLFLGLLGDALAARLAGDTEVETTSSDGTVLIRLTLVPGGGVARIETEDGVLDGPEHTVEIVDLAGAASRPAAWNDLNDLNDWSDSNDRNDRNRQNDLNGRMDGLAPVVLAGGPDRLELLETGRVSG

SEQ ID NO: 39556 - protein, 422 aa, Frankia sp. BMG5.23; identical to SEQ ID NO: 38568

SEQ ID NO: 39557 - protein, 1443 aa, Frankia sp. BMG5.23
MSTSTRMPATPAPASIPAPAPASASIPVPAREDRWQPLRAGLVDLFYYDVEEFHFHDGRLLLRGNNGTGKSKVLALTLPFLLDGELAAHRVEPDGDRNKRMEWNLLLGGRHPHPERLGYTWLEFGRLGGDGIPEYRTIGAGLKAVSGRGIVRHWFFVTRQRIGPQLSLVSPTRVPLTRDKLKEAVDGHGAVYDTASDYRRAVDEALFGLGGHRYEALVNLLIQLRQPQLSKKPDEKLLSRALTEALPPLDPALVVIVAEAFRGLDEERETLRALAEAETAAQAFLTHYRRYARVAAKRYAAPPRQAHSRYEQHGRDLAEADAAHQAAVEALTAAQQALTEVEEAKATLTARRDALRDSPEMRDAAALRGAEEDAGRLARFAAQRERDSRAAAEAAGDRKRRLTGAERTVQADAAGFDAAIRAAGLAAEAALVTGRHAAVLTELDGGEPPYRDARRSAEALVGQQGTAVNRLDGLLRAAADAGVALRAARDDLDRITAEQQAAAERIAAAEDLTAQRGAGLVVACTAYLAGCAYLRPADPDAALAALAGWVDTLDGSNPVATAVDGAARLATADLGRRQAVLDGEQTAARRELERLAEEIERLAAGGHDSPPAPHTRDEHGRDGRDGAPLWKVVDFVDGVPDEHRAGIEAALEAAGILDAWVGPDGRLHDPVSDDVLVTPGRPAPGGGLAAVLTPAIDRDDARAARLSDTAVAAVLATIGLRGGPGPAGGSLVHGPAANGTTANGTTANRTSGTETWVTVDGRFGNGVLTGGWRKETAGYIGEGAREAARRVRLDHLRADATRIELRLEELAAAAAELADRQLSLAAEHGARPSDGDLREAHAQLATEHKAKRRIDAQHQEAAAVAARRQQAAGEARAAAEEFAGDVRLPAEPAALADVRDALGDYRAELAALWPAAESLDRSRRAATEAEHELTLALERQEQTAEAVAEAQTQADAAAERHRVLVETAGAAVDELFRKLAAVDTELDRCGQREKQARAAERDALDARGRAHGRRETLREAITTAAAEREAAVARLRAFAATGLLAVAVPDLEIPDPAAGWAPYPAITLARAVNAALDDVDDTDRRWELAQQRVSAEHKVLTDALSRHGHSVGMVVSDGVIVVDVLFQGRKQDIPALVAALETETGQRAMLLSAKEREILENHLVNEVAGALQELISDAEGQVRRINTDLAQRPTSTGMRLRLQWRVARSAPEGLGAVRDRLLRQTADAWSPAERTAVGAFLQEEINREHSADTTGGWAEQLTRALDYRDWHEFAVQRFQDGQWRPASGPASGGERVLAASVPLFAAASSFYDSSGNRHAPRLVALDEAFAGVDDDSRAKCLGLLAAFDLDVVMTSEREWGCYPQVPGLAIAQLSRRDGIDAVLVTPWRWDGHERTRVDRPVPYQPERPDQPDQPQLLDQPDQPDQPQPLRPAQSGNTEPLPFE

SEQ ID NO: 39558 - protein, 434 aa, Frankia sp. BMG5.23; identical to SEQ ID NO: 38570

SEQ ID NO: 39559 - protein, 509 aa, Sphaerotilus natans subsp. natans DSM 6575
MLTTSDHDLFRHLGADKADLYRRILAVFAAALRQYQLQLRPDEVLAQGEWAAGAVPRIEDIQAALTQLSAWGNLEAQPDMARVSSLNDYYRARFLYRLSAGGEAVEAALDVFAASLQRRAELQTVALEDITMRLQALCRLAAEGREGAVLDAAKVHETLRDLAQRFEEMTRNAQHFMAGVARQLDLRQADATAVVQYKRRLIDYLERFLGDLVRRSGTIAAHLSALESDIDSLLHAVATREARDAAPDATTDLAADRLARHQVWQGRWRGLRSWFLRQGDTPPQAELLRARARSAIPQLLGAIAALNERRSGRSDRAADFRLLAGWFADCEDDAQSHRLARAAFALHPARHLAMTVSFDAPLPASTPWHQAPPLAIQPRLRELGEAAPRGVAPPVHDRVAAREHIARQLAEESRQIEAARQRLATGQVLRLSELSAERPLEGESLDLLLSLLGEALAEQADPDQPVERLSGDGLMRIRLEPLAADSHAEIVSARGVLGGRDHLVTITPA

SEQ ID NO: 39560 - protein, 401 aa, Sphaerotilus natans subsp. natans DSM 6575
MRTALRALLMTPLMPASHADFAVVRQHAQALREWFAREAGWTLQVERDGARLYKRMADTGDATRGLPGYDRRRYALLCLACAVLERAEPQISLRQLGERLLTLAAEPALAERGWGFTLGTAGERRELVAVCRTLLGLGVLVQVAGDEDGFVRHADPTDAAAAAQHDVLYDVQRRALGGVFAAVRGPSTWPAGEAPDTLEARLQALGADVVAGGTLDSDEARRTAGRHHLARRLLDDPVVYFDTLDPDLRAYAVQQRGPMAARLSEATGLQPEQRAEGIALVDEDGRLTDTVLPGEGTDAHVALLVAGHLASREGVHRDEVIDFVRGCMAQHGRFWRKSAREPEAAPELAALALDRLERLHLITRTGEWLHPRPALSRFAPPLATAPSRPTGTDLFASPHTT

SEQ ID NO: 39561 - protein, 1400 aa, Sphaerotilus natans subsp. natans DSM 6575
MDCLFDSPAPARPALPEPRRTRWQPLRLGLVELFRYDSEEFWFRDGHLLLRGNNGTGKSKVLSLVLPFLLDAQIKSSRIEPDGDPGKKMAWNLLLGTYPRRTGYTWIEFGRRDADGTPHYLTLGAGLHAVDGRAQVESWFFLLEAARERPAPRVGQDLWLVNARRQVLARDKLREAIDGRGQVFETAQAYRLAVDQRLFGLDTERYGALMDTLIQLRQPQLSRKPDEGALSNALTEALPPLSPDLLGDVAEALQRLEEDRLELEGHEALERAVRQFQRRYGQYAATLSRRQARLPRQAQTEFDQASRASTEARERLQTARQQEAAAEAAFEQTELSVHACRARLDTLRADPTLQDANRLAIAEREARARERAAQDTQRALEALEHRMIQEASETERLAGQLNALRQACDQARREALHQASGLGLDAEHAAHPLFILDDEALATLAAPAFDAACEQLHQSVANRREAIARLMQHHEVLRQAQWQQQEHQRRRDESQAEADEAIERAARADAAVEQQAQHLTEAWHEHLHGLQALPLSPDERTSALTALADWVRDPQALAPPRRALEDARQRALQALIAQQAALDQTARTLAETRDRLDQERQRLASGEEVTPLAPAWRDPASRRDRPGAPLWQLIEFNDPVPDDARAGLEAALEASGLLDAWVSPDGQLQHDPRHDGAPWQDTQVRVMADAPMVPRAQSLAGWVRVAQVGAVEPPVAAAVVERILGGIACGGDDPGNAVAWVSPQGCFRLGALVGAHTKAAACHLGFAARLAARQRRLAEIAAEQHQLAVQQQAHAQHVQQLAVHRARADGEWRSAPADDALRQAHLEAQASSRTLAAARTRLQAAEDRCRAARQQVDAARQVLHDDATDLRLPERAEALAALREPLEQLARAQGALVRALQAARLLHPEHQRQQARQARTAQDRAERQTQWDLQRQEAEEARARWETLRDAVGAEVDALQRQIAQAEQQVQAQERALREASQSRQQAGEARAVADARAETTAQAFARSTQARAAAVAQFQRFADTGLLAVALPALPQPEGRQPWTIDPALTLARSAERDLSEVRDDDETRDRLQRQISQDLTELQGALTALGHRAQAESSDFGLVVSVLYQNRAERPDQLAARLADEIAQRRELLTANEREVLENHLQAEIAAEVQKLLKAADRQVEAINAELHKRPTSTGVRYRLRWEPLVEGSEGAPVGLETARRHLLHTNADLWSAADRRVIGTMLQQRILAERARAEAAGTGSLREQLARALDYRRWHVFRVQRWQDGQWRKLSGPASSGERALGLTVPLFAAVASFYGSGPQARAPRLVLLDEAFAGIDDAARAHCMALIHEFDLDFVITSEREWACYAELPGVSICQLLRREGVDAVLVSRWSWDGRARRREDDPDRRFEPAEA

SEQ ID NO: 39562 - protein, 408 aa, Sphaerotilus natans subsp. natans DSM 6575
MSADRERLRRVLGGEAGSGLRQRLRQRFERSPADAPPTRMRLTALAPHEHEVLVGLLGQAARHSGALQIDVLRIDEALRRAGLAASLRDALEQLDGPIVDRAAEQADLQDRWNGVVSGVAPGTGLHRLLQRPEGRGLLKRLAGAQPQRAERLLQQAQAVLARLPAQGLTRAQLAAETLGDAHALDDGQPLATLVLAGAPEAEDDPDHESRRARWARWGVLVNELARPVLHLNLPTAVAPDAGPCPGEPAYTSLRQLLRAAPVWAVEQRTVFVCENPNVVAIAADRLGRDCAPLVCTDGMPAAAQRVLLNQLRDAGACLRYHGDFDWAGLRIARQVLQGQGAEPWRFGCADYLAAVQTLPPLARDHALGLDVAEAPWDEALAAAMREQGCAVAEEAVVDLLLDDLREAA

SEQ ID NO: 39563 - protein, 496 aa, Geobacillus sp. CAMR5420
MDATWLKPIVETKYLSTENAHRYRAILRYFYIQHERMRQYLFPEEVYAFLKQHEEFADYTEDDLQQDLDQLVKWNNLIARQETSHVRTIEEFKKKRFRYQCSPYTVEIERMIRTLEQLGDSFGGSLEKTRFDRLYASLSRMEAIIASDFQEQADEMHQVWEETFDYFKKIIRNSADYIAYLHSENLEERMTSESFLVYKEQFTAYLRDFIVALQKTSMQIEQLLEDLPEEGVRQFIERVVDYERSIPRFADAPPPRAVQIEEKWETWRSLCEWFLGRDGRESELSFLQYQTNEAIRRLTRVVQRLGERHHHFRSRKGDYLHLARWFSRLESIEEAHCLSAVVFGCFHTKHLVADFGATDNIYRDVWDDPPAEWVTKPRVRHYGEKKKPQAIEDKEREKEEARLRYLEEKAREEAALRQLVTDGKIVLADLPEVTPYVRKTLLGWIAKAMGREGQAIKTENGWVVKVAAKEGTICLRAEDGELVMPNYEIHVLAGGE

SEQ ID NO: 39564 - protein, 398 aa, Geobacillus sp. CAMR5420
METAFDDKAKEALAALFEQFWIIRDQEPDLYQLIREREHVLKRYVEEKFGYRLIVHRYFAKLEKIPADPEPWMGIESFQEPLDYALFCCLMAYLEGKAVEDKFLLSDVCEEIRAMYPGDLPVDWTNYAHRRALIRVLKTAEQIGLVRRMDGEIEAFAQHAEEEALYEVPVLARYFMRTHPKDLLRYESIEELMAEEWKASPQDYRRHRLYRKLFLSPAVHRTEGDEQDFYYLRNFRHRLRDDIEAHTPFRYELYKNAAMLTLPERQAPYTTFPDQKGTSEIILHFSALVRERLQDYPPDEYGRIRLTPEQFSAWLADCRRRYGAGWGKTYRDMSAAELVREVLAALCEWRMADIERDTGMIVLYPLLGRVAGRYPDDFDAKEGEEHGESMDASSRGTD

SEQ ID NO: 39565 - protein, 1373 aa, Geobacillus sp. CAMR5420
MANPWMLHRAGLINFWYYDEQYFHFADGKLLLRGSNGAGKSVTMQSLIPVLLDGKKTPDRLDPFGSRARRMEDYLLGEKDVVNRDERTGYLFLEYKRKASDQYVTTGIGLRAKRQKSLDFWGFVIFDNRRIGHHLTLYKKEKTGEKIPLTKRELAAALGAGGTVVDTQKEYMELVNKHVFRFESLEAFQELIELLIQLRSPKLSKDFKPTVIYEILESSLPPLTDDELRHLSDTIENMDQAKQQLEQLERDERALKRLCDQYRLYNEYMIAEKAAEYVKAVKQAEQLAAEQQRLHDEEERARTTLDELEESITRLGREEDVLRAREIDLAGHEVFQQAEKYEQLKAEQQRLEERRKRHEQTIAEKERQERQHRRRLDEAEARLDDLERKLEDELEQLRMDADEGSFSLHETNEGDFHRHRQKEQEFLFAAWKQEADRHIERLEGLARLWRRHDEVKQRYEEASSEAGERQREMDEWRHQQRKWEELLEQEKERFEQAVLAWIGQGDVDISEADIQSFLQQMDSLYEQYSLDDLKRPFVQAYYDAVGKKKDEKWRLEHDIRLLEEKRAEREAELRRWREQRDPEPERDEQTTAARLALEEKGIPFVPLYAAVEFVDDVPDDVRERIESALSHAGLLDALITAREIDVACDRVLIPKPVHMAHTLADYLRPDANAPVSMERIDEVLRSIVITDADQEGGMTIDETGRYSLGLVRGHAPRGSKAAFIGRAARERWRLENIAALEAEIAAMGQEIDRLRGAHAAVEAAIQALADWLASFPADRDVRTAFDEAQEARRQAESKEREWKRQEEKAALLAREWKQIKQQLRDESAELDLAFTLDGCEQAMLAMKSYVRHLHEFEVLYRETRHTEAVIAQQREQLAVLEAEIDEAKGERNRLRDETERLALRIAEMERTLAQMGADDIRAEIARIQERLASLRREIPRLVNERARTEQQLMRLAEEREKEARREAFARELAAMWEKSFAREAALGLVDLDRSRSLLEQAKEAKQRYEAVLKETRSSLLARLNTVFFQESSNLTEYRASFEPLEEQTKPEWTAAAPDDEMAMKAADWREKQERHVIYLDYKGERATPFAVLAEVERDIVLQHEYMKEQDRELYEDVILKSVGRILRSRIQRAERWVNDMNKLMGGLDTSSGLVLSIQWKPKTAETEAELDTKELVRLLRLDPRLLREEDLQRVTNHFRSKIARARELLEERGQGSTLHQIIKEVLDYRKWFSFTLYYEKTNEPKRELTNHRFYQFSGGEKAMAMYIPLFAAAYSRYQEAGDDAPYIISLDEAFAGVDENNIRNLFGLVEQLGFNYIMNSQALWGDYDTVPALSICELVRPRNASFVTVIHYRWNGRVKQLMVNDKEWETIET

SEQ ID NO: 39566 - protein, 406 aa, Geobacillus sp. CAMR5420
MSTAKEAAAFFRSEPGFRRLFIEMKHKYESLGRVGGAVSLEAFTDEEREAVAAFFGKDVSRVSLIAFEKQLGQTRFAGVGLVELLEQYFGAPLVSNKERRQAEEEERDRFFARLTEEHHWVESVRPQRFVQTAYETDRRSLEEAIRLVSAALGRLPLPSYMRLPLFAQQVAGDPHAFDLSTLPGRLLLSALQATVPGDWDMASVESVNELLQSVGLLREDILNFVTCANILAETKDGPHPVFSAAWEANTALNMPLRDVLSLVRARPAHGGTVYIVENAGVFSTLLDTRAPLVSTNGQMNLATMKLLDLLASSGAKLYYSGDFDPEGLAMAERLQERYGQAVTLWRFSVEDYRAANPVVDLTPERLAKLASVTSTPLQPLKEEMAETKKAGYQEAIIGRLTEDING

SEQ ID NO: 39567 - protein, 518 aa, Streptomyces albulus
MRRVPPEMFRFTIGEKADLNGAVLDAFGVAGEHLETALGLDGVREQLRAVGWVADLADEELYDALKRLVGWGLLDVVHNHAEHYRTAEEYERRNLHYSLTRRGEAALAGVRHALEVLASTGALQTAVLEAITDRLDELTVLSGEPATADRRILSTLRELEGHLEALVENTKAFNGQLQRLLRAEGADLDVFREVKAATVTYLQEFLVNLDRRGEAVAEAVGRVEERGIAVLRERALRGAELPPVPGEDPAAGWLESRRARWAGLRAWFLPDDGTHPRIEQLHDIARRAIVSLLQVLERINESRRRSSSAVQDFRELARWFAAASEEDDLHRLWSAAFGLGSARHAHLAHPDPELIPSSRSWSEAPPVEVSALLRTSGRTERFTRTGKVRDVEAVRAERAERARAQRAELARAWQALELDGPVRLSSFGTLDPAVFDRLLDLLGRALATSPDASGLWRATSGDGRVEIVLAPPPDTRTAVLHTEKGTLAGPDYVVHVVAAGGTAAFPAPHTATRQEAAG

SEQ ID NO: 39568 - protein, 437 aa, Streptomyces albulus
MSTLANQLASAEREEVARAIRLLLARPLLTKAADPAGFDLVRRRRDPLARWFDYTCGWSLAVEPRRGYARLTKIRANPDGSRPARRARSGRNPFDRRRYVLLCVTAAELLSMPMTTIGMLADRVVQATAVDRALPTFDPVHKPERTAFVDVMKLLESYDVLRTVDGTTEAYVDSAEAKVLYRVDTTLLMRLPAAPVGASRLAVPPDEVPARFEDLLAGLVRERRYGGAAADGTADEPHGEAAATDAQRNLRLRHSVLRRLFDDPVLHRADLTEDELAYVASLTGRQILRRSVEQAGFLLEERSEGFLLVDPDGIATDVRFPDDSSTARVAALLLLEPLCAAPAGLLPEQLAEAGATQLRRFPSWAKAYQSEDGPARLADDAVRVLLDMGLARRAGDRVVVRPAAYRYRLTETTSPAGNNDPNDTTTSSGVPAEGDEQ

SEQ ID NO: 39569 - protein, 1385 aa, Streptomyces albulus; identical to SEQ ID NO: 39250

SEQ ID NO: 39570 - protein, 453 aa, Streptomyces albulus; identical to SEQ ID NO: 39251

SEQ ID NO: 39571 - protein, 491 aa, Exiguobacterium sp. AB2
MQPGLQKKIKEATYLTAEKAWSYRPILRYFYIQHERMCEFLYPEEIYAYLKQYTEFQEYTMDGLHQDLESLVKWGNLIASQEHRKAKTIEEYKKKSFRYQCTPYTVEFERMMIQLEQLGDSFGGSLEKTQFERLYHVLEAIAQANGKPDSECAQLWEDAMLYFRQITQNTSDYIAYIHSEKVVDKMKTEAFLVYKDRFTTYLRDFIIALQRTAMQIQDLLTSLTTNRLEPFFQQVVRHQHQAFRFEEDDMDPMIDLVEKWRNLRAWFLGTTHGESEFERLQERTNEAIRRITRIVQRMSERHQQFRSRRRDYEHLAKWFDGIETIETAHELSSVVFGVFHTRHLYGDHVPTDDMYVDVWDEAPIEHETKPRTTKFKESTKAGAIIDRSDKIAEMRRLHLKQLEEEKEAIERYIEAGVISIKTLPVIEPHVRKLLLSWLGKAMVREDRVIKTEYGRRVRVTLEEERVILRATDGTLEMPNVEYYFIDEEVTS

SEQ ID NO: 39572 - protein, 1356 aa, Exiguobacterium sp. AB2
MNRAGLLNFWYYTEETFDFSDGKLLLRGSNGSGKSVTMQSFLPVLLDGKKSPDRLDPFGSRARKMEDYLLGEKEVVDREERTGYLFIEYKKAETNQYVTTGIGLQAKRGKPLKFWGFVITDNRRINIDIELYKLDRQGTQTSKIPYSRVELERVIGDGGKVVTTQGEYMQLVNKHVFGFESIDAYEELIKLLIQLRSPKLSKDFRPTVIYEILEAALPPLSDDDLRHLSDTIEQMDQTKQQLEQLERELIALQKLSRTYDAYNERHVADLAVEYRMATEREMTEAQELENLRELQTSRAHEVETLKQLIQQLDQDKATAERQRQRLASHKVWNLEDELKKEVDALQHITADYRRQDERRAKTAQKIYDAKQRQDEEQVVHRTTLQTIDDLIDDMAYDAEQAAFDRHELNVSDYRRLNREFDFLTWKQEVGEHTERLGKVAEGMRALEETKRKLQTENKQLADEQQARDQKKHEQTDWQKTFDQDLERHLADVYRWTEEHPEFGVEGETMGHIERTLRNDYDPSTYEDVLRLVRPNVVGYQNRLREKAASKKAAERVIDTNIQNIESSLAEWKKKTDPEPDIDPMTRASREQMRADGVVFAPLYALVEFVDGVEEDVQKRIEAALMDSGMLDALVTEADVTYDRVLLPAPQMMAHTLADYLKPSPVDTGIASDRIDDVLRSILIGDGETSIGEDGTYRLGQLNGHAVPVEHVRFLGRTARQRYREAKIEQLQHEIEQLQLERVTLRGEQAELGQHIQSAEAAWEAFPSDRDLRTSHQEIQKIRFEIESLERRCRQIEDMLKQTSERFNVLKREVYTLAEPFELEKTQVAFEQAKRAMGSYKDLLLDTHREHDNAVASNKRLDTMEAALAEAEEDILELMGELNELEDKMVRVQKNIAQIEDQLAREGADDIRQQIQNVQAELERIDQNLKESSRLVTTRETQFEADKVKLDDKQHSHTLSKQMRVAWETALKAEWKRGIVSLDVDGSDPETLSRTVEAVYGKRLTNSASKADEHLSKAFIDQQNDLMEYRMRNFTEELPLEAWMQVVDERFRREVEMWQQKTTRRIISLDLRGQQASPQAVKQTVEEEFARQESVLNESDKELYEEILFKSVGTKLRSRIRRAEEWTGKMNELMESRNTSSGLTFSIKWRPRTAESEEELDTKDLVHILKQDAKLLKDEDFERITAHFRSKLSKAKRMIKEDGKGQTLLQVLREVLDYRKWFSFVLYFDRTNEPKRELTNNKFDKFSGGEKAMAMYIPLFTACYSRYKEAADTAPYIISLDEAFAGVDENNIREMFEIVEQLGFDYIMNSQILWGDYDTISSLSICELLRPKNADYVTVLHYVWDGEKRHPKEETLL

SEQ ID NO: 39573 - protein, 425 aa, Exiguobacterium sp. AB2
MKPLVDEAVHYFKASTGFSRLFEQFRKKYASLGKVGGSVSIQSFKHDELEAIARFFGEDVATIRLKKTVTLRAFEKKLQTTKFEGVTLLELLEAYFGEALVTKQEALAQMEGQRAERFRELKLTYPTLTFWFTYLEGRTADTHWINRMVETDKFDVSCEQLSQAMERLPLDYERLPVFGQRILGNPHAFDRTTDLGKLLIHALHIKRGQIGAPPSDTERVNDLLLEFKLLRDDITNFVTCANVTAEREGTEHPMWHGAAWMHSVLNVPMRELLNVDRVRPSRGHTVWIVENSGVFSSLLDDVPDAPLVCTHGQFKLAAYRLLDALVASGCQLKYAGDFDPEGLQMAARLKERYGDKLDYWCMDLESYVASEPSVELAEERLVKLDRVTDVELQDVVEEMKRRGRAGYQEALVEKMVVQLKYRRDR

SEQ ID NO: 39574 - protein, 483 aa, Rhodococcus erythropolis R138
MKLFSFTIAEKRAEYLWVLRAFDHARANYTVLLHAGAVAQILEKIGGSDPAADLSAAEVTPLLDQLHVWEILERSYDGTRAATLAEYRNRHFVYQFGQAGYQVYRSVEDVLAARLDSASLSRLALPDLLADMSELAEANRSSDGDLIFRKLKRLDSTLSDMADRAAHFYLTLGDLVRTTEITPQAFLTHKDALLTHMREFSSDLARYAPKLKEAIEHVESTGVDRMIRLAAASDERVFVPITEREDDWAARWRGLTAWFVSAESGISESERLREGTMSAIAAVLALLRRVTETRRGGVSRESQLRHLAGWFAATPSEDAAHALFQAVFDLGRPRHLSMVHPDADIISHSRSWWEAPPVEIARTLAETGRPPSPGLPSKVARNDGSIRRLREEQLAAQRTRSAAAQSLASNGVYQRELNEQETEVLLSLLNAALTARVPVVGRVKSSTGSENGVKLTLSPSDGSTTIKTARGRMHLDGIEVSVR

SEQ ID NO: 39575 - protein, 480 aa, Rhodococcus erythropolis R138
MRAREITPLALDSYQRAARVILSNHLITSTYPDRIALPLLRRWATELRDDLLELFGYRLEVTETTARLFTVSDRLNPSAPARTASERTFDRTRYAYLALCLAALGRAGNQITLSELADHVAADAAQVDGVELSTDRASDRDAFVDAVGWLGVRGAIALADGDANGWASNPEAGEALYDIDRSVVVALFRPPRALQHLHSIRGLLAADTSSAAEDDGIPVDAKEIGRRVRRALVERPVVLAGELDQHELIALAQPKTASEVELLTGLVAERRAEGIAMIDPTGRLSDVRFPSTGTIAQVALLLAGEIADRVLDVDAPELPKLPIPHVSDDHLIEQLDAAIPEAGIFEDLADEDDDFVLPAGEPAEPPEPVTYPMIDDDWLADKVTELVDQFGRTFAAQWQADHNGLRKQALGLLQRLRLTHAVDGGVLVLPVLARYRDVVVSVRERNPQIDFAVDNSAPDPVDEFGPESSTNGELSEVENV

SEQ ID NO: 39576 - protein, 1391 aa, Rhodococcus erythropolis R138
MSNARFRPTRAGIINLWDYRDQEFSFADGRLVLRGPNGSGKTKALEVLFPFVFDGRIEPRRLNPFAGEERTMKSNLLYRGQDSAHSYVWMEFCRGSLEDPESVTVGIGMRATRTNDKVTRWYFVADGRVGVDFSLIGNDDRPLTKKQLAEQLGSDSITDRPLDYRTAIDARMFGLGVQRYDQLINLILTLRRPQLAKNLDPKGLSQALTDGLRPLDDQLVLEAARSFSDMEEVGRALEGLAAADQAAQSFISVYTKYLRQQSRGEIEQVSTRLAAVTRGVAAMDESSLAQTRSREARAAAEERFNQAEQALENARANVEALQRSSAYEGKQQLDDLAQAVSTLKLSTEQQADKSRKAQAALAQRGDEADKAASSVKRAAEALSRAEDELQAAAEDAGIVWTPLPDGSRSDQITTAVRGHAEERDGDVRVVRTALATVEKAATERTRAENSSRRGQELLEASKAAVLEGEAAVELARSQCASGLRAWWTDHSSLFSAVGADTSLFEALDAALAEVGDEDAPALSAVLTEHTEAGTETLRERRREAEAEISASHASIAALKSERKAVSAEHDDAPPAFHARTDNRSDLGGAPLWQLVRFADSVEPDVATGIESALQAANLLDGWVCPDETIPDHVSEQFLTALPVKQRPKGRTLADVLEVEGNADIPDARVQDILGSISLVEAPGDSDASVAIGVDGRFWQGVARGRHVKADAEYIGTTARARRREARITEIDAALEELAAAVDAAKALVTQTNEQLSRINSAAKELPKTGSILRALKTVTESAGALRTRSEATETAQRELDAAIADLAAKEKQLRATASQHRTPHIGRELDSLAAAIRHFEKQGELALRCRREHAKEVELERESRDRLDESRANAEEFAEEAAIAEESLLQQVQRLETLRDTLGASAEQIDLDLAKARAKIEECKVEQRAARKAYDAAVLQIGTAEGAYNTAVETLRHTLTETRSDAERLAPYARPDLLELLGVKEHLSWPASSAAWMSPDQLVYRIQNEDRSEDAAHPPVLPEDVDKLYRALEAATSAVRVTDGARKATRTALTSALQDFDAQLAAAGQDYRLQWDAPDGLTVVRVQDDQGYSSIGEFATRIHDARGDQEQLLTESERRILEDALLTGLAQQIHERTVDARVLIAQMGTEMRERRMSSGNTIGVHWVLADNLDDSSRAISKLLDRDASALGVDELATLRAHFATQIRTARAAHPERSYPEILSSALDYRQWRVFSFTLISGEGKEDRLTVARHSALSGGEQSVSLHLPLFAAAHVMLDSADPHAPRLLALDEAFAGVDDNGRSELLGLSVQFDLDLFMTGYDLWITYADVPGCAHYDLAHSTAEQAVSAALLVWSNGELLAEHDGTDLARALGSPLRRRVPTPAEGALDYA

SEQ ID NO: 39577 - protein, 492 aa, Clostridium litorale DSM 5388
MEIGEKLLKQLTEAKYLCVENSWRYRSIIRFFYIEYEKMNYWLYKEDVLEALISSERFKDYTVEQCRQDLDALCEWGNLVPVQDTSKAMTIEEFKNKQFRYQLSPYSVEIERMVIRLENLKVENASLEPTLLERLKMEIEKFEMMSDKTPQQVGIWWNNLNEDFKRLNQNYQDYIRELCSIRAEELMKSREFLIFKDKFIEYIRSFVKGLQTNSYAIESVLKSVGGECERAVFDKVIEYEMSIPRIENIATEQEMMESISGRWHSIKRWFLGQGAHESEASRLFETTNDIIRKITRFACQIIDTKNSLANRKEEYKKLAEMFVSCNDIDDAHKISSLVFGLFSTRHIRGDIERQSESTSSSVYDEEALEVTIKPRVRTFREKLVRNAISENEDRKRVMREKIMAQRLQEAEILREIVNGNEIDFESIGNIEPHIRNTLLKWVAKGNSSKNRRAKTDEGASFELVYPADGRKCTLECSDGKFITPAYKIRFEG

SEQ ID NO: 39578 - protein, 384 aa, Clostridium litorale DSM 5388
MKIVDMMLENYWILKEDDKDAYYYAKDNVSKVREFFSEKLGYQVIVNPTLIKLEKLPGALECWMGIDGFEDCMEYAFLCMLLMFLEDKPGGEQFLLSQLTEYIEGVFTGDGKVDWTLYRHRRFIIKVIKFALEMGMIRLNDGSESDFASDGAAEALYENTGISVYFMRQFTGNFMSYGGIEDIMGDEWSHMDTERGRIRRNRVYRRLVMSPAVYSEGGDDSDYEYIKNFKGVVQSDIEDRLSAQLHVHKNAAFVVLPQNKGYRGVFPQNSALSDIALQMNLIIREHVNEGVLKVSNDDVIRVSQYEFKGIVEKLKRRFVKGWSKEYRDMGFEKLYGSIVEYMKSFSMIRLEEYTGDVHIMPICGKIEGNYPEDFEKAAGENDGK

SEQ ID NO: 39579 - protein, 1371 aa, Clostridium litorale DSM 5388
MMANNGEKNRWSINRAGLVNFWCYDDEAFEFEDGNILLRGANGSGKSVTMQSFVPLLLDGNKSPERLDPFGSRARKIENYLIGENDSSKQESTGYLYMEFKKKESKNFITIGMGLHAKRGKALSSWGFIINDGRRIGKDFELVKKSGGRIPLTKRELKNRIAEGGQVFESQKDYMDGVNRHLFGFDSIEDYDELIKLLIQIRTPKLSKEFKPTVIYDIMNNSLQPLSDEDLRPMSEAIENMDSIKGKLEELKLNRKAAQKLKRAYDQYNIYVALEKAKDFAKSKSELERLKEETSELERQRHGLLDVAEFEKRNLESLELKRETLEAKKRELEKHDSYELRERASRLEMDMKRLEDEKGSKEKLLDEKKSKRIVMDGEVREIKARGESFKSDISRRLLEMDGIAREFDFDEHSFMKGEIEKAFEEEYDFSFVENQLKVQCQKIHDAKIALQQQAGDIREYDRLLEKFARISGEQEQKEKKLDECALLFSEVKGEFVDNAHSWEKGNTYIKIPDAVMGEIAQMAQGYGEKFSYNEIFECMRGAYEDVRIHESRERESALARLDGIREDIGEKNGQIESWKQMKEPQMPLGDEVRENIRRLKELEIPHIPLYRAIDFEEGLAERDMGIIEEALESMGLLDALIIPDEYKVEALAVQEGMAGKYVFSSQSHAFKSRDKRIKADESLGGIIPSEIVDGLIGSIMDGNEESISFVDESGRYGIGPAEGVVSKRVNARYIGASARERFRKENIKRLESERDVLELLEKEASLDIARRDEILKSIENEKDSFPGGADMDVAHKAIIAASIELEVAQAAYEKAQAEEQDAMKRLQKSKKEVYEKTRNIQIPVNLDSYEEAVQSAREYESELSKVEVLHSKFMGAVYDISRVSNQIEDIGVDIDNLAYDFGEIERKLKWCRENIKSLKEQLELSGFEDVQKEIAQCIKELSNIPERIKDSVGKRARAEEGAKGIGEKIDANTGDIVFAQALCGIHEKGFASEINLGYVGESLSEDGLFERAVSMIKRLEGEILSQRGMNEHIKNIQEKYHDVKQYMAEYALKIDNIFTPENEYEDERLQKAEKAQERLEIQGMVGGRYIGFYDVVKHIDYQIEENDKLFKDSDRHIFEDILAKNISRKIRAKIYHSESWVKKMNSLMQSMNTSSGLSFSLAWKSRGAQDEEQMDSSDLVEILKKDGGLLLDSELERLSMHFRSKIDQVRRSIEESGQHQTFHSIMKEVLDYRKWFEFRLYYKKTNENRRELTNNAFYRFSGGEKAMAMYVPLFSAVYAKYKGARNDCPRIISLDEAFAGVDENNIRDMFRLLGELELEFIINSQVLWGDYDTVDALAICELLRPDNADFVTVLRYRWNGIQREIVDNEMQ

SEQ ID NO: 39580 - protein, 450 aa, Clostridium litorale DSM 5388
MKCSKSDDSYNGLVQKAAGYFKSSKGFDRLFEKMKDKYRSMGRIGGSVKLLDLSEEEKESLTGLLGKNCYKPRISIKLEKVQSALENTPFSGVSLVDLICEYFEEDVLTREAEKLMHERQKDEFFEEIIESFAGSSSCEWLVKALSNGDAGRRTIVKRYNADRVALRHDIQKVMHALSNLPERLGKKQRLAIFASEWGDGPHDFDRGGECDKLFMHALSDIYGEKIPQNAEERAYLLYGAGIVIDEVSNFTICSGIVGYIGEEEHEGWMGFCQRGEPLQVSVSNLGNVDSVECRFDRVFVVENPAVFSEILECSNIKSPPLVCTFGQVKLASLILLDMLSAQGTQIWYSGDFDPEGLQIAMKLKERYGKGFVFWRYASCDYEKAVSSIFIDPARMKKLGGFENTELEDIAKAIEKKGFAGYQENIVKELICDVDGLAEGNCNYAGNLEWR

SEQ ID NO: 39581 - protein, 491 aa, Bacillus azotoformans MEV2011
MKKIIEASYLTADSAAHYRTILRYFYHQHERMRDYISPEELLDYMRSIPVFTDYQEEQLHQQLAQLVKWNNLIARQDMTNAKTIEEYKKKRFRYQCTPYTVEIERMLVQLEKIGDTFQGSLERSQFDRLLQALTSLQTEIEHELKKPAEEYMRIWEDVFRYFQSIRTSTADYIAYINSEQTDQRMQTEAFLVYKNQFTTYLRDFIVSLQKTSLQIQQLLTELATVKMQHYFQRLIDHRMAIPRLEDVSTSKEDWLLEYTEYWGSLRQWFLGSTHHQSELEVLQWQTNEMIRRMTRYVQRIGERQQHFRSRKKDYLQLAKWFGESKNLNEAHKLSSVVFGSMTIKHLQLEEGTTENLHVDPWDETPTELTIKPRTTRYREKTKPGSFQTNDEKKREQRKKYLEERDQEKRIIEKYVTQGTIELSSLSTVEPFVRKVLLGWIGKSMASKDRIVKTDYGFHVKVKLKQDQMITLKAEDGDLTMPNATIVFEEMR

SEQ ID NO: 39582 - protein, 386 aa, Bacillus azotoformans MEV2011
MEQTQLFDEKAIQGMDLLFHHYWILRADQPEWYQLIREREKVLRRYISEKFGLRLIIHQHFIKLEKIPVEPESWMGIQDFQEQMDYAIFCCALSFLEGKEVDEQFLLSELCQDIQADYPSDFPLDWTVFTHRKSLIRAIKVLLDFQLIRTIDGDIGRFDHNEEQEVLYEATVYSRYFMRTYPDDFSNYEYWEELLHDDWKLNQEDERRKRVYRKLFFSPGLQRQDQQDQDFLYIRNFRNRLAEDIEKHSDYKLHVFKNTAFLSISEARQYHQLFPNTKASTDLILQLSSYFHRNLQRFQPNENGELLVTIGEFEQIIDDLRNQYGTGWAKYFRDMGSNAICSELISAMNDWMMVEEDFSFIRIRPLVGIIIGKYPADFKGGEKIDD

SEQ ID NO: 39583 - protein, 1380 aa, Bacillus azotoformans MEV2011
MTESRWIMHRAGLLNFWYYDDEIFQFSEGKLLLRGTNGSGKSVTMQSFLPVLLDGKKSPDRLDPFGSKARRMEDYLLGEKEVVDRDERTGYLFLEYKKAGVERYITTGIGMQAKRNKGIKSWYFVITDNRRIGYDLELAHNQLGDRVPFSAKELENRIGQGGYVVHSQREYMELVNKYIFGFQSLEAYEDLIKLLIQLRSPKLSKDFKPTVIYEILESALPPLTDDELRHLSDTIENMDQTEQQLEQLEREFESSSRLVKQYDLYNQYILAERSGLWLNANKRKEDAGNEVERLHALEKQFQAEIEQLKADKNRFTLQKGVAEAEKERLQNHEVWKLEKEITKKRELVEQLRQEIKLLDDRWNNKNEQYRKTRNDKDKTEDELGVQQKEISEILEELRLDAEESAFQQHSVNAEDFDRHQQTEFDFSVWIKEIGEHERLLTALQQLVDEQSRLLEEYSRLERQSSEKKKEIDEVRKNLDHLEEWFTEVKQKLEHLVFTWIEQHPKLVFSPEQIQEISRAIEGLYEENRYDLVREKLFHVLNDYIAQLKTDKKLTENAIQAKVKEIEEAKAELHHWKSLKMPNPDRAKDTDESRLKLTEEGQAFLPFYAAVEFQDHVTEEQKERIEAALKQTGLLDSLITEQSLSPIHDRMLRTKPVVLGYTLADYLRPDLDDDSPISKKVVDEVLRSISLESQDGGFHIDVDGTYSIGCMIGHAPNEGPSKFIGRSSRKRYQLEKVKEWEQQIEELESHLEQLKMELRAFDQALNDAEEWKQTIPTDVDLNDINIQIEKDYRLLEQLKESLQKLDDQWKIVHQRLEKIKLQLHQQKGQLNLSLTKEVITEAIEAAIHYREHVHKLNRIYEKCLFGRKRIQDLTNRLIELEEEMDEIKGEQNSKEGQSNKEKAEIASIEQQLQLKGIDDIRSRIQEVQHLLTEADKEMNQILQSLPRKETDRDTCLKDLETAKTGFEFWSNMAIEWENLVKTETMRGFIKLEGDFSDPVNLVAQLEGIAAKFDRSKLNEQLTKTFFNEQAFLTEYRMFEFPEEAERPEWFSRDWGVYYEPFINEWNQYKSRRLIQMEYKGQRVSPYHVFNSLEKELADQKGWLDEQDRQLYEDIIVNTVGSILRNRIQRAEKWVREMDKIMEARDNSSGLTFSISWKPLTAESEQELDTKDLVKLLQRNSKFLNEEDLNHITKHFRSRITKAKELIQLRNEGSTLHQVLKEVLDYRKWFTFVLSYKRVNEPKRELTNNAFFKFSGGEKAMAMYIPLFTAAYSRYKEAAAMAPYIISLDEAFAGVDENNIRDMFEVVEQLGFNYIMNSQALWGDYDTISSLAICELVRPKNADFVTVIRYLWDGKKRSLVWDEMMNDDGAGEEFVEELITNE

SEQ ID NO: 39584 - protein, 427 aa, Bacillus azotoformans MEV2011
MSKSVQVFRNEPGFIKLFILFKEKYRSLGRVGGTVSILSFTEEEMEAIAGFMGLPAYGLLEKGKVALLDFEKALLHTPFADFSLIQLMEEVLGETILTKNEEHEFDREKTNDFFNTLQTVLPEGIWWWDWIKSKQPDTRWIWSLYKQNSNQLMEYLLNVFRAFLELPKNNSFERLPLFAQRTTGNPHYFDQDQTAGKLLIHCMYVDQLQNDGGILEQGMPKSSEEVNELFAQYGLMKDDLWSFVTCNGLLAEDENGIHPVWQAASSTNTVLNVPIKELLKVNKIRPVNGNKVWVVENSGVCSTIIDEVPSAPIICTHGQFRSASWVAMDLLVGCGYSIYYSGDLDPEGISMAQRLKNRYPNNVTLWRMDKESYVQALSEEDVTSRLAKIEVINLPELEEIVYLIKHYKKAAYQEGFITLLIQDILET

SEQ ID NO: 39585 - protein, 540 aa, Saccharopolyspora rectivirgula
MTAPDHQADALRAETAGALSAEPSPAEQPADEEARLQLFSYLQAPERRTYLAIMRLFTSTLLADLSAGEVAAALADVEREGRIAPGESNPETVIDRLKQLVKWGNLVVGRRETIASSIAEFQHGSVRYQVSKLAVRVQREVDVLLRVPEGAREVSRELLPAIDRGLRSISTQLSEVLAAEQRDPRARSVQRAREQLAGQVTTVFLQHTELAATVRDFYAYLGQVVNRHQLAPDEISGFRNLLVEYIQMVVEDVLRHTESLARSLTDLAGRRDELLRQLGPAEQLGGEVERARGRSAADWQELTDWFVDSPGRPSQVSALREATARAIGALLASVKRATAGSVLAPSRRGELLKLAKWFDEATPERAEQLYAAAFGLHSARHLFPAPEYDADNEDVPWRDGPVQEVSVSVRARSDRSGRGKTSRVLDDPMTEVALRDRAREADRRRSAAFAELAAAASRLPQTRLSADALEVFCELLTLAMAAREQQTGTGSAFDPVHRVRLTVSHAPGTATEVRSAAGSLTLQDTAVRISGEDVSTGVAG

SEQ ID NO: 39586 - protein, 397 aa, Saccharopolyspora rectivirgula
MSLQFDGLSNIDQANVVHCARVLLRRPLLRPDGPEGDLLPLVYRHRSVLQEMFAHLLGYRLVVERRFARLCKTGPAGGPSRGEPGLSPRGHAYVALTLAALTGAGRQVLLSRLVSDIRAAAAEAGIEVVDDQTDRRALTAALRHLVALGVIAETEGTVSADSQEEALITVNTDLLGQLLVGPLGEAGSPVELVELAAGQGSAEQAVRRRLVEDPVVLYQDLPAEQAAWLRKHGERESATLERYFNLVTEFRAEGVLVTDPESYLTDLVFPGASTVSRITLLALPELLSRTQPRPDGKHPINRRLLDEVCQQLVAAYPAAWARQATQDPEQLVDEVVDLLDRTGLLSREGEQWLLSPVAHRWRPHPDAAAAPPEAERPPKPAPQPRSLFDTTDEDGQR

SEQ ID NO: 39587 - protein, 1356 aa, Saccharopolyspora rectivirgula
MTARWRLHRGGIVNIWQYAETEFDFSGGRAIFQGTNGSGKSRTLELLLPLCLDGDLRQMGSKGFDTVSIRRLMLDEYPGTQPNRIGYAWIELHRTAEDGGDEFLTCGIGVKASRTAQAISDSWRFITSRRVGVDLHLADEDRYPLSAAALREELGPECVLDDEAFRAKVASVVYGVPAERYSDLLHLQRTLRNPDVGLRVQNQQLEQILSDALPPLDSSLIERLATSFDDLESIRENIVRLSGADEALRRFLACYSDYALGSLQERAGKMRKADERLSALRGELAELQRKLATEQEQAAEAQRTVAELEQREAELETSIEALRSHPAYGELQNLRDRERLVESTRAAALSALDTASKHRAQEHRSAEAVVNVLRRLVTDNQAAANAASRTAGQLDAAGLDSSLVPAPPAPPNAELRVKTERVRTSPNPDAEPVTIERYLVPQLDTDGFAQQYRALLDNYDQVAALARQQAALTLTLHQQAQELDAEHSRIGELHRAARQAQLAATEESGRRHQARQQLREAAAAWAARAADWAHDWPGEAEPPEPPAPEQLVADRNATRYARDDVRLWARPQLQQARRRAAQLEQELAALEADREQHQRELAELQAGGERVPGRPEWATADRDPERGRAFYQLVDFQPGLEEAERAGLEAALQASGLLNAWVSADGEVTGVPDLFAAPRAAASGGTLADLLVPAADADNPVPQERVAELLRAVSTDGSGTFSVSTSGRWRSGVLSGQWRKSTAEFIGAGARHAARQRRIAELEDELERLNADIAAAEQRHREAGEHALALERHLDSYPDDNELLTAHVQLASAVDAAEAAEQQAAELREQHEQARQRWQAAHADLVRAAGEAGLPAETQLLQAANRAANDALTCLDLLREAVETRCLPTVAELRDICLHHDVAVADRMEAESQAEQRCAEYAEQAAALAELTAAVDGEAKDITERVSSYEQERADLRRRLPKARQELTKLQVSAGKLENRLDDRQAALEERQSLASAASEEFRRALRLPGFWRACGLGDEVPDDLVKAGELVLDAPQRSTSWGKVANEQQVLQQALAGNYDIAVTEVDGLFAVTITGEEGPQPVAEAADRVSTRLAELRGYLNERYQEIFADYLIRDLTERLREQLRVARDLCRRMNEVLEGARSSQGVHVQLEWRPSPSLSDDVRQAIELVRIPFAERSEEQDAVLRRVFTQLIEAQRDSASGGYAELLARALDYRSWYSFNVRVRDTGPDGKPRVRRLRQLSSGETRLVSYVTLFAAAAAFYDAVSASSDGRGPLRLVLLDEAFERLDDPTIARMLGLLVDLDMDWVITWPSGWGISPKIPKMHIFDILRPSSGPGIACTHTVWNGSGLTTAES

SEQ ID NO: 39588 - protein, 500 aa, Paenibacillus polymyxa
MSIFSRLDQFTYLVAHQRTDRYRPIARVLYEHHRTFRSMLTTEDIYTALRQMDEFVERFPDYSIEDLEMDLGTMKEWGNIEISQQENVKYVAYEDFKRKKHLIRATDALIDIEEMIAMMERRANRVRGSLEKNLAARIIEELDRFKSAMTKEPSELYNLWNEIMGRHDRLRIDTSDYLSHVNSNDMEAAYLSDQFLEQKNKFVSYLDEFVRDIQKQQVRILKKLMSVSKDYIEDVIYLIVDYEINRIQLPTLEDTDQEERVELHKKQWQSMINWFANESSQEGGYYFLMEQTKNAISKVLRLSRQVSDRLFHYTNRKHDFLHLATLFFKANNDEECKELFGYIKGIGPASQMIITDIQTSDSETKTVWELPAEQVELIPRKKRDFVKRVKSTLFEDPLERKRIELEHKEQEERLRRELEAISLNGRIRIRDLDEISPALRDTLLYMETEGLRNYDIAYLPDGREFRTFVASEDRIKMKCTDGELTMDDIEIVLEDGVAGE

SEQ ID NO: 39589 - protein, 402 aa, Paenibacillus polymyxa
MSNAEALTEEIQTLVFLLWSEEWIYREHKPELYFRIRSHEHKLIAVFWDWFHYPIYMGDGYVRLIKRPERRVLDPNPTHSLKYQMDFVLYACVLAFMEEKGEDQQFVLRELLESIKAYYPGGPDAISWSDHGVRTSLIRVIKTLEQERLLLMFDRTIDQFRDSEDYDLLMQVSNGLRHVIRQTRVSLSEFSNMTSLREALHQEEIEEGMMCEQQIWRRLFAQGCLFLSELSHDEVIYAERHGLRMQQKLEEVFQGVFLERYASTWILVHDKLREGKSVYPAYNTHSHIVTAIGTHLRDRLDRGENWLNHRGYVALHAKDAFDLFVSVRRANQEHLAKSSLSDRALWEEVADYMKQLGLLKVINHEWIFSDALGRVAGEIVEEEVPPKEDLKRELETDQNWLF

SEQ ID NO: 39590 - protein, 1341 aa, Paenibacillus polymyxa
MSWKPTRIGYFNVWYHADTEIELSDGKLFIRGDNASGKTIASTLMLPLLLDGNYNPSRLDPQKRTDRLLIDLHLGEEAVNQKKDGNGYLYMEFRKGEQFLTIGMGLSGIRKSRDLTTWYFIVTNGKQIGKDLLLYDQTRDGKTPLDYRDFCDRFKGSFITEHKTEYAKEVNRLLFGFKNMHTFHMYIKLLIELRPPKISKDVGPSIINTSLTDALPELSDNDLESLTNIVSKITEQEELLTKTTSEVEALKKLSAAYEAYQFALFFEFAEHVSRASRLFESEQSRLVTKENDLQEMTQRQSDAKKRIEESEQQITALEVTVNTLKEAHQDVFKAEEKKREVESQFGEVKERLSQKETQLRNFKTDVHKNEQAVDEAVQNELQIKDEIQGILDYLTEYEASIKFDYHDRFVSQFSTTADQISLIAAWKEEINRYIARLKEIEENLRRYQEQEAKTMQKRTEFENKLEAYNASIVEIDSLYKQLQKFRVELFERIENWSAVQGLSIETREWEALQGILSDLYEYGEDEEKFHSWKQNVLESREEPFRIQKREAEYHIQRLTGEIKKVQIEYEQVLSAPFVEPPEQKEERLQWNGLDELQIPYIRFFEAVEFKDAVSDHIRKRVESVIQRSGLLQAVIVPKEYEAKASDQAVVLRTLAPKSKHLGDLMEPVPSNRIGTKTIERVLQGISVDENQEGYIGEDGVFRSGFLEGTAPGCSESYVGLRAREEARQRRLLILREQLDELEQNLSDQSRELRAAQAKIDELRRTWIKIPSTQEIKDVYREQDVEKRNAKRRESEKEEAYSHYESIRRETLNVRNQVMRLIGDMDLPLRLDVCSHTLEQCRKYKEEIMAIGVLAEKRIEVERGIVQTRGHLCSLESIVKGYQEDYDELSYEQSKLEKTIQRLQEAMDSNSDVFKQIEKANLQLNDAKEGQRQAEQVFNQLTPQIDNAKKEIEKLQTAVLQASERESMWYKEFRKLQTINSPFSSNTADQMLERGSKSVANREEALEHLLEVESEVRGDLKDYRLRRQRAQPWNGESEVKESIGRTDADALTRLTSYSTLSLQSNSGVPCSPLELLQELSDIELKLKQNIGEKEKELFTDIIINEIGRTIQARIYEAGQWVNDVNERFHEFEGLRIRLDWNAKDAVEDDTLKTKQLVDLLSRNSRFIDPSDLEKVAAHFRTRIEAVQQRTKKDFRMTRLEAYKEVLDYRKWFIFETKVDKGAGPEKVGNRNFGRYSNGQKAIILYMPLLAAIDAILMSASDTAPRLITLDEAFAGVDSSNKEKMFNMIQDFGFDYIMNSYDLWGCYRSVKSLSIVTILRQPSSPHMGFRRYHWNGKRQVEVE

SEQ ID NO: 39591 - protein, 706 aa, Paenibacillus polymyxa
MESSLMELVQIFRTEKGFSSLFTLFRDKYRSYGKIGRSTKVVLSDLSPHELQTLEGFFGEIYRNDKPIMITAAKFERAIMKTKYKNSFEGLDMNDLLQVYFSGTLTSKSEDKHNFEKEKELFFQTFLSQSKEGSPFYRFVLFITNYRKNAFIHSIYKENPNLLKQLLNLMKKMFDHLPLGNNIFLPLLAYKLTDDFHALAPNSDGGKMMLFALQVLNHLDNGEDIISKPDEEQIKHILNGHRILFCSQSNKLARRLWILEDQNGEEQKDQLIPLEKVGSGGFAEVYRVFDSIEKKEMACKILFEKSVFLREYGKEGEDYLLRFKREIKLLRERISHANIIKIDKIKLDNDPVLFTMPLADTSLEKWLELNPTASDETKLGIFKDILCGVSYLHNYKISHRDLAPHNILLFSNSDGTILAKVADFGLAKDDQSLSSITRLSNMSYGRAAFTAPEQKISLKNADSLSDIYSLGAIMYFIFSGESPEQRFRSFIKYQPIVGKAMEEDRSNRYQTVQELMDDLINSSAQSNYLFDSLRTYEFQDFSFDVKQVLKCMSAVKIEESQEVVEKFVRPFLSIPIDVLMECAKHETIMVPFINVAKENIYRVVDCNEVDWVHLSELLNGIYKISQNLVVQISTLYLIIIAALEKKIPLAQAIMVDIIGNLAGQDRISQQIAHIIGEEFLTSHDLLISLLKDTHYPSDIRFVLNDY

SEQ ID NO: 39592 - protein, 513 aa, Paenibacillus polymyxa
MRKIPDLQSLRGVPELKYVNADNVTRYRAIMRLIYQQYQKLNYWLKPEFIYEELMKWKLHKNYTLEQCQIDLNQLVEWGNLTAQHDGGERVVTVEEYLRKKFRYLLTPYSIEIERMLESLESIRGYGGSLEPTLFDKIADTLNKVSGNAGIYEPGEALEYWKTLFNVFQTLHETSVDYIASLQTGMAEELMTTDTFLLYKDSITHYLQDFIQALQRRSYKIEAKLHRITTGVREIFFSAVMEDEWLIPKLEQSISKEEYLSELQDKWSSLNRWFLGDEESISDSVLLERATKEAIVKVVKSAVRIQEKKRSSISRKKDLDHLGKWFYNINELNTSHKLAAYAFGLFPSRHLQGEDIRGSDSKEMSMWQETSISKTIRSRSRKKNERQDSDAAIDNSKLKKQFREAFLIKQKQELQFLIQMVNARTINIAELGPISSITRLQLLDWISRCNASSTSSIQTSEGVQIEMSTPLGNNRTLLRCEDGTLELLNHNFVFTVMIHKAWEGQVAWLSAQQ

SEQ ID NO: 39593 - protein, 393 aa, Paenibacillus polymyxa
MNRTGPNEIEERKQICMNALLNRSWIDKHEDEELYYWIKEQYFELRDWFTNYTGYTIIMNRHFVKLEKVPAVAFPWMGFSEFSKPLDYALFTYSLWYLENKTENEQFLLTQLVIEIRQHMIEQEMEVDWGIYYHRLSMARALKKLKSLKIVQAVDGEESNWVNDTAHHDVLYECTPYSRYILRNFPVELSSFTNMEDLKETIIYGLDTKEKALQQKHNLYRRFLLEPILLNHQWQGDISYLRKESKELVSQFKIMFGWEGSQYREGIIFFEPHVTSESDTFPTQPALSDLAMLVCGEIRSMVTDPVTRMEVELDGLVRLTKHEIERILIQLKAEHGEFWTNEHKNMDSAELAEELCNHLEEWGFGHWEDHIFFVLNGAGGRWEVKYGITEQVD

SEQ ID NO: 39594 - protein, 1367 aa, Paenibacillus polymyxa
MDRWHMSRAGIFNFWYYDEEEFHFDEGRLILRGTNGSGKSVTMQSLIPLVLDGDKRPQRLDPFGSRDRRLEYYLLGDGNEGHTDRTGYLWLEFYHPVKKIYKTIGIGLRARRAVTVIGFWGFLLEDNRRIGEDFYLYDYNLWLEEGKKVPLNRKSLEEQIASGGQVVQGQGAYQEMVNKALFGFREIESYKDLLKLLLELRSPKLSKDFKPSSIYEILNNSLPPLMEEDLSSLSDVLEEMDQITDRLDELLLYLEEISRIEKSYNSYNQFLLQQASTDVIQKWKAYNKNNNQVEHIQTELKQLEEDRQRVVRQLDDYHQRLGIVEMELETLNQGEAVGKQRELELVEEQLKEVHKQLQSLAHRLKTNEDKLERLKKEILKLNNSLNQIVNEQDETISELEDIARIIEFHEHDIYHGLWNRAIPEEERWHKSWLQDLEAHKKKLALAQQTAREEGEASRAAKEMEIQLGEVHKERHRAEGEQAKQAEHVESTKEGMRELLVRWYQELKHIPAQGEQLRESLRALTSLTTHNRQYEPIRQPAVQAYEQKKEAIMQQKVQLNQERLSVQAETTRLEEELNQWRVTREPEPRRTDNRDSARKQRGTGRGAPLYTVCEFNENLTDIQQAQLEETLDQAGLLDAWILPGGQVGVLDQEHNEEVWFQPVNQIKGTTLSSVLYATPTEKSGLSTEDITSALNSIGWNQQIEQSTTRIETAGAFIAETGEFKLGPISGKNSSKSRSEFIGEANRLRTKELEMAKLQAEIQYTNEQLQVISQQLELLTQHQQEMDIEFGTFPQDLELQKQLESLMKITFRLEQFMIQEQKVEERYKKKVSDWRELQLRLTEQTAEWSLLKKEHQITEAIELSSAYQSRISDLYSYWEQHRSTLRLKDNQEEQQAELLILVEGDQMDVRDREDQRVRMTAQVDLLKELVKSMGIEEIHERITRYKEERNTIKHNVVQLQNDKEQKYKILGEVSTTLKNEEEKLNKIQSELDDVIALWKMEITLALLPIWKTFIGQIEAETSILEIVKCCEQITKEYANLFTNLTRERMVNDLTQEFHKGKTNLQDYVLEMDHGGGNSSRIILLSKRDRMNPMTPTAVLHELTQQIEEQQILLTAKDRNLYEEIIIGSVGKAIRNRIHRARSWVDEMDQLMKQRNTSSGLKLSLKWEPLERGSDNELDTTDLVDLLMLDANRMDDEQIEQVITHFRTKISRAKEEAQKEDEVLRKYIYSQLDYRSWFQFKLEHLKGERTNYTELTDRKFNVLSGGEKAMAMYIPLFVASYSRYSDADTDAPKIISLDEAFAGVDDANMRDMFHLLTDMGFDYIMTSQVLWGCYDTVPNLAIYEIHRPKDTDIVTLFHYRWDGESKILMD

SEQ ID NO: 39595 - protein, 472 aa, Paenibacillus polymyxa
MELANRKTAKQYYADPSFENLLTTVFNKYQGLNGVKGNARIIVKTVAEAERLQDYFGYRTRRLIRPGSEVEVHLKIFAEELERGYKLTIPDLYDVLYGKQLLTRHEQKELKLTAWMDLFTKVRQDFKREFNIFEAEIQTFNQKTFNWFSRLQAGDAKGYGVLRSTFNKGENAYSDLLDCLSALWHLLIKKKEMFAERGVSTEKITLPAFAAHVTQDSHAFDKKRSLGRLLGHALYDIDMRRVLANETLESDRTVVPEYLLERQVYRNFGVKDDDLSSISHVFVPNLIKGTSPRTLNLREIEEMEHLPRYSTLYIVENPSAISHLADETIHFLNKNGLSLEQLPESFPALICTIGQARTASKLFIDKCLVSNPDCVIYYSGDLDWHGLQMMHGIEGQFTVQFHAWRMDVSIYRKYISTRSVALSHEDLKNLGQSNDVLEQEMVKVGAKKVYQELFGKELREDFIEVIHEAVRV

SEQ ID NO: 39596 - protein, 499 aa, Tumebacillus flagellatus
MSEQVGKNISEFSYLTANQNTSRYRSIMRFFYTQYQKMNFWISPEEVWQGVLSYGQIQNYDLEECQRDLNALVGWKNLTEQHDGSRANSIEEYLKRRFRYMMTPYAIEIERLVIQLEGITGYGGSLQPSKLQELVRNVRRIRFWQEAETDSSAEELWDNLTMIFRELNEEAADFIASLNSKKSEELFSTDVFLLYKDKVVGYLQNFIQVLQGTAPEIAHWLKQSRLDPLSTTRFLQQVTQAKLAIPNLEDMQTEEEWRARIEGQWESIERWFINDERESSNANRLEQMTKDTIYKLVRAAVRIQEQGRRGISRRQELEIIGNWFFSLEELDEAHRLAAFAFGLYETRHYYGGHDDRPYLAETSIWDATPMERELQPRGHQHKQRAHAPQPVVKRKNNATSMHAYLQKKQQEDELLHRFLERGLLTISELEQVTVLERQQILAWISRCLSTKNKQFQTPNGVTVSVVGIPNPEQRVMLHCEDGDLEMPDFTLYFRKDDSA

SEQ ID NO: 39597 - protein, 393 aa, Tumebacillus flagellatus
MSEADKQKLPQAERKREERAELAQVLLNRPWVLKSEHPDLYAKLRDHYEPLRQWFQEKCGFTLLQTRELIKLEKVPGVAQPWMGFAEFSQVMDYGLFTYCLWYLESKGETEQFSLTELVEEVKGKVKLTGHYFDEGIYTHRLSLKRALKKLREIGALNAVDGDEEEWVHHHEDERKNVLYECTYITRFVLRRFVQDISSFTEISQLGEGVYPESQQGENDRRRHYIFRRYVQEPAVLDDQWTEDDRKYVLTQRSYILNQMQTIGLDGSRYKEALLFCYPYPKSEMELFPTAQSISDLVLLLTGEIQDQLRDASGSVHLTRSDLEGILTRLKEAHQTYWSKKDREAKIGELAEELLTHMEEWGLARRIDSQQLCLTPVLGRWKGFYKKNGVEKL

SEQ ID NO: 39598 - protein, 1361 aa, Tumebacillus flagellatus
MNRWQLSRAGIFNFWYYDEQEFHLQSGRILFRGANGAGKSVTMQSFLPLVLDGDTRPFRLDPFGSRDRKIEYYLLGEDGEHTDRTGYLWMEFYLAQQDRYQTIGIGLRARRGKSQLDFWGFALTDGRRIGRDFHLYQNDYAQGEEARIPLDWKALRDRIGAGGQVVQERKEYRRLVNKLLFKYDNVKHFQEMLDLLIQLRSPKLSKDFKPTTIYEILNSGLPPLQEEELRPLAEVLESIDQIGDRKQELELHVHFAKHLADAYGKYNQFQLYQTAHQVIQTDGERAEAEHNIQKKQAQSEQQSQELEQVNTEIETSLQTERTARAEIGILEQDEAFEKERELENKREQQKRVQEEMNKTQTRLEMWQNRYAAVDKRMRAQIEKRDQHASKQQDLLLDLEALARDVEFRYHDVFHGRFSREIPDDALLFDSWKRGIDDHEQALKEALECARQHQQAKKQVQDQERELGIATERRDHAEASLQAAESQLLHTKEEQQAKLFTWRKEARIFKLEDAEMTRVLHLLSSFPEVAYEEITAAAQERSGTLYQSIWQERAQAEAEKGRLVAAEQEKQREIQTWKNQREPEPPRSASREQTRGTYADRNITGVPLYAACEFHPQVREELRAVLETVLQETGLLDAWIGGNSLQVTREDEEFWVQAAPLDFGYTLADFLKPTPPEDRSVTAEQIDSLLRSIEVGEPLTASERVVISVDGQFRMGTLAGKVRPKSRAEYIGKESRRQTRMAMISRLEQEILELKACIERQDQVLRFLQERESALSLDLAAFPSGAELMAARNALQTAKDRWSMAVEELERKNTSCKAAMQVESGIRQRLHVLTQEYTSLKDEARLKMAVDQFRTYLNDFFELRSQWNQYVQVQKSIVRDEQELKEAGEQVENEREHLDEYLRQSREVEAVIQAFENTLKEMGVAEKYRQLTQLRELAARMSAQARELGDRKSDLTVDLRTSARELQSLQDELQKITVKLQARLQEWRYERSLQLVSIWREQPLLESTEEDVKLCHRMYQTYKSSFENRRSEGVLNSLFTVVNEVRSHLHDYVLEMEADPNTNSRQLIRFNYDRKHPVTPEYLLFELEKMLEEQNVLLSDKEKELLEKVLIQSVGVSIREKIQRAEEWVKEMNELMRQRQTSSGLQLQLKWEPRPKRSESEMDTSELVALLRVDYEHLTEEKREQIHAHFQDKIKTAKQEAENYQSLRQVIHEFLDYRDWYRFKLRFKKGDRVDYRDLSDSSFNVMSGGEKAMSMYIPLFAAVSSRYKGSSPESPQVISLDEAFAGVDEENVRDMFGLLTQMGFDYMMTSQVLWGCFDTVPGLAIYEIVRPKDADEVIAISYVWNGRERIVNFDGLEQNLAG

SEQ ID NO: 39599 - protein, 428 aa, Tumebacillus flagellatus
MQREKEIREHFLQTGYQRLFEQARRKWESIGRVGGTITIKSLREEERRRLSGLFGKSYQTGGTTEIRLMELDQILRSSRWAVGVEELLALLTGQPLVSNKQRKERRTNAWDTFCDDLLKGCKRQETRSWWKQVNAGDVAGSKAVKMLFESDRQRAQTAARLCLRALDELPQWSGRRERLPVFANRLSGDPHALDAETPSGRWLYLALCDLFGIRFDSAAEWKREVFQEAGILADEVASYVTVLGMGTLPDDPWHTFFEQAVSARIPLLLPLAFFQQKVTWRETKRLYVVENPSVFQSLIDEFPQEERLPPLVCTSGQPSVAALRLLDAFAATGTTLYYSGDFDWKGIEIACSLQTRYRESFVAWRMSKEEYLSCSVGTPFEEEQARGVLSLEVPWDEELVRTMMQHKRNVYQESLLELLLEDLTAVNA

SEQ ID NO: 39600 - protein, 666 aa, Frankia sp. CeD
  MOD_RES (17)..(17): Any amino acid
  MOD_RES (509)..(510): Any amino acid
MLVQACQTRPSLQPPTXPQTPVFPSSVTGSRSPAVHAVAWWAILGGVTSDGQTGPAAGGDAPPRQPFAHLSAPNADVYREVLTTFARARDRFIVHMRPEDVIADLGRPGQTESIVAALDKLVEWGNLRADPDTGRVTTVADFHRARYLYQLTPAGQAAEEAIAVYEVAIGRRGALQSVALEDIAAQLRALVEMTAGDAADLDPAKVHLLLLGLAERFTGLADNAQAFMTSLRRVIDFSDGDVDAFLAYKQRLIDYINRFIAELANRGAEIATLLGQVEGAGVERLLLLAARREATDAVPDVPEVSGSGASGSGASGSGASGSGASDSGRTGAGRTDAERIRTAYDAAVAAALDGWRNRWRGLHDWFVSADSRRPSQARLLRGAAITAITQLIDTVAALNERRTGRSDRSADFRTLARWFAEAPDDAAAHRLWRAAFGLASARHLTVSQETVAAWQEDEPTPNTPWQDAPPMRISPQLRRTGSYERRGTPNRVTDRARQRRLLAEQAARXXEQAASARARLATDGPVLLSQLGVLDRQAFRLFLGLLGDALAARLAGDTEVETTSSDGTVLIRLTLVPGGGVARIETEDGVLDGPEHTVEIVDLAGAASRPAAWNDLNDLNDWSDSNDRNDRNRQNDLNGRMDGLAPVVLAGGPDRLELLETGRVSG

SEQ ID NO: 39601 - protein, 422 aa, Frankia sp. CeD; identical to SEQ ID NO: 38568

SEQ ID NO: 39602 - protein, 1443 aa, Frankia sp. CeD
  MOD_RES (1063)..(1063): Any amino acid
MSTSTRMPATPAPASIPAPAPASASIPVPAREDRWQPLRAGLVDLFYYDVEEFHFHDGRLLLRGNNGTGKSKVLALTLPFLLDGELAAHRVEPDGDRNKRMEWNLLLGGRHPHPERLGYTWLEFGRLGGDGIPEYRTIGAGLKAVSGRGIVRHWFFVTRQRIGPQLSLVSPTRVPLTRDKLKEAVDGHGAVYDTASDYRRAVDEALFGLGGHRYEALVNLLIQLRQPQLSKKPDEKLLSRALTEALPPLDPALVVIVAEAFRGLDEERETLRALAEAETAAQAFLTHYRRYARVAAKRYAAPPRQAHSRYEQHGRDLAEADAAHQAAVEALTAAQQALTEVEEAKATLTARRDALRDSPEMRDAAALRGAEEDAGRLARFAAQRERDSRAAAEAAGDRKRRLTGAERTVQADAAGFDAAVRAAGLAAEAALVTGRHAAVLTELDGGEPPYRDARRSAEALVGQQGTAVNRLDGLLRAAADAGVALRAARDDLDRITAEQQAAAERIAAAEDLTAQRGAGLVVACTAYLAGCAYLRPADPDAALAALAGWVDTLDGSNPVATAVDGAARLATADLGRRQAVLDGEQTAARRELERLAEEIERLAAGGHDSPPAPHTRDEHGRDGRDGAPLWKVVDFVDGVPDEHRAGIEAALEAAGILDAWVGPDGRLHDPVSDDVLVTPGRPAPGGGLAAVLTPAIDRDDARAARLSDTAVAAVLATIGLRGGPGPAGGSLVHGPAANGTTANGTTANRTSGTETWVTVDGRFGNGVLTGGWRKETAGYIGEGAREAARRVRLDHLRADATRIELRLEELAAAAAELADRQLSLAAEHGARPSDGDLREAHAQLATEHKAKRRIDAQHQEAAAVAARRQQAAGEARAAAEEFAGDVRLPAEPAALADVRDALGDYRAELAALWPAAESLDRSRRAATEAEHELTLALERQEQTAEAVAEAQMQADAAAERHRVLVETAGAAVDELFRKLAAVDTELDRCGQREKQARAAERDALDARGRAHGRRETLREAITTAAAEREAAVARLRAFAATGLLAVAVPDLEIPDPAAGWAPXPAITLARAVNAALDDVDDTDRRWELAQQRVSAEHKVLTDALSRHGHSVGMVVSDGVIVVDVLFQGRKQDIPALVAALETETGQRAMLLSAKEREILENHLVNEVAGALQELISDAEGQVRRINTDLAQRPTSTGMRLRLQWRVARSAPEGLGAVRDRLLRQTADAWSPAERTAVGAFLQEEINREHSADTTGGWAEQLTRALDYRDWHEFAVQRFQDGQWRPASGPASGGERVLAASVPLFAAASSFYDSSGNRHAPRLVALDEAFAGVDDDSRAKCLGLLAAFDLDVVMTSEREWGCYPQVPGLAIAQLSRRDGIDAVLVTPWRWDGHERTRVDRPVPYQPERPDQPDQPQLLDQPDQPDQPQPLRPAQSGNTEPLPFE

SEQ ID NO: 39603 - protein, 434 aa, Frankia sp. CeD; identical to SEQ ID NO: 38570

SEQ ID NO: 39604 - protein, 497 aa, Amycolatopsis japonica
MDPFRVPPELFRFTDGSRSGLPLAILHAFGEANERLETALGIDDVRTRLREVGWLETLDDEDLVKALDQLKGQGHLDVVQSHAGDYRTASEYERRNLQYALTRQGEAAYAGVVRANEVLNATGALQTATLEALGERLGELAKQLEDGTDRRVFSTLTEVEGHLEAFRDNTKRFNGDLQRLLHAEADLATFHEVKAATVAYLQEFLNDLEHHTHTIATRIKEIDDHGIERVHRRALNGAALPKPDARWLVVRKARWDGLRAWFLPEDGATPRVEDLHNLARRAIITLLQVLDRITESRRRASSAVADFRELARWFTVVPAQEDLHRLWSTMFGLSSARHAHLAHADPEVVSTTASWLDAPPVEVSELLRSAGRTERFTRTGRVRDVTAIRAARVQQAIEERAELEAAWNMLDTGGVVRLSAFEKLDHTVFERLLDLLGQALGRPPGAEGARRSTTSDGQIEIVLRPPRNGAVARLTTTSGVFRGPDYEIEISTTGGGA

SEQ ID NO: 39605 - protein, 406 aa, Amycolatopsis japonica
MSLTNQLVIAEREEVARGIRALLATPLIGERGSPETFDLIRRRREPIRQWFDYYCGWTLTVEPRLGYARLIKVRAAADPTRPARRLRSGRAAFDRRRYVLLCVVAAELLTVPVTTIGLLAGRVAQASAADDLVTTFDAATRAERLAFVDVLKLLESFGVLEAADGDPESFVDDPAAKVLFRVDATLLLRLLAAPVGPSQLAVPADDVALRFEELLEAVSHEQRYGLSSGRHEDTPSASDVQRNLWLRHTVFRRLVDDPVLYFAELTAEERAYLGTPTGRQLLRRAAEQGGFVLEERAEGVLLVDVDGLATDERFPDDGSNAKVAALLLLDALDEPRTIDYLQKATAKLLKRFPRWAKTYRGKDGVRRLTVDALAVLTGFGLVRAEAELVRPLPAAARYTDRTEEAP

SEQ ID NO: 39606 - protein, 1327 aa, Amycolatopsis japonica
MTVTRWIPSRAGILNIWRYYDEIFEFHDGRLLLRGPNGSGKSKALELLLPFLFDASLRANRLSTFGTSERSMHWNLMGEGASGATRVGYVWLEFGMAGEKWFTCGARLQASTHTSTVHADFFTTDLRVGDGLPLVNEAGQPLTKGALEEALGEHGTVHDGAAEYRAEIRAKLFPTLSEQRYDALITALLQLRMPKLSQRLDPSLLSNLLSRALPPLGQQEIADLAEGFERLDAQRERLGSLETEVDATRALAARQKTYAQRVLRAGAANLINATAELDELAAAARRSAEEHDEVAAKKEAAEERAAKLEKDVEETEARLSGLTESESYRKGQELDKLRQRTLSTSEKAEALRADADRLRAEADADEERSRAAKQVAKRQADLVRSLETEVRAAATRANLAGVHDELVAGLDEPARLRPLLQAAVRGKRDQVEALGRTLDKHERAVGRRHQAEADLDRARADFSVAQERVELTTATRELALSDLRTRLAEWAIGCRELRFPDVEAVVRDAEAEVSLLGRLGAVAETVLEDIIRREAATGAALATARAEHDELLVEAGVLETEDILAPEPPRTRTADRAEMSGAPLWRLVDFAGSVPESSQAGIEAALEGAGLLDAWVNSHGVVDGHDVLAESGTLPVASGRSLADVLVPEPDAEVSPTKIRRILEVIAFDDTLPSGPAAIGADGGWRMGSLSGSWTKDAPAYIGGSARLRARERRIAALRDKISLREKTIAELEGELAALRGRRELIKIERAARPGHDDLLAATGELTTAEAELTAADAAVRHLESAVSALEIEAKTALHELTAQASESGLPTERAPLAALATALRTYSDQGENWLYEHGNLLTATQRAELCAEQADRSEGNAARREDEAADAEAERTKLTAMLDAIDGTVGTGQREVLAEIDGLRTKLRALSGELRAANADAKELAVSLGALGVRRTTDARAREDATKKQDAAALRFRKLATGIFPADGGIEDLPKFQATLSASESVRAALDTARLVAAAWPSVPHAPSNLGEALHRLSEAVHTCRNTLSSRAELDLETDEDVQIFTAVVDGLRVGAAELLKILYAEAEQSRHEITDRESDLFDKTLTGDTRRHLAARIRQANDLVDGMNARLERVRTASRVAVRLVWQVSPDLPPGTKTARDLLLKDPDQLTAEDRVSLHKFFRERVEQAKADDTATSWEQQLAQVFDYTSWHRFVVKVDRANGAGWQLLTKKLHGALSGGEKAIALHLPLFAAVAAHYQAAPEAPRVILLDEVFVGVDTTNRGQVFGLLSALDLDLMLTSDHEWCTYAELGGVGIHQLITGGDGDDAVTTARFTWNGHDLQPAGH

SEQ ID NO: 39607 - protein, 661 aa, Frankia sp. Allo2
  MOD_RES (17)..(17): Any amino acid
MLVQACQTRPSLQPPTXPQTPVFPSSVTGSRSPAVHAVAWWAILGGVTSDGQTGPAAGGDAPPRQPFAHLSAPNADVYREVLTTFARARDRFIVHMRPEDVIADLGRPGQTESIVAALDKLVEWGNLRADPDTGRVTTVADFHRARYLYQLTPAGQAAEEAIAVYEVAIGRRGALQSVALEDIAAQLRALVEMTAGDAADLDPAKVHLLLLGLAERFTGLADNAQAFMTSLRRVIDFSDGDVDAFLAYKQRLIDYINRFIAELANRGAEIATLLGQVEGAGVERLLLLAARREATDAVPDVPEVSGSGASGSGASGSGASDSGRTGAGRTDAERIRTAYDAAVAAALDGWRNRWRGLHDWFVSADSRRPSQARLLRGAAITAITQLIDTVAALNERRTGRSDRSADFRTLARWFAEAPDDAAAHRLWRAAFGLASARHLTVSQETVAAWQEDEPTPNTPWQDAPPMRISPQLRRTGSYERRGTPNRVTDRARQRRLLAEQAAREAEQAASARARLATDGPVLLSQLGVLDRQAFRLFLGLLGDALAARLAGDTEVETTSSDGTVLIRLTLVPGGGVARIETEDGVLDGPEHTVEIVDLAGAASRPAAWNDLNDLNDWSDSNDRNDRNRQNDLNGRMDGLAPVVLAGGPDRLELLETGRVSG

SEQ ID NO: 39608 - protein, 422 aa, Frankia sp. Allo2; identical to SEQ ID NO: 38568

SEQ ID NO: 39609 - protein, 1443 aa, Frankia sp. Allo2
  MOD_RES (214)..(214): Any amino acid
MSTSTRMPATPAPASIPAPAPASASIPVPAREDRWQPLRAGLVDLFYYDVEEFHFHDGRLLLRGNNGTGKSKVLALTLPFLLDGELAAHRVEPDGDRNKRMEWNLLLGGRHPHPERLGYTWLEFGRLGGDGIPEYRTIGAGLKAVSGRGIVRHWFFVTRQRIGPQLSLVSPTRVPLTRDKLKEAVDGHGAVYDTASDYRRAVDEALFGLGGHRXEALVNLLIQLRQPQLSKKPDEKLLSRALTEALPPLDPALVVIVAEAFRGLDEERETLRALAEAETAAQAFLTHYRRYARVAAKRYAAPPRQAHSRYEQHGRDLAEADAAHQAAVEALTAAQQALTEVEEAKATLTARRDALRDSPEMRDAAALRGAEEDAGRLARFAAQRERDSRAAAEAAGDRKRRLTGAERTVQADAAGFDAAVRAAGLAAEAALVTGRHAAVLTELDGGEPPYRDARRSAEALVGQQGTAVNRLDGLLRAAADAGVALRAARDDLDRITAEQQAAAERIAAAEDLTAQRGAGLVVACTAYLAGCAYLRPADPDAALAALAGWVDTLDGSNPVATAVDGAARLATADLGRRQAVLDGEQTAARRELERLAEEIERLAAGGHDSPPAPHTRDEHGRDGRDGAPLWKVVDFVDGVPDEHRAGIEAALEAAGILDAWVGPDGRLHDPVSDDVLVTPGRPAPGGGLAAVLTPAIDRDDARAARLSDTAVAAVLATIGLRGGPGPAGGSLVHGPAANGTTANGTTANRTSGTETWVTVDGRFGNGVLTGGWRKETAGYIGEGAREAARRVRLDHLRADATRIELRLEELAAAAAELADRQLSLAAEHGARPSDGDLREAHAQLATEHKAKRRIDAQHQEAAAVAARRQQAAGEARAAAEEFAGDVRLPAEPAALADVRDALGDYRAELAALWPAAESLDRSRRAATEAEHELTLALERQEQTAEAVAEAQTQADAAAERHRVLVETAGAAVDELFRKLAAVDTELDRCGQREKQARAAERDALDARGRAHGRRETLREAITTAAAEREAAVARLRAFAATGLLAVAVPDLEIPDPAAGWAPYPAITLARAVNAALDDVDDTDRRWELAQQRVSAEHKVLTDALSRHGHSVGMVVSDGVIVVDVLFQGRKQDIPALVAALETETGQRAMLLSAKEREILENHLVNEVAGALQELISDAEGQVRRINTDLAQRPTSTGMRLRLQWRVARSAPEGLGAVRDRLLRQTADAWSPAERTAVGAFLQEEINREHSADTTGGWAEQLTRALDYRDWHEFAVQRFQDGQWRPASGPASGGERVLAASVPLFAAASSFYDSSGNRHAPRLVALDEAFAGVDDDSRAKCLGLLAAFDLDVVMTSEREWGCYPQVPGLAIAQLSRRDGIDAVLVTPWRWDGHERTRVDRPVPYQPERPDQPDQPQLLDQPDQPDQPQPLRPAQSGNTEPLPFE

SEQ ID NO: 39610 - protein, 434 aa, Frankia sp. Allo2
  MOD_RES (115)..(115): Any amino acid
MSASSTGASRGTEAARDVERLRRLLGGEHTAWLLDRVRRRIELGRPLTGTVTLGRASADQRRGVERLLGRRAGTGASLSVSLDEVDAVLRSSGAAPDGLAAAVRQLTGDVTERAXLAAAQSRAWAQAHQPLDDLLARRPELTPWRSWLDSTGLLRRLAGTPDAAGPLAADLLRVLDALPSPGVALGRLAATSTGDAHALDDGRPLATLALAAARVLGGSHPAGDGSAAGRRAAWAAVGVHRDELSSTVLCLGLPGGADSPTGRILAICREAGEPCVLTLRQVGPGQDRGDLGVGLGVVYLCENPIVLASAADELAGRTPPLVCVNGQPSAAVISLLAALAGQGARFAYHGDFDWGGIRIANGLRERIGWRPWRFDARSYQAALTTVTGGELVGRPVDAAWDPDLRPALEHHAIRVDEELVLAELINDLGAPHAW

SEQ ID NO: 39611 - protein, 507 aa, Bosea sp. LC85
MPKHIPEDPADLFRHVSAEKAAFYRCIMNVFAAAKRQYRLQLRPDEVLAEAQWPDGPPRIEEVNVALGQLAEWGNLESHPDTARVSSLSDFYRARFLYRLSQGGEAVESALAMFVQTLQRRAELQTVALEDIASRLQALQALAGAAAPDVAKIHETLRDLVRVFEGLAENAQAFMAGVARSIELQQAEAGAVANYKKRLIDYLERFMGDLVRRSDTIARLILALEPNIDALLGQVAERESRDAAPGGAQDQAESWKGYLDAWRERWKGLRGWFLSTGHEPPQAELLRARARSAIPQLLAAIAALNERRSGRSDRSADFRLLAGWFAACADNGEAHRLARAAFALNPARHFSLNANADAELPANTSWADAAPLKIHPRLREYGEAAPRGPLPRVRDRAEERAFLALQLAEESLQVEAARKRLATSRPARLSDLGELDTHTFGLFLGLLGEALSEQAGPEAPVERQTGDGLLHIHLRPLARDSHARIETPYGVFAGRDHLITITPLHGR

SEQ ID NO: 39612 - protein, 427 aa, Bosea sp. LC85
MKAANRLSDGRNIGLQQQRFQREEFRACVRALLMTPLMSPADDDFAAVRRQAEALREWFSREAGWILQVEREGARLYKRPGNLSDAMRGLPGYDRRRYVLLCLACAVLERADPQITLRLLGERLLELAAEPALDFTFTLEAQHERRELVSVCRTLLGLGVLHRVAGDEETFVQAGGDQADALYDVQRRMLAGMLAAVRGPSTWIPEEAPVTLEARLHAMVDEHVADSEEGRRTALRHQLARRLLDDPVVYVETLDAEASAYFFNQRGTMAARLCDAAGLVAEQRAEGLALVDEGGLLTDVAMPAEGTDAHVTLLVAEHLAAGQRQRRKDGAGTAQAHVMREHDIADFLHEVKGQYGRYWRKSAREPGAERELAAIAIDRLEKLQLAVRKAGVVHPLPALARFAMGEAELRETRNAPAQAIDSLFGPT

SEQ ID NO: 39613 - protein, 1391 aa, Bosea sp. LC85
MNDRFNPLASPLEKPALPTPTRQRWQPLRLGLVELYHYDSEEFWFRDGHLLLRGNNGTGKSKVLSLTLPFLLDAQLKSSRIEPDGDAGKRMAWNLLMNSQDRRNGYAWIEFGRVAEDGTPHYLSLGVGLSAAAARPQVDSWFFLLEDADGAPRINQDLWLTSEHRIVLTRERLRDALEGRGQVFDTAASYRRAVDERLFHLGAKRYDALMDTLIQLRQPQLSRKPDETALSNALTEALPPLAPELLGDVAEALGQLEEDRRQLEEYQALAKAVGRFEERYRVYAGTQTRRQARLLRQAQTEFDNASRARGEAQARFDEAQAREALAQTAHDESEIVLARGRARLDALRSDPTMQDANRLENAEREMAARRQATQKAAAAVEQAGRRLGLSTEETGHTARRAEQVERALAELRRQSAVHADAAGIAGQHTASPLAAFETSALVELMQPAFDRACAELRNLVAGRREQIALLRRRHGEVARAEADYMRRRETQDERQVEAEEAAERRTQADAEVERQGRDLAESWDRHVIGLKQLQVDADAKFAALTALAEWAATLQGDNPARHLLQSAHEAASFTLTQRRAALDSQRQALEGESGALEDERQRLEAGDDMVPPLPYTRDASVRDAREGAPFWQVVDFRDAVAAPQRAGLEAALEAAGLLDAWISPDGRLQAGDDGAPLYDTQVLERRKSSPSLADFMEVTVPAGCTVPAVIVERVLSGIACADDDPIDTEAWIAADGRYRLGALFGGWAKPAAVYIGHAARAAARTRRLAEIAERLAQLSDELAAVQGMTKQLALDREQSDEEWRRAPADEMLRGAHLAAVASARAARLASERLAEADMRCREAEQALKAVREQLATDAADLRLPGSPEALPAVETELDQYRDTQVRLEQAAHGLRLALPEWQRQLARENEARSDLQQHEQESAAARVEAEEALARLEVLRDMVGAKVEELQRQLTQARVTVEAGEGALKLAGDALRKAGEMRAVANQQAETATSVLHGRGEARAQAISKLQQFAGTGLLSAALPRVELPDMAAQWTIDPALTLARRAEQELSNLKDDDEAWARVQRQIAEALTELQRALGALGHQAQADPSDWGFSVDIIYQNRRERPDRLADRLAEEISQRSELLTASERTVLENHLQAEIAAEIQRLLQAAERQVDAINRELHKRPTSTGVRYRLQWQPLSEEEGAPVGLDVARKRLLNTSSDLWSAEDRRVVGAMLQQRISAERERADSSSGKDSGTLLDQLARALDYRHWHRFRVERWQEGHWRKLSGPASSGERALGLTVPLFAAVASFYNQGSHALAPRLMLLDEAFAGIDDTARAHCMGLIREFDLDFVITSEREWACYAELPGVAICQLQRREGIDAVFVSRWTWDGREKKPEADPDRRFAPA

SEQ ID NO: 39614 - protein, 426 aa, Bosea sp. LC85
MNEQVDPRLQRLLGGKHLASLRKRLRQRFERAPLDEAVEYIRVGELSAEEHEALASLLGRPQRRSKSLQIDVHRVDADLRRAGLAPSLREALEKLDGPIPHLAGARLRLQTLWSGVIDGCGHPGLAGLLGTPAGIGLLKRLARQEPAMAGELCRRAEEVLRHLPANGITRSQLAADVLGDAHALDNGRGVAALVLAVWRRAAAPAADEDSDTLPEPGENADPEPAGGAERARDTWARAGVLVNELARPALFLNLPIGEAGSDCRPLGEPSYASLRLLLRSPPRWDAAGRTVFVCENPNLLAIAVDRWGAGCAPLICTDGMPAAAQRCLLSQLAQAGARLRYHGDFDWPGVRIGNHVMREHGAEPWRFGAVDYLAAVQTAPNPAHSLKGNPVEASWDGALTLAMQERRVAIAEEALAASLLQDLCDR

SEQ ID NO: 39615 - protein, 483 aa, Rhodococcus opacus
MKLFAFTTAEKRAEYLWVLRAFDHARANYVVLLHAGDVARILNGLAGDDPAGQLGAGDITPLLEQLHVWEVLERSYDGTRAATLAEYRNRHFVYQFSQAGYQVFRAVEDALAARLDDASLSRLALPDLLADMNDLAAANRAADNDLVYRKLNRLDATLSDMAGRAAQFYLTLGDLVRTTEITPETFMSHKDALLTHMREFSSDLSRYAPKLAAAIALVEDTGVETMVTRAAASDERVFLGIEEREADWRARWAGLTHWFVGSEAGLSESERLREGTMSAIAAVLSLLRRVTETRKGGVSRESQLRHLAGWFAATPTEDAAHALFQAVFDLGRPRHLSMVHPDADIIPDTRSWWEAQPVEISRTLAETGRPPSPGLPARVQRNEGSVRRLREEQLTAQRLRAAAAQSLARGGVYERELDEAETDVLLSLLNAALTARVPVSGRVNSSTGSENGVKLTLSPHSESTVVRTARGRLHLDGLQVSVR

SEQ ID NO: 39616 - protein, 464 aa, Rhodococcus opacus
MKAREISPLALDSYQRAARVILSNHLVTQTYPDRIALPLLRRWATELRDDLMTLFGYRLEVTETTARLFTVSDRLDAGTPAKTATDRTFDRYRYAYLALALAALGRAGNQITLSELADHVAADAAQVDGVDLSTERASDRDAFVDAVGWLAARGAIALADGDAGGWAANPDAGEALYDIDRSVVIALFRPPRALQHLRSIRGLLAGADAVTEDDTSEFGTTRPVDVKETARRVRRALVERPVVYAADLDDHELVQLALPRTAADVELLTGLVAERREEGVAMIDSSGRLSDVRFPGTGTVAQVALLLAGEIADRVLDPDAPETARMPLPRGRIDDLIEQVDSAIPQSGIFDSLAGHDGFEPADPAPADRLFPLVEDEWIAGTVRTLTERFGRTFAAGWQADPDGLGRAALALLERLRLTAAVPGGVLALPALARYRGVVVTIRDRTPEIDLFQSSANDSEEVTA

SEQ ID NO: 39617 - protein, 1385 aa, Rhodococcus opacus
MTSARFRPTRAGIINLWDYRDQEFSFADGRLVLRGPNGSGKTKALEVLFPFVFDGRIEPRRLNPFAGEERTMKSNLLYRGQESAYSYVWMEFCRGAKDDPEAVTVGIGMRATRTNDKVTRWYFVADGRVGVDFSLLGTDDRPLTKKQLGEQIGTDSITDRPLDYRTAIDARMFGLGVQRYDQLINLILTLRRPQLAKNLDPKGLSQALTDGLRPLDEQLVLEAARSFSDMEEVGRALEGLAAADQAAQSFVGVYAKYLRQQARTDVDHLATRLEAVRSGIAALHGAAADRARSQESRAAAEDRFTAAERALDQANATLDALKRSTAYEGRTQLDDLAQAVSTLEKSTELQAEKARKAKATLEQRAEEHDKAGDAVARAVEALTHAEDELHLAAEDAGITWTALPENARTDQLTAALRGHTEERDGDIRAVRAALATVERAATERTRADEAARRGQEQLDTATVAVLEAETAVESARSRCATELRSWWTEQSSLYAEIDAPASLFEALDAALARIGDDDAATLTETLTEQTTDAVDALRLRRQQYDRDAASAEEAIAEHESARAAIESEHDDAPPLSAARHDARSRLTGAPLWRLVRFADSVDAAAAAGIEAALQAANLLDGWVTVDDALPDVESEQFLVALPAEDRPGGTTLADVLEVEQDTGVPDNRVRGILESIALESLDLSEGPVGVAEDGAYRQGIQRGRHTKSDAEYIGTTARARRRAARIAELDSTLEETRATLAEARASADAAASLLSRTTAAAQALPRTGSILTALKKVTESAGALRSRSDTATTVGRELDQAIADLSAKEKQLRATASTHRTPHVAREIDSLAAAVRHFEKQGEMVQRCRREHAKEVEHTRESEDRLHEARGSAEEFAEEAAIAEEVLAQQIQRLETLRDTLGAGAEQLDRQLEEAHTRIEACRKEQRDARKADKDAGEAIGKAEGAYNTAVQTLRLALTETHADAARLAPYARRDLLELLGVDGGHTWPASSAAWMSAEQLVYRIQNAEDDTPILPPEVDALFRALDGATESVRVSDSARKSTRTALTTALQDFDAQLAAAGQDYRLQWDAPDGVTVVQVQDDEGYSSIGEFAARIASARSDQELLLTESERRILEDALLTGLAQQIHERTVDARELIARMGTEMRERRMSSGNTIGVHWVLADNLDDSAKAISKLLERDTSALGPDELATMRAHFAHQIRTARAAHPERSYPEILASALDYRRWRVFSFTLISGTGNEDRLTVARHSALSGGEQSVSLHLPLFAAAHVMLDSADPHAPRLLALDEAFAGVDDNGRAELLGLSVQFDLDLFMTGFDLWITYGGVPGCAHYDLAHSTAEQSVSATLLVWSDGELLAEHDGTDLAQALGSPLRRRVPTPAEGALEFA

SEQ ID NO: 39618 - protein, 517 aa, Streptomyces scabiei
MRRVPPEMFRFTTVERSELYGAVLDAFGAAGEHLETALGLDAVREWLRGAGWAAAVEDEELHEALRRLVQWELLDVVHNHAENYRTAEDYERRNLQYSLTRRGEAALAGVRHALEVLASTGALQTAVLEAIADRLDELCLLSAEPASADRRIFSTLRELEGHLDALVENTKAFNGELQRLLRAESADPEVFREVKAATVAYLQEFLVNLDRRGQTVAAAVARVEERGVAVLRERALSGAELPPVAGEDPAAGWLESRRARWAGLRAWFLPDDGARPRIEQLHDIARRAIVSLLQVLERINESRRRSSSAVQDFRELARWFAAAPAEDDLHRLWSAAFGLGPARHAHLAHPDPELIPSSRSWAETPPVEVSALLRTSGRTERFTRTARVRDVAAVRAERAERARAERAELARAWRALETDGPVRLSSFGELDPAVFDRLLDLLGRALSARPDAGGLRRATTGDGRVEIELAPHPDGRTALLRTATGSLAGPDYLVHIKEAGGATAFPALRAARQEAVG

SEQ ID NO: 39619 - protein, 425 aa, Streptomyces scabiei
MSTLANQLAAAEREEVARAVRLLLARPLLTEASDPAGFELVRRRRDPLAQWFDYTCGWTLTVEPRRGYARLAKVRADPDGSRPARRARSGRAPFDRRRYVLLCVTAAELLSMPMTTIGMLADRVVRATAADRALPAFDPVHRAERMAFVDVLRLLESYDVLRAVDGATEAYVASPEAKVLYRVDTTLLMRLPAAPVGASRLAVPPDEVPARFEDLLSGLVRERRYGGPVAGDGTTEEEHGETAATDAQRNLRLRHSVLRRLFDDPVLYRADLADDELAYVTSLTGRQILRRSVEQAGFLLEERAEGFLLVDPDGIATDARFPDDTSTARVAALLLLEPLCAAPAGLLPEQLAEAGTDLLRRFPRWAKAYQSEDGAARLTDDAVRVLRDVGLAHRTGGRVVARPAAHRYRLTETTSSVPEAEGDKQ

SEQ ID NO: 39620 - protein, 1392 aa, Streptomyces scabiei
MSVTELPFPRRPEFSLPRRPESTEPAGTPAGAADASGSRWQPHRAGILNVWRYYDETFTFHQGRLLLRGQNGSGKSKALELLLPFLFDASLRPNRLSTFGGSERTMHWNLLGEGASGKTRVGYVWMEFRRVADDGTERWFGCGARLQASVHTTGVHADYFTTGARIAHPGGVLLVNEAGQPLTRAALAEALHDRGDVHASATDHRTAVRRELFAGMGEQRYESLLSALLQLRQPKLSERLDPSLLSTLLSRALPPLGEGEIAELAEGFERLDRQREHLRRLDDEVAAADTVAARQRAYARRVLRAGSAALISATTEMDGLTRAARQSAQELEQALAQRESARTLREDQELRAHALEETVEGLRESDAYQQGEELDRLRRRTREDAAAAGRLRTTAQAARATAEEDLRHADEAAGRARTLEEHAREAAEEARRSARSAGLESIHHEANTILRADPAVPLPEGTRRAVDGGRSEEPGATPTGENGARQARRLLRGAVTARRQQVALITEAMDDHDRAVRDRGAAEDLLDEARARFAEAIARRDEASGAWDDALAAQAERLLAWAGGCTELRIADPGELAARAATEAEVTALAEAAARPPEQEIATAEGTARAARQALRDERSRLVEEVRRLGGQTDLPPAPPSTRTTVRTATAGAPLWRLIAFREGVPLPVQAGVEAALEASGLLDAWVSPYNGIRLPGHDTRAEAALAVTAPGPSLLEVLRPEEDIPVPVDTVTRLLAGVAYGAGLPDGHSAAVSADGAWRLALATGSWNKPEPAHIGALARQRARQRRIAELTDRIGGTNASLAALDDRLRDLAARRARLDADRAARPDHRELEARRRDRDRAEEAVAARDDAVRDAAGHLARCEGEVAGALRTLGRRAAEHQLPTDRGRLRELSADIDRFRDTADSWVDARLTATAAADRNHHSAAQAERSRRAAEERAGDAAAAEAGAAGLRARLEAVEATVGEDYRQIVARVTEARDELRRCREAAARAADLLLRLEGRIGGLRATSGQDAVRREQAVLVRDRAAQRFRHLCLVGLAEDAGIAPEPDAGDGAKATLEAARAVAANWAGIPHAPRNLGDAATRLSEAVHEARRRLGARADLDLEPDDDVQLFTATLDGVRVGATGLLTTLTQERDRSRDDITTGERRLFDQILTGDIRRHLAVRIRQAGELVDRMNGHLERVRTASNVAVQLVWDVRPDLPDSTRTARQLLLKDPGRITETDREALHAFFRARVGEAKGSDTAASWEEQLGEVLDYTAWHRFTVRLDRANGTGWQPLTKKLHGALSGGEKAIALHLPLFAAVAAHYEAVPLAPRPILLDEVFVGVDTVNRGQVFALLTALDLDLMVTSDHEWCTYGELPGIAVHQLLTDGHDDAVTSARFVWNGTDLEAG

SEQ ID NO: 39621 - protein, 410 aa, Streptomyces scabiei
MGERTLRRPELRPLWHTVHSRLSSGRPVTRVRPGPLDDAQREALADLLGLDRLPDPRPFVALARLEEAVTELWGRTVRETVTALVGPLDDRAGERRRQEGERAELWAWLDGHAVVRAQPALADWAASCRTAGLVGGSPERTRSLLTDALTVLAALPAEAEPLPVFSARVLRGDSHALDDGTRPSALVLRALAALHDGVPPQSAADRRALWARAGVADDDLSATVLVGGLRPCGDGPLARVARVCAEAGQGAALTLAQLRAPGEFTLAADPAPVVHAVENPSILALAVRRFGPACPPLVCTSGWPNSAAVHLLRLLADHGATLRYHGDFDGEGIRIAAYLLDKTPARPWRMAAADYRTAVARTPHGPRPGRLTEAPWDPELTPAILDHGTAVVEELMADVLLADLAATVRA

SEQ ID NO: 39622 - protein, 522 aa, Streptomyces scabiei
MFERDDAGVSESFDLDSLTVGDRLRLFNFTQRDDPLAYLWVLRAMNVLRAVHQLQVHPDDVANTLNELATVHEEVPAAADLNLRGMLDNLSSDNEQVLYRVEDPLRCGNLAAYRNRQSVYQFTEIGYRVYCAVEEVIGSRVQDANLSRLVFADILADFKALASANHEGDQDEVYRKLARLDNVLEDMTQRAARFYLTLNDVARTTDVSPETFLRYKHALLAHMSEFTAELERYAPRLAEAVYEVEDSGVETLLERAAAVDERPMMRPAARLEDWRRRWMGLRQWFLADGPGETKAAQLQGATRTAISGVIGLLRQVTESRRGGVSRTTQLRHLAAWAAAAPDEQAANALVSAAFDLRSVRHLSGAHDDDDQISPRATWWDAPGVEISISLFRHGKRPAPGGPQPVRTRRGAHARLREQQLADRAADREAATDLLDHGPHDRLLNEAETRAVLKLLTRALQARTVVAGRLRSGTGSSDVLTLRLVPNERGSRLRTETGTLHLPGFALEIKPHGAMRRRRTEKP

SEQ ID NO: 39623 - protein, 472 aa, Streptomyces scabiei
MPAHRVAASVEPADLGSYQQAARLMLLHGVVTESYPRAKALALVLQWSDELAKDFRDLFGYSLQTSARHARLLRRLDAFDASQAFLTVKSKRPFDRRRLAYLCLILACLHRSRIEINLADLVKLLTPSANAIEHLGFDATAPGHKDAVVDVMDWLVDRGALRISDGSTEDWARDHDRGDALFDIDHDTCAALFRPNKPLQHLVSAAGLLDTPTAGTGRDPRRRFAAQRARRLLIEHPVVYFSDTDAETAIALRQPTLAEDIARLTGLPVERRAEGIMLVDTTGHFTDKRFPGRGGAVNRTAGLLLAKIADLREDPDRASSLQYLMSAGPGEEHANLLSRIDMALPHAGTLEALAHDPHADAGWHADEADPDVREHEGQTGLPFVEHGTLEQMITELYEEFGPSSFTNKWQADPSGLLAEAVALLADLRLVHVVPGGILVRPAAGRYRNITAVLPRPAHGQFAFDFPTEDTSR

SEQ ID NO: 39624 - protein, 1439 aa, Streptomyces scabiei
MTLIPHSRTADESEVRFKPTRAGVIGLWDYTDEEFVFADGRLVLRGHNGSGKTKALEVLFPLVLDGVLDARRLDPFSGEERTMKSNLLYKGQESAYGYVWMEFARANPDGEVLEAVTTGIGMRVTKAMSTPARFFFVTDGRVGIDFGLLDGASRPLREKALEALLGKKAIFDTAEAYREKIDDRLFGLGRERYSQLVSLLLQLRRPLLAKDLDPVKLSETLTAGLRPVDDGLILQAARDFENLAEIQALLNALSGADTAVRNFLRDYTTYLRAHARDRVDHVNGRIQDTAAQCEKIMEAAEDRRTSERQLASAQHERDTAERQCNELGARLAEYKDHDAIKQRDGLKELRDRVHAERRGIADSERHLSQAQKSLAALKGEAERAVQRHGELRKAASRHTDNLMDAARRCGILHDDATLDLGAELDTDVAGRVAARRSELKDVRAHLRAFEDAKKDQDREQDHWDTASGELTETERQSAAAAEQLEIARTTASQELDEFISRWSSGNDIAVLAATDGDALRAAINAVGDPEAAPLLEVFRSLTDQRRTRAVTRVETLEREHSDAADALRSRQGERDTVAAEADDAPPPSDLRPASRDDRPGAPLWQLVRFADHVPDDHAAAVEGALYAAGLLTAWLHPDPVLTDQALHDKVADAYLRPLPPAQRPTGPTLADLLVVEDQQLVDAAAVQAVLSSIAVADDLPAMDDALPAPAVTTGSHFSLGVQVGAHPKKQPEYIGATARAARRRERLRLLDESIATLEAQLAGIEEQHRYAQEAFDDFDRARREFPRTQPITEAVGEVAVVAEKVAGARRRLAEARKRLDGAIARTHEKNRQLRHAAAAARLPTLHEELNNVAQAIDDFADAGKALSTCREQATAAERDIAGRRDIIATQTESCAEQAEALQARKDEFAVQEERLRTQEATLEAPLQAILQRIADAEEQLTAARKTYGRAKKDAEAQRDRLLKADHALEFGRTALATAVAEQVRTTLTLEPYARPDLLGLLEANAETVWLPHDTWPSPEQAVQALMDRLTSPGTSLTGVEAAQNVVPASVASLINALDEATRGRPINASLLKTVTTKISTAITALEAALLESDQGYLFEWEPAGDIILARVTDSEGPAPVADFARRLAEQLADQSVLLEDKERTVLEDGLLTGLAEQIHDRTVAARDLVRSMDADTRSKPMSSGQTVGINWVISDALTDSQQAVNKLLDKNASGLGPAGLAELRSHLRSQIRAKAAADKKRSYQQVIAEVLDYRAWRKFELRLFRPGMSEEERNKGELLTKAKHSVMSGGEKSASIHLPLFAAAHAQYSSAYPTCPRLIALDEAFAGIDEKYRPDLLALTAKFDLDLFMTGYDLWITYPDVPQISHYDMKHDEASHTVSAMLLVWDGEQVLDDLEYPGSDDLAAELLGFTPRRHVPAQAGLLADIPEDEPTNDETEEAE

SEQ ID NO: 39625 - protein, 442 aa, Streptomyces scabiei
MTGPTEAYERYRAPEFRRLLAAARRSLERDGGEIKGSIGLANPTTAERNAIIGITGTYRSADVRRITIPLSALEQSVHNVTGMSLRDVLERIGPKLRFRADERTALDQARQAILAEGEASPLHAEHSWFRQWLAGLASDGTITTLINKKDTHLFSQAVRVLEHLYNRPSDAPPIMLPALADATTGDTKALNTGRGSLPTLVLRALAMARGKPLEPGAEARRELWDAFDVIVDDLASRVLVLNLPATGQGLGQWLTDAARYGTPFHVTLHQLITLPITVNLPTVYACENPAVLRRAAGELGAGSPPLICAEGRPSTAFHRLARLIVEAGGTLRYHGDFDWPGIDMTNQLRARYQAEPWRMSAADYLSAVRADSDHVRLSGKAQDTVWEPGLAEAMKREKRAVYEEAVADVLLADWKGPARKEGDGQAPGLRHGLPHEIQARAQ

SEQ ID NO: 39626 - protein, 605 aa, Streptomyces scabiei; identical to SEQ ID NO: 38688

SEQ ID NO: 39627 - protein, 435 aa, Streptomyces scabiei; identical to SEQ ID NO: 38689

SEQ ID NO: 39628 - protein, 1377 aa, Streptomyces scabiei
MSLTELPLPRRPEATEPARPAARAADTPGGRWQPHRAGILNVWRYYDETFTFHRGRLLLRGQNGSGKSKALELLLPFLFDASLRPNRLSTFGGSERTMHWNLLGEGATGKTRVGYVWMEFRRVDDDGTERFFGCGARLQASVHTTGVHADYFTTGARIARPDGVLLVNEAGQPLTRAALAEALGDRGEVHTSATGHRTAVRRALFAGMGEQRYESLLSALLQLRQPKLSERLDPSLLSTLLSRALPPLGEGEIAELAAGFEQLDRQREHLRRLDDEVAAAETLAQGQRAYARRVLRAGAAALIEATAETDDLTRAARKSAEEFAQALAQRESARALREEQERRARALEETVEGLRQSEAYGRGEEPDRLRRRTEDAAAAAARRRALARAARAAAEQDRAHADGTAGRARTLDEHARAAAEEARGSARPAGLESVHDEAGTLLGATDDPRRAADDPAGESGARQARLLLRRAVTARRQQLTAVTGAMDEHDRAVRDRDAAEDLLDEARARLAEASALRDEAAGAWDTALAAQGERLLAWAASCTELRIADPGELAASAAAESEVTALVEAAARPSEREIATAEATVRAARPGLWDERGRLVEEVRRLGDEPDLPPPAPATRTTVRSATAGAPLWRLIAFREGVPMPVQAAVEAALEASGLLDAWVGPYGGITLPGHDTRAESALAVAAPGHSLLAVLRPEEGIPVPVDTVNRILAGVAFGAGLPDGHAAAVSAQGAWRLALATGSWSKPEPVYIGAAARQRARQRAIAALTDGITRTSASLAALDDRSREIAARRARLDADLAARPGHRELDAPRRERDRAEEAVAAHDDAVRHAAGRLARCEDAVAGALRELSRRAAEHELPADRGRLRALDAALGRFRDTADGWVDARLAAHGAADAARQAAAHAARSGQVADEQAGDAAAAEAEAAALRARLEAALAGTGADHRQIVARLAEAREELRRCREAVARAADLQLRLEGRAGGLRAVSGQDAARHEQAVLARDRAAHRLLHLCLAGLAEDAGIAPGPDAGVAPGPDAGDDPGAVLETARAIAAKWPALPYAPRHLGEAATRLSEAVHEARRHLGARADLDLAADDDVLVFSAGLDGVRVGATGLLGALARQRDSSRDDLTGGERHLFDQILTGDVRRHLAVLIRRAGELVDRMNEHLERVRTASRVAVRLVWDVRPDLPDSTRTARELLLKDPGRVTESDREALHAFLRARIGEAGGSDTAVTWEEQLGEVLDYTAWHRFTVHLDRAGGTGWQPLTKKLHGALSGGEKAIALHLPLFAAVAAHYEAVPLAPRPILLDEVFVGVDTVNRGQVFALLTALDLDLMITSDHEWCTYGELPGIAVHQLLTDGHDDAVTSARFVWNGADLETG

SEQ ID NO: 39629 - protein, 530 aa, Streptomyces mutabilis
MTDARKAVEYLVRQESSEYIPIMDVLEGSVTDLTVAEVAAALVAAGVRLDARLVERRLDALKDMGAVSFRSDTSHARRYAEILPRNWRYTASPAGRHVQRFYRQVLAGTVTVREIPIVSLSRIVSHLEQLAAALGVGEPDASLLDATVLDAVSSVFTSHDDLDAALVGAEDALIGLADRFDLDEEHTNDLKGLLVDYATRVAVELDSGSARAAAALAVLRPWFGLLAQAVVDASQARDLIAAGALSASRGGRAEDWDGLCAWFDARTGRAARFSLRLVRALPGMHANLRRLHSSAGTASTRSRALALARAVLTPEIGVQIFQAAVGDHSWRKLYGQADEDDMGRNPSWRGGPQVPVPTLLRTAGRSGPRGRGAAPRDDTVAKAQVAEARARRQAGHQRALAEVLAALPGEQLDEAAARAALAALMAAARAAATGPRRTGTSGGLACTLVHTGSGTGILNAPTWRVLLPGRIPLFHRPGQRPSAAALAALAGTTTTDDISAHATLRITPHTGPSTSDNDTSRIISRQEGAA

SEQ ID NO: 39630 - protein, 413 aa, Streptomyces mutabilis
MAATCWLIGGRDDELIAAVRRNEHALRSAVARLGWVLIVERDLVRLRKSPPPRPQAWADQGPNAAACSWFFLLLAAAESMPPRTAVGHLVTQAHAAAAEAGLPVHHDITERRAILAALHMLDDRGVIERLDGDLDRYLHDEQAPVLLAVHHTRLAYVIANPGTLDPAADPHAWLEQAQREPDAARRMRRALVDDTCVHTALLDDAEAQWLSQRVRGDDGGPLADAFGLVLERRAEGAAFVVPDGAFRHFSELGPMHFPAPGTIAHAALLLLDHAALHGTADNAPGTGWRGLVEEAVVEALTTFGTNNASGRGGWSTEYVQDPLLLTGKVRDLLTGTHLAWLTPTTLQADGETTLMWWFAPITGRWAEEGTAQPKTAPTRARRSTPTPQRPHIPVQQGLFSAIETDKNPEGHPA

SEQ ID NO: 39631 - protein, 1412 aa, Streptomyces mutabilis
MSDFFDLDFALPPAPAPSGNTGRFGGRWRLVGAGLSNVWRYGDLELPAASGRLLLRGPNGTGKTTALEALWPYLLDLNGAKLAAGKARPTTLKLLMSEGAPAKGRRYGYLWLTFAAPAGEPAPNTPDGGADGVVSFGVRLQYSPSSTPAVRVVPFTVPGQPLKDLALRGPHNSALEHEEFSDRVEAAGGRVFAEPEDYIEELAARIWSTTSGELRLLASRLREVRNPTLLGDVSPAAAADALRQSLPGVAEDVLTATAEALAESDTTREAFERDEHAATLLEEFARVWTGHAVDVTRTAHAAARRAHDDAITRKRRVQQCTGLLESAKAAADQAAGDVQRLDNANQKAQAAVRAIETSDAYRTHGHVMDLRKRLRAEQRAASSSYDSLHTAAQQARTQTKTGQDALDDAIGDIEDTLADAEAAGSPPGALETLLAHHPRARVTRPVADRIADPGPGITLIHDREGLDQLATTLRTRAQEHRSTADRATLVLRDHDPVAAAEKTAATAHRTAAGAESAYDEASQAHDRATAAARSAARQALAELTRWAPEHPALRGLHDEAPLAGDELTVWDTDDVEALIHAEPAAVRDQLNTWADQALRIGETLAASHESAAQQHLATAASLDATAAQHRTEAHHLRSGRLLPLPRPAWAGPGEDDTALGSLLEWHPTLDDADDHKALLELALASSGILGAHLHEGGATTHAWHISPAGAVQEHNLTAVLDIAPSHPHTDLARAILQRIALADTATTSDRPDTLALVIGRDGTFTAGPLAADPATALHAASNQIPAASHIGARTRLARARARADELDATAQELETSAANERRLAGERRQQRDALRAEGRGFPPRDELTTAEAERSRTAKTAHERHGTARTLRGRADDAAAQHTRLRTAWETRVRSLGLPTDPGGLAQLIDTSQASAQQLNGYATQLTTRLLPRIQRIVDALPDEAALAECLAELQHTAQDMHTTVLETQAELTEAQSHGDADDAARRYEQATAEAKDLQQQLKQAAEQVLIAEKRLSTCESDLTAAQERLNESLPLQKTTRAHLTALLACPPLAQALGADARLTAKDTDTADLLTAVDNLLARRPTASKKTLGEHYDAVRAELAQTWTIAHDDAPAGAEELDTFVLTHAETHYGPLTAAQRAKALASRAKAALDAAEAAALRDFVIGRLPSAIGTAWAALTGWKKTVNRKMRAAQASSGVGVQVQIDLRSDLDAATRTVYELSCTVGDALRTDAQKEEVGQALQSLLAAADGSTMQERLAAAVDIRNWVDVRYLVERPGPDGKPVTGQWGSRTGLSGGERRLVVLAPMLAAIAASYDRFTSTGLRLVPLDEVPAEVDERGREGLARYLAELDLDILCTSYLWDGAPGAWDGIDAHDLEAGADGTVVAFPMLIRAGQALPGGTGSAPQAGGVA

SEQ ID NO: 39632 - protein, 194 aa, Streptomyces mutabilis
MDCDDLLGGLIITGVTPRGWRVPPGATFTLPPRELAHIDWEPAETTGTWVFVTENPSVLAAASTQALARDSLVRPRVICTAGTPSQRECEAIGALADTGWNIAVRADFDQAGLAHMRALLAAAPSAVAWRMGAADYLAAVPEGSDVLHLQGSDAPWDDHLVPVMRKHSVPVYEEDLLPALLADITAGAPGSCAL

SEQ ID NO: 39633 - protein, 496 aa, Geobacillus stearothermophilus
MDATWLKPIVETKYLSTENAHRYRAILRYFYIQHERMRQYLFPEEVYAFLKQHEEFADYTEDDLQQDLDQLVKWNNLIARQETSHVRTIEEFKKKRFRYQCSPYTVEIERMIRTLEQLGDSFGGSLEKTRFDRLYASLSRIEAIIASGFQEQRDEMYQVWEETFDYFKKIIQNSADYMAYLHSENVEERMTSESFLVYKEQFTAYLRDFIVALQKTSMQIEQLLENLPEDGVRQFIGHVVDYERSIPRFADSLPPRPMQIEEKWETWRSLCEWFLGRNGRESELLFLQYQTNEAIRRLTRVVQRLGERHHHFRSRKGDYLHLARWFSRLESIEEAHCLSAVVFGCFHTKHLVADTEATDNIYRDVWDEPPAEWVTKPRVRHYGEKKKPQAMEDKEREKEEARLRYLEEKAREEAALRQLVTDGKIVLADLPEVTPYVRKTLLGWIAKAMGREGQAIKTENGWVVKVAAKEGTICLRAEDGELVMPNYEIHVLAGGE

SEQ ID NO: 39634 - protein, 398 aa, Geobacillus stearothermophilus
METAFDDKAKEALAALFEQFWIIRDQEPDLYQLVREREHVLKKYVEEKFGYRLIVHRYFAKLEKIPADPEPWMGIESFQEPLDYALFCCLMAYLEGKAVEDKFLLSDVCEEIRAMYPGDLPVDWTNYAHRRALIRVLKTAEQIGLVRRMDGEIEAFAQHAEEEALYEVPVLARYFMRTHPKDLLRYESIEELMAEEWKASPQDYRRHRLYRKLFLSPAVHRTEGDEQDFYYLRNFRHRLRDDIEAHTPFRYELYKNAAMLTLPERQAPYTTFPDQKGTSEIILHFSALVRERLQDYPPDEYGRIRLTPEQFSAWLADCRRRYGAGWGKTYRDMSAAELVREVLAALCEWRMADIERDTGMIVLYPLLGRVAGRYPDDFDAKEGEEHGESMGASSRGTD

SEQ ID NO: 39635 - protein, 1373 aa, Geobacillus stearothermophilus
MANPWVLHRAGLINFWYYDEQYFHFADGKLLLRGSNGAGKSVTMQSLIPVLLDGKKTPDRLDPFGSRARRMEDYLLGEKDVVNRDERTGYLFLEYKRKESDQYVTTGIGLRAKRQKSLDFWGFVIFDNRRIGHHLTLYKKEKTGEKIPLTKRELAAALGAGGTVVDTQKEYMELVNKHVFRFESLESFQELIELLIQLRSPKLSKDFKPTVIYEILESSLPPLTDDELRHLSDTIENMDQAKQQLEQLERDERALKRLCDQYRLYNEYMIAEKAAEYVKAVKQAEQLAAEQQRLHDEEEQARTTLDELEESITRLGREEDVLRAREIDLAGHEVFQQAEKYEQLKAEQQRLEERRKRHEQTIAEKERQERQHRRRLDEAEARLDDLERKLEDELEQLRMDADEGSFSLHETNEGDFHRHRQKEQEFLFAAWKQEADRHIERLEGLARLWRRHDEVKQRYEEASSEAGERQREMDEWRHQQRKWEELLEQEKERFEQAVLAWIGQGDVDISEADIQSFLQQMDALYEQYSLDDLKRPFVQAYYDAVGKKKDEKWRLEHDIRLLEEKRAEREAELRRWREQRDPEPERDEQTTAARLALEEKGIPFVPLYAAVEFVDDVPDDVRERIESALSHAGLLDALITAREIDVACDRVLIPKPVHMAHTLADYLRPDANAPVSMERIDEVLRSIVITDADQEGGMTIDETGRYSLGLVRGHAPRGSKAAFIGRAARERWRLENIAALEAEIAAMGQEIDRLRGAHEDVEAAIQALADWLASFPADRDVRTAFDEAQEARRQAESKEREWKRQEEKAALLAREWKQIKQQLRDESAELDLAFTLDGCEQAMLAMKSYVRHLHELEVLYRETRHTEAVIAQQREQLAVLEAEIDEAKGERNRLRDETERLALRIAEMERTLAQMGADDIRAEIARIQERLASLRREIPRLVNERARTEQQLMRLAEEREKEARREAFARELAAMWEKSFAREAALGLVDLDRSRSLLEQAKEAKQRYEAVLKETRSSLLARLNTVFFQESSNLTEYRASFEPLEEQTKPEWTAAAPDDEMAMKAADWREKQERHVIYLDYKGERATPFAVLAEVERDIVLQHEYMKEQDRELYEDVILKSVGRILRSRIQRAERWVNDMNKLMGGLDTSSGLVLSIQWKPKTAETEAELDTKELVRLLRLDPRLLREEDLQRVTNHFRSKIARARELLEERGQGSTLHQIIKEVLDYRKWFSFTLYYEKTNEPKRELTNHRFYQFSGGEKAMAMYIPLFAAAYSRYQEAGDDAPYIISLDEAFAGVDENNIRNLFGLVEQLGFNYIMNSQALWGDYDTVPALSICELVRPRNASFVTVIHYRWNGRVKQLMVNDKEWETIET

SEQ ID NO: 39636 - protein, 406 aa, Geobacillus stearothermophilus
MSTAKEAAAFFRSEPGFRRLFIEMKHKYESLGRVGGAVSLEAFTDEEREAVAAFFGKDVSRVSLIAFEKQLGQTRFAGVGLVELLEQYFGAPLVSNKERRQAEEEERDRFFARLTEEHHWVESVRPQRFVQTAYETDRRSLEEAIRLVSAALGRLPLPSYMRLPLFAQQVAGDPHAFDLSTLPGRLLLSALQATVPGDWDMASVESVNELLQSVGLLREDILNFVTCANILAETKDGPHPVFSAAWEANTALNMPLRDVLSLVRARPAHGGTVYIVENAGVFSTLLDTRAPLVSTNGQMNLATMKLLDLLTSSGAKLYYSGDFDPEGLAMAERLQERYGQAVTLWRFSVEDYRAANPVVDLTPERLAKLASVTSEPLRPVKEAIGRKKKAGYQEAIIGRLTGDING

SEQ ID NO: 39637 - protein, 491 aa, Lysinibacillus sp. BF-4
MNVLTKQVIETSYLTAPSAAQYRVILRFFYEQHERMRDYIAPEEVLHHMRTFNQFENFDEEQLHQNLAQLVLWNNLVARQDMTKARTVEEYKKKRFRYQPTPYTIEIERMLIKLESIVDNTFSGSLESSQFERLLQALQSLEDKSLNIEQQVKIWEDIVHYFNEIRRNTADYIAYINSEKIDQRMLTEAFLVYKTQFSHYLRNFIVSLQQTSLQIIELLQNKSIEHTMLAVFDSLITKEKIHDQIVGVIVSDDSRLKSYQAKFESIKRWFLETDGQKSELEMLQWQTNEMIRRVTRYVQRLGERQHYFKSRQNDYLQLAKWFSECPTIVEAHEISAIVFGAMQTQHVQLKTDTTDDLYSDTWSEKPEKIVIKPRTNRYREKTKATGIDLKETEKRAQREKYLSERRQQELLVKNYFKHGTVQLSKLSVIEPFMRKLLLTWMSKARTSDKNLVTTEFGTLLRITMLEEKTTLRAQDGDLLIQDALFEYVKEA

SEQ ID NO: 39638 - protein, 382 aa, Lysinibacillus sp. BF-4
MEEVFDEKAVQGLDYLLHHLWVLRKDNANMYRQIRERQKVLQRYVSDKLGLQLHVHQHFIKLDKLPVKAESGMGIQQFTTPMDYIVFCYALAFIEGKRIEEQFLLSELTEEIQATSYKQIALDWTLFHHRKSLIRVMKVLVEFHLIEIIDGDVQRFDHHEEQEVLYEVTIYSRYFMRTHPKAFTQLQNAQELLQLEHQLVSEDERRKRVYRQLLLTPALYRESNQDQDFLYVRNYRNRISDDIEKYTDFKLHVFKNVAFLSVTEPKRYYQSFPNTKAITDIVLQLSQYLHQNIANYNSQENGMIALTEHQLTEILLQLKEQLGEGWAKLYRDKSIASVQKELIDELIYWRMGSICADFIYIHSLLGAFVGSYPSDYSKEEKL

SEQ ID NO: 39639 - protein, 411 aa, Lysinibacillus sp. BF-4
MTNINVFRHSAFLKLFKQFKRKYYSFGSMRGNVSLKDFTADEVKEIAGFLGVPEYQLNQKRSVSLQQFEAQLATTSFSQFTLKELLEEILEEKLQSKEEDERLKGNTKKQFINDLQEILSDLPQWYNQIQKQTGDSKFIWQEQKALLPTIQLVAKAVSRQLKGNDFIRLPILAQLATGDPHAFDSKNIAGKLLVHAVYSLSKQPVNYPKTREEQVDLLGDLKIIQDDLWNFVTFQGLLGYEQKELHPLWQAAVATKSAVNMPMRHLVSITKVRPAIGKRVYIVENSSVASTLMDAHPKAPIICTHGQLRMASWRLLDLLSSEIELYYSGDLDPEGLRIAQHISNRYSERVHLWRMDEACYHLGMTGELTAKRLSNLQSLTILPTITEQMKRHKKVSYQEAWLDLLVADIKI

SEQ ID NO: 39640 - protein, 497 aa, Amycolatopsis lurida NRRL 2430
MDPIRVPPEMFRFTDGSRSGLPLAILHAFGEANERLETALGIDDVRTRLREVGWLETLDDEDLVKALDQLRSQGHLDVVQSHAGDYRTASEYERRNLQYSLSRQGEAAYAGVVRANEVLNASGALQTATLEALGERLGELAKQLEDGTDRRVFSTLTEVESHLEAFRDNTKRFNGDLQRLLHAEADLATFHEVKAATVTYLQEFLNDLEHHTHTIATRIKEIDDHGVERVHRRALNGASLPNPDARWIDVRKARWDGLRAWFLPEDGATPRVEDLHRLARRAIITLLQVLDRITESRRRASSAVADFRELARWFTVVPAQEDLHRLWSTMFGLSSARHAHLAHADPEVVSTTASWLDAPPVEVSELLRSAGRTERFTRTGRVRDVSAIRAARVQQAIAERAELEAAWNMLDTGGVVRLSAFEKLDHSVFERLLDLLGQALGSAVGADGTRRSTTSDGQIEIVLRPPQNGAVARLTTTSGVFRGPDYEIEISTAGGGA

SEQ ID NO: 39641 - protein, 406 aa, Amycolatopsis lurida NRRL 2430
MSLTNQLVIAEREEVARGIRALLATPLIGERGSPETFDLIRRRREPIRQWFDYYCGWTLTVEPRLGYARLVKVRAATDPTRPARRLRSGRAAFDRRRYVLLCVVAAELLTVPVTTIGLLAGRVAQASAADDLVTTFDVATRAERLAFVDVLKLLESYGVLEAADGDPESFVDDPAAKVLFRVDATLLLRLLAAPVGPSQLAVPADDVALRFEELLEAVSHEQRYGLSSGRHEDTPSASDVQRNLWLRHTVFRRLVDDPVLYFAELTAEERAYLGTPTGRQLLRRAAEQGGFVLEERAEGVLLVDVDGLATDERFPDDGSNAKVAALLLLDALDEPRTTDYLQKATAKLLKRFPRWAKTYRGKDGVRRLTVDALAVLTGFGLIRTEAELVRPLPAAARYTDRTEEAP

SEQ ID NO: 39642 - protein, 1327 aa, Amycolatopsis lurida NRRL 2430
MTVTRWMPSRAGILNIWRYYDEIFEFHDGRLLLRGPNGSGKSKALELLLPFLFDASLRANRLSTFGTSERSMHWNLMGEGASGATRVGYVWLEFGMAGEKWFTCGARLQASTHTSTVHADFFTTDLRVGDGLPLVNEAGQPLTKNALEEALGDHGTVHDGAAEYRAAIRAKLFPTLSEQRYDALITALLQLRMPKLSQRLDPSLLSNLLSRALPPLGQQEIADLAEGFERLDAQRERLGSLETEVDATRALAARQKTYAQRVLRAGAANLIAATTELDELAAAARRSAEEYDEVAAKKEAAEERAAKLEKDVEETEARLSGLTESESYRKGQELDKLRQRALSTREKAEALRADADRLRAEADADEERSRAAKQVAKRQADLVRSLETEVRAAATRANLAGVHDELVAGLGEPARLRPLLQAAVRGKRDQVETLGRALDRHELAVGRRHAAEADLDRARSDFSAAQERLDLTTATRELALSDLRTRLAEWAIGCRELRFPDVEAVVRDAEAEVSLVSRLGVVAETVLEDIVRRETATGAALATARAEHDELLVEAGVLETEDVLTPEPPRTRTTDRTEMSGAPLWRLVDFAGTVPESARAGIEAALEGAGLLDAWVNSHGVVDGHDVLAETGTLPVATGRSLADVLVPEPDAELSPAKIRRILEVIAFDDTLPAGPAAIGADGAWRMGGLSGSWAKDAPAYIGAPVRLRARERRIAGLRDKISLREKTIAELESELAALRGRRELIKIERAARPSHEDLFAATGELTAAEAELTAADAAVRHLETAVSALEIEAKTALHELTAQASESGLPSERAPLAALAPALRTYSDQGENWLYEHGNLLTATQRAELCAEQADRSEANAARREDEASEAEAERVKLTAMLEAIEGTAGSGQREVLAEIEGLRTKLRELSGELRAANADAKELAVSLGALGVRRTTDARAREDAAKKQDAAAHRFRKLATGVFPADGGIEDLPKFQATLSASDGVRSALETARLVAAAWPSVPHAPRNLGEALHRLSEAVHTCRNTLSSRAELDLETDEDVQIFTAVVDGLRVGAAELLKILYAEAEQSRHEITDRESDLFDKTLTGDTRRHLAARIRQANDLVDGMNARLERVRTASRVAVRLVWQVSPDLPPGTKTARDLLLKDPDQLTAEDRASLHKFFRERVEQAKADDTATSWEQQLAQVFDYTSWHRFVVKVDRANGAGWQLLTKKLHGALSGGEKAIALHLPLFAAVAAHYQAAPEAPRVILLDEVFVGVDTTNRGQVFGLLSELDLDLMLTSDHEWCTYAELGGVGIHQLITGGDGDDAVTTARFTWNGHDLAPAGH

SEQ ID NO: 39643 - protein, 496 aa, Geobacillus stearothermophilus; identical to SEQ ID NO: 39633

SEQ ID NO: 39644 - protein, 398 aa, Geobacillus stearothermophilus; identical to SEQ ID NO: 39634

SEQ ID NO: 39645 - protein, 1373 aa, Geobacillus stearothermophilus; identical to SEQ ID NO: 39635

SEQ ID NO: 39646 - protein, 406 aa, Geobacillus stearothermophilus; identical to SEQ ID NO: 39636

SEQ ID NO: 39647 - protein, 503 aa, Geobacillus icigianus
MDASWLKPIVETKYLSAENAHRYRAILRYFYIQHERMRQYLFPEEVYAFLKQHAEFADYTEDDLQQDLDQLVKWNNLIARQETSHVRTIEEFKKKRFRYQCSPYTVEIERMIRTLEQLGDSFGGSLEKTRFDRLYASLSRMETIISANFQEKPDEIHQVWEETFDYFKKIIHHSADYIAYLHSENLEERMTAESFLVYKEQFTAYLRDFIVALQKTSMQIERLLEDLPDEGVDRFIEHVVDYERSIPRFADSAPSRAECIEEKRETWRSLREWFLGRDGHESELAFLQHQTNEAIRRLTRIVQRLGERHHHFRSRKGDYLHLARWFSQLSSIEEAHCLSAVVFGCFHTKHLIADNEATDDMYRDVWDEAPMEWVTKPRVRHYGEKKKPQAIEEKKREKEEARRRYLEEKAREEAELKQLVKDGKIVLAELGEVTPYVRKTLLAWIAKAMGKEQPTVKTENGWDIRIVRRDDTICLHAEDGTLVMPNYEIEVMAEGGSEDGDGV

SEQ ID NO: 39648 - protein, 385 aa, Geobacillus icigianus
METAFDDKAKEALAALFEQFWIVRDADPERYQLVREREHVLKRYVEEKFGYRLIVHRHFAKLEKIPAEPEPWMGIPSFQEPLDYALFCCLMAYVESKAVEEKFLLSDVCEEIRAMYPGDVPVDWTNYSQRRALIRVLKTAEQIGLIRRMDGEIEAFAQHADEEALYEVSVLARYFMRTYPKDLLQYTSIDELLAEEWKAAPQDYRRHRLYRKLFLSPAVHRTEGDEQDFYYLRNFRHRLREDIESHTPFRYELYKNVAMLTIPERQAPYTLFPDLKGTSDIILHFAAVVRERLASFPPDEYGRLWLTPAQFSESLADTKRRYEAGWGKTHREASLAELAREVLAELEAWRMADTDPETGMVVLYPLLGRLCGRYPDDFQAKEREL

SEQ ID NO: 39649 - protein, 1372 aa, Geobacillus icigianus
MADRWMLHRAGLINFWYYDEQYFHFADGKLFLRGSNGAGKSVTMQSLIPVLLDGKKTPDRLDPFGSRARRMEDYLLGEKDVVNRDERTGYLFLEYKRTETDQYLTTGIGLRAKRQKNLDFWGFVILDNRRIGHDVDLYKKEKTGEKIPLTKRELADALGAGGTVVETQKEYMELVNKHVFRFESLEAFQELIELLIQLRSPKLSKDFKPTVIYEILESALPPLTDEELRHLSETIENMDQAKQQLEQLERDARALKRLCDHYRHYNEYMIAEKAVEYEKAVQRAEQLAAEQRTRSEEENKARQRLDELDEEIIRLSREEDVLRAREVELAGHEVFQQAETYEKLKEQQRDLARRRERQERVIEEKERLERQRRHQIDEAEARLDELERKVEETLAQLRADADEGAFAGHEVNEGDFLRHHRQQREFPFTVWKQEADRHAERLEALADLWRRHEGLQARYEEASKEAGELQREVDEWRHQYRKWDELLDQEKERWEQAVLAWLERGGVTVDEARIQTFLRQTDGLYDQYSIDDLKQPFTAAYYDAVGKKNDEKWRLEHEMRLLGGQLAEREQELRHWQTEQDPEPERDPQTDAMRAELEQQGVVSVPLYAAVEFFDHVPEPVRERIESALAHAGLLDALIIDRDMAVTYDRVLVPNPVHMAHTLADYLQPDAGVPVAAERIDAVLRSIVIADEAQDGGMTLNEAGRYALGLVRGHAPARERAMFIGRTARRRWRMEKIASLEEEIASLRQALDRLQAEHKAVEAHIAALAEWFAAFPSDRDVRAAFEEREEARRRAESKERDWQRQQEKVSRLAREWQHLKQTLREQSAGLDVAFSVEGCDRARLAMKSYLRFLHELEVHVREALYVAVMITQQREQLQELRDDIDEAKGERNRLLDEDERLALRMAEIERTLQQMGADDIRAEIARVRERLSALREAVPRLVNERARTEQRLARLAEEREQGEKRATFARELAAAWEQAFAREAALKLVELDRSRPLREQASEAKQRYGGTLKDSRSSLLARLNTIFFQESSNLTEYRATFESLPFEEKEWSTAAPDDEMAMKAADWREKQERNVIFLDYKGQRATPSVVLAEVEREIALQHEYMKEQDRELYEEVILKSVGRILRSRIQRAERWVNDMNKRMSEIDTSSSLVLSIQWKPKTAETEDELDTKELVGLLRMDSRLLKEEDLQRVTNHFRSKIARARELLEERGQGNTLHQIIKEVLDYRKWFSFTLYYEKEHEPKRELTNQRFYRFSGGEKALAMYIPLFAAAYSRYQEAGDDAPYIISLDEAFAGVDENNIRMMFGLVEQLGFNYIMNSQALWGDYDTVPALSICELVRPRNAPFVTVIQYYWNGRIKQLVANEEEWELIET

SEQ ID NO: 39650 - protein, 406 aa, Geobacillus icigianus
MNRAEEAAAFFRSELGFHRLFVEMKRKYESLGRVGGVVSLASFSENEREAIAAFFGRDVSRVSLPAFERQLERTRFAGVGLIELLEHYFGEPLVPKKEQRQAAEKERERFFGHLAHEHPWLEDICGQRFIQAAYEANREELAAAIRLVGAALRRLPLGSYERLPLFAQRIAGDPHAFDLSTLPGKVLLSALQATVLGEWDVTSVESVNELLQSVGLLREDILNFATCANLLAETKKGPHPVFTAAVEANSALNAPLRDVLSLIRAYPANGGIVYVVENAGVFSTLLDTRAPLVCANGQMNLATMRLLDLLAASGAKLHYSGDFDPEGLKMADRFLERYGSAAVPWRYSVDDYFAATPSVHLPPERLAKLASVASTPLQPVKEAIAKTEKAGYQEAIISRLLGDIKS

SEQ ID NO: 39651 - protein, 493 aa, Anoxybacillus sp. KU2-6(11)
MDTSWLKPITEAKYLVVDNAYRYRAILRYFYTQHERMRQYLFPEEVYAFLKQFDEFQAYTEEELQQDLEQLVKWKNLIARQETGHIRTIEEFKKKRFRYQCSPYTVEIERMIRTLEQLGDTFGGSLEKTRFDRLYASLVRMESIIHAGFVEKREEMNQVWEETFDYFKKIIQNSADYIAYLNGENMEERMMSDSFLVYKEQFTAYLRDFIVALQKTSMQIEKLLEDLPEEGVRRLIEEVVAYQLAIPRFEGAVFSREQLTEEKLDTWRSLKEWFLGRNGHESELSFLQKQTNEAIRRMTRVVQRLGERHHHFRSRKKDYLHLAKWFSSLETVEEAHKLSAVVFGCFHTKHIVAENDATENMYRDIWEEQPAEWLVKPRVRHYREKKKPEAMIDRRKEKEETMTAYLAAKQQEEEQLEQLINDRKIILRELPVVASHIRKTLLGWIAKAMGREDRIVQTENGWKVKVVQCEGTITLKAEDGTLMMPNYEIHLLD

SEQ ID NO: 39652 - protein, 1379 aa, Anoxybacillus sp. KU2-6(11)
MTNKWVLHRAGLINFWYYDEQYFEFADGKLLLRGTNGSGKSVTMQSLLPVLLDGKKTPDRLDPFGSRARRMEDYLLGEKEIVDRDERTGYLFLEYKRKQTEQYVTTGIGLRAKRQKNMDFWGFVIFDNRRIGRDLFLYKTEKSANGTEKIPLTKRELANLLGNGGTVVDSQKEYMELVNKHIFRFESMEAFQELIELLIQLRSPKLSKDFKPTVIYEILESSLPALTDDELRHLSETIENMDQTKQQLEQLERDEQSLKRLCAQYRAYNEYMIAEKASEWIKADKQVKRLAEEGKQWLTEEAEKQTHLADLSEYIQTLANEQDVLHQREIELASHEVFQATKEYERVQQEINDIHEKQQKLLRQIDEKEQLERRYKRQLGEDEDRRYQIEKQLAQQLEDLRHDAMESSFSAHDLNEADFSRQRQTKFDFTVWKREGQEYAEKLEQAIALWRRHDEMKARYEETSKEVGDLQREVDELRHEETKWLELLENEKSRFQQEVFRWLEQCQDVFVREASVQLFLQRLHELYETYHVDEMKQPFTEAYYEALNRKNEEKMAQKHACALLEEKIAAKEAEWNQWKTQKDPELARDEQTMAARAELDEKGIAFVPFYAGVEFQDHVPEPLRERIESALYHAGLLDALITETDVEVSCDRVIVPRPIEMAHTLADYLQPDVDEECGVSKARIKEVLQSIVLADREMDGAFMLNEEGHYTLGIVKGHAPAREKALFIGRAARKRWRLEKIAALEAELIELRAQLHEQTDRLKQLEQTIAQINSWFRAFPTDRDMRAAFEEREKTKRMTISKQQEWERKNEKLAQLARDWQQAKQTLREYTEGLDLEFSKDGYEQALLFMKSYMRGLHELQMIHREFLHLLDMIRHRTEQLETVQQEIDETKGERHVLAKEQQKLELKRQEVERTLQLMGAEEIQAEIQRVRDRLAFLQREMPAKLNERIALEHELKAIGEKCEQLVVKEAFAKRLAEAWKRSFEREVALELVDLHAHDTFEQAKEAIQRYGALLKETRTSLVNRLNSIFFQESANLTEYRLSQEPVSVEETNPFIDIELDEEMELKVAGWREKQDRIVLLLDYKGQRVSPFYVLHEIEHDIFLQREYMKEQDRELYEEIILKTIGRILRSRIQRAERWVKDMNELMQQLDTSSGLVLFIQWKPRTAETEEEMDTKELVELLRMNSRLLKEEDLQRVTKHFRSKINRARELLEERGQGNTLHQIIKEVLDYRKWFSFTLYYQKTNEPKRELTNQRFYQFSGGEKAMAMYIPLFAATYSRYQEAAEDAPYIISLDEAFAGVDENNIRNMFGLVEQLGFNYVMNSQALWGDYDTVPALSICELVRPKNASFVTVIRYYWNGKVKQLVAEDARKGELIEPIR

SEQ ID NO: 39653 - protein, 410 aa, Anoxybacillus sp. KU2-6(11)
MNRLDEAVQFFRGERSFHRLFCEMKKKYESLGRIGGTISVASFSMEEKDAIASFFGKEMSRVSLAAFEQQLTNTRFAGISLIELLEHYFGEPLVTKKEQQIEAEREKEAYFTRLMHTYRAQRDWLIAVEKQRFVQLAYQQTPQTLEVALSAVCRALEQLPSTYTRLPVFAQKVTNDPHAFDLHTLSGKLLLSALQFYADTEYDLSSVEDVNELLQSYRLLREDVLNFVTCVGVMAEIEKGRHPVFAAACETNTALNVPLREVMPLTRAYPSIGNTVFVVENAGVFSTLLDANVPLISTNGQLNLATMWLLDLLVQEGVILCYSGDFDPEGLKMAQRLVERYGQSVRLWHYDCSDYLATKPTVPLSDERLAKLQSVTLYDLQAVKQEMLRRKKAGYQEALVEQLRGEVKRR

SEQ ID NO: 39654 - protein, 497 aa, Amycolatopsis sp. MJM2582
MDPFRVPPELFRFTDGSRSGLPLAILHAFGEANERLETALGIDDVRTRLREVGWLETLDDEDLVKALDQLKGQGHLDVVQSHAGDYRTASEYERRNLQYALTRQGEAAYAGVVRANEVLNATGALQTATLEALGERLGELAKQLEDGTDRRVFSALSEVEGHLEAFRDNTKRFNGDLQRLLHAEADLATFHEVKAATVAYLQEFLNDLEHHTHTIATRIKEIDDHGIERVHRRALNGAALNNPDQRWLDVRKARWDGLRAWFLPADGATPRVEDLHNLARRAIITLLQVLDRITESRRRASSAVADFRELARWFTVVPAQEDLHRLWSTMFGLSSARHAHLAHADPEVVSTTASWLDAPPVEVSELLRSAGRTERFTRTGRVRDVSAIRAARAEKALQERAELEAAWNMLDTGGVVRLSAFEKLDHTVFERLLDLLGQALGRPPGAEGARRSTTSDGQIEIVLRPPRNGAVARLTTTSGVFRGPDYEIEISTAGGGA

SEQ ID NO: 39655 - protein, 406 aa, Amycolatopsis sp. MJM2582
MSLTNQLVIAEREEVARGIRALLATPLIGERGSPETFDLIRRRREPIRQWFDYYCGWTLTVEPRLGYARLVKVRAAADPTRPARRLRSGRAAFDRRRYVLLCVVAAELLTVPVTTIGLLAGRVAQASAADDLVTTFDVATRAERLAFVDVLKLLESFGVLEAADGDPESFVDDPAAKVLFRVDATLLLRLLAAPVGPSQLAVPADDVALRFEELLEAVSHEQRYGLSSGRHEDTPSASDVQRNLWLRHTVFRRLVDDPVLYFAELTAEERAYLGTPTGRQLLRRAAEQGGFVLEERAEGVLLVDVDGLATDERFPDDGSNAKVAALLLLDVLDEPRTIDYLQKATAKLLKRFPRWAKTYRGKDGVRRLTVDALAVLTGFGLVRTEAELVRPLPAAARYTDRTEEAP

SEQ ID NO: 39656 - protein, 1327 aa, Amycolatopsis sp. MJM2582
MTVTRWIPSRAGILNIWRYYDEIFEFHDGRLLLRGPNGSGKSKALELLLPFLFDASLRANRLSTFGTSERSMHWNLMGEGASGATRVGYVWLEFGMAGEKWFTCGARLQASTHTSTVHADFFTTDLRVGDGLALVNEAGQPLTKGALEEALGEHGTVHDGAAEYRAAIRAKLFPTLSEQRYDALITALLQLRMPKLSQRLDPSLLSNLLSRALPPLGQQEIADLAEGFERLDAQRERLGSLETEVDATRALAARQKTYAQRVLRAGAANLINATTELDELAAAARRSAEEHDEVAAKKEAAEARAAKLEKDVEETEARLSGLTESESYRKGQELDKLRQRTLSTSEKAEALRADADRLRAEADADEERSWAAKQVVKRQADLVRSLETEVRAAATRANLAGVHDELVAGLDEPARLRPLLQAAVRGKRDQVEALGRTLDKHERAVGRRHQAEADLDRARADFSVAQERVELTTATRELALSDLRTRLAEWAIGCRELRFPDVEAVVRDAEAEVSLLGRLGVVAETVLEDIIRREAATGAALATARAEHDELLVEAGVLETEDILAPEPPRTRTADRAEMSGAPLWRLVDFAGSVPESSHAGIEAALEGAGLLDAWVNSHGVVDGHDVLAESGTLPVASGRSLADVLVPEPDAEVSPTKIRRILEVIAFDDTLPAGPAAIGADGGWRMGSLSGSWAKDAPAYIGGSARLRARERRIAALRDKISLREKTIAELEGELAALRGRRELIKIERAARPGHDDLLAATGELTTAEAELTAADAAVRHLEGAVSALEIEAKTALHELTAQASESGLPTERAPLAALATALRTYSDQGENWLYEHGNLLTATQRAELCAEQADRSEGNAARREDEAADAEAERTKLTAMLDAIDGTVGTGQREVLAEIDGLRTKLRELSGELRAANADAKELAVSLGALGVRRTTDARAREEAAKKQDAAALRFRKLATGIFPADGGIEDLPKFQATLSASESVRAALDTARLVAAAWPSVPHAPSNLGEALHRLSEAVHTCRNTLSSRAELDLETDEDVQIFTAVVDGLRVGAAELLKILYAEAEQSRHEITDRESDLFDKTLTGDTRRHLAARIRQANDLVDGMNARLERVRTASRVAVRLVWQVSPDLPPGTKTARDLLLKDPDQLTAEDRVSLHKFFRERVEQAKADDTATSWEQQLAQVFDYTSWHRFVVKVDRANGAGWQLLTKKLHGALSGGEKAIALHLPLFAAVAAHYQAAPEAPRVILLDEVFVGVDTTNRGQVFGLLSALDLDLMLTSDHEWCTYAELGGVGIHQLITGGDGDDAVTTARFTWNGHDLQPAGH

SEQ ID NO: 39657 - protein, 510 aa, Burkholderia oklahomensis
MQSNATAAELFRHLGAEKSAFYRCIMDVFAAAKRQYRLQLRPDEVLAEANWSEGMPRIEEVNAALTQLTEWGNLESQPDTARVSSLSDFYRARFLYRLSHGGEAVETSLAVFFQTLQRRAELQSVALEDIASRLQALQQLIDDDTPENGLDVAKTHQLLRDLVGVFHDLAENAQAFMAGVARSLELRQAEANAVVAYKRRLIDYLDRFLGDLVRRSDFIAQLIEELAPRIDSVFLLVADREAQDAAPEDTQNQADEKLRRWRAWRERWKGLRGWFLSTGQEPPQAELLRARARAAIPLLLGAIATLNERRSGRSDRSADFRMLAYWFAACNSDSEAHRMARAAFALHPARHYSLNPQADDDLPATTPWADAPPLQINPRLREYGEAAPRGPLPKVRDRSTERALMAEQLAEESRQVDAARQRLATGRPIRLSELGDLDVHAFALFLNLLGEALTEQAHPDQTVERQTGDGLLYIRMEPLDATTEARITTPAGVFAGRDHLLTITLTQEPT

SEQ ID NO: 39658 - protein, 424 aa, Burkholderia oklahomensis
MTARTSWGHDRQRIGELQRVQQQDEFRRALRALLLQPLMAPDHDAFPAVRRQAERLRDWFARETGWPLHVERDGARLFKRPANLADDTRGLPNFDRQRYVLLCLACAVLERADPQITLQLLGERLMQLASDPTLVSCGFQFTLGSVAERRDLVAVCRTLLDFGVLQRVAGDEDNFVHENGWTQSDALYDVQRRMLAGMLAAVRGPSTWRVEDAPIDFEDRLRSLVAEHVADSEQGHRDALRHHLARRLLDDPVIYGASLDPEHLAYFINQRGAMAARLCEATGLTTEQRAEGLALTDESGELTDISMPAEGTEAHITLLVAEFLASRQREVPEIALTSQDAVAAFLRGATEQYGRYWRKSAREPGAEMELAEIALDRLERLQLIVRIHREIRPLPAIARFALGDPEIRSKATGDVTPELLLIDA

SEQ ID NO: 39659 - protein, 1393 aa, Burkholderia oklahomensis
MTDTLFDSPQALRPVLPEPRHERWQPLRIGLVELFHYDSEEFWFRDGHLLLRGNNGTGKSKVLSLTLPFLFDAQLRPSRIEPDGDSGKKMAWNLLMDGYKRRIGYTWIEFGRRKADGMARYLTLGAGLSAVTGKTQVDSWFFLIESSSGEQDPRIGQDLWLTNEQRIVLTRERLRERLEERGHGTVFENGRNYRRAVDERLFHLGEKRYEALMDTLIQLRQPQLSKKPDESGLSHALTEALPPMPQELLADVADALNQLEADREQLNNTRQLEQAVRHFEQRYRTYASTLTRRQARELRQAQTAFDNASEERNNAQNVLHTAKEAEAEAIRTRDAAKQASTAARERLETLQSDPANQDANRLSQAERDVKDRKEEAAKAEEQREEARRQLEREKERSRASNQRAEAARSEVASARTQCASDAQTAGTAVALSRNPLVALPLDELAELPVTQFTSAATELRDAANRRRENIRYLEQRHAAVATKRSTLQTLQAAQNDCQAELEEAIERRAEADLDAETTGNALIDAWTKYCAGLEQLRFEPQNALSELAGWTARPEGINPVHSALITAYSQALEQHAARQTELATRQRDLDQERRVLADEREQLAAGQDAIPPVPSTRGANVREGRAGAPLWQLIDFHSHVTPQQRAGLEASLEACGLLDAWVAPDGNVCDTAGRPIWDTQWRQRPAVAGENLLSLLSPAVPEDCTVDPALVEALLASIACGPEDDLAAESWIAADGRFRLGALTGAWDKLEAVYIGHTARAQARQCRMQEIALRLRQLDAEASILLQAVEALAADRAKTKEELGGAPTDTSLRQAILAAASAERDVLQARTRLDQADTRCRAAETELYAAREALENDAVDLQLPLDQAGLAPIDSALDRFTDALHILSQAGREWRSAWPDHLKQQEREIEAQVTLERREDELSTVNERREKTLARYAVLTEAIGAKVETLRLQLNEANRNATEAATDADHKQAVLIEAAEARAVADTQATTANRVLAERADIRTLAVERLQRFTESTLLASALPDLPLPPASMPWTIDPALQLARRAEQALAHIGDDDVSWSRIQRQVSEDLTELQRSLSALGHQAASEPNDWGFTVHVNYQNRSERPDTLAVHLADDIAQRSELLSAREREILENHLQAEIAAEIQRLMRAADKQVNAINDELYKRPTTTGVRYRLQWQPLAPEEGGPLGLEIARERLLNTSSDLWSAEDRRVVGVMLQQQIAMERARAEDDATASGFSLNDQLARALDYRRWHRFRVQRQRDKNSSWQKLSGPASSGERALGLTVPLFAAIASFYGRGGNPHAPRLMLLDEAFAGIDDAARAHCMGLIREFDLDFVITSEREWACYAELPGVSICQLQRREGMDAVFVSRWTWDGRAKRRESDPDRRFPDK

SEQ ID NO: 39660 - protein, 431 aa, Burkholderia oklahomensis
MMRTDTPASPDARLQRLLGGAQLGSLRQRMRRHFERVDNGTAGSSLLLTQLSPAEHEALGSLIGRPFRISRSVRVDIERLDSALRDAGIADSLRAALERIDGPIVSRAAVKANTHAQWARMIALDSWHGVLRAWLKTPAALGLLKRLSRQDPTTGKQLLGRADATLHRLPAQGIARSQLAAETLGNAHALDGGEPTATIVLAAWRHMEHTAAYNDNLRDANSNPDDPPQLDDRTRDIWARAGVLVNELSRPALFLNLPVTAGDPAGGPPGEPGYASLRRLLRTPPAWSVRGTTVFVCENPNFVAIAADQLGAASAPLVCTDGMPAAAQRTLLTQLVHAGAHLTYHGDFDWPGLQIGNQVMSTWHARPWRFATRDYEAAVTNSPPVTHELSGTSVSASWDESLAAVMQRHGIAIAEEAVAAVLLEDLSRRCP

SEQ ID NO: 39661 - protein, 496 aa, Bacillus coagulans
MDQIMKKVVEASYLTADSAAQYRVILRFFYRQHERMRDFIAPEEVLEYLRSLPAFQDYAEEQLHQQLAQLVKWNNLVARQDMTNAKTIEEYKKKRFRYQCTPYTVEIERMLIQLEKLGDQFQGSLERSQFDRLLASLEKLEEELEQPLNKPAADYMHIWDDIFHFFGTIRTNTADYIAYINSEKTSQRMQTEAFLVYKNQFTAYLRDFIVSLQKTSLQIRGRLRELDGQRLAPFFEKLVEHRRQIPRLEDTAASEQEWLEEFHEYWGSLRRWFLGGSSSQSELEMLQMQTNEMIRRMARYVQRISERQQHFRSRKKDYLHLAKWFAECRNLEEAHQLSSIVFGTMTVRHLHLEEATTDNLHAETWEEQPEMRQIKPRTNRYREKTKPGAFRSNHEQKEKQRLAYLKEREQEKQLIEKYMKNGEIRLAEIGTVEPFVRKVLLGWIGKSMAAKNHEVKTDYGMTVRVAMNPDHLITLDAEDGKLIMPDVVFERSGGER

SEQ ID NO: 39662 - protein, 387 aa, Bacillus coagulans; identical to SEQ ID NO: 38821

SEQ ID NO: 39663 - protein, 1364 aa, Bacillus coagulans
MNRAGLLNFWYYDDEVFEFADGKLLLRGTNGSGKSVTMQSILPVLLDGKKTPDRLDPFGSKARKMEDYLLGEKEVSGHDERTGYLFLEYRKQGTKQYITTGIGMQAKRHKTLKSWYFVLTDNRRIGYNFELTHTRQSERIPLSAKELENRIGSGGHLVHSQKEYMELVNKYIFGFQSMEAFEDLIKLLIQLRSPKLSKDFKPTVIYEILESALPPLTDDELRHLSDTIESMDETEQQLEQLEREHESAKKLVRQYDLYNQYILAERAQKWQEAESRLQEAKQEAGTLAVRCESLRGVIENLTEDQKQNEQKRDVLKAEQERLQHHEVWRLEKEKGEQQARAEKLKSEAADLEKKWELKKSQLLNIRLEQDRLETENSKDEASMQETLDELALDAGEAAFPQHEINAGDFSRHEGEAFDFSVWKQEIKQHSGLLQKLQQLAGEAERLHEMHMKLQRQSSAKKQEIDELRKQLDHLENWFTEQKQELEDAVFLWIEQHPALPFTDERLRRIAVALDGLYEENRYEAVREEIVKAANDYILQVQKEISRAEQAQKAKEQELAEAEETLMYWKNLKLANPERPQDTEAFRAGLDGAGKRYLPFYAAVEFQDHVTEAQKARIEAALRQTGILDSLITEEPVTPVHDRVIRPNPHILGYTLADYLKPDPDNDSPVSAARIDEVLRSIPLEPSDSGFHIDADGSFSVGCLVGHAPDEGPSKFIGRTSRKRYQQEKIKETEQTIAEIRLALLQIENRLSEWARKVQEAEDWKAGIPDDKDLRDLEEQIEKTARSLKQEQEFLTEIDRDWKQVYQHLQNIRLQLHEQGAGLNLVLQSGPLDEALAAAKSYEEHLHSLELIFQRLFSGRKMLARLAADILEKEQELDEIRGEENIRRSEWEKTVANIEAIEQQLKLQGIDEVRARIQAVQHEYTSTEEKIREIYEEKPKKEAELEKCTTNLSLAKTRTTFWTNMAAEWEKLVKAELSLGFVESEHTEPESILTAFSGVLEKYDRAKLNENLTKVFFNEQSNLTEYRMSEFTKEADPPDWFAEKLDDYYETFKKEWEGLRGRRLIQMEYRGRRVSPYTVLESLEKELLNLQSYLDEQDRRLYEDIIVNTVGVILRNRIQRAAKWVKEMDAIMRNRDNSSGLTFSIAWKEKTAESEDELDTKDLVALLQRNSKFLNEDDLNRITKHFRSRIAAAKELIEIRNEGSTLHQVLKEVLDYRKWFQFVLSYKRAGEPKRELSNTAFFKFSGGEKAMAMYIPLFTAAYSRYLEAGSMAPYIISLDEAFAGVDENNIRDMFEVVEQLGFNYIMNSQALWGDYDTISSLAICDLVRPKNANYVTVIRYRWDGHKRSIVEKPKESLAGATPDLL

SEQ ID NO: 39664 - protein, 431 aa, Bacillus coagulans
MKDAIDLLRKEPGMLKLFHLFKEKYRSLGHIGGTVSLSGFTRTELEAIAGLAGTSPDLLREKNKISLRAFEKALAPTVFGKYTLVELLEAVLKERIFSKAEEEEIEKKKEEQFLARLTETMPDGNGWWRRIASKTADTRFIWHAYKQDPDTLSAQLKMVWKAFTMLPEEGKYERIPFYSQRITGNPHFFDQTRFAGKLFIHCLFTDQWLKGLIEEVPKTTEELNELYANAGLMRDDLWSFVTCRAFLAETENGLHPVWREAAATGTVMNVPVKELLQLTNIWPRAGKKVWIIENSGVASAVLDAVSDAPVICTHGQFRTAAWIMLQHLAKNGCTFYYSGDLDPEGVVMAERLSSRFPGQTVFWRMDPDAYFLTLSEEDISTRLSKLDAVQSPELLLVANEMRLKKKAGYQEGLADLLIEDLKKRWLSGKEA

SEQ ID NO: 39665 - protein, 504 aa, Paenibacillus sp. FSL R5-0345
MDATLFSDVKEASYLSTKKTHRYRPIIRYMYEQKRIFNTEVLPIEIFNYLIQYPQFGDYNIEELFADLNALVKSNNLTEIPDNTEVEGIDEFKRNRRLFILTDFTFEIEKMLTSFEKNFHRIGTSLEPTLPEKLYNALHRLRDFSRRKTVDKDDLVYLNEVWEDMFDKFLKLDNNASTYMSHINAEKLEAIMAQPDAFIVFKDEFVAYLTNFIIGLKRNAPYIEQLLRDIEGPGFAVLKKYLIQFQRTIPKTEVIPDSEFEMAYDEIWLGVTHWFISREAKESKVRQLERRTNSSIVRVTKLAQQAAERQFYTRNRKTDYLHLAKIVHQQNNLEEAGKLFSFLFGFDNIKHFKTNGKETDSTKYTIWDCQPEEVDIKYRAKSPTDKQTKRSLKVPTMDEEALQRKRMLEARRDYEEKAIKKLLDCNYLALRELGTVEPFIRSAILTWINKGMLSKTQDSNICEGRTEHGVKFKLAQVSEDIIELHSPDGILKLPDYEFTFSEVK

SEQ ID NO: 39666 - protein, 389 aa, Paenibacillus sp. FSL R5-0345
MKKLTDEYLECIQRLLDDFWVLRFENEELFFYIRQYEHELRTYFRDTFRFKLVVGSDFAKLEKFQLTPQPDMGIEDFKENKDYVFYFCLLAFLEGKTTQQFTISDVCEAIVAYFPERIGSDGLPETTLISWKEAEGYYNRLSVIRVLKEAERRHLIIVVDRELDGFRNSDSNDALLKSTGLGKYFIRNFGFDITKANTLDDIISMQTEQEKGLGIETKHKMYRRLFLEPVMYKDEAQGMEFDYLRTYGHHIGDHADKFYDMNFELYLNTAMLTRRSSRRNEFTFPADNAESNLVVQFASEVRSLYIDESIISTANGNISLSVAHIEDIVRTLIEQKSSKWTATLKSQSVHELITTITKFLYKWNLARPLDDGGLMLYDATVRFDEKITS

SEQ ID NO: 39667 - protein, 1401 aa, Paenibacillus sp. FSL R5-0345
MVTFKKETNRWKPHRLILCNYWYYPYKVYQFKNGCILFRGHNGSGKSITMQSLFTFLLDGNKSPSRLDPFGSSARKLYEILLGEESVNRDIQERIGYIAIEYKREKTEEYMTTGFGLHSKRKDNRLKNAWGFVIHDPSRRINKGENPLPVYKREKLDGKWERLPLTREEFVKAVGNSGIVVDESHYAALVNSHLFKFPDVSHLEMFTEVLTQLKSPKLSREAGPNKLKEVLHNSLMPISDKEISPLTVTVESMDKTQATIEKHEQDLAAVRSLATEYAKYKRYVFAEKAKYYLDNKRILESHVKKFMEMENAIHLKSAEKETMEAEKESKSNELEVLNREYDEYRGGEVAKLQGNLDKAERELTQMSKEALAKKERYNTKNDLVTKSIEKIRKLEDAIYTAKREIGAYLVELEDMIEDTGFDDLQHLTHFKKCADDTTYDFSIWEQDSKKYLSALQTTRSKIKEYESHKEKTNALKSEIERLHSLYNEERELLKELADTYDWEREESVKELSVWVESLRTLTASNGAIKETLDLLPEYLISVSDEQLKGPLLIEKDAQVEHAQLESIKLQNLMDSLKLRRGELEATLTDLENNKEIEPYISDAKTEQFKGLTEMGIPFIPFWAAVEFKEGLSEETKANIESVAIELDLLNAVIVPVHAYDKAKTNSVVLSRNNKCDCNLTEYLTPVSSDNVSDTDILAILMGISIDHTSQTFVTATGEFKTGIVEGTSPSFGDAKFIGKTARELLRKKEIVRIQGEIATIEEELEQLHSQKEAWIETKQQIANEFSSFPFFNALKTAKNQYEEKKNFITYIVKSELDNKMEQHKKLAAELEGLLLTVKAMVAFTKLPLTEKAFSEAVEQTSAYLLLLTNIKSDFRSLVDKRHSFRTEQENKEDHENELEEYRGELFTIRNKIDRTSKYIQSLNDQLKLSGAEEVRKHIAKVIAKLQSLPAEISQLATDVGVIRNKIETMVESLPSHTSTIHFYNELCSSWEVIFVQDVRENVSEYELDETLDTKMMAKQIHDKFGALLDKKEKSQVNTELTKNFTASSMSLIEYDAELKAVPYTVNFTNIPKEEQANVELLKSVAQFSKITLQLQIEGELRTLSPSELRTKLEGYVNMQKKTLTDKDRELFEDIMINSIGETIRNKIRSANDWVNRISAFMELAKNSSGLRFQVQWKPITKQEEGELKTEDLVKLLERDPKLLADHDRLSISQHFRSKVNAAKKIMEADGKVQFLEVIKSVLDYRKWYEIIIRYEKPGETMKEMQTKHFNSFSGGEKALAMYTPLLAAVDARLQSAGEDAPRIFALDEAFAGVDDNNIEETFKIIEMFDFDYTLNSQALWGCFSEVKHLSIYDLSRPQNASYVITTQYEWDGIQKNIIADSFDDIMPEDTIEIVNEQAVLF

SEQ ID NO: 39668 - protein, 435 aa, Paenibacillus sp. FSL R5-0345
MPTIAEATQYFKEERGFDRLFPLILKRYKGLQALSGTVKLKDIEPNEVNAIERFLAKPLKIVNGVATISVEKIVEEYSKTLYGNIPFLDLLESYFGKPILTNKKEREIRSSVKFSFFENSYLPYKSALGNIIYDRIQSRSLGSAQVHLLYERDKLLLGSILPSVFIAISKLPLDEPIRLPLFASEINGNPHFLDLDTEAGRIFISFLQILLENDDVKSYESQPRAEEMTEILNFFGIWRDDVLNQVSCFGIRGYKSDDSSFLMLDAATEEKTFINLPLRDVLRLKRVETYQNTVFIVENSSLFSSLVECFIQEDNFPSILCTHGQLSLASLKMLDKLSQTADVIYYSGDHDVDGLIIAENVSRRLGHKLVLWRFDAESYTSSLSDVPLRNESRLQFITNEHLLPLKHLLQERNCAAYQERLFPEYIKDIKNALNV

SEQ ID NO: 39669 - protein, 512 aa, Paenibacillus sp. FSL R7-0331
MSRIPDIQSLRGVSELKYLNADNVTRYRSIMKYLYQQYHKLNYWLKPEQIYDGVIAWKLHKNYTLEQCQLDLEQLVEWGNLTSRHYGERAVSVDEYLKKKFQYLLTPYSIEIERLLENLVTVRGYGGSLEPTLFDTIANTLFTIRARSGEYEHGEALVLWDQINESFQKLHEASVDYIASLQTGKAEELMVTDDFLIYKDAITNYLKDFVHTMQRRSYKIEGNLVQISNGVRDVFLEAVIEDEWRIPKLEEIITKQQYYDELFEKWHILSKWFLGEHGTISEMQLLERATKEAIVKMVRSALRIQEKKRTSISRRKELEHLGQWFYKIDNLDSAHKLAAYAFGIFSTRHFHGEDRRESDSSGQSMWLETPIVKNLRSRSRKRHERQDTEAAIDNSQEKERLRLEFITRQKQELQFLKEMVDQRDISISQLDVITTSSRLQLLDWISRCNNSSNSIMQTSEGVKIHLTKPVDNERASLRCEDGQLELLDYHFTFVVVDKDNWSNLLSWAIENN

SEQ ID NO: 39670 - protein, 404 aa, Paenibacillus sp. FSL R7-0331
MRVGKLTKKRKRSNIVDKEELLNRRRVCMNALLNRPWVSKEQDSQLYYWIKDNFTSLRDWFSNYTGYILILNGKLAKLEKVPEVAYPWMGFQEFREPLDYSLFTYCLWFLEAKSEQEQFLLTDLIKEVRDSMMESGIEVDWKNYYHRLSMARALKKLKSLQVIIAVDGTEADWASTDDKHDVLYESTHYSRYVFRNFTKELAGYIDMNQMKEIIDYGDSPEEQNSRKKHRLFRRYLIEPVVLDEEWQEDLFYFHGQKNNVINQIRMMFGWGGSKYREGILFFESDIVSEAEIFPTLASLSDLTLLVLGEIRQQPAVENIDEVSDQTHLYITRHHLERILIHLKEHYGEYWTNDHRKMKSSELAEQIFTHLMEWGFGQWEDNTLFALRAVAGKWVARYGAVELEV

SEQ ID NO: 39671 - protein, 1359 aa, Paenibacillus sp. FSL R7-0331
MNRAGVLNFWYYDEEVFGFEEGRMILRGTNGSGKSVTMQSLIPLVLDGDKRPERLDPFGSRDRKLEYYLLGDSEHGHTDRTGYLWMEFHHPAKNIYKTIGIGLRARRGTAQLGFWGFLLEDGRRINHDFWLYNNSLWREQGSKVPLNRKELEIAVDSGGRVVQEQREYRDLVNAALFGFQDSDSYKDLLKLLLELRSPKLSKDFKPSSMYEILTKALPPLMEDDLNSLSDVIEDMDQITDRLDELNIQVEDMRKLNDKYNEYNRFLLLHHSEIVLKQFQVYDESEKQVIELTRQVQMNGDDKDKVISAIEHRKLTLKEIDAGMDILNRSEVIEKQRELGDAEEQIKDTQKQLVTLNERIERNSNNLLIIENEIAKSQNKLEQLEIEQNNVIDELEDTARVIEFREHDIYHNIWLRGILEDESWVNNWIKDLSQHREELNKAYNIACEEREAYRKVTEAELSLGEIHRERIHVEEEREGQANLGEIIKASMKERLIRWQQELHQLPVNNETIREVLRVLTSLTANERQYDRVRYPAIQVFQIKNQELIEQSLRLQHHKELLQSECNKLEQELEQWKTTKEPEPVRKEKRKNSRKLRSLNTGSPLYAVCEFNETLPEDVRPHLEETLEQAGILDAWIFPGGNVAVIDWEHNEEVWLEPSLKSTKSSLADVLCATPSLESGLTVEDIMSALNGIDWDNNTSDIAAGNEKLAIGPTGFCIGGLSGKGFSKERAEYIGKETRIRTKQILIADIETNISQLSSEIVFLDEQLRKNEHNKGTLQSEINAFPDDRELQEHFDTSIQLTHRLKEIMSQEFKLEVQYREKLSTYKKLQLTLEEATRKWSALKNEKRIWEALDSWPSYRERVTELQSLCVRHNEISQHQLIRMNQQNDIVIQAEEDEAEKDLLEEKRIKCEAKIRQLRKLMLEMGSEEIYEQLAKLKQSKTSLNNQLTDLENKKDKLIAILASHETNLNTRKDEYERNNDQLQLVINFWHSELQLKLIHEWKDTVIQTSDKADIKRICRQIKKTYEFGNINKDRLGNEVQQICNVVESNLREYMLQLEYLLSGRILITSNRDRLNPLPPSVLLEELIQQRDEQRILLTQRDRELYEEIIIGSVGKAIRKRIHRAKDWVLQMDSLMNLRDTSSGLKLSLSWEPKKAETETEIPTDALVGLLLRDAHQMDDEEIDQVVEHFRTRILKAKVSAEEEQGMLRHYLNEILDYRSWFEFRLYFRKGEQLGYKELTDSKFNVLSGGERAMAMYIPLFAATYSRYSDARDEAPKIISLDEAFAGVDDANMRDMFQLITEMGFDYIMTSQVLWGCYDTVPRLAIYEIYRPKDVRVVTLFHYRWNGKSKMLVEPEPSLTE

SEQ ID NO: 39672 - protein, 470 aa, Paenibacillus sp. FSL R7-0331
MEIGFRKTAKQYYSDPLFERLLTAVFKKYQGQGGVRGNAKIVVSSFAEANRLQEFFGNKVERIIRPNTILEVPLWLFTEEIIRGHQLTIPDLYELLYDSPLLTKKEDKQLKDHQWIDMFDRIATRFTKEAQLDLFNGQFSVVTYDWFCRLREGKALGYQIVKTVIRNGGDAENDLFYCAKALWKLLLEKNKLRYEMNTDADYIYIPIFSEKITKNSHFFDVKFSSGRLFLAALCDIYNIKVESGEVTINENLINTDFMKDRQIYRYFGLMDDSLSSISHVFASGFVDGASPRTLNLHEIEAKNYWPKYSKIYLFENPSVFSYLVLETTHFFDKNGFIYNHFSNAFPPLICTSGQARSATKFFIRKCLEVNPDCIIFYSGDFDLHGLQMMHKIEELAQKKVVQHFMDAATYRRFLDPDCLPISSQDKKLLRKMHGEQLARTMAETGVKVYQESTVAELKEEWINLITGLVK

SEQ ID NO: 39673 - protein, 500 aa, Paenibacillus odorifer
MSFLINPIKEATYLSTTKSDRYRPICYVFYQKYRQEYNAYMFLDEIYQELVTSEIFGTYFTDYNEKELEEDLKSLVKWNNLIIHQDESHAQRIEDFYKRKNYYEVTQYTISLERSLEEMRHNLQAIRGGSFERILADHILEDLTKLQKWNSSDKESFGDIRNIWRDLMSRFEALRNGTADFLSHVNSEPYERLIHTESFLPYKEKFVRLLSDFVVGIMEKKDLIEESLSLIDEKNIENIISIIVSYEAEQQINDMFEEEVVLERRRAEWLGFKGWFVEINGRKASSRFLIEQTRGTIQKIVRIADQISDKFNYFKSRKNDYLELARIFANTSDIRDCHIIAGAMFGVSNTKHFLVPHKSEDDITKHVWECDPFELPLNKKTPGNRNKRTKLPIYENPLAQMVLIQEHLEKTRMIQEKFNSIIKDGKIILEEIGVVYPEVRDLLLELLGQAMITKKFESRTEDGRRFYLRLRSNKRIHLRSTDGTLTMNDYEFVFMEEMYG

SEQ ID NO: 39674 - protein, 379 aa, Paenibacillus odorifer
MDRDQMVLQECVEALFHFYWIHRDKQADLYFQILSRKAELTDMMRDYFGYRLILRTEFIKLEKIPVSSKPFMGINNFSTVHHYMFFCCFLTYLEDKGEDQQFTLQNACDAIRMYYPEDAIHFAWEERSHRRAFADVLQHCVMLRLVYVVDRDIDGFRDDINHDVLFQTTPYFRHFAPLYFLDLSKIQSWSQLEEHITKEITNNTTPKQRVLRRFFLESAIYDDELSEDEVILLEDRQELERLNEIICESFEYWHLERYHRTTMLIHSEVRYGDYYPKDEQISNTAVQYATFIWDMVNEQKVALDHNGRITCTEYEALKWFQAIKELHSHGWTKSFTERPVTTIWREVMEYMSDFHMAEVQMDKQIVFYSATGRVTGYYA

SEQ ID NO: 39675 - protein, 1367 aa, Paenibacillus odorifer
MSSFHLNRFGLVNFWYHSDTIFEFSNGRLFVRGANGSGKSVSTTMAVPFLLDGDKRPSRLDPFGSQDRRMIDLLLGNKHVSKREEGTGYLYTEYRKGDTFVTVGIGLNGKRRESDNTMQTWYFILFNKRIGYDIKLHEEKIVSGESRKFPLTMGDLAEHIGRDGEVTDSQQRYMELVNQNIYRFKTTQEFKELIGVLLQLRSPKLSNAVKASEVSNVLSDALPELSQTELAPLSSSLESMDSLQDKKARLEKELRFLTMLADAYDTYNQFSLYEKAKHLIYSEKRLDESIELIKKYKVSETIAIENKNDLEHKRIEQSNIKETLHKKISLLNGHALFTAEEELEKAKKNLYDLERKLQNTTEAMDNNATQQREVEERIKKNVGKEYKAVKSREDVLSELEALADETFFISHSTLSQYFEQNLRNFSEAGFKNWQEILQEYHTKVQEIASQLHSLQARLEHEGQLKRNLAIEEDHVKELEVEISALEKEHIKNADIVEHDVMEWAEGARQFQVKPNELLEARGILQGIGELLDDFSTAAVIDWLNNLFHKCLTGLQEERAHITAAIGILQKKIEDTETQIYELSAHKEIMPVLTASELIKMEHLRTQNIRTAYFYESVEFLDHIDASVKEAIEGAITRAGLLTALIVHESDLSMVADSTTVVQKGSYKKENMLTYLRSVPINGLSENDIDAVLQTISIVPHEEGYILETGEFRSGMIGGLAPQYEDLYIGKSAREQIRARRLNELRKLIDELEHRKYDLDSECCSIEDQKRLLQMEKEIFPSMELLIGSLVRYENKSQERVAQLSMMERLHVALRIYQNETQVARNAIYYAAQNMELPLTYTGYQRALNDIEQYKDMLNELRMVHNAWLDAYQSISNCLSEKENLLNFYDYLTDARTEIEQDIKRNKSYEAMCVKKIHDLGDTDVKKEIEVARKNLQETDRLLETNHKLINEAENSIRILKEKLEKEQPLMEEWLRLFNAWTKLYEKEISFGLVPHSSSPYQVIGALEETCRAFSLNTILSAMKDAEAHAQRELVDYFLKQSHVTFPFEISAKEMEDARWQIFEQHCSRQFLVFAPQYVENTPREVHSEVADQLKLISGHIQNEEQKLFEKVLIDVIGTAIHEKVRSAKKWEQDANAMLQRVTGTIQMRLEWVPLTSKEEDQISTTELLSYLSKESIFLTPLQKEKVRLHFTSKINEARKKCKDDTSFSMFEEMKKALDYRKWYRFDMFITRKGIPEERFTNKVFGELSGGEKAMSIYSPLFAAIAAKYSYAAPDAPRVISLDEAFAGIDSENIAQMFQLVHDFEFDYIMNSQVLWGCYDTVDELSIAQILRSVDSPVLAVARYYWDGKEKYLLSVENSIEEYSSNAG

SEQ ID NO: 39676 - protein, 467 aa, Paenibacillus odorifer
MQDKWQLIEIFRRSIGFGRLFDLYRKKFESYGAFGTVKMLPTREEDKALRGFLGVRYKGPRFPAIDFEKAVIEAGYSISLIELLELYYGCRLLTKREQKELKVSAWENLFVRVEQDFIMRFNVSDSDKEYFFQKTFRWCERLKAGDVKGHRILSIAFDKGANVDSELFTCISALWHLLMRKDEMFKACGISTGKIRLPMFAAYVTEDSHAFDKTNVIGRLLWSALDDISSQSLMLSENVNSHLTVIPEYLLERQIYRHFDILDDDLSSISHVFVPHLVNGISPRTLNLREIEEMKQLPQYSSMYIIENPSVISYLVDETIHFLNLNKFTLEQLPSNFPALLCTIGQARTASKVFIEKCLTANPNCVIYYSGDLDVPGIQMMNNMKEQFSAEFYAWRMDASIYRKYVASKSKALSDADLKILQEKDSGLEKEMVQIKAKVYQELFGKELRGDWIKEVSAVFSVNQFDK

SEQ ID NO: 39677 - protein, 491 aa, Caloranaerobacter azorensis H53214
MEINEKLLKQVTETKYLTVENAWRYRAIIRYFYLQAQKMKYWIYKEEVFEELKKHDIFKDYTIEQCRQDLDALVEWKNLNAVQDTSKASTIEEFKNKQFRYQITDYTVEIERMILKLENWKIEGASLEPSLLERFKKEIEKFKDMKNRDMKEVGSWWMSLNEDFKRLNQNYQDYIRHLNSVKAEEMMKTQQFLIFKDKFIEYLRNFVKELQQNSYAIEYIIRDVDEDTEKIVLDKVVEYSKSIPRLDMEISEKDIKENILGRWLSIKEWFLGSNFQESEASKLFGITNQIIRKITRYAFQIVESRNTAANRKEEYKKLCSIFLQAKDMEEAHMISAYAFGIPHMKHIRIDKHRETESINSGVYDEKPYEVIIKPRVRTYREKRDRTPIKDNTEKKKKILKETIEKRNQERKIIEGYIIDNQIEISKLPKIEPYVRTTLLKWISRANSSPDGKAKTEDGRVFKLIKSKNNERCTLDCEDGQLEMPSYILKFE

SEQ ID NO: 39678 - protein, 382 aa, Caloranaerobacter azorensis H53214
MNELRELLDEYWILKDRDKEKYYKIRDSISKFRSFISDKLGYQVILTSDLIKLEKLPGKAETWMGIYAFDDKLEYAFLCLLLMFLEDKEKEEQFLLSQLTEFIQGTFPGDEKIEWTLYSHRRHLIKVLKFAIDIGFIKVNDGEEERFYTDQSTEVLYENTGASKYFMRNFSGNILKYSTLEDLERDEWLDMDTDRGRIRRNRVYRRIIMSPAVYRHGEDDQDYLYIKNYRNMIQADLEKYLKVDLHVHRNGTFLVLDEEKRYKNSFPENRAISDIVLQVNKIIVNKVRNKELSRNAEDIIIVHKTVFDNIIEEVKEKYSIGWSKEYREMKLEKLSKEVINYMKNFSMLRVDEDNNEIIILPLVGKIVGDYPKDFNNKEKEND

SEQ ID NO: 39679 - protein, 1367 aa, Caloranaerobacter azorensis H53214
MIKLDMNRWIMNRAGLINFWYYDDEEFNFSDGKLLLRGANGSGKSVTMQSFIPLLLDGNKSPDRLDPFGSRARKLENYVLGDEDSGKDENISYIYMEFKKEKTENYLTIGMGLKAKKGKGLDFWGFAITDGRRIGKDFFLYKKIDQKVPLSRKELENRIGDGGEVKTKQKDYMAMVNKYLFGFDELEEYDELIKLLVQLRTPKLSKEFRPTVIYEILNNSLQPLSDEDLRPMSEAIENMDNIKNKLEQLEVSNREAKKLKKVYEAYNNFVLFEKARDYVDSYDKLKSLIKEKSKLEDKKSHYEEEISSAVENIKELEIQQDNLRLKEQELRKHDSFGLKEKINFLERELIDFKKERAKKADELERKKDRERELYAKIKKLEEDEEYSISKIREDIEELDSLADEMKFDEQFYMKQELLKDIRCEYKFNYVKDQVKAYRDKVIKIKRELEMEKVKRDAYEKALEDFERTKGNKNVIEKRLESANLLFSEIKEEFIERIYSWEKNNSIFKIDNNALSNISQAVNTYGDKTSFDDILALVRKEYNTVEDLLKEEKQDLSLIKSKYVKEYEEKLKEIKEWEEKRDPEPIREEKVLLNRERLRKNKIPFIPFYMAVDFKEELMEEEKGRLEETLLEMGILDALIIPSRYRDKVLEMDEDMADKYIFPSPKYLTYELSSKLRIEKIDVDGITTEDVDNAVKSILMDYSDEGTYIRDNGEYGIGIIKGKVTNRYRAKYIGSTARKRFRKETLERLTVEKQEIEYKIKEVNEKIETINHKLKKLEDEFNDFPNKRDLETALQTVREETLNYDNILRELDNKQEILDNTYRELNMIKQNIHNLTLNINLPVNLEAYENAEECIREYMDLLNELERKHSNLLKVLMIRSNIVESKEEIEIDIDNLRYDINNIDRKIKESEGRLKNYKKQLELTNYKEIEREINECIELLRKIPNMINELTEKRAKAETKLEQTIQKLDELNKDIELQKKINGVLETGFREEYLLGLVFSDDIEGDIYKLAKSVYNELKYFEDKNKNREDYLNNLHNKFYEIRQYLTEYSPKIEIIFDKEVDDLDISEIVLRQKRYVVKARVRGKYIGFYQLLDYIQEGIDENKRLIRESDRKIFEDILTKDIAKKIRGKIYHSRAWVDKMNKLMEGMNTSSGLSFSLKWKSKVAETEEQLDTNRLVELLMKDGDLLTDSEINELAAHFRSKIEEARRAALETGTRQTFHQIMKEVLDYRKWFEFRLYFKKTNERNKELTNNAFYKFSGGEKAMAMYVPLFSAVYAKYEGARKDCPKIISLDEAFAGVDENNIRDMFKLLNELELNFIINSQILWGDYDTVRSLSICELLRPNNAKEIAVLRYIWNGKVKTLVEDVGV

SEQ ID NO: 39680 - protein, 428 aa, Caloranaerobacter azorensis H53214
MNRLVVEASEYFKRNKGFKRAFSKIRDKYRSLGKIGGTIILKNLTKEEKDALSGFLGIGLYDKNDVKIKVEKFQNSLDNSRFKGTKLEDVLAEYFGSVIISKKDEKEKYKLERERYFEEIFKEFIGTKSYDWLKYVFEFKDNAYRVITKRYDEDRQALKEDLIITMRGLNSLPFLKSKTKERLAIFASRVTKNPHAFDEKTEAGKLLMYGISYLLGRDFPKSAEDKAEYYYEVGLIKDEISNFTVCSGLLSYRDGVISAGWKDFYEISEPMHVSLWNLSKIERIISPTGRIFVFENPTVFSEVLYRISRFKPPLMCSYGQVKLASLVLLDMLVKEGVKIYYSGDFDPEGIMIADKLKKRYGDNLIFWRYGIEDYFKSMSREIIDDTRLKKLDNIKNKDLIELIEIIKENRYAGYQELIVEDLIRDIIE

SEQ ID NO: 39681 - protein, 544 aa, Streptomyces glaucescens
MVSPEEEKPATADSVPDARKAVEYLVRQESSEYIAIMDVLEGSVTDLTVAEVAAALVAAGVRLDARLVERRLDALKDMGAVSFRSDTSHARRYAEILPRNWRYTASPAGRHVQRFYRQVLAGTVTVREIPIVSLSRIVSHLEQLAAALGVGEPDASLLDATVLDAVSSVFTSHDDLDAALVGAEDGLIGLADRFDLDEEHTNDLKGLLVDYATRVAVELDSGSARAAAALAVLRPWFGLLAQAVVDASQARDLIAAGALRASRGGRAEDWDGLCAWFDARTGRAARFSLRLVRALPGMHANLRRLHSSAGTASTRSRALALARAVLTPEIGVQIFQAAVGDHSWRKLYGQADEDDMGRNPSWRGGPQVPVPTLLRTAGRSGPRGRGAAPRDDTVAKAQVAEARARRQAGHQRALAEVLAALPGEQLDEAAARAALAALMAAARAAATGPRRTGTSGGLACTLVHTGSGTGILNAPTWRVLLPGRIPLFHRPGQRPSAAALAALAGTTTTDDISAHATLRITPHTGPSTSDNDTSRIISRQEGAA

SEQ ID NO: 39682 - protein, 1412 aa, Streptomyces glaucescens
MSDILDLDFALPPTPAPSGNTGRFGGRWRLVGAGLSNVWRYGDLELPAASGRLLLRGPNGTGKTTALEALWPYLLDLNGAKLAAGKARPTTLKLLMSEGAPAKGRRYGYLWLTFAAPAGEPAPNTPDGAADGVVSFGVRLQYSPSSTPAVRVVPFTVPGQPLKDLALRGPHNSALEHEEFSDRVEAAGGRVFAEPEDYIEELAARIWSTTSGELRLLASRLREVRNPTLLGDVSPAAAADALRQSLPGVAEDVLTATAEALAESDTTREAFERDEHAATLLEEFARVWTGHAVDVTRTAHTAARHAHDDASIRKRRVQQCTGLLESAKAEADQAAGDVQRLDNAHQKAQAAVRAIETSDAYRSHGHVMGLRKRLRAEQRAASSSYDSLHTAAQQARTQTKTGQDALDDAIGDIEDTLADAEAAGSPPVALETLLAHHPRARVTRPVADRIADPGPGITLIHDREGLDQLATTLRTRAQEHRSTADRATLVLRDHDPVAAAEKTAATTHRTAAGAESAYDEASQAHDRATAAARSAARQALAELTRWAPEHPALRGLHDEAPLAGDELTVWDTDDVEALIHAEPAAVRDQLNTWADQALRIGETLAAGHESAAQQHLATAASLDSTAAQHRTEAHHLRSGRLLPLPRPAWAGPGEDDTALGSLLEWHPTLDDADDYKALLELALASSGILGAHLHEGGATTHAWHISPAGAVQEHNLTAVLDIAPSHPHTDLARALLQRIALADTATTSDRPDTPALVVGRDGTFTAGPLAADPATALRAASNQIPAASHIGARTRLARARARADELDATAQELETSAANERRLAGERRQQRDALRAEGRGFPPRDELTTAEAERARTAKTAHERHGAARTLRGRADDAAAEHTRLRTAWETRARSLGLPADPGGLAQLIDTSQASAQQLNGYATQLTTRLLPRIQRIVGALPDEAALAERLAELQHTAQDMHTTVLETQAELTEAQSHGDADDAARRYEQATAQAKDLHQQLKQAAAQVLIAEKRLSTCESDLTAAQERLNESLPLQKTTRAHLTALLACPPLTQALGADARLTAKDTDTADLLTAVDDLLAGRPTASKKTLGEHYDAVRAELAQTWTIAHDDSPAGIEELDTFVLTHAETHYDPLTAAQRAKALAGRAKAALDAAEAAALRDFVIGRLPSAIGTAWAALTGWKKTVNRKMRAAQASSGVGVQVQTDLRSDLDAATRTVYELSCTVGDALRTDAQKEEVGQALQSLLAAADGSTMQERLAAAVDIRSWVEVRYLVERPGPDGKPVTGLWGSRTGLSGGERRLVVLAPMLAAIAASYDRFTSTGLRLVPLDEVPAEVDERGREGLARYLAELDLDILCTSYLWDGAPGAWDGIDAHDLEAGADSTVVAFPMLIRSGQDLPGDTGSAPQAGGVA

SEQ ID NO: 39683 - protein, 425 aa, Streptomyces glaucescens
MSCALCEGACDGADLAPLLSPELAWLWKAMAAVADRRGDESLTSGPAVTVTVPAEPVQRAAAAGLIDGRPLEPGQSRRVSLERLTTALATRGPRLTPGAVAAHACNRRLAASARRRTQQAVAADRIRAQLESAAADLPGHVRDLVGPETVFTRLRTLGWVTRLLNAPDPAELLSQALHVAARLPPPGRRIDRRLLVSGNPHALDTGALPALVLALTGSSGTPVRSGWARLGVDCDDLLGGLIITGVTPRGWRVPPGATFTLPPRELAHIDWEPAETTGTWVFVTENPSVLAAASTQALNRDSLVRPRVICTAGTPSQRECEAIGALADTGWNIAVRADFDQAGLAHMRALLAAAPSAVAWRMGAADYLAAVPEGTDVLHLQGSDAPWDGHLVPVMRKHSVPVYEEDLLPALLADITAGAPGSCAL

SEQ ID NO: 39684 - protein, 418 aa, Actinopolyspora erythraea
MRIRETTVPGFEQLGDIDAANVVRCARTLLRRPLLHAASPDGDLLGMIYRHRAVLQELFATLLGYRLVIRRRYARLYKSGPGEDATRAVPALTPRGYAHVALTLAALTGCGKQVLLSRLIEEIRAAASEAGLVIGDEPGDRRSMAAALRHLVNLGVLTETEGTVGPLANDTTAEALITVDTDLLGQLVTGPLSEADGPERLVELAAGNEGAHAVTVEQSVRRRLVEDPVVHYHDLPEAQASWLRRHRAGETRLLERYFGLVAESRSEGIATTDPQDYLNDAPFPGNSTVARVAQLALPKLLEDSEPRDGDHRHPLGWEDFARVCGELLENYPAAWSRRAIDDPDSLVTMVVDLLRRVGVLAPHDSGEAGRWLLSPSAHRWLPIPDGEPGPAERETDTPAEEPAPDLALFDYPEGESAR

SEQ ID NO: 39685 - protein, 1403 aa, Actinopolyspora erythraea
MSTEAVEHQEGTAGQRSSTASGGPHLPDGGVGGRWRLRRGGVVNIWQYANQEFDLSGGRAIFQGTNGSGKSRTLELLLPLCLDGDLRQIGSKGFDTVSMKRLMLDEREGGGNRVGYAWVELARTAGDGSERFLTCGIGVKAAAASNQISDSWRFVTERRVDHDLRLIGPGDVPLGQTQLRDELGVECLFDEQAFRARIAGTVYGITPERYGDLLHLQRTLRNPDVGLKVQEGQLEQILSDALPPLDSTLVQRLASSFEDLESIRENILRLTTADSALGSFMTTYSDYALGVLRARAKESREAAGRYDSLRTTIEELAEQHRAKLDERSESDERVTELEQRDRELDSSLQALRQSPAYTELQNLHDRRALVDNARSTAEDALRTAERHRDQEQRSVSTVLGMLERLGSDVAAARQHRERAESLLTASGLDGSLVPGVPTMPPTEATVRSEVVRGTADTGSEWLNVERHVPPQPDTEEFAARLREVDEHAERAVEAARQRGALTLTLHQRAVDADRQRAEVDDAERQAEAAKVTATEAAARRNQVRQDLHDTAVAWLDRLRGWWRGGSLADEAVDGPAPPDAPTLEQLMADRFAARGGRERTREWAQPVLHRARMRVTELDRTLAETRSTVAERDAELAELRSGGEPVPERPSWATAERVTGSGEAFYRLVDFAESLPEAERAALEGALQACGLLNAWVAADGTAVDADTADVLATPDEPLPEHSLAELLVPAAEPDCPVPVERIGALLRSVAATSGGELSVSVTGHWRSGVLSGAWRKTTAEYVGAGARRAARQQRIAQLEAELARLRSELGDVERQRAEANRHADALERELESYPDDDELFSAHARLASAVDDADEAQRNANRLRQAHEQAEERWRAARSELVRTAGGAGLRPETEALREANRAATDARQELETFREAIASRCLGTLQQLGDTLLHHDATVADRMAAESLAEQHCANHAEQAAALAELTASVGDEGRRVAEQVTELENEREDLRERLPETRERASAAREAAGKFEEKLNAARARLTERESESRDAEAALRRTLELPGLWAAAVEATDGELPPQPGDPEGAVSALLSTAVARSSPGSTTAKAVHDKLHPLKQSLSGHFDVTTAESEGVLTVTVIGEEGPLPVAEAALRISGRLAEQREYLNEQYRSIFADYLIRDLAERLRDQIAVARDLCDRMNRVLDGARSSQGVHVQLDWQPATALSEDMRQAIEVVRKPFANREEQEDALLRRVFTDLIESQRESVSGGYGEILARALDYRDWYEFTVRVRDAGPDGQPRVRRLRQLSSGETRLVSYVTLFAGAASFYDAIESSGEQHDPLRLVLLDEAFERLDDPTVARMLGLLVDLDMDWMITWPSGWGVSPKIPKMHIYDVLRPRSGHGIACTHTVWNGRGLERAEQ

SEQ ID NO: 39686 - protein, 426 aa, Actinopolyspora erythraea
MNDAENIRAVWDRPELRGLWERARQALEAPERPATFRLELPDERTRREVGELYGRPMWGQGTRINVSKLDEAVRGSRFGRSLEEVLEILHERPVTPRESDSRLRRQRGDRTVEVLGAALAEHGLGDQPWATAWQHWVRQYGRVAEADLESTAARAAAVLARLVLDPSERPRTWRARTDLAARFAGGAHGLDNGTTLSRVVLRAAAMAHGVDSPGNERERRNLWERCGVTLDGVSATVPCWALPLTGTDTWSGTVRERTEAGVPTHLTQLDLRAAPPALVEPDTVIAVCENPRVLEAAVAEGVRHPLVCVSGNPTTVALELLDRLRADGAVLRYHGDFDWSGLSITASLYEQQRVVPWRMSASDYREAVNRASALRTDLQILDETPTEAPWDPELPEVMSSAGRVVEEEIVLEELLEDLRNGLGPTP

SEQ ID NO: 39687 - protein, 495 aa, Thermoanaerobacter kivui
MEDKLDLNVIKPIEEVKYLSAENASRYRLIMRYFYEQYQKFKYWLYKEDVYEYVSQFDVFSDYTMEKCEQDLKALTEWKNLIATQDTSKASTIDEFKNKKFRYQLSPYSIEIERMTIRLESIVGYGGSLQPSLFERIYRNLIKINEMAKKEDLQEINRWWEDLNTDFENIYHNATDYIASLQSSNADELMKSEQFIIYKDKLIEYLRDFIKDLQRFSVAIESFLKKVSPQIVNSVVDKLCQYEMSIPRIDRVLNEEEVKEDLMDKWNNISFWFTGHNFEDSEAVRLLNISNEIIRKITMYAARIAENRMKAASRKNEYIALSKMFAKAGSIKEAHLLSAAVFGCFYTRHIKGDFERKTESVNQSVWEEPPFKVIIKPKTRSYSNYVKTNAIIDKSADKTEMLMDYLNQKNIEDEIIASCIVGNRIRIKDLPVVKPFVRATILKWIGKAMARNSFTGKTEDGRTYRLHMPKNGERAILKCTDGNLDMPDIVIEFVD

SEQ ID NO: 39688 - protein, 383 aa, Thermoanaerobacter kivui
MEELQMLLENFWILREDRENFNKIRDAENKIKPFVEEKLGYRLIINPYIIKLEKVPSDVEEWMRIDAFQTPMDYAFLCLLLAFLEDKGPEDQFVLSNITEYIEAQYDGPDKVDWTLFQHRKSLVRVLNFAVDIGIIKIDDGDHERFSESEDTEVLYENTGISRYFLRSFNREITEDMKIEDFLQEDLNLSNPKDAVIQRRHRVYRKLILSPSVYSEGPDDQDFMYIKNYRNTIAKDLEEYLDAKLHLHKTSAFVLFNDNKYLKSYFPDKNKNISDIMLQVNKIIREMIEDGKLAYNPDDTIDITEAEFINIILKVKERFSDGWYKSYREMSEKQLIEEVIENMESFKMIKRVEELHSIKILPMAAKLIGEYPPDFEKGEGADE

SEQ ID NO: 39689 - protein, 1388 aa, Thermoanaerobacter kivui
MSEKLAERWMINRIGLLNFWYYDDEIFEFADGRLLLRGANGSGKSVTMQSFIPLVLDGNKSPERLDPFGSKARKLEDYLLGEEEVSGLDERTGYLFMEFKKEKKDSYITIGMGLKAKRHQNMDFWGFVILDGRRIGIDFFLYKMEIGDDGKRVKVPLTKKELKNRIGEGGEVVESQKEYMEMVNKYIFGFSSIEEYDELIKLLIQLRSPKLSKDFRPTVIYEIMKASLPSLTDDDLRPLSETIENMDQIKMHLDVLYRNMAAVKKLKNEYDNYNKYILYEKAGDLVKAYSDLYASKKEYDNLTKDIENYRSTIANLGNDIISLESEREALKKKEEQLSSGDAKRTQKELLEEEDRYKQYLEDKSKKEEELRNKQDKYYGLERKIKNTEEQKYKLDKELQDKLEDISSIAQDIDFMEHEFSVSELKKVYGKEFDFTYWKNELKKHKDKIKRAINALREEIEANKRYDAALKEQERLKKEREDRAKKLNEAERLFDEQKREYVERVYSWSQGNAELKLLSSQLEGLSRVILVYGEDKGFDDILAFVRKPYEEILNGIQQEILRLENQREIKENQLHEEEKLLEEWKNKKDPEPERDEQVINNRKRLKEAGIPYIPLYMAIDFKEDVDEDTRGNIEAAIEDMGLLDALIVPKEYFEKALQMDSNMADKYVMPGSFNMMLNVSQYFKVVDNEEGVSPEDISDALSNIFVSEEGGTTYIDSNGAYGIGVIKGKARDKVRSKYIGSESRKRYREELIKSIQEEIQAIKTEISAIDEEINAKKLRIQRLDYEYSAFPGKEDIEEAYRYLKTAKADYEYTSHKLDEQLFTVKNCFEDLQKKKAVVRELTSGINIHPDIDTYSSAYEYAEEYASGLNEVEILYNKYVLQISNEEMLLQQKQDLEYDIDNLKYEIDVLENKIQSSVKKIEMLKETLKELGLEEIEKELEICLKRLEEIPKEITNKSAEKAKLEERLQRSLKDLLNIEEEINLKEKIYNIVEEGLKKELALGFVKQDVEMEDMLKLSKSILSEYKGFFDKAGFDREKFTERLQNVYFETRNELLEYGLSIGNIFDEACEGDNERIKEAKNKQRRLNITANINGKIVSLYTLYSNIEEDIMANESLLRETDKILFEEIIMHNVGIKIRAKIFKAEEWVKKMNKLMSERDTSSGLKFSIEWRSIPASNEEELDTKELVDILKSDADMLKKEVFDKVVNHFRSKVERARRAMEEKNNTETFHKIMKEILDYRDWFEFKLYYRKEGESRKELTDNAFNKLSGGEKAMAMYIPLFSAVYSRYEGALPTAPRMISLDEAFAGVDDTNIRDMFKLIEDLRFNYIMNSQVLWGDYDTVPKLSIYELIRPKNAKAVLVMKYLWDGKVKHLILPEKEEVAALEVGAINE

SEQ ID NO: 39690 - protein, 431 aa, Thermoanaerobacter kivui
MNKEELRYFKEKKGYKRIFEGIREKYRSLGRLGGVVKLDNLTEDEKEVLTNHFKKDYRTKKSASIDVAKLEESLKNTRFEEYTLKDILEYYFGEKLTSKKEDMEILAKEREEFFKELFSKYQECKCIDWLKSLYQGTAVGVRAVNQRYLNDKDGLKKDIMCVCDAINNLPVYKGEKKRLPVFSSQIARNPHYFDSNTEAGNMFINALCTLMGLNEAKGSEEISELYYNVGILIDEISNYVTLSGLLAYEGDMENQVFKAAYESNQVLQVPLLNLSKIERVISPSKKVYVVENPSVFTSLIDATSKVFPLVCTYGQPKLSSLLLLDMLYKEGTEIYYSGDFDPEGLMIADRLYKRYKDKFHFLRYGLEDYLKSLSNEVINDVRLSKLNKIESPLLFDVANEMKIIKKAGYQELIIDDIINDIKLIEEGKGEW

SEQ ID NO: 39691 - protein, 493 aa, Listeriaceae bacterium FSL A5-0209
MNNQDFSKLSEATYVTAENYKRYRLIMRYFYDQHRSMNDLLYRGDILKFMQEDIKFPNYQEKELDQDLNSLISWGNLEQRQEMSQPKSIEEYKNRHFRYQISETSVVIEDMLENIANLHKGTRGSLDKNIFERLLVCLTRLEKETPEGQQLLDIWEDTVTHFSRISKNTTDYIGYLNSEKSELQMQTEVFLVYRDKFINYLRDFIIAMQNKAYQIQHSFENVSEACLERIFQQILKKEKEIPRLEILTIDENQVRKEFFEKWNNMKSWFIDQPHKASEYSLLLNQTNHAIRKMTHLMQRFSDQMQQYHSRKKDYMLLAKWFLDCENLDEANELSAYLFGFEKTKHYYVKPCSSDNKYEDMWEIDPTIHETVPRIRSYSRKTKSDSFERKQAEKDELRNKHLRENKQLENGILSYIKDNKIDLKDVGFVEKDVRKILLKWLSLSFQKEDNIIQTEFNMSIKITVDTAEIITLCSEDGELTMPRVVYNILKKEIS

SEQ ID NO: 39692 - protein, 394 aa, Listeriaceae bacterium FSL A5-0209
MVASNEEIAEAVGVLFENYWIVRERQRYEYHLIKSNERELIRHLMENYGLKLIVRSHFIKLEKIPIQAKSWMGMADFNTLMEYALFCCAMAYTEEKGEGEPFLLNELVEEIELFYPEKEGLDWTNYRHRKSLVKVLNKMVDLQLIEIIEGNTNTFAESKEQYEVLYRISKYSRYFIRTYPEDFQIYNSGRDFISNERREKLADYENRVKIFRTLLMEPAILRNADNESEFYYLRNQEENIRHFFEKFTPFSFELTKNVAMLTLHDRKAQYDTFPSLKSLDDCFLQLVDYVRGDGLEYNAYGEMILTSNQWKTLVGDHAARNRGGWSKKDQELSLDKLAAVLLEIGKTWGMLRENKLGNITIMPNFARNIGRYPAGFDSLYPEAYKEKMKTQIDD

SEQ ID NO: 39693 - protein, 1375 aa, Listeriaceae bacterium FSL A5-0209
MAINDSKWEVNRVGLINFWYYDEEYFEFADGKMLLRGSNGSGKSVTMQSLFPVLLDGKTIANRLDSFGSRARKMEEYLLGEENVTKLNDRTGYLFIEYKKKDHDIYMTTGIGLKAKRGGVLTKWYFALIDNRRIGHDFSLFDEVSGDKLQPLSKRQLINRVESGGVVLDTQREYQELVNQRIFGFATISDFDNCINLLIQLRSPKLSKEFNPTVIFGILSNSLPTLKEDDLQTISNTLDQIDSSRMRLEQFEREKQALEGLNSVYTDFYDEKLRIIAKKWLDSIEYTKIKRIELEQHQAEHLILKEKLLDLESEDHDLDMNLAVWRDENEELSHHKDFQLVAQGQKTKEHLEKQSEVVKKLHSQLKAKESYIKEIKGRLQELEVEHDNLEKEKHDYLDEMVDHAESGGYAIKHLLHLDSSKRQDEKLVLNFWSADIKAYVSHLQEGIERLKEIHREQIYYSKLDSELGEYLENRDLHQKNQLHWQQTYREEREKLATKLHEWKNQLPFFLDVDVFKGVLRDLEGLYDEVTIFEFAIEPLYRAVKLEIERLDRSLLPLEAEMNSLEVEIKHQESERQAWQEQREPEPLRSIASTKFREQLVANASPFYDCVDFREELSEEQRNRIEGALLDSGILDALVTEDFLALEGDRQLIPVPLTPDKKALTEYLVADCDGLSRHSDYITQILRSIEVSDDCNNDVGTWRISTEGNYQMNLLRGVTASDYKAMYIGKASRERYRAEQINKINNELDLLNGEYMNLKENKMILVKKVEDAEQMVNNLPRDDELKTTYEESKKEGRNVQEWNEKLSKKQEEMREKKKHMDSLKWGLTQFTTEDDLELNLESYEGAYKEMIDYQDAFSDWKDRLTGLQYVMAKQKDQQQQLSIQSEEMDEKQLESDEAQDSQDLLEKQYDSIMARQKLSKLDDIKAQIGQVKLNIQEGEKRKKMISRSTLESHGRKVQVESKIEQLAGKLDFDVIFEQLLASTFTQEFKRYRVVNNELEMEDEAKGMIQGWEYNDSHLYQFERKLDKVFSVSESNLLEYRPSVKRAVILSEPDYLETYTDESDMSMIENWRTLNQQKILEVNSEGAWIHPQLLIDRLNSQIEQANLILRESDEELFEQIIFHSVGKIIRQLIQKAQRWVIQMNAILKDQDNSSGLTLSINWVPNTGDSDDELSTKELVRLLKKDTSILKESDTELMKRHFQAKIAHAKKEQKEEDSGDSLYQILQQVLDYRKWFQFEMKYHRVNEGVSKLNNNEFNKFSGGEKAICMYLPLFTAVYSRYEDASANAPYIISLDEAFAGIDELNIAELFKATEQLGFNYIMNSQSLQGEFATVSSLNTYELIRPRNAAVVGTLQYHWDGYTKKLILPKNGDEELVHE

SEQ ID NO: 39694 - protein, 427 aa, Listeriaceae bacterium FSL A5-0209
MNRNELYEDAIHYFNNRVALKIFFEEMERKYKSYGRFQGNVSKKGFHNVDVEPLLQFMGIDPWEWDEVKHIKIATFIKHYESSKFEEIPLKDVVEAVLGRRLVSNKEKQEREEELLQIFVSTVENISSVYLEIPLKPFYKWYLIDGIDCLNGFSQVKEALGNMPKEYTKLPVFAYQQTGNPHAFDSTTYRGQLLLAVLGVLSLNKEQIYTSRVERENEIYAGFHLIKDDIMNFAAINGLVAFKKSEPMAMWRSACESNSPWNVPVRQLIEITTIRPNKGKKIILIENSGVFSVLLDKFPDLPIICTNGQFRYAIWLLLDRLVNHDVQLYYSGDFDPEGIEMASKLKSRYQDKVFFLAMDAVAYLESKPSVPLDGDRCKKLRNVIVVNELNDVKEKILELELAGYQEGIIERIATEIRQKFYNDKGLL

SEQ ID NO: 39695 - protein, 493 aa, Listeria newyorkensis
MNNQDFSKLSEATYVTAENYKRYRLIMRYFYDQHRSMNDLLYRGDILKFMQEDIKFPNYQEKELDQDLNSLISWGNLEQRQEMSQPKSIEEYKNRHFRYQISETSVVIEDMLENIANLHKGTRGSLDKNIFERLLVCLTRLEKETPEGQQLLDIWEDTVTHFSRISKNTTDYIGYLNSEKSELQMQTEVFLVYRDKFINYLRDFIIAMQNKAYQIQHSFENVSEACLERIFQQILKKEKEIPRLEILTIDENQIRKEFFEKWNNMKSWFIDQPHKASEYSLLLNQTNHAIRKMTHLMQRFSDQMQQYHSRKKDYMLLAKWFLDCENLDEANELSAYLFGFEKTKHYYVKPCSSDNKYEDMWEIDPTIHETVPRIRSYSRKTKSDSFERKQAEKDELRNKHLRENKQLENGILSYIKDNKIDLKDVGFVEKDVRKILLKWLSLSFQKEDNIIQTEFNMSIKITVDTAEIITLCSEDGELTMPRVVYNILKKEIS

SEQ ID NO: 39696 - protein, 394 aa, Listeria newyorkensis; identical to SEQ ID NO: 39692

SEQ ID NO: 39697 - protein, 1375 aa, Listeria newyorkensis; identical to SEQ ID NO: 39693

SEQ ID NO: 39698 - protein, 427 aa, Listeria newyorkensis; identical to SEQ ID NO: 39694

SEQ ID NO: 39699 - protein, 493 aa, Clostridium novyi A str. 4552
MFLESKLKKEIKETRYLSVDNTWRYRAIIRIMFRNYEKMNFWLLKEQIYEKLKEYEDFKEYDIESLSQDLEALVNWGNLLTMYDVRKMKTIDEFKNKQYKYQVSPYTVEIERMLIKLEALKEETGGSLESTLVERFKEELNKIDFIVSEESNKIYNWWKMINRDFKTLNENYQDYIGKFYSPKHEEIMKTTQFLIFKESFIGYLRDFIKELQVNANSIRNFLNTLDIDIVKTIIEKSLEYEKSLPRFEDKINEEDYIEKNMGRFYSIKAWFLGNGAEKSMVDQLLDSTSEIIRKITRYAVQLAEMKHISGNRKEEYKKIAEIFSKCESIEEAHKLSSTVFGVFKPRHIKGNPIRKTESINSSIYDEEPHGITVKPRIRAYREKTASRTIVKDNSEKKKIKRERIIAKREEEKVLAESLIKDGKIDFKNLGIISKNQRSIILRWLSKGRNNKFGMGKTEYGKEYQVVVTKKDEYITLVCDDGKFKMPNYSIIFK

SEQ ID NO: 39700 - protein, 376 aa, Clostridium novyi A str. 4552
MKELLALLENYIILREENRELYYAIKDKHKEFKDFLSEKLGYSIIIKEDFIKLEKVYGKAESWMGIPGFTEIREYIFFILLLMYLEDKNKEEQFILSFITEYISNYYPNAKIDWTQYRNRKALIKVIKIALSLGIMKNNDGNEDDFSSNESADVLYESTGISKYIVRNFPNDIIKCNTFNELIKFNWDGIEEDRGLLRRNRVYRRLLLSPVVYNEGNYDSDYEYIKKFRSSIQDNFEKNLGWSIHVHKNGAMVVLDDDNKIGDIFPSMKGESEAILLLGTLIREKLDEGSILLNSSDEIILNRKDFNKLLVELREKKGSGFKKELRDCKEEYFIETLLNYMKSFLMAEEKDGDIVLLSVIGKVVGNYPKDYVIKDM

SEQ ID NO: 39701 - protein, 1361 aa, Clostridium novyi A str. 4552
MSERWIANKFGLFNFWYYDEEEFQLLNGKILLRGSNGSGKSVTTQSFIPLLLDGNKSPSRLDPFGSTARRMENYLLHDEHEDRIGYLYIEFKKPKSGLYITIGIGIRAKKYKQMDSWYFILKDGRRINKDFKLYKKIGEKYPLTKQQFKNILGEGNVFTESQKEYMNKVNEHLFGFSDIENYEELLKLLIEIRSPKLSKEFKPTKIYNILNNSQKTLSEDDLRPMAEAMDNMDTLNMRLMTLGKSLKAAEGLRKSYDNYNKYILFSKSKDYLERESYIRDLSNQRKELLHDIDELKNKQELMKTEVGLLEDSYNKAKVQYEKLMQNDIFSTKNELENLKIEIDAGTEQVAKLKENLHKKNQEIKERENILQDTKNEQEYLKRSILFELDNLKSYGEEFSFEEDKFLKSELLRDIVAYDFTFIKNSLDKEEKSLSLGLKAIKEYEKVQEKKEKCELHKDKTYKIIEGLESQLKESYEYFTQIKEEYMEKINIYNKNNNEFKLSEKELQELFKVINKVECIDDLGDIKPLIVDIYSNLRGTLLLNKQKLNEDIKVKKEEIKELEDNIRELKEQKQSEFILDEMVEKSRKVLTDYKIPFISFYKAFDFKQDSEDEQKRFIENALIDMGIIDALIVPKEYGNKVNDLILKDKYLCVDNYSLKNVKDQSNLSSFLKLEKGEFVETYKNELEEILQSISIKDDKDTYIISNGEYSIGVIKGKTSSKDEVKYIGEESRRKYREYLIEKKFEEVNKIKIEITSIEESLNYLQDKLGNLQREYEAFPSKEDLKVNLEIIEEKEYQLKRFNNDLVDIKEQEFQINKEIVKLKKNVFERTSNIDIQKDSKSFEDALDALRDYEKTLISLEIIIEKFKNYNYTIQAMCEQIEYIREYADNILQSLADLNIKLHEKINKSNGLREVLVKSNLKEIEKAIEESKSIVDTYPKRITDGSNEVTRITSNIQVNLEKEEKLKNKIQRGKELFEIVEQSLIGELQLNYVDVSIEDDLSKKAKYVINNYKLDKNKDKNTYARELFESVQRYEGDLRGYNLKNIEIFVPKETIEDEEKRILYMNAKRFEIVFKFNGTVSLYNLIQLLKEAIEEQKLFISEKERQIFEETLINTISTKITAKIYQTKVWVEQMDNLMKSMNTSSGLKFSLKWVPRKSNSENELDIVSLVNILQRGAIVGDEDIQKLSKHFKEKLIVQKREIEASDEVVNYQSIIKNILDYRQWYEFRLYFSKPLEGKKELTDNEFFKFSGGEKAMAMYVPLFAAINAKYNGADKKDCPRIIALDEAFAGVDENNISDMFKLLEKMNLDYVLNSQVLWGDYDTVKELAICELTRDSEDDIIVVERFQWNGKEKVVVFEGEDIE

SEQ ID NO: 39702 - protein, 433 aa, Clostridium novyi A str. 4552
MSKEIEALKFFRDKKEYHRILIEIFKKYKSLGKLSGTFKLKNLTKEEQMILAPLNHKYFVAREANVSIKKFIEYFCSGKFEQIDFTKVLSMYFKDDLITYKEEKMQNRTKKEDFFHELIYNNRGTNAENWIREMISKKNYGYNIINTNYGVYEKNDKICDLKVILDNVFRGFNLLKFQTNYIESLPIFSSKVTRNPHYFDINTMPSKILIHGICYELKREYPKNAEEIAEILYNAGILRDEVSNFVVTFGLKAYKEDMELDFIKSFTEFQQPLILTLGNLNKIDKFTCNKDKLFIFENPSLFSEVIKKTIDLKPSIICTSGQLKLASLVLLDKIIKNVEEIYYSGDFDPEGIFIANKLRMRYKNKLKFWRFRVEDYIKSVSHKEIPYSRMTILDNIKDRDIKELIEKIKEKGLAGYQELLIKDYVKDIRNIIG

SEQ ID NO: 39703 - protein, 532 aa, Knoellia aerolata DSM 18566
MAVMSQPSGTAPVDRVRLEALRYAVNDEAVQYVAIMRQFTSGLSGLLSDQSAAEVTTRLSEDGIELDDDTVEARLSYLVEHGNLARSPRETEARSLADYLRNRARYQLTQRGELVHRQVEELLGHSESAREVSSEMLGGILAGLTTLSRHDRDSIGRADPEALARDIGTVFAQFDRLVHSTREFYAYLTQVLTRYDLDRDEFQAFKTALVDYLQRFVDEVQRHMPQIADTYASVAPLIPALCERANSGQRLLDLDGTTARRATGLSPEDWPSLHAWFAGGGGRSSDADVVRQLATQAMRSLLANLRRIASSADREHGRYADLVRLAGWFDTSADDAAHALWATAFGLHPCRHLSFVADDPERPVSPTTSWWVAPSAEVPLMLRRSGLRSVHGRPSRTVDYSAAKAARVSERAESERGRAAALAELASLRGRIDGVRLSEAARTELLEVYAACLAQGGGSPSAQGPLTAPIPHSDHELVIEDAPGERSVLHGPSGRLEFVDRALSVRRVGEASGEASGAPTAAREVSRVGGAS

SEQ ID NO: 39704 - protein, 407 aa, Knoellia aerolata DSM 18566
MTPTTVERPRLADDPIEVAQRVEAARQLLLHPLMAATEANRSTLRLIRRHQAELTRLFADGAGYRLHVDPNGARLFKAGLGRDSTRPLRRRSGTPFTPRAYALLALVLAALTRSKSQLLVDELVAQVRSTAVDAGIDLDLDGITDRRALNAALLALVDLGILVERDGDLDHWAEKRTQSLLDVRRELLSLMVAAPLSSATSAGDLLDRAALPSAVGGARIAVRRRLLESPILTVDDLTEDQSEWWRRNRNRESEWFRDHFGLEVELRAEGALAVDPDDELTDVSFPGRGSTRHLALLVLEALTEQAPAVTSPGKAWHGIPIDSARVMARGIVSRWAEVLRRDQREAPDAAVDEAFALLESMGLLRRSDDPRSMEVHAAASRYAPAPVIVEKSSTGELSLFDTQDEDD

SEQ ID NO: 39705 - protein, 1369 aa, Knoellia aerolata DSM 18566
MTDPNRFRLARGGVVNVWQYDRQVFDFADGRLLLRGANGAGKSKTMEMLLPFAIDGDKTRLTASGRHHTSLLWLLLDGYDGQARTGYVWVEFSRIREDGKPESVTCGVGLRATQSARAATAWFFISPLRVGDGLELEGESGPLSKAQLEAAVTADGRGHVFDSAVRYREHVGQALFGLASDQYDDLLRLIYWLRQPQVGEDIDPKRLAEQLVNALPQLDDTALRAAGDTFDELEAFGEEIERRSRAASALTGFVDTYAGYARAAVADRAARVVDAADQVRRVNTLLRNARREGSEVSDALTVAEAELTRAEQAGAAARNEIGALESGPEARSRLRLLEMGKRVEERAAAAEVAVRRRDDAQHRARRSADSAAEDGNAVARGSGEMAAAVIEHVGTLGTAGVAVDTTIHSVAATLADGRGSLTWEDSAAGAPLAAGLERVLGWLRETQTAVGQRQAAVRVVREGLREADEARQDAERSTTIEELAQSRADAARESVEEAVGERDGVEEALLHALSTWQQAPVAEAFTLPLLDLEGLGRLEGLARAAVAGRVDALSLTRGRAVTRAAEATQLIATLERQRAEVEAQTDPQPAAPGFVRERSGEESGAPFWQLVDFRADVSAGDRAGVEAALEGAGLLDAWVTPDGVVDGDRLDVHAFAGAEDGQARPWAQDSVTLASVLQPDRGGNDALAVASDVVERVLTAVRVSEPGDGAVHVAGLAVGRDGQWRSGPVHGRTTKDTAQFIGATARAAERARRLAVLGEEIRATVAVVDAAEAESAAAAAALGEVERWLGARPPHDEVVRAWATVDHRREVLHRAEVEQVEATRHAHDARALAAKRHTQLVALSERHDVPATWEGLDALTERLDRAARDLEGRGRDVRAVRDGLGRWLRAAALAREDAAAVTHESDVATAAEGEARDLAGQHLALLDAEGASVRELESKLEAARQAEKDALARAKENRNDRDGLIGRQATLVERAESLQHRLDEVEPALDRARAALGQLDGLPGVVAATAEPGDVDDADHADDAESAGLVLGALDDVRLRELAGRWSSGGAVEARTNAVLQAVSALQAGDAAIHEPRVVDHEGVLVALGRDEAGEHSVAALARRLTAAVTRDRDLLSERERKVFEDHVLGQLGDALRHVRMRADELVQSMNEQLRDVTTSQGIKVRLRWKQRDDLPAEAGRTLTLLGSPLGALLPGERAQLQESLHRLISVSRAESPEEPYAVHLARALDYRQWNRFSVQYHRPEAGDWRNLERRTALSQGEQKVLCYLPLFAAAAAHFTSVAGAAPHAPRFILLDDAFPKIDVRTHPLLFGLLVDLDLDFVITSERLWGTHSTVPQLAIYEALRSPGDRGIAQYQHRWDGRQLTAVGA

SEQ ID NO: 39706 - protein, 389 aa, Knoellia aerolata DSM 18566
MTDLDRRERHAVGDLLGRTVAASQVTVDLAELDERMRLRAGVGIVEAAETVVGRALVDRRARAARLAERRAEPAEAARCWVEDHRDVDWPWLEKWLVAMRSDGVLGREPHPAALVTAALEVLDHRRAFLPQGEAGSSGAREVAAPVARSALAAAVCHDAHALDDDRRLASAVLRAVASATGSVPPTDARDRRELWDRLGVVTDLVSSTCLVWGLAVEVGGKRGGPRPLDTAKPTHVTWWDVKSGMRVSPAGRVLVCENPSVLEAIATAELDVAVICTSGRPNLVTAQVLAHVAESTAPMIYHGDFDWPGLAMATDALRRYGAQPWLMGAEDYQGVPGSLSLKGSPVESPWDPELAAAMRRRDVAVHEEAVLDRILAELRTGWRTAYGKA

SEQ ID NO: 39707 - protein, 496 aa, Bacillus coagulans P38
MDQIMKKVVEASYLTADSAAQYRVILRFFYRQHERMRDFIAPEEVLEYLRSLPAFQDYAEEQLHQQLAQLVKWNNLVARQDMTNAKTIEEYKKKRFRYQCTPYTVEIERMLIQLEKLGDQFQGSLERSQFDRLLASLEKLEEELEHPLNKPAADYMHIWDDIFHFFGTIRTNTADYIAYINSEKTSQRMQTEAFLVYKNQFTAYLRDFIVSLQKTSLQIRGRLRELDGQRLAPFFEKLVEHRRQIPRLEDTAASEQEWLEEFHEYWGSLRRWFLGGSSSQSELEMLQMQTNEMIRRMARYVQRISERQQHFRSRKKDYLHLAKWFAECRNLEEAHQLSSIVFGAMTVRHLHLEEATTDNLHAETWEEQPEMRQIKPRTNRYREKTKPGAFRSNHEQKEKQRLAYLKEREQEKQLIEKYMKNGEIRLAEIGTVEPFVRKVLLGWIGKSMAAKNHEVKTDYGMTVKVAMNPDHLITLDAEDGKLIMPDVVFERSGGER

SEQ ID NO: 39708 - protein, 387 aa, Bacillus coagulans P38
MDPLQIFDEKAVQGMDLLFHHYWILRSEHPDWYQLIREREKVLRRYISEKFGLRLIIHQHFIKLEKIPVEPESWMGILHFQEPMDYAIFCCALSFLEGKAVDEQFLLSEMCQEIQNNYPVEDELDWTLYLHRKSLIRAVQALMEFSLIRTIDGDISRFDTYEDQEVLYEATVYSRYFLRSFPDDFTSYPDWTGLLEEDWKQNQEDERRKRVYRKLFFSPGLHRKDMQDPDFLYIRNFRNRLLEDIEEHSHYKLHVFKNTAFLSAAEPRSYHHVYPNAKGSTDLMLQLSKTLHDHPEKYVPNEAGEILLTAGELEAVIDDMRTRLERGWSKHFRDAGTKAVCAELLEMMKEWMMAETDEAAGLIRIKPLLGVLAGEYPADFEKGDEEP

SEQ ID NO: 39709 - protein, 1364 aa, Bacillus coagulans P38
MNRAGLLNFWYYDDEVFEFADGKLLLRGTNGSGKSVTMQSILPVLLDGKKTPDRLDPFGSKARKMEDYLLGEKEVSGHDERTGYLFLEYRKQGTKQYITTGIGMQAKRHKTLKSWYFVLTDNRRIGYNFELTHTRQSERIPLSAKELENRIGSGGHLVHSQKEYMELVNKYIFGFQSMEAFEDLIKLLIQLRSPKLSKDFKPTVIYEILESALPPLTDDELRHLSDTIESMDETEQQLEQLEREHESAKKLVRQYDLYNQYILAERAQKWQEAESRLQEAKQEAGTLAVRCESLRGVIENLTEDQKQNEQKRDVLKAEQERLQHHEVWRLEKEKGEQQARSEKLKSEAADLEKKWELKKSQLLNIRLEQDRLETENSKDEASMQETLDELALDAGEAAFPQHEINAGDFSRHEGEAFDFSVWKQEIKQHSGLLQKLQQLAGEAERLHEMHMKLQRQSSAKKQEIDELRKQLDHLENWFTEQKQELEDAVFLWIEQHPALPFTDERLRRIAGALDGLYEENRYEAVREEIVKAANDYILQVQKEISRAEQAQKAKEQELAEAEETLMYWKNLKLANPERPQDTEAFRAGLDGAGKRYLPFYAAVEFQDHVTEAQKARIEAALRQTGILDSLITEEPVTPVHDRVIRPNPHILGYTLADYLKPDPDNDSPVSAARIDEVLRSIPLEPSDSGFHIDADGSFSVGCLVGHAPDEGPSKFIGRTSRKRYQQEKIKETEQTIAEIRLALLQIENRLSEWARKVQEAEDWKAGIPDDKDLRDLEEQIEKTARSLKQEQEFLTEIDRDWKQVYQHLQNIRLQLHEQGAGLNLVLQSGPLDEALAAAKSYEEHLHSLELIFQRLFSGRKMLARLAADILEKEQELDEIRGEENIRRSEWEKTVANIEAIEQQLKLQGIDEVRARIQAVQHEYTSTEEKIREIYEEKPKKEAELEKCTTNLSLAKTRTTFWTNMAAEWEKLVKAELSLGFVESEHTEPESILTAFSGVLEKYDRAKLNENLTKVFFNEQSNLTEYRMSEFTKEADPPDWFAEKLDDYYETFKKEWEGLRGRRLIQMEYRGRRVSPYTVLESLEKELLNLQSYLDEQDRRLYEDIIVNTVGVILRNRIQRAAKWVKEMDAIMRNRDNSSGLTFSIAWKEKTAESEDELDTKDLVALLQRNSKFLNEDDLNRITKHFRSRIAAAKELIEIRNEGSTLHQVLKEVLDYRKWFQFVLSYKRAGEPKRELSNTAFFKFSGGEKAMAMYIPLFTAAYSRYLEAGSMAPYIISLDEAFAGVDENNIRDMFEVVEQLGFNYIMNSQALWGDYDTISSLAICDLVRPKNANYVTVIRYRWDGHKRSIVEKPKESLAGATPDLL

SEQ ID NO: 39710 - protein, 431 aa, Bacillus coagulans P38
MKDAIDLLRNEPGMLKLFHLFKEKYRSLGHIGGTVSLSGFTRTELEAIAGLAGTSPDLLREKNKISLRAFEKALAPTVFGKYTLVELLEAVLKERIFSKAEEEEIEKKKEEQFLARLTETMPDGNGWWRRIASKTADTRFIWHAYKQDPDTLSAQLKMVWKAFTMLPEEGKYERIPFYSQRITGNPHFFDQTRFAGKLFIHCLFTDQWLKGLIEEVPKTTEELNELYANAGLMRDDLWSFVTCRAFLAETENGLHPVWREAAATGTVMNVPVKELLQLTNIWPRAGKKVWIIENSGVASAVLDAVSDAPVICTHGQFRTAAWIMLQHLAKNGCTFYYSGDLDPEGVVMAERLSSRFPGQTVFWRMDPDAYFLTLSEEDISTRLSKLDAVQSPELLLVANEMRLKKKAGYQEGLADLLIEDLKKRWLSGKEA

SEQ ID NO: 39711 - protein, 500 aa, Paenibacillus polymyxa; identical to SEQ ID NO: 39526

SEQ ID NO: 39712 - protein, 383 aa, Paenibacillus polymyxa; identical to SEQ ID NO: 39527

SEQ ID NO: 39713 - protein, 467 aa, Paenibacillus polymyxa; identical to SEQ ID NO: 39529

SEQ ID NO: 39714 - protein, 500 aa, Actinoplanes utahensis
MGEPDEDLDRLEAFTYLIVPERSSYLAIMRLFAASLMTDLSAQQVVEELAAQGHDIALDVAVSRLNRLVTWGNLLPSSHTVRVRSIEEYQRARSRYQLSALGERVQRQADEVLSSAEAAREVSRELLGLISQGLAELADRVERPGGIDGGAARETVATVFAQFWVFRDSVRDFYAFLGQVLARYDLDSAEYTGFKELLLDYVESITEEIVLLAPRIERHLERLWPYLPDLVTMLREGGLAGAAADLGVTVAHSRGHDLTDWAGLRAWFSDLDGRRSEVTQLRDATLRALQSLLANAKRMIRSGGQGTSRRRELLRLAAWLDAADEDLAADLFTSAYGLYPARHLGIAADAQMVVPATTSWWPEPAVEVPVSLRERGARAARGRVSGVADRSAQQRALIEQAAAEQLARAAAAAELLSAAASLGTVRLSEPAIRLLLELMAQALGAGDPAQGSAVTSNLDLGVRCELISKPRQETTIHSATGDLTVRDIDISITRREPADG

SEQ ID NO: 39715 - protein, 1348 aa, Actinoplanes utahensis
MNPYRYRLHRAGICNVWQYDDQVFDFEDGRLLLRGKNGAGKSKALELLLPFLLDGDTKRLDATGGGRTTFRWLMSEGASGVNRQGFVWLELRRVDEREVERFVTLGAVVRWSSSTAEARLTYFVTAARIGAEVTLVEGRQPVPIDRLRETLGEGALINSARDYRARVGREVFGIADPGRYRNLVHLLYRLRRPTIGDRIEAGQLTAELGEALPPVDDDVLDSVAHNLDDLETVRADLGRLEATHSALSDLMTTYRGYLRGELRRRVHAVDEALTRLRAQRRQAGQAEREVDRARTAEEEALAAVGHWDRAYREASAELRALRESAGYRAVQELAQRRLAVQALLAAARSAQTAAAADRQTLAALADRLRDETGRLASAVTQIRDGHHGLRELATESGLDVGHLGSMPELRHRDAPSLKVVDHELAGHEFGRQRDRLTAAEEAVRGRRTAVADVDGRLAEAEKATRAATRAEDERDLLDGQQGEARNRFDQLKDALAAAGQEYASDVHRWSALPVWDGTDLTSVKEALLADDPLPAETPEAVRAAAEAAAEPLRDAAETRRDSLRTAQRKAEEDLSAVRAEHRRWSSRIDPEPPRSRFRETGTPSPAGTPLYRLIDFAGSLDPADRAGVEAALESSGLLDALCTGDGTVLHPGNGEVVLRPGPPVPGPSLRDALVAVPGAQAVTALLASIGWGADSDATSWIAADGGWRLGVAHGTWTKPEAEYVGATNRAALRRRRLAELNVRIEELTGLLTALGEQIADVETERRDLAATLRALPDGVALRTGWIRYDEAKSHLERLARQFAGARRRARELRVIADDRRAHAASAAASHLLPADRAQLALIDQRLRQLAADVPRQARDIERFTAGLRPYADLIARHGAAVGQAAHTADEAQIAATEHLTAEQELAVLERSLGVEPAEILRQETAAEERARTAEQRLPAARRDYEERRDERVRAGEARDQARLRLTEFEQAALDAGTALPRVLTLPGVRPALELPADLPAEAPTGTPPERIRHLDDLAGRLRDALGRPASDLGENALHQRYTDVRSRLPGGFDLIWEDRDGVKVVEISDDIGRHPVAAATARLGAELDQKRSAVADRERHAFERFLLGELGDALSRQIRSAEALVAAMNRTLGEVRTSHGLGARLVWALRDDADPDTRRAVALLRTPLELRTRDDNDRLREALARRVEDARRSDPSAGYAVHLRAALDYRNWFTFTVKVTDQARPDRERTLSARTAMSQGEQRVVSYLVLFAAAAAHFTSVGELHPAAPRLILLDDAFAKVDEPTHGRLLGLLVDLDLDAVLTSERLWGCFPEVPSLGIYECLRDPTRPGVATLHFRWDGQRRTVLPS

SEQ ID NO: 39716 - protein, 414 aa, Actinoplanes utahensis
MIPPATLAYLSSPVLRPLWAAAHSRLARNGRTARGRLTLTSLDPPQREALGHLLDRIVTATHTVDLSQLDERLRTTAAGTGLLDVVEAVVGPVPDRRALASASRSQRAALRDHATAALTTAGLSGHAWAHEWMDQLWRQGLPARLPADDVHRVIEQAVATLARTVGEQARTWSRGELAQAVTGSAHGLDDDTTLARLVLRGLALALTGSPTLPTGAAERRALWDAAGVAGDTIATTVLACGLRPHGIAWLQERADIGAESHLTLREIRRLAPWSMPPQTVYVCENPRVLEAALDNGVRAPIVCTMGNPTTVTLALLDAITAAGHVTLAYHGDFDWPGIAIAARIMRRYPAAPWQFTAVHYREAVAQATRRGTPRQPLTGSPVQSPWDPALVVAMAEQNVAIHEEALIETLLADL

SEQ ID NO: 39717 - protein, 496 aa, Rhodococcus sp. Chr-9
MEDALVRDDRLRLFSFATAEKRVHYLWVLRAFDHARGNYSVLLHAGDVENVLTRLPGASGDDVPDSSEIPALLEQLHAWGVLERSYDGSRAATLAEYRNRHYVYQFGQAGYRVFRAVEDVLSSRGEDVSLSRLALPDLLADLNDLADANAAGDGELVYRKLSRLDATLSDMAERAARFYLVLGELVRTTEVTPETFLAHKDALLTHMREFSTDLARYAPKLSTALDRVQTTGVQKLTAAAARHDERVLLSFEEREADWAQRWWGVEHWFVGVGSEPSESERLRGATINAISAVLGLLRRLTEQRRGGVSRESQLRHLAGWFAAAPSEEAAHALFDAVFDLGRPRHFSVAHPDADIVPVTRSWWEAPPVEIARTLAETGRRPAAGAPGRIQRNDAGVRRLREAQLEKQRRRAEAARSLAAGGVRERKLSEPEAEVLLSLLDAALSARVPVSGRVRSDDASSGTQNGVKLTLRPSGESTVVHTARGRLYLDGLSVEVR

SEQ ID NO: 39718 - protein, 464 aa, Rhodococcus sp. Chr-9; identical to SEQ ID NO: 38986

SEQ ID NO: 39719 - protein, 1384 aa, Rhodococcus sp. Chr-9
MSSARFRPTRAGIINLWDYRDQEFSFADGRLVLRGPNGSGKTKALEVLFPFVLDGRIEPRRLNPFAGEERTMRSNLLYRGQDSAHSYVWMEFCRGRADDPEAVTVGIGMRATRGNDKVTRWHFVVDGRVGVDFSLLDDEDRPLTRKQLVDQIGADAIADRPVDYRAAIDARMFGLGAQRYDQLINLILTLRRPQLAKNLDPKGLSQALTDGLRPLDEDLIVEAARSFSAIEEVERTLESLAAADDAAQQFVKVYSKYIRQQARTAVDKVATRLGVVDTAVRSLREATEARTEAAAARAASEEQLLVAERDHEQARTTLEALHRSSAYEGKQQLDDLASAVKNLERTTAAQAEQANRAQAVVADRLRDHDSARDALETATAARRRAEDGLSAAAEDAGITWTGLDGIERTEQLNTAIDALAEERDADVRVVRSALSQLDGATAARSRAEAAAVRARAQRDTASAAVEAAETMVELSRSEVAAELGRWWSDRAETFAAVGLSTPVFEALDTAFGTVGQDDAPSPAAVFAEHTGPVLDDLRFRRRVCGSEIESLGTRIAELETERTAVAAERDDAPPAFPSRTGSRDDLVGAPLWQLVRFRDDVSTQDAAGIEAALQAANLLDGWITDGDLPDIESEQLLVPLAPEHRPSGLTLADVLVPEPDTAVPEERIAAVLSSIAWTTDPGPDARVSVDAHGGFRQGVQLGRHVKEQAEFIGATARARRRQRRIVELETTIAECRADVEAQREQDREIGHRLTALDEAVKSLPRTGSVLAALRKVTECAGALRTASESAAAADRDLDQAIAAVATKEQHLRSTAGRHRAPLTATELDSLDAAVRHFRSQGQALQRALREQVTCGDRLRDTEVQLDEARVSAENAAELAAENAETLANEQQKLETLRESIGASADRIDAQLDEARRRIETAKTAERTARKAHESALERIGKAEAAHTGAEQTLRSALTEARADADALAPFARRDLLTLLGVESEHVWPSSAAAWLDADQLAYRIRQSPDDTVDVLPTEVLSLFRALDAATESVTASESTRKSTASALTSALQEFDAELARGRDYRLHWDAADGITVVQVQDEQGYTSVAAFAQRIARARQEQETLLTDSERRILEDALLTGLAQQIHERTVDARDLIARMGTEMRQRHMSSGNTIGVHWVLADHLDEPARAVCKLLDRDASMLAPDDLAGIRAHFASRIRAERAAHPERSYPEILAATLDYRRWRVFSFSLVGADGSEDRLTPARHSALSGGEQSVSLHLPLFAAAHVMLDSADPHAPRLLALDEAFAGVDDTGRSELLGLSVQFDLDLFMTGFDLWITYAGVPGCAHYDLSHSVAEHTVATTLLVWSGGELLAEHDGSDLESALGSPRTRRITRPVEGALEFA

SEQ ID NO: 39720 - protein, 517 aa, Streptomyces pluripotens
MRRVPPEMFRFTTVERSDLYGAVLDAFGAAGEHLETALGLDAVRERLRGVGWAAAVEDEDLQETLRKLVQWELLDVVHNHAENYRTAEEYERRNLQYSLTRRGEAALAGVRQALEVLASTGALQTAVLEAIADRLDELCLLSGEPAPADRRIFSTLRELEGHLDALVENTKAFNGELQRLVRAEGADMEVFREVKSATVAYLQEFLVNLDRRGQAVAAAVDRVEERGVAVLRERALRGAELPPVAGEDPAAGWLESRRARWAGLRAWFLPDDGARPRIEHLHDIARRAIVSLLQVLERINESRRRSSSAVQDFRELARWFSAAPEEADLHRLWSAAFGLGPARHAHLAHSDPELIPSSRSWSEAPPVAVSALLRTSGRTERFTRTARVRDVTAVRAERAARARAERAELARAWQVLEGDGPVRLSSFGVLDPAVFDRLLDLLGRALSARPDAGGLRRATTGDGRVEIALSPPPDERTAVLRTAKGSLAGPDYLVHITAAGGTAAFPARHTAQQEAAG

SEQ ID NO: 39721 - protein, 460 aa, Streptomyces pluripotens
MSTLANQLAAAEREEVARAIRLLLARPLLTAAADPAGFELVRRRREPLARWFDYTCGWNLVVEPRRGYARLTKVRADPDGSRPARRTRSGRAPFDRRRYVLLCVTAAELLSLPMTTIGMLADRVVQATSADRALVAFDPVHQPERRAFVDVLKLLESYDVLRSVDGTTEAYVASADAKVLYRVESTLLMRLPAAPVGASRLTVPPAEVPVRFEELLTGLVRERRYGGAATDGTADETDGDTAATDAQRNLRLRHSVLRRLFDDPVLYRADLAEDELAYVTSLSGRQILRRSVEQAGFLLEERAEGFLLVDPDGIATDVRFPDDTSTARVAALLLLEPLRAAPAGMLSEQLTEAGAELLRRFPRWAKAYQSEDGAARLSDDAVRVLCDAGLARGVGDRVVVCPAAHRYRLTETTSAGSPDQFGPESQSGAEDQRRPERKAPRRTTAGATATGGVTAEGEQQ

SEQ ID NO: 39722 - protein, 1385 aa, Streptomyces pluripotens
MSVTDLPLPRRPEPTESAGTPTAAAGAVRSRWQPHRAGILNVWRYYDETFTFHQGRLLLRGQNGSGKSKALELLLPFLFDASLRPNRLSTFGGSERTMHWNLLGEGATGKTRVGYVWMEFHRAGDDGTERWFGCGVRLQASVHTTGVHADYFTTGSRISRPGGVLLVNEAGQPLTRAALADALRDCGDVHPSATDYRTAVRRELFAGMGEQRYESLLSALLQLRQPKLSERLDPSLLSTLLSRALPPLGEAEIAELAEGFERLDHQREHLRRLDDEVTAAGTVASRQSAYARRVLRAGAAALISATTEMDNLTRVARQSAKELEQALAQRESARASRQEQESRAHALEATVEGLRESDAYKQGEELDRLRRRTDDAAAVAGRQRATAEAAQTGAEEDQGHAEQAARRARILDEHAREAAGEAHRSARAAGMESIHHEVRAVLDTDLVVAVPDGPGGEAGGRRPEGPSATRTTGEDGAPQARRLLRGAVTARRQQLSLVTEAIDQHARAVRDRGAAEDLLDEARTRLAEAIARRDETSGAWDDALAAQAERLITWAEGCAELRLTDPGDLVAAAATEAEVMALVEAAARPLEQEISTAEATVRATRESLRDERTRLGEDVRRLSSETDLPPPPPLTRTTARTATAGAPLWRLVAFREGVPLPVQAAVEAALEASGLLDAWVSPYDGITLPGHDTRAEAALATAAPGPSLLEVLRPEEHIPVPADTVTRILAGIAYGSTLPGGHPAAVSADGAWRLALATGTWNKPEPAHIGVPARQRNRRRRIGELTERIRETNASLAALDDQLRGLVARRTRLDADRDARPDHRELDARRRDRERAEDQVAARDDAVRDAAGQLASRESEVGGALRTLSRRAAEHALPTDRDLVREISLGIDRFRDTADTWVDARLTANAAADRARQTAAQADRSRRTAEEQTENAAAAAVEAAGLQARLQAVEATVGEDYRQVVARVAEARAGLRRCREEADRAAGLLLRLEGRIGGLRATSGQDAERREQAVATRDGAGHRFRHLCLVGLAEDAGIAPEADVGDGTKATLEAARATAAKWPGIPHAPRNLGDAATRLSEAVHEARRHLGARADLDLEPDDDIQVFTATLDGVRVGATGLLTALTQERDRSREDITTAERRLFDQILTGDIRRHLAARIRQAGELVDRMNGHLERVRTASHVTVRLVWDVRPDLPDSTRTARQLLLKDPGRVTETDREALHAFFRARIDEAKGNDTAASWEEQLGEVLDYTAWHRFTVRLDRAGGTGWQPLTKKLHGALSGGEKAIALHLPLFAAVAAHYEAVPLAPRPILLDEVFVGVDTVNRGQVFALLTALDLDLMVTSDHEWCTYGELPGIAVHQLLTDGDDDAVTSARFVWNGTGLEAG

SEQ ID NO: 39723 - protein, 416 aa, Streptomyces pluripotens
MTHAETDLGEHTLRRPELRPLWHTVHDRLSSGRPVTRIRLGPLDEAEREALADLLGLDRLPAPRPSFPLAQLEEAVTELTGRTVRETVTELVGPLGDRAGERRRQERERAGVWAWLAGHDTVRAQPALAAWASSCRAVGLVGGSPDRTRAQLTDALTVLAELPAQAEPLPVFAARVLNGHAHALDDGTALSTLVLRALATLYDTAPPQSAADRRALWTRAGVADDDLSATVVVGGLHPAGDGTLARVARVCAQAGQAASLTLAQVRAPGEFVLATEPAPVVHAVENPSILALALRRFGRDCPPLVCTSGWPNSASIRLLRLLADRGATLRYHGDFDGEGIRIAAYLLDKTQARPWRMTAADYRAAVARAPHGPGPGRLTDAPWDLELTRAMTDHGIAVVEELVADILLADLADTMR

SEQ ID NO: 39724 - protein, 495 aa, Thermoanaerobacter sp. YS13
MEDKLDLNVIKPIEEVKYLSAENASRYRLIMRYFYEQYQKFKYWLYKEDIYEYVSQFDMFADYTMEKCEQDLKALTEWKNLIATQDTTKASTIDEFKNKKFRYQLSPYSIEIERMTIKLESIVGYGGSLQPSLFERIYRNLIKINEMAKKEDLQEINRWWEDLNTDFENIYHNATDYIASLQSSNADELMKSEQFIIYKDKLIEYLRDFIKDLQRFSVAIESFLKKVSPEVVNSVVDKLCQYEMSIPRIDRVLNEEEVKEDLMDKWNNISFWFTGHNFEDSEAVRLLNISNEIIRKITMYAARIAENRMKAASRKNEYIALSKMFAKATNIKEAHLLSAAVFGCFYTRHIKGDFERKTESVNQSVWEEPPFKVIIKLKTRSYSNSVKTNAIIDKSADKTEMLMDYLNQKNIEDEIIASCIVGNRIRIKDLPVVKPFVRATILKWIGKAIARNGFTGKTEDGRTYRLHMPKNGERAVLKCTDGNLDMPDIVIEFVD

SEQ ID NO: 39725 - protein, 383 aa, Thermoanaerobacter sp. YS13
MEELQMLLENFWILREDRENFNKIRDAENKIKPFVEEKLGYRLIINPYIIKLEKVPSDVEEWMGIDAFQMPMDYAFLCLLLAFLEDKGPEDQFVLSNITEYIEAQYDGPDKVDWTLFQHRKSLVRVLNFAVDIGIIKIDDGDHERFSESEDTEVLYENTGISRYFLRSFNREITEDMKIEDFLQEDLNLSNSKDAVIQRRHRAYRKLILSPSVYSEGPDDQDFMYIKNYRNTIAKDLEKYLDAKLHLHKTSAFVLFNDNKYLRSYFPDKNKNISDIMLQVSKIIRQMIEDGKLAYNPDDTIDITEAEFINIILKVKERFSDGWYKSYREMSEKQLIEEVIENMESFKMIKRVEELHSIKILPMAAKLIGEYPPDFEKGEGADE

SEQ ID NO: 39726 - protein, 1388 aa, Thermoanaerobacter sp. YS13
MSEKLAERWMINRIGLLNFWYYDDEIFEFADGRLLLRGANGSGKSVTMQSFIPLVLDGNKSPERLDPFGSKARKLEDYLLGEEEVSGLDERTGYLFMEFKKEKKDSYITIGMGLKAKRHQNMDFWGFVILDGRRIGIDFFLYKMEIGDDGKRVKVPLTKKELKNRIGEGGEVVESQKEYMEMVNKYIFGFSSIEEYDELIKLLIQLRSPKLSKDFRPTVIYEIMKASLPSLTDDDLRPLSETIENMDQIKMHLDVLYRNMAAVKKLKNEYDNYNKYILYEKAGDLVKAYSDLYASKKEYDNLTKDIENYRSTIANLGNDIISLESEREALKKKEEQLSSGDAKRTQKELLEEEDRYKQYLEDKSKKEEELRNKQDKYYGLERKIKNTEEQKYKLDKELQDKLKDISSIAQDVDFMEHEFSVSELKKVYGKEFDFTYWKNELKKHKDKIKRAMNALREEIEANKRYDAALCEQERLKKEREDRAKKLNEAERLFDEQKREYVERVYSWSQGNAELKLLSSQLEGLSRVILAYGEDKGFDDILAFVRKPYEEILNGIQQEILRLENQREVKENQLHEKEKLLEEWKNKKDPEPDRDEQVINNRKRLKEAGIPYIPLYMAIDFKEDVDDKTRGNIEAAIEDMGLLDALIVPKEYFEKALQMDSNMADKYVMPGSFNMMLNVSQYFRVVDNEEGVSPEYISDALSNIFVSEEGGTTYIDSNGAYGIGVIKGKARNKVKSKYIGSESRKRYREELIKSIQEEIQAIKAEISAIDEEINAKKLRIQRLDYEYSAFPGKEDIEEAYRYLKTAKADYEYTSHKLDEQLFTVKNCFEDLQKKKAVVRELTSGINIHPDIDTYSSAYEYVEEYASGLNEVEILYNKYVLHISNEEMLLQQKQDLEYDIDNLKYEIDVLENKIQSSVKKIEMLKETLKELGLEEIEKELEICLKRLEEIPKEITNKSAEKAKLEERLQRSLKDLLNIEEEIHLKEKIYNIVEEGLKKELALGFIKQEVEMEDMLKLSKSILSEYKVFFDKAGFDREKFTERLQNVYFETRNELLEYGLSIGTIFDEVYEGDNERIKEAKNKQRRLNITANINGKIVSLYTLYSNIEEDIMANESLLRETDKILFEEIIMHNVGIKIRAKIFKAEEWVKKMNKLMSERDTSSGLKFSIEWRSIPASNEEELDTKELVDILKSDADMLKKEVFDKVVNHFRSKVERARRAMEEKNNTETFHKIMKEILDYRDWFEFKLYYKKEGESRKELTDNAFNKLSGGEKAMAMYIPLFSAVYSRYEGASPTAPRIISLDEAFAGVDDTNIRDMFKLIEDLRFNYIMNSQVLWGDYDTVPKLSIYELVRPKNAKAVLVMKYLWDGKVKHLILPEKEEVAALEVGAVNE

SEQ ID NO: 39727 - protein, 431 aa, Thermoanaerobacter sp. YS13
MNKEELKYFKEKKGYKRIFEGIREKYRSLGRLGGVVKLDNLTEDEKEVLTNHFKKDYRTKKSASIDVAKFEESLKNTRFEEYTLKDILEYYFGGKLTSKKEDMEILAKEREEFFKELFSKYQECKCIDWLKSLYEGTAVGVRTVNQRYLNDRNGLKKDIMYVCDAINNLPVYKGEKKRLPVFSSQIARNPHYFDSNTEAGSMFINALCTLLGLNEVKGSEEISELYYNVGILIDEISNYVTLSGLLAYEGDTENQVFKAAYESNQVLQVPLLNLSKIERVISPSKKVYAVENPSVFTSLIDATSNVFPLVCTYGQPKLSSLLLLDMLYKEGTEIYYSGDFDPEGLMIADRLYKRYKDKFHFLKYGVEDYLKSISNEVINEVRLSKLNKIESPLLFDVAKEMKIIKKAGYQELIIDDIINGIKMIEEGKGEW

SEQ ID NO: 39728 - protein, 510 aa, Streptomyces sp. 769
MFRFTTGERSDLYGAVLDAFGAAGERLETALGLDAVREGLRAVGWLAAVEDEDLHEALKQLGRWGLLEVVQNHAENYRTAEEYERRNLQYSLTRRGEAALAGVRHALEVLASTGALQTAVLEAIADRLDELCLLAGEPASADRRIFSTLRELEGHLEALVENTKAFNGELQRLLRAEGADLEVFREVKAATVAYLQEFLVNLDRRGQAVATAVARVEARGIATLRERALRGAELPPVAGEDPAAGWLESRRARWAGLRAWFLLDEGVRPRIEQLHDIARRAIVSLLQVLERINESRRRSSSAVQDFRELAHWFAAAPGEEDLHRLWSAAFGLGSARHAHLAHPDPELIPSSLPWSQAPPVEVSALLRTSGRTERFTRTAKVRDVAAVKAERAEQARRERAELARAWADLATDGPVRLSSFQELDTAVFARLLDLLGRAMSTLPDAMGVRRATTGDGRVEIALSSPPDSRTAVLRTERGVLAGPDYVVCITAAGGAGAFPAPRAARQEVAG

SEQ ID NO: 39729 - protein, 454 aa, Streptomyces sp. 769
MSTLANQLAAAEREEVARGIRLLLARPLLTEAADPPGFDLVRRRREPLAKWFDYTCGWSLVVEPRRGYARLAKVRAGVDASRPARRARSGRAPFDRRRYVLLCVTAAELLSMPMTTIGLLADRVVQATATDQALPAFDPVHRPERMAFVDVLKLLEAYGVLRAVDGATEAYVASPEAKVLYRVDTTLLMRLPTAPVGASRLAVPPDEVPLRFEELLAGLVRERRYGGAPEAAGSGEREEVRNEPAAASDTQRNLWLRHSVLRRLFDDPVLYRVDLTDEELAYVTSLTGRQILRRSVEQAGFVLEERAEGFLLVDPDALATDLRFPDDASTARVAALLLLESVCSSPGGMLPEQFAEAGADLLRRFPRWAKAYQSADGAVRLVEDAVRVLCDVGLVRRAGGRVVARPAAYRYRLAETTSTDADDRRRHRHGTAANPPATPSTTPAFDTPDEGDEQ

SEQ ID NO: 39730 - protein, 1416 aa, Streptomyces sp. 769
MTELPLPRTPEAPAGPPQSPGDAVDVARGRWQPYRAGILNVWRYYDETFTFHQGRLLLRGQNGSGKSKALELLLPYLLDASLRPNRLSTFGGSERTMHWNLLGEGASGKTRVGYVWMEFRRIGEDGTEQWFGCGARLQASVHTSGVHADYFTTTGRIAHPDGLSLTNESGQPLTRAALAEAVRDHGAVHASSADYRTAVRRGLFVGMGEQRYESLLTALLQLRQPKLSERLDPSLLSTLLSRALPPLGEAEVAELAEGFERLDRQREHLRQLDEEVAAAETVAARQRSYARRVLRAGSAALISATTEMDNLTRVARHSAQEHERALEGRESAQVQREEQERRGHALEETIEGLRESDAYRQGEELDRLRRRTEEAAATAGRLCTAARTARDRAEDDQRRADEAVRRARTLDEHAHQAAEEAHRSARTAGLESVHHEAKALLDEVRAPADGTVSARGAGTTEIAPPDRTTAEDRARWVRQLLRGAVTARRAQITLVAEAMEAYERAVRDRGTAEETLEQTRTRLAEAAGRRDEAARAWDDALAALAGRLRVWAAGCTELRIADPEELVAKAASETQVTAQVEAAARTVEREITEGEAAARGVRRALLDERNGLVEEVERLRGETDLPPSPPPTRTADRSTMAGAPLWRLIAFREDVPVAVQAGVEAALEASGLLDAWVGSDESVTLPGHDTRAEAALALSAPGTSLLEVLRPEEDLPVPAETVTRLLAGIAYGTRLPDGHPAAVSAEGAWRLAPATGTWDKPEPAHIGALARQRARQRRIGELTDRVSRTNASLALLDDELRALTTRRARLDADLSTRPDHRELDARRRDRDRAEERVAARDDSVHDAAAHLEERENDVAATLRALSRQSAEHGLPTDRGRLRELSTAVDAFRDTADTWADACLNAVAAAGGAGQLATQAARSDQTARERSEEAAAAQAEAEGLRARLTAVESTVGEDYRQVVARVAEARNALRRCREEARHASEHLLRLERRIGELRATSERDAERREQAVATRDGAAHRFRHLCLAGLAEDAGSTLGLHAEDGAKATLEAARATAAKWPDIPHAPRNLGDAATRLSEAVHQARQHLGARTDLDLEADEDVQLFTASLDGVRVGAAGLLGTLTQERDRSRDDITAAERRLFDQILTGDIRRHLAARIRQAGELVDRMNGHLEHVRTASNVAVQLVWQIRPDLPDGTRTARELLLKDPGRVTEGDREALHTFFRSRIEEAKGSDTAASWEEQLGEVLDYTAWHQFTVRLDRANGAGWQPLTKKLHGALSGGEKAIALHLPLFAAVSAHYEAVPEAPRLILLDEVFVGVDTVNRGQVFALLTALDLDLMLTSDHEWCTYGELPGIAVHQLLTGADDDAVTSARFVWNGTDLETPQDAPASREPSREQQPTAMADERYTPSSVTTEPAP

SEQ ID NO: 39731 - protein, 422 aa, Streptomyces sp. 769
MTHSGTPRGERALARTELRPLWQAVHDRLSSGRPVTRVRLGPLDDTQREALADLLGLDRLPDARPSVLLSRLEEAVAESCGHTVRDVVTELIGPLRDRASERRREEDERAALWTWLDGHSTVRAQPALADWTASCRAAGLVGGSPERTRTLLTDALAVLAALPARGEPLPAFAARVLNGDSHALDDGTRVTSLVLRALAALYCADPPQSAEDRRALWGRAGIADDELSATVLAAGLRPVGDGPLARVTRACAEAGQAASLTLAQLRAPGTFALPTGAAPVVHIVENPSVLALALRRFGPGCPPLVCTSGWPNSAAVNLLRLLADHDAALRYHGDFDGEGIRIAAYVLDKTPARPWRMTAADYRAAAARTPHGPPPGRLTPAPWDLELTTAMAQHGIAVVEELIADVLLEDLADATRPARAQQ

SEQ ID NO: 39732 - protein, 517 aa, Streptomyces pluripotens; identical to SEQ ID NO: 39720

SEQ ID NO: 39733 - protein, 460 aa, Streptomyces pluripotens; identical to SEQ ID NO: 39721

SEQ ID NO: 39734 - protein, 1385 aa, Streptomyces pluripotens; identical to SEQ ID NO: 39722

SEQ ID NO: 39735 - protein, 416 aa, Streptomyces pluripotens; identical to SEQ ID NO: 39723

SEQ ID NO: 39736 - protein, 517 aa, Streptomyces sp. MUSC 125; identical to SEQ ID NO: 39720

SEQ ID NO: 39737 - protein, 460 aa, Streptomyces sp. MUSC 125; identical to SEQ ID NO: 39721

SEQ ID NO: 39738 - protein, 1385 aa, Streptomyces sp. MUSC 125
MSVTDLPLPRRPEPTESAGTPTAAAGAVRSRWQPHRAGILNVWRYYDETFTFHQGRLLLRGQNGSGKSKALELLLPFLFDASLRPNRLSTFGGSERTMHWNLLGEGATGKTRVGYVWMEFHRAGDDGTERWFGCGVRLQASVHTTGVHADYFTTGSRISRPGGVLLVNEAGQPLTRAALADALRDCGDVHPSATDYRTAVRRELFAGMGEQRYESLLSALLQLRQPKLSERLDPSLLSTLLSRALPPLGEAEIAELAEGFERLDHQREHLRRLDDEVTAAGTVASRQSAYARRVLRAGAAALISATTEMDNLTRVARQSAKELEQALAQRESARASRQEQESRAHALEATVEGLRESDAYKQGEELDRLRRRTDDAAAVAGRQRATAEAAQTGAEEDQGHAEQAARRARILDEHAREAAGEAHRSARAAGMESIHHEVRAVLDTDLVVAVPDGPGGEAGGRRPEGPSATRTTGEDGAPQARRLLRGAVTARRQQLFLVTEAIDQHARAVRDRGAAEDLLDEARTRLAEAIARRDETSGAWDDALAAQAERLITWAEGCAELRLTDPGDLVAAAATEAEVMALAEAAARPLEQEISTAEATVRATRESLRDERTRLGEDVRRLSSETDLPPPPPLTRTTARTATAGAPLWRLVAFREGVPLPVQAAVEAALEASGLLDAWVSPYDGITLPGHDTRAEAALATAAPGPSLLEVLRPEEHIPVPADTVTRILAGIAYGSTLPGGHPAAVSADGAWRLALATGTWNKPEPAHIGVPARQRNRRRRIGELTERIRETNASLAALDDQLRGLVARRTRLDADRDARPDHRELDARRRDRERAEDQVAARDDAVRDAAGQLASRESEVGGALRTLSRRAAEHALPTDRDLVREISLGIDRFRDTADTWVDARLTANAAADRARQTAAQADRSRRTAEEQTENAAAAAVEAAGLQARLQAVEATVGEDYRQVVARVAEARAGLRRCREEADRAAGLLLRLEGRIGGLRATSGQDAERREQAVATRDGAGHRFRHLCLVGLAEDAGIAPEADVGDGTKATLEAARATAAKWPGIPHAPRNLGDAATRLSEAVHEARRHLGARADLDLEPDDDIQVFTATLDGVRVGATGLLTALTQERDRSREDITTAERRLFDQILTGDIRRHLAARIRQAGELVDRMNGHLERVRTASHVTVRLVWDVRPDLPDSTRTARQLLLKDPGRVTETDREALHAFFRARIDEAKGNDTAASWEEQLGEVLDYTAWHRFTVRLDRAGGTGWQPLTKKLHGALSGGEKAIALHLPLFAAVAAHYEAVPLAPRPILLDEVFVGVDTVNRGQVFALLTALDLDLMVTSDHEWCTYGELPGIAVHQLLTDGDDDAVTSARFVWNGTGLEAG

SEQ ID NO: 39739 - protein, 416 aa, Streptomyces sp. MUSC 125
MTHAETDLGEHTLRRPELRPLWHTVHDRLSSGRPVTRIRLGPLDEAEREALADLLGLDRLPAPRPSFPLAQLEEAVTELTGRTVRETVTELVGPLGDRAGERRRQERERAGVWAWLAGHDTVRAQPALAAWASSCRAVGLVGGSPDRTRAQLTDALTVLAELPAQAEPLPVFAARVLNGHAHALDDGTALSTLVLRALATLYDTAPPQSAADRRALWTRAGVADDDLSATVVVGGLHPAGDGTLARVARVCTQAGQAASLTLAQVRAPGEFVLATEPAPVVHAVENPSILALALRRFGRDCPPLVCTSGWPNSASIRLLRLLADRGATLRYHGDFDGEGIRIAAYLLDKTQARPWRMTAADYRAAVARAPHGPGPGRLTDAPWDLELTRAMTDHGIAVVEELVADILLADLADTMR

SEQ ID NO: 39740 - protein, 503 aa, Bacillus sp. B-jedd
MKLEQRLLRPFTKAKYLSEENYKRYTAIIHYLYHQHEVYYAPPSLPNSILNFIKENDTLDFFIDYDLTKLEADLNMLEGWGNVISHQDSGNVSRIEDFNRRKLRYQCTPETIEIERLFEKLNSQINRVKGSLDSNLVNSLSSLMIEIETYKTKSIMSKEERKELSQLWNQIFAQFDNLRKESSDYLGIIHSRNIDDAMQNKEISAFRLKFTEYLTSFIITLQRNVHIIEYSIGEIEKDLIHRVIIALITEHKEKPSLDEPLSEEEYQEIYMNQWNGLKKWFKYDEYNERFVDYLLKQTNETISRFTKYLQQISERDQQIKSRKKDFEHIARLFKNEENLGLCQKSFAAMTNVEKLHHFVSQANREVDSDKFLYDHEPEVVAIKSAKDINVRKERKRASIEPTPEDLMEIERLRRQKEYEENEIQRLVERGTVKLSELENVPPFMRKMLLQWISYSNGREKMKGKTDQGIPYVLQIQSEDDISLKCTDGILTMPDYVFEFGVQR

SEQ ID NO: 39741 - protein, 398 aa, Bacillus sp. B-jedd
MKIDIFHDEELEYDKKNHVKPVVRECIYELMERFWVLKDKNEQLFYQIKDNEVEIKKFFRDTFRYRLISNHDMVKVEKIPVVPHSWMGEKEVKSTPVFKSQMDYAFFFWILAFLEGKNVNEQFSLKNMCDYIQIQEEGKLVWKEGAGYQNRLSLVRTMKYAVKMDLIEVRDKDVEDFAGNHNHDVLFQRTLYSSYFMRRFNEDVTNWESLSDFIAYLQKENTEMIDRKHRYYRRLFLEPIVYHDELTQDEIEYIRNYYAGVDNNLYRFTDYTFERYNRTSMIVKNEVNMGENVFPTENMNTKLIMLFANYIHQRSFAYPLDKRNKIELTKTECDSILSDLKKEYRQFWTKKMRQQDVEEIRGTLLKEMKNWSFVDEQEDGTLLLKEGLFRFVGDYFYQ

SEQ ID NO: 39742 - protein, 1386 aa, Bacillus sp. B-jedd
MEEMNEIDRWIMNRAVFYNYWYYPNQELIFKDGCAVLRGHNGSGKSVTTQSLITILLDGDVRSHKLDPFGGRERKISDTVLGEKELLGLNHRIGYIALEFKKGKSGVTKTIGMGIEADREKKQPKVWYFIINGKRIGNRERDLRLYTTETIDGEVRSIPRNEKDLRMTIEGKLQCGKVYNNRDEYASMVNKQLFGFENLESYKGLIDLLLQARSPKLSDQNKPEGAAYVLNDSLPQLTEEELRPLTSSIESINRLENDLITYKEDLKEIRKLHEVYQEYNEVAFTEKADSFLRAYKQYECTKKRLAEKRKKLEDSNTKLGSITKEIRQANDSLEVYKTEKADLGVEEIESVLSKKDSQLNQLKKQKERYESLLKKKEAAKQAHDVYKKKYEESEAKMLQTERELLGYMDELKETSTELSFPFHSQYFEHFSLNHKEDKDYDFRTWEQLLRNYRATINKAKREIEKYEQLRRDVTTLENTLGEIRMKIDEAQRRIDETDEEYQDELRHIGEKIAYWAKEATSLAVPREIVDGLLSNLDDIFDVIDKEKYLGELQKHVSDIGEKAQSEVLRLKMEISNETQTILSIQNEIIEWENEKEVEPDFVLTKKQDWDKLKQDKIPFQPFYEAFEFHKGIENEEQRIIQNVLYESGILLSVIVGKEDSERAASFASVLKYNQVKNKNLYQVLHAVENPEWNDVLKGISFEKHGDAYVLGDGTFQTSFVKGKASLYSGDVYIGKTARENFRMKKIEELQTLKGIHEDAKNGLEQNVNDFQKLKENIQSELGAFPILDSLKELLKDIESENDRIKNVYEPEAKEKKEKINLLTDESKDIMTAVKRMDLPIMRLEVDYLADEVIRIDGYAECLQDIQNSYKDRVTASDNIENFMEQAKIQSQLEQDHHSDMVDVELDIQKINKSIKGLNRRLEELGEQKILQRVEELSKLINDTIPNLLRQLYGDETETKRDITDFTNQIEAIEQNEIPFDKTVFEAWENLFHEQVRLGYVEFEENIVTLQEKAQNALTRLGHLIDKNRTKIEGVKKRLNQRFQKCAVDYQKYEPILDNTQSEHIPVYETQDDTKIQSINFIREQMSRIIVTLEIDEIRLSPKNVVDRLSKRIEDMERDANEKDRELYQEILINTLGDKIRRKIQYVEAWEKEMNKFMEHKNLIKFRIKWVPKDSEKPEEMNTRALVEALKKNTRWIDIDEISNHFRSKIKDAKRKYENEAEANLQQIMKEVLDYRSWFHFEIYFTKKGDKEKKLNRNTYGELSGGQRVLAMVTPVLAALYSKYMEGREDAPRIFTLDEAFARVDEESINVMFEYIYKLGFNYILNSQSLWGCFESVPSLNIYELSRPDNRPFVAIQSYYWNGNKRVTVDEAWMQREKEGEMVNVAT

SEQ ID NO: 39743 - protein, 443 aa, Bacillus sp. B-jedd
MSPLEELVEMFKQENGFNRLFSSFYERYRSYGRLEKGITVIIEKPTELERDAIGGLMGHDYSKKKKITITASQFERGLQKTKYGKWIPDISLTEIVELYVGEKLLTKKEAASTYLEDRSSFFLSFKTPEHPDELHQIVDWILSVENKNNRYYAQFKQNKAGIEKNLKTLSLLFQSFPLKEPVYLPIFASKVTRNPHAFDGGTERGEILIHALQVLQEIMTGAKIKPSLNAEEINELLFKFNLLRDDLTNYVTIFNIEGTNHSGEPNELLRGLVTEKSAVNLPLKEVMKLSMVSAKNNTVFMIENSSVSSYIIDELIRLNKDVSIICGNGFLKLATLKFLDIFIRNGGTIYYSGDCDPEGVGIAQRLISRYGESVRLFLCDRASYLKSLSDESIEPSRLAQLGNNIEDKELQEVKDEMLAHKKAGYQENILDEILTYVMNDLYI

SEQ ID NO: 39744 - protein, 534 aa, Mesorhizobium plurifarium
MYGKNVVVLDDHPEQSKNTHRSLEAAISMQFASDSAELFRHLNADKATLYRCIMDVFAAAKRQYRLQLRPDEVLAEGRWPNGSPRIEEINAALAQLAEWGNLESHPDTARVSSLSDFYRARFLYRLSQGGEAVESALAVFVQTLQRRAELQTVALEDIASRLLALEALAAESEPDVAKIHETLRDLVRVFEGLAENAQAFMAGVARSIELQQAEASAVANYKKRLIDYLERFMGDLVRRSDTIARLILALEPRVDALLGQVAERESRDAAPGSAQDQANAQDLYLQGWRERWKGLRGWFLSTGHELPQAELLRARARSAIPQLLAAIAALNERRSGRSDRSADFRMLAGWFAACTNDGEAHRLARAAFALNPARHFSLNVDADAALPASTSWADAKPLRIHPRLREYGEAAPRGPLPWVRDRAEDRAFLALQIAEESLQVEAARKRLATGQTARLSDLGELDTPSFGLFLGLLGEALSEQAGPEMAVERQTGDGLLHIHLKPLAADSYARIDTPRGVFAGRDHIITITPLRGAL

SEQ ID NO: 39745 - protein, 375 aa, Mesorhizobium plurifarium
MREWFSRETGWPLQVEREGARLFKHPGTVSDASRGLPGYDRRRYVLLCLACAALERADPQITLRLLGERLLELAAEPGLDFTFTLEAQHERRELVWVCRTLLGLGVLHRVAGDEETFVQARGEQADALYDVQRRMLAGMLAAVRGPSTWIPQEAPATLEERLRALVDAHVADSNEGRRTALRHQLARRLLDDPVVYIETLDPEVRAYFLNQRGTMAARLGDAAGLVAEQRAEGLALVDETGFLTDVAMPGEGTDAHVTLLVAEHLAAGQRQRKSNGAELAPVPVRGFREHDIADFLREARTRYGRYWRKSAREPGAERELAVIAIERLEKLQLALLKDGTVYPLPALARFALGEAQIRETRDVPAVAAGPLFGPT

SEQ ID NO: 39746 - protein, 1450 aa, Mesorhizobium plurifarium
MNDRLVLTAVQPGKPVLPVPTRERWQPLRLGLVELFHYDSEEFWFRDGHLLLRGNNGTGKSKVLSLTLPLLLDAQLKPSRIEPDGDGGKKMAWNLLMNSYDRRIGYAWIEFGRIAEDGPPRYLSLGVGLSATAARPQVDSWFFLIEDADDAPRISQDLWLTSAQRVVLTRERLRDALEGRGQLFDTAASYRRAVDERLFHLGTRRYDALMDTLIQLRQPQLSRKPDETALSNALTEALPPLAPELLGDVAEALGQLEEDRRQLEEYQALARAVGRFEERYRAYAGTQTRRQARLLRQAQTEFDNASRARGEAQARFDEARAQEALARTAHQDAEIDLARGRARLDTLRSDPTMQDANRLEGAQKEAAARRQAMRRAAEALEEATRRLGLSTEETERAARRMEQAESVLTDLRRQSAAHADATGIAAQHGASPLAVSQASELVELTRQAFDKACAGLRSLVDSRREQIAVLRRRQAEVAQAEAIYARRREIQDERRLEAEEAAGRRTQADAEVEREGRSLVESWDGHFIGLKQLHVDPDDRFSALAALAEWAVALQGDDPARHLLQSAHQHASHALTQRRVEIDNQCQALASENERLSEEGERLEAGADIAPPLPYTRGTSVRENRQGAPLWQVVDFRDKTTATQRAGLEAALEAAGLLDAWISPDGRLQAGDDGRPLLDVQVLERQNRSQSLADWLHVTVPAGCDMSDDVVGRVLSSIACADDDPVDSEAWIAPDGRFRLGSLCGAWGKPAAVFIGHVARATARTRRLAEISERLAELSAELAAAQAMAAQLALDREQADEELRRAPADEALRSVHLAAAASTRQARLAGERLADADIQCLVAEKALKAVHEQLAADAADLRLPESPDALRILETALQHYRDAQVRLEQAVHELRLAMPEWQRQRIREDEARGDMRQREEDLAAARIEAEDAFARFDVLRDTVGAKVEELQRQLSDARIAVESGETASKLANEVLRDKGEARAVASQQVETANVNLLQRGEARAQATLKLQQFADTGLLSAALPDIDLPDMDGLWTIDPALTLARRAEQGLSALKDDDEAWARVQRQISEELTELQRALGALGHQVQADQNDWGFSVNIIYQNRRERPDRLAMRLAEEIAQRSELLTANERAVLENHLQAEIASEIQRLLQAAERQVDAINRELHKRPTSTGVRYRLVWQPLAEEEGAPIGLDLARKRLLNTSSDLWSVDDRSVVGAMLQQRISAERERADSIDARDAGGTLLDQLARALDYRHWHRFRVERWQEGHWGKLFLNLPVREAESDRWLPGEPAYASLRLLLRLPPLWDVADRKIHVCENPNLLAIAADSLGAGCAPLVCTDGMPAAAQRSLLSQLAHAGARLCYHGDFDWPGLRIGNFVMRDHGAEPWRFGAIDYLAAVRTQSNMTHPLGGKAVEAFWDGALTAAMEGHRVAIAEEAVAESLLEDLDIARSR

SEQ ID NO: 39747 - protein, 525 aa, Rhodococcus ruber
MWHARHRGLRGTWAAPAYPVTVNETQPPAGHTDPGPGVQHDRLRLFSFATAEKRAEYLWVLRAFDIARANYVVLLHAAEVAAILERTGSTDPAAALSAQDVAPLLEQLHAWGVLERSYDGTRVASLAEYRNRHYVYQFGRAGYHAFRAVEEVLSARGEDASLSRLALADLLADLTELAAANDAGDGELVYRKLSRLDTTLSDMAERAAGFYLMLGDLVRTTEVTPESFLAHKDAVLAHMREFSTDLARYGPKLAAALARVRETGIDRMLGFAAAHDERMLLSVAERHADWRARWRGLERWFVGAADVPSESERLRDGTMSAIAAVLALLRRLTETRRGGVSRESQLRHLAAWFAAAPDEQSAHALFDAVFDLGRPRHFSVVHPDPETVPVTTSWWDAPPVPIARTLAETGRTPSAGAPARVQRNESGVRRLRERQLATQRARAEAARSLAAGGVDERELSEPETEVLLGLLDAALSARVPVSGTVPGATGTQNGVRLTLSPAPEGTVVRTARGRLHLDGLRVSVQ

SEQ ID NO: 39748 - protein, 454 aa, Rhodococcus ruber
MSARRISPLDRDSYQRAARLILSHHLVTTRYPDRAALPLLRRWATELREDLLELFGYRLEVTETTARLFTVADRLDPGGGARSVTDRPFDRRRYAYLALALAALGRAGGQITLSELAEQVASEAGQVPGVELAPERATDRDAFVDAVAWLAARGAIALADGDAGGWVSDPERGEALYDIDRPVVAALFRPPRALQHLNSVRGLLAAGDRRDGDRSVGTAEVARRVRRALVQRPVVYAEELDDEARLQLALPRTTAGIELLTGLVAERRAEGVALVDSSGRMSDLRFPGVGTVPQVALLLAGEICARVSEPGCEPVRLPRPVDAEAELEAGLDAAIPAAGVFAPLAGDAAAADAPPGSRPAPAHPLVEDSWLAETVARLADEFGRTFAAQWQADPAGLLEAAVTVLERQRLVARVPGGVLALPALARFRGVVVTVRERDPRLALAGEDSNEAEMS

SEQ ID NO: 39749 - protein, 1381 aa, Rhodococcus ruber
MSSARFRPTRAGIINLWDYRDQEFSFADGRLVLRGPNGSGKTKALEVLFPFVFDGRIEPRRLNPFAGEERTMRSNLLYQGQDSAYSYVWMEFCRGRRDDPEAVTVGVGMRAARGHDKVTRWYFVVDGRVGVDFSLLDAADRPLTRRQLIEEVGADAVTDRPVDYRAAIDARLFGLGIERYEQLINLILTLRRPQLAKNLDPKGLSQALTDGLRPLDEQLVLEAARSFADMEEVSRTLESLAAADDAAQRFVAVYTTYLGQQARADVDRLGARLAAVDAGTSEWTASVAAFERAGVERALTLERLEVAERDLEQTRATLEALQRSSAYEGKQQLDDLAQVVADLERTTAGQAEQAQRARVELAQREEEARRAAEAAADAASAAHRAEDALAGAARDAGVEWAGPGGDTGGDQIAATVAACAEERAADVRAVRAAVAAAEGASAARVRAEAAAERARAQRESARAAVDAADAAVESARAEASTLLREWWTGHRDAWSGVDGPEELFEALAAAIAAAGDDEAATPAAVLAERTAPVVEELRFRGRGLEAEITHGRERIALLEAERDMIEAERDDAPPAFPASTAGTGTSGAPLWRLVRFADAVSAEAAAGLEAALEAANLLTGWVCGGAGDVPAGATVLVPAPAAQRPAGRTLADVLVVEPDTGVPAERVREVLASVAVPDVVTDETGPAVDERGGYRQGVQLGRYTKAEAEYIGATARARRRRLRSAELDAEIAEVRARVADAESARVAVGERLARLDGAASAVPRTGAVLAALRKVSECAGALRTAGEAAAAADRDLDQVIAECSVKERQVRSVAARHRAPHTVRELEQLAAAIRFFESQGQVLLRARRERVAAIERAREAQARRDDTRVAAGASAERAVTAEESLRQQQQRLATLREALGADAQQIDAQLAQARERIEAARTEQRAARRAHDEAVERLGKAEAAHVAAEQALRSALTETRADAAQLAPYARPDVLALLGISEELRWPSAAVEWPAPEQARLTRAAGDVPAVPAAVGALYAALAAATATVKGGDGARKAARSALTAALQEFDGQLAAAGQDYRLQWDAPEGLTVVRVQDEQGFSSVAEFAVRIGAARREQELLLTDAERRILEDALLAGLAQQIHERTEDARELIARMGTEMRQRRMSSGTTVGVRWVLADHLDDQARAVCRLLDREVSALGPEELARVRAHFAARIRAERAAHPERSYPEILATTLDYRRWRVFSFGLIGADGTEDRLTVARHSALSGGEQSVSLHLPLFAAAHVMLDSADPQAPRLLALDEAFAGVDDNGRAELLGLSVQFDLDLFMTGYDLWITYAGVPACAHYDLAHSVAEHTVGATLLVWSEGGLLAEHDGSDLAAALGSPGTRRVPAVVEGALEFA

SEQ ID NO: 39750 - protein, 515 aa, Kibdelosporangium sp. MJ126-NF4
MMAGEESTGPQPFAHLSARNAALYRDVLLTFTRARDRFIVHMRPEDIAGELGRAGDVEAIAGSLQQLVEWGNLRADPDTSRVTSVADFHRARYLYQLTAAGQAAEEALAVYDEALGRRGSLQSVALEDIAGQLRALAEMAGAADPDPAKVHLLLLALAERFTGLADNAQAFMASLRRVIDFADGDMDAFIAYKQQLIDYIDRFIADLANRGAEIATLLGRMAQADVEHLLTIAAMREAADAAPDAHATAVEAGVASWRNRWRGLHDWFVSADSRHLSQARLLRGAAVIAITQLIDTVATLNERRSGRSDRSADFRTLARWFAEAPDDAAAHRLWRTAFGLHSARHLTVDRETIAAWDAEQPAPSTPWSLAPGVQISPQLRRTGSYERRGQPNRVVDRAAQRQYLAEQAALESEQVGEARRRLVTPGPIRLSQLGTLDTRAFRLFLGLLGDALSARAPGDTDVRTTTSDGTMEIRMSVVHDGGTVSVQTEDGVLHGPEHIIEIVDLAAERRTQAIA

SEQ ID NO: 39751 - protein, 394 aa, Kibdelosporangium sp. MJ126-NF4
MTAFADETLAQQRKAMRAILTRPLLTAGADDEVLRLVRRHATHLQNWLSAETGWRLVVNAESARLFKIAPTTADDTHAATDGKGKPPFGRRRYVLLCLALAVLERADAQITLGRLAEGVLAAASEPELTAAGMSFTLGKRDERSDLVAAVRLLLMWGVLEKVAGDEDAYLSDSGDVLYDVRRRVLAAMLTGSRGPSTIAADDLADRLDELAHEAVADTDDLRNRALRHRLTRRLLDDPVVYYDELTDDERAYLTGQRYAITKRIEDATGLVTEVRAEGIAMVDPEDELTDVWMPEQRTDGHVTLLVAEHLATQDGPVQLDALRAYVRKMAQEHKSFWRRGVTEPGADAELLTIALAKLRALRLVETSADDTVRARPAIGRYKVAAPVIRERKAK

SEQ ID NO: 39752 - protein, 1341 aa, Kibdelosporangium sp. MJ126-NF4
MTSPVPHRDRWQPLRAGLVDLFYYDVEEFHFHDGRLLLRGNNGTGKSKVLALTLPFLLDGELSAHRVEPDGDRNKRMEWNLLLGGKHPHNERLGYTWLEFGRALPDGGTEYRTIGCGMKAVAGRGIARHWFFVTDRRVGHDLSLVGPTKVALSREKLKDSLDGHGTVYDTATEYRRAVDEALFGLGAHRYEALVNLLIQLRQPQLSKKPDEKLLSRALTEALPPLDPALVTTVAEAFRGLDEEREALRGLDEARSAAEAFLTHYRRYARVAAKRRAAAPRQTHSRYEQLGRDMGEADNAHDEATRALEESQRLLGELADARVHLEARRTALQDSPEMRDAEALKQAGADAEKLRKFAESRQLVHASAVGTAQRREKQVTQAREAAEVDAEAYERDRNAAGHAAAAARVADGHAVVVANADERAGAALVERQSKAVGRLQELLDAAVKAENDLRSARADVDRITAEQQAAADRIADADRVTVERGTELVAAYRTFLAESTRLAVSDMDDVLAALDGWVETLDGANPAGAAIDEAVMRATNELGRRQAAIEAGQRQAETERTAVVEEIERLEAGGHDAPPLPHTRDQGVRDDRPGAPLWKVVDFVDGVADEHRAGLEAALEAAGILDAWVSPDGQLRATTGDVVVVPGDTAPAGGLTAVLTPAVDRADPAAGALTDDTVTSVLLAIGLGPGSATWVAVDGRFANGVLHGSWHKESAGYIGEGAREAARRARVERLHDELALLGQRIAELADAMTRLVADRDALAAEHRKQPKDSHLREAHVKLASEHDAKRRIDRRLGDAVVLVDERTKASDSMHGAVTEFAGDVGLPSDPDELAVVRAAIGDYRVALAALWPAARALRRAQQNLADAQQELLTAVEEREQALEVATSARVEAEVATERHRVLVETAGAGVEELYRKLDAVAAELDERDRREKQARDTERIAIEKRGRAEGRREELRDSISIAAAERDQAIAQLRAFARTGLLATALPELDVPDPTTEWAPNPAVALARAINTALDSVDDADRPWELIQQRVSSEHKLLTDALSAHGHSVGMVVRDGIIVVDVVFQARSQDIPTLVSALAEETGQRKALLSAKEREILENHLINEVAGTLQELIVNAEDQVRAINADLAERPTSTGMRLRLQWRTARTAPEGLDRVRDRLLRQTADAWSLADRQTVGEFLQEQINREHSEDRSGGWVEQLTRALDYRSWHEFVIQRHQDGQWRPATGPASGGERVLAASVPLFAAASSFYSSSGNPHAPRLIALDEAFAGVDDDSRAKCLGLLASFDLDVVMTSEREWGCYPQVPGLAIAQLARRDGIDAVLVTPWRWDGRERVRADRPYPVR

SEQ ID NO: 39753 - protein, 425 aa, Kibdelosporangium sp. MJ126-NF4
MTDDHDRLHRLLGTSDTEWLLDRLRKRLASGKPLTGTVTLASPTHDQRRAIERLLGRRAGAGTSLTVSLDDVDDVLRRSGAAPDGLVGAVVSLVGAVPRRADEIAAWAAVLAPLDDLVARRPELAPWRAWLDATGIVRRLARDPVTASALVTSATVVLERLPSGGVALGRLAVETTGNAHNLDAGRPLTTVVLSAARVLAGAVPGGDNSAAERRAVWAAVGVHLDELSSSVLCLGLRGGSGTTTGRMLAMASEDGEPCVLTLRQLTRDDIDLGVGDGLVWMCENPIVLASAADELGVACPPMVCVNGQPSVAVWRLLELLAAGGARFAYHGDFDWGGIRIGNTLRERLPWRPWRFDARAYQAVDTTGATLTGRPVSATWDSDLRSAMERRGVQVEEELVLPELIDDLRGPGRRSIRHRSHTCTDG

SEQ ID NO: 39754 - protein, 517 aa, Kibdelosporangium sp. MJ126-NF4
MNPEQQDRAAQAPARSNTDRLGLYAYLQAREHKSTYLAIMRLFTATLLADLSAGDVAAALAPAEREGTVERGESRIENVITRLKQLVEWGNLVQGRREVVAASIAEFQHGSVRYQVSKLAVRVQRDVDELLRVPEGAREVSRELLPAIERGLNQLCKSLSNAVSQEQRDAESAAAQRSRELLSEQVTTLFLQHAELAATVRDFYAYLGQVVTRHHLAAEEISGFRNLLVEYIQKVVEDVLRQTPAIAEHLTGRFAAARPELLRLLGPSEGLGPAVERARGRSAADWQELTDWFVDRPGRPSQVTVLREATARAIGSLLASVKRATAGGGLLPGRRAELLKLAKWFDDSTSAEAAQMYAAAFGLYSSRHVLPAPEHDSDDERTPWSEGPVCDVTVSVRSRSDRGARGRTSRIMDDPITEQSLLADARRADELRAADVAELVAAAPKLDQVTLSSGALGVLCELLTMAMAQRESARDVGSAEDQVRGLTVRIEYAEGETATVRTAGGTLTLRDSRLVVG

SEQ ID NO: 39755 - protein, 419 aa, Kibdelosporangium sp. MJ126-NF4
MRISAADPLDGLADIDAANVVRCARTLLRRPLLRLGGPDGELLPLVYRHRVVLGEMFTALLGYRLVVERKFARLYKSGPGGDSTRGVPELSPRGYAYVALTMAALTGTGRQVLLSRLVSDVRAAAVEAGMDVVDTIADRRALTAALRHLVSLGVLTETEGTVGSASQDAPAEALITIETDLLGQLLAGPVADAQDAGHLVALAARTAPRRVDFQVRRRLIETPVVLYAELAEDEREWLLRNQRRESYLLERCFGLYTETRLEGILAADPEEYLSDVMFPGTSTVARIGLLALPDLLDGNTGDTPESSEVDSPVASPVDAAGRRPVTAEKVREVCERLVADYPAAWSRQAAEDLDGIVTEVLALLVHMGLAVADGERWWLSPAAARWWPEPDGDPEREIAEPAPEPEVPGWSLFDEEGGA

SEQ ID NO: 39756 - protein, 1352 aa, Kibdelosporangium sp. MJ126-NF4
MTDRWRLHRGGIVNVWQYAEQTFDFSGGRAIFQGTNGSGKSRTLELLLPLCLDGDLRQLGSKGFDTVSIRRLMLDDYDGGPNRIGYAWVELRREGHTLTCGLGVKASKTSQQISDSWRFITPQRVGIDFQLAGPDRVPLGSAQLREVLGADCVLEEAAFRAKIAETVYGVPAVRYGDLLHLQRTLRNPDVGLKVLEGQLEQILSDALPPLDAAMIEQLATSFDDLESIRENITRLGTADKALRTFLKTYSDYAIAGLRTAADKLRVSEDTVRKLGSQSKKLTGELERARTERADAERAEQDLEGGEQQAEETIGALKELPAFRDLQDLQSREKLVAASRSAASAALDVAGKQRLAEDAAVDGVVRLLRRLAQDLDSAGEFGESLRTALQTAGLDTTLVPSMPRMAEGESETITERVRAKPDPESEPLPIERKVPPPVAGDELLTTLTEAAERAGRAAKEARQRSALTLALHQQAVEQEKQEQRVETLRSSARAAQLEATEAAGRRNQANQESVTESEVWLEQVRSWCGAGPLTSATPERSLQLPSVEDLSTNPGQARELGTAARQWTAPLVQAARDIAHTASQRRTETRDAIDERDTELAALRAGKERSPSSPVSRDESTGAAFHRLVDFRADLPDADRAGLESALEASRLLNAWVTPSGSVPDLDDVLASPGAVVAGPSLADVLVAVEVPDSPVPADRVESLLRGIGLGDAPEAAMALSVDGQWRAGALHGRGSKPAAEFVGAGARAAGRQRRISELEEELAALRTELAAAEEQQRSANDVVAEWERHLEKFPGDEELIAKHTRMRTEQEATERANKHAQQLREEHDQMQNRWQATTADLLRQAGDAGLSPRSDDLRQAQQAAAEALGAAERLAEALRQRCRGTVEDLVDATHRYHTAVADRTTAETEADQRCAEYAAQAGTLSELTGSIGGEAKEIAARIAELEQSRKQMRGELKDTREKITGLREQAAKLDAQLESATEQLASSEEVQAHAYHQFAAVAQAPGVLSAALPELEETDLAAVRAAVVEAADRKTAGETAVITKLQDLQTALAGGYDIAAEEHAGLLTVSVAGEDGGRPVAQAAKQVSSKLAEQRGFLDEQYQRIFADYLIRDLAEWLRGQITVAEDLARRMNDVLGRAKSSQGVHVQLEWKPSAALDDETRQALSLVRMPYGERTSAQDATLRRVFTERIEAERDTHSSGYAEILSRALDYRSWHAFTVRVADTGPDGGQRVRRLRQLSSGETRLVSYVTLFAAAAAFYDAVSSSSEDFNPLRLVLLDEAFERLDDPTIARMLGLLVDLDMDWVITWPSGWGVSDKIPRMHIFDVLRPRNGRGVACTQTTWDGAAMDRIDP

SEQ ID NO: 39757 - protein, 544 aa, Streptomyces albus
MGASVSGAGQDADEEARRRLNAYTYLSAPERLEHVAIMRVFCGTLLADLTVPDVMAKLRQTGASAAGLDADTLTVRLEQLVQWGNLLRSSHTVNASSISEYQRSRSRYQLSKLGERIQRDADGVLAEADAAREVSNELLALVERGLRELADLVTAPGGVEPQDGLERISTLFVQFTEFADSIRDFYAYLGQVLSRYDLDSAEYQGFKELLLDYVEAITEDVAFRAPRISAALDTLWPHIPALLDRLDSHAQGLTGLSTQAQAQGESRPDVRIQRSRGREFADWEGLRGWFSNTDGQGSQVDQLRDATLRALQSLLANAKRMLRSATGEMSRRKDLLRLARWFDEAAPRDAHDIAVAAFGLYGARHLGIPPATEEVVPAYTSWWTGPVVEVPVALRERGSRAQRGRASAVEDHSAQKQLLREAARQRAAARAAAADELRSASGRFAEVRLTSAALGLLLELLATALGNAQLSRPISTDGERKAVFDLDSASSEDAELRIRLTVRRTAGTRTVLYSADGDLLLDDLELDISRTSAAVGGEAEASVS

SEQ ID NO: 39758 - protein, 441 aa, Streptomyces albus
MTLPSTHDVALAAERRTAARLLLAHPLIASDGPHADLFPLIRRHADWLGKRFQQVLGYRLLVDSSYARLFKAGLGTDSGHRLERSTGTPFTPHTYACLALALSVLVTAPEQMLLSHLVADIRAAAADAGIELEETGRAAGKRTLVAALRQLVDWGVLIETEGRVAALAQEAGGEALITIDRELARVVVAGPLSQARNGADLVRRAADPGFGGPRTYVRRMLVETPVVHLDELTDAERDWLRTRQRREAQAFSELLGLEMEIRAEGVALVDPEEELTDLHLPGTGTVAQAALLLAERLVERLRPQEPGHPATGGTLTIGVAVPDGLVDEVLAELITEYGQRSNWQRGYLEDLPSLREAVLDLLVRMRLIARAGRLRAEGEGLPEGYVEEASEGRTVTDVHGARPGGDGWVLLAAAARYATQVTVRPATAVGKGTDVQEELPL

SEQ ID NO: 39759 - protein, 1412 aa, Streptomyces albus
MTTDARGLVPLPRSGPATTTGARFRLHRAGIQNVWQYDEQEFSFGDGRLLLRGKNGAGKSKALEVLLPYLLDGDSRALDATGTGRTTLAWLMLDGFEQTNRLGYLWVEFRGTADAGGHRHLTLGAAIRASKSTQKALPTFFVTPLRIGEDLHLVEAGKPLPVDRLKEIVGSDNTTDRAVQHRSHVARELFGITDATRYRNLTQLLHRLRRPTVGDRIEHGGLVSLLSETLPGLDEDVVEKVARNLHDLDAVRDELGRLERTDAALRTFLTSYRGYLAGVLRTSAKRVSHELGVLAQRRRAAGDAAQRTSDLRTQEEELEGRLETLREEEQDARTDLAALHASHAYRSLRELSERRGTVEALHTAAVAAFTTLRNAHDAEEGSAERLAEGVEHLGSRLAELGTEHRELLTQAEKAGLPTGHLGEAVALPRTVLAQATGTGLTTPDGETRTVRHRSVARVETVTAQEGLQSWQNQLENAESVARNRARMVQEVTHLISRADEARAGAAQADAERERLEGEAEDAAGHLDGSREKVAEESGAYSGQVAEWAARTRNALGPDCPSLDAVHATVGHETSTDAPFADRTLPPDVDSQARRTAQAALEPYGEELTGRRDALALGVNRLGEELDHLAEQKRNWEQRTDPEPPAPHHRAAARTPGSGAPFYRLVDFADDLAPADRAGVEGALEASGILDAWVSADGVLLNPRTQDTLLQPGPVLSDGPTLASALRPAPEPDCGVTSEQVGSLLATIALASAEETSAHNAVFYDGSWRLGVLSGRHDKGATEYVGAAVRAETRRRILAELEERITHTEQRLADVREELAVADAMRRALTLAERDFPRARNLADAWSRTESAERTLRDLTAKATRAARLAEETRALAVSARTEADATATAHDLPGDPTSLDRVRTALAGLLSGIGHLRRAVSSTGERLGTNQADADRYGRAREDRLAAEESYRVHLTGLRTAEQDLRTREEAIGSSEEEILSREQETKQRIANAVQALPTAQRARDDFHDLRVRAEEDEKRLRRSLVDQETAVINVGSALRGALNRPEVVRGAGLDRASLPEYMSDDPGADVRSRLRALRALADAVEHALGRPKGEVSDSTLLNRHTDLRDQLAGGFDAQLEERDGIKVCRLVDDHGSHDVAAVGERIAVQAAEARGRLTEREREVFQRFLTGELGDHLSAQVITAANLVAALNDTLRTVRTSHGLGVELLWKLDEDVDADVRAAVELLRSPSSLRTRDQTEQLREVLQRRIEDARRADPSAGYAAHLRTALDYRDWFHFHTFVVEDAAPGRRRKLTGRTGLSQGEQRVLSYLVLFAAAAAHFTSLAESAPHAPRLILLDDAFAKVDEPTHGRLGRILVDLDLDFVLTSERLMGNWPEVPSLHIYECLRDPHVRGVATLHYTWNGRHRRLVSV

SEQ ID NO: 39760 - protein, 426 aa, Streptomyces albus
MSGLPAATREWLTGPGLTRLWQGARKRLESNGVQAAGSLRLTAMNAQERNDLSLLLGKPLTGAAVTIRLDVLDARLRASAAGLGLKQTLEELGPPLTDRRAARADVAARREQVWSSLASSLAASPLADQEWPRQWYDLLRRSGVPRGVTPEAAIWTLQQAVQVLTALLGPDGPERNGTRGRGELAAMTTGSAHGLDDGTWLARLVQRGVALAHGTEFPDDAAGRRALWRLVSVTPDEVSSTVLTYGLRPDGEGWRERALRERADHHAEVHVTPRDLHGLRLQLPAGTLIHICENPRVVEAAADAACVQPLVCTSGSAATVVFTLLDALAATGCRFAYHGDFDWPGIALANRVIRRYEARPWRMGTADYEHLAARSQAEGIPQLALDGQPVSADWDPDLTPAMTALGIALHEEATLELLVDDLSRQM

SEQ ID NO: 39761 - protein, 495 aa, Bacillus sp. OxB-1
MQSFKKVKEASYLSAEKAWSYRAILRYFYVQHERMRDFLFPEEVLAHLQGLPEFHLYTEEQVQQDLAQLVQWNNLVARQEMGRAQTIEEFKKKRFRYQCTAYTVEFERMLSDLEKGGNAFGGSLEKKEFERLYERLQLMVGMVGKGVFTNADECAQLWTDVFTYFRSITKNTSDYIAYISSEEVEERMQTDAFLLFKDRFTSYLRDFIIGLQQTALKIQTVLEELTVEKLLPFFEQVIAHQEQVPRFEDIALDSQAMLVEHQQKWISLQTWFLGSVHGESELESLRKRTNEQIRRITRVVQRLGERNNYFRSRKKDYMHLAEWFDSLESMEDAHRLSSAAFGIFHTKHLHTDHVPTEDIYADVWDEMPGIHEIKPRIRQYREKTRPGAVVSRKGEQAELVEAYLAERRAEQEVLSTYIRDGEIRLETIPHIEPHMRKLLLNWVAKSMTRKDRIIKTEQGYTVRVLLDESKRIELKSEDGVLIMPAAVFQFVEGGE

SEQ ID NO: 39762 - protein, 388 aa, Bacillus sp. OxB-1
MNENRFDEKAQSALRLLFERFWILRAEDPASYQLIREREKVLKRYIDDKFGYDLIIHQHFIKLEKIPVEPKSWMGIQAFTMPLDYAIFCCALAFSENRAVDEQFLLSDLCGDIKELYPGGLPLDWTNYNHRKSLVRVVRQLEMLSLIRAVEGEVEQFALDVEQEVLYEVTVYARYFMRAYPKDIFEFTSIEEMLASEEERHTDDLRRKRVYRKLFLSPAVFRVGEEDSDFAYIRNFRNRLRDDIETHSHFRLELFKNMGLLIMDEKKQEMTLFPDQKAISDLALQFSALLRNQMDTYPADAFGRIQISAFAMEHLVEQLQAEYGTGWSSHYRKNSVKATTEELIDLLLSWEMIEVEPETNDYLITPLAGRLAGVYPSDFKLKGEEVDA

SEQ ID NO: 39763 - protein, 1388 aa, Bacillus sp. OxB-1
MREPNKWKMNRVGLFNFWYYHTMEVFDFADGKLLLRGSNGSGKSVTMQSLLPVLLDGRRSPERLDPFGSRARKMEDYLLGEKEVGGRDERTGYLFIEYKRTDTEQYITTGIGLQARRQKQMNFWGFAITDNRRVGKDFDLFEMETQAGKKQQIPLSRVQLENRIGDGGEVVRSQSDYMHLVNKLLFGFETDEAFADLIQLLLQLRSPKLSKDFKPTVIYEILEKALPPLTDEDLRHLSDTIEHMDGVKQQIEQLERERGALNKLIRHYDEYNTYKLAEKAEAYKKTKHRLTKAEKEIASKQREAEALAVEVQALESRNVQLHQSKKVAEEKRTRLQGHGVWQIEREKADKLEQLSKYSKDRQAKLDKLENRKRQERAEKEQLVKTEESLDETAKTMEQQLEDLQDHAENAVFGGHPVNEQDFQRLRKSGYDFAVWHEEAERHDLFLNEIIEKLRELEQLRNDLAEHEKKQADKQLEIDKLRMEAADWQNVFETDKQNQLDAIHVWAKRHSFFEVDETLLGQTARLLDDLYEPFEYGMIREPFWKLNENYRTRLYEKKVRVQNSADLLKQRIDEKEADLMNWEQRQDPEPVFRDEATIEARSLLAKEGRRHSPFFEAVEFRADVPEPTRNRLEAALLESGILDALIVEEEGLDIHHDRIIVPAPNLMAHTLADYLVPDCDDSVLPQSVVDDVLRSIVVGEDLKGEGSGFSIAEDGTYVIGLLQGHAAPVDAVRFIGRTARERFRQQEIARLAGEIEMLQTEEQELEQMIQALDDDFQKAESAMEDFPTDQDLSMSFQQIRQKRFEMNELQKVLLQMDEEIRKRKQAFLELKRSVDMETRGLDLEQTHPAYTEAQLEMRLYKRVLQKLELAHKDEGNLASRSQQLKERLEEIIYEVDELQGEINTIAGNIEQLTSSLAEIETQLKSQGVEDVRREIEAVRVLLEDVEKELDQNKEQLPVKQVRMETLHKQIVIHKQEAGFLSQLVAGWKAAFFKERAYGFVEGHGVDDSSPEQQLDEVAEQYRTFLEQKDLSKIEENLTKAYNEQFANLLEYRMQDSSDRLDSSDWEAADWTESQQIEFANWQRMSTRRLIQLDFQGKRVSPYFIRNSVDADYERQSHALEEEDRRLYEEILFDSVGNMLRSRITRAQNWAEKMDKLMRGNDSSSGLSFSIQWKPRSAENETELDTNELVDLLRRDPRLMKEADLNRIIEHFRSKIDRAKEEVDLQGEGKTLLQVLKSVLDYRYWFSFVLFYKRERETRKELTNHAFDKFSGGEKAMAMYIPLFTACFSRYQEAAPTAPHIITLDEAFAGVDENNISMMFGIVEELGFDFIMNSQVLWGDYETISALSICELIRPKNADFVSVMRYHWNGLKRVEVTSKPSEPAMIPADD

SEQ ID NO: 39764 - protein, 442 aa, Bacillus sp. OxB-1
MQDALEFFRSEPAYGKLFQAFRNKYESLGRLGGNISTDSFSEEELEQIARFFGISTTRLRRKGAVALLDFESQLRMTRFGIMDLKALLDAYFGEEIFSKREQEMARRNRIQDLLQTLQSELPALSFWFGCLLAQSAEARWIIQTAERDEALFRTMSKQLHKAILELPNSPVRLPFFSQLVTGDPHAMDLNTEFGKLFLHALAVLQRMNEDGTEGADGKLTTPTATEEVNELLNTYNIYRDDLLNFVTIANFTARMKTGETYPVWQSAGEVGAVLNSPLREIIALSDIRPATGQHVWIVENSGVCSALLDWQPRMPIISTNGQFKLAALLMMDQLVEAGFQLHYSGDFDPEGLSMAQRLLERFPGYVDLWCMDVNTYRLSKPLKKLEPERLSKLNGINHPSLIELSEAIKTEGKAGYQEAIVEGMLSYIGDVLEKGLSKKPLK

SEQ ID NO: 39765 - protein, 510 aa, Bacillus bombysepticus str. Wang
MFDIPIIQTPIKEATYLNTDKTWVYRPIIKYCYTRYLQANRFVYPHEVLEFLQSTGGFTSYTLDDVKRDLESLEKWGNLVARQDVRGPEKLEDVLKKRYQYSVSEISIGFEQFLEKLDSKRSNITGSTDSSLVSRLLETTYALKDYTIPRVKDMKVNQEIYELWSDIFYRFEKLQFDSVSYLSHIDYQKIQTEVAKGEWAFLHYKDDFITYLQDFVLSLHRTVDLIISVFKEIEVTKLEKVILAAAEHKCYRDRFIFENVSVEEQIQEFENNWLYMMQWFSSDSSNHNGGYESLLRQTQETIDQIVKFIRQIGEKYRQVKNRQHEYLHAAVLFEKMNKSNMDECHEMFAYLFGVQNTKHIRAHSISTDQQNNDLWEIKGDKLTLLSKYRERKERKKRKAVQENLEARYKLLKEYEKEREIKKQYIVRYLSSKVIRVRDLGPVPACIREEILEWLSRSSFEFSEKGILRYGFTDDGRTFEAIAVTENRIKLVCDDGTLEMEDLEFRFKEVR

SEQ ID NO: 39766 - protein, 400 aa, Bacillus bombysepticus str. Wang
MEEKNGITDHMKELVEYLFEYMFIDRKKNRDIYYEIRRLQKQITYYVSENFKYNLLVHPDFIKLEKVTTSPKPWMGIERFKGPRDYVILCCFMAFLEQEITNEFITEDLTKAIKNYFPGEEGLQWEGNGGYQNRLSLIRVVRALEEIGIIVILDQNIDDFKDDDKKQVLFQKQTQSHYFMRNLPFDITACQSPRSLKLKRVLEKELTGILPKHELNRRLFIEPSIRKRDLDEGLYDYLKRNIEQVESFVEETSSYQLEFYKTGAMLTRTETYKPLTTFPNLKMESHLTMQLSFYVRELIKERKVHKELEGEIQMTRSEFLQVIDSLKERNGDEWTASYRQMSAKQICKEFIPFLKSWGFCNELEDRENLVLYDSLGRVSGTYDMEMKQTEWESGGVEKTS

SEQ ID NO: 39767 - protein, 1400 aa, Bacillus bombysepticus str. Wang
MTKDTRWRPNQAGFLNFWFFKDDILEFINGKLHLMGENMSGKSVTTQSLITILLDGKKDATRMDTFGSRSRTLRDTFLGSTGDKDKQERNNQDKLGYTYLEYKRGIYDEYITTGMGLQAKAGVQDLDYWFFIILDNSRIGKRPQDVKLYKEEWIDGDVKKIPLSKEELREQLGEGGKIYTTNAEYMKAVNDHLFQFREIQVFEHLIKLLIALRSNKLGGGQKPKMVYEILTNSLSSLSSKELSPLSNTIESIDTIESELTELQFAYDYIEVITSVYEAYHEVYLAEVANGYLKAENRLQNLYERQRYNSNQLSTTQSNVVKLTEEISHLEAKEKTLNERIEALRSKEAKDLSIQKGRLENQKIDITRLMKPKQEQRKTKETKIKEMNQLFEATSTTSLKWINRMKGELSEMERCALESSFKQHSRHAGHFITRYEHFDYDFSLWNQDIQSYQTFIHDIQKQIFELEKLGHKKTVLTEEKNEATVLLNQKQEELRMMKKKLDELKKTFSNEMDEWLEDNEFLVMNEEEKEQLLKKLYHFPYSVTERELTEMIEQQYTDVKRKINDEIHQVDRLEGEIGQKQSSVEEELNEWIVGKMPKPFLSKEKESVLEAIKEWNIPHILFYDAVEFQDGLSEKEMASIESALEDTGLLTTVIADPKWDIQLSEHTTVPNKHGTPYRFNLTQYLKPSKKSGKLAVWVEELLSHVGISKEEECFILSNGNFKNGIIKGQASLKESPQYLGERVQIHYKKQIMSSLENMLDEISHELEKLQQEKSDLFLQLDLLDDEYHNLPDSNEILELYQASNRNEQSINNIFETKLDSVRKRLTTLQNEMDTMTRRIQVEADFTEIPLTSEAFSQVRDEMHRYDRHLNQIKMTYTELKSIQQSMDSYNTQKHSLLEDVDNLSAEILSHEKELQKIEVQISVIMEEMEHSGLLDNERQILEYMKELQSIPDKKDYLRKNLLKEESKSLQLSEKISFMLKEQGVREVIRDAWEKYFSSLFTLGENDTLRRVAEEYLEIARNYLVGKEDLRSLCTRSEKELLNEFYKSRQAIAQYSPILDEYVSNIEDNLEIPSELDELNLETEWNNLISLRKYKLVLDIQINGIIQRREPRYVLSVLKERMDLQRANLSERDKRMYEEILLGSIGRTIKRKIGQTRDWVKNLNEIMMNINTGGGLQFGIKWVPLKATTEEELNTREIVRLLEIDAPLLKPEDREKLIDHFRSKIETRKLEQGLEQYTGFDLKETFKEILDYRNWFEFQLISKYVNEEEFTLVDQDKFGKFSGGGRALALYIPILAAVSSCYGEAHYDSPRIISMDEVWAGIDNKNINEMYKLLEELEFDFISNSQFVSGCSPDLKGLSIYELIRPKNSKEINFGRYIWNGKYKEYVKNNSLSEDYPGSANM

SEQ ID NO: 39768 - protein, 444 aa, Bacillus bombysepticus str. Wang
MYSQIQETVNYFRSKGGYDRLFYLFREEVIRYGRVKGVVILKNATDQEKECLDGIMPNINFKDTDIKVRLLTFEKRLKERTVYASVNLDDLLECYFSQKIVSKKEVDERKRSRKVQFIEEVSKYTSHPYYQYYIVSIKRKGRGYKRFMNLYEESSSTLRKYLSHLSQSIQLLPLSKMTHVAMFAAKMTKDPHAYDIQTSLGDLFFDILTIAYEKEITNTQLSSKLSIEDINDILNHCNLIRDDISSDVIFTGLYAKDIRGLPIEYIDLATKHDTVLKLPLCELIKIEKFYPIESFKVVYAFENPILYKVFIESVKEEVGCYPPSVCTSGHFSYALWKFFDKLIPYNSTVIIKTNFDMDPEGLKMNDKLYSRYGEVIHPIAYSKELHQEQQSDKKIHLNRLKQLDNLTHGVLKEMGELLKEAPQASYQENFLEACLEDAISQFMG

SEQ ID NO: 39769 - protein, 492 aa, Bacillus coagulans DSM 1 = ATCC 7050
MKKVVEASYLTADSAAQYRVILRFFYRQHERMRDFISPEEVLEYLRSLPAFHDYEEEQLHQQLAQLVKWNNLVARQDMTNAKTIEEYKKKRFRYQCTPYTVEIERMLIQLEKLGDQFQGSLERSQFDRLLASLAKLEEELKQPLDKPAAHYMHIWDDIFHFFGTIRTNTADYIAYINSEKTSQRMQTEAFLVYKNQFTAYLRDFIVSLQKTSLQIRERLRELDTHILAPLFEKLVEHRRQIPRLEDTAASAQEWLEEFREYWESLRRWFLGASSSQSELEMLQMQTNEMIRRMARYVQRISERQQHFRSRKKDYLHLSKWFAGCHSLEEAHQLSSVVFGTMTVRHLHLEEATTDNLHAETWEEQPEMREIKPRTNRYREKTKPGAFRSNHEQKEKQRLAYLKEREQEKQLIEKYMKNGEIRLAEIGIVEPFVRKVLLGWIGKSMAAKNHEVKTDYGMSVKVVIDPDRIITLDAEDGKLIMPDAVFELSGGER

SEQ ID NO: 39770 - protein, 387 aa, Bacillus coagulans DSM 1 = ATCC 7050
MDPLQVFDEKAVQGMDLLFHHYWILRSEHPDWYQLIREREKVLRRYISEKFGLRLIIHQHFIKLEKIPVEPESWMGILHFQEPMDYAIFCCALSFLEGKAVDEQFLLSEMCQEIQNDYPVEDGLDWTLYLHRKSLIRAVQALMEFHLIRTIDGDISRFDTYEDQEVLYEATVYSRYFLRSFPDDFTSYADWTGLLEEDWKQNQEDERRKRVYRKLFFSPGLHRKDTQDPDFLYIRNFRNRLFEDIEEHSRYKLHVFKNTAFLSAAEPRSYHHVYPNAKGSTDLMLQLSKTLHDHPEKYVPNEAGEILLTEGEFEAVIDEMRSRLERGWPKHFRDAGTKAVCAELVETMKEWMMAETDEAAGLIRIKPLLGVLAGKYPADFEKGDEQP

SEQ ID NO: 39771 - protein, 431 aa, Bacillus coagulans DSM 1 = ATCC 7050
MNDAIDLLRKEPGMMKLFRLFKEKYRSLGHIGGTISLAGFTRTELEAIAGLAGTSPDLLREKNKISLRAFEKALAPTVFGKYTLVELLEAVLREKIFSKAEEGEIEKKKEEQFLARLAETMPGGNWWWRRIAGKTADTRFIWHAYKQDPDTLSEQLTTVLKASTMLPEEGKYERIPFFSQRVTGNPHFFDQNRFEGRLFVHCLFTSQLLKGLIEEMPKTTEELNELYANAGLMRDDLWSFVTCRAFLAETENGLHPVWREAAAAGTVMNVPVKELLQLTNIWPRVGKKVWIIENSGVASAVLDEVPDAPVICTHGQFRTAAWIMLQRLAENGCTFYYSGDLDPEGVAMAERLSNRFPGQTVFWRMDPDAYLRVLSEEDISARLSKLDAVQSPELLLVANEMRLKKKAGYQEGLADLLVEDLKKRWAGGKEI

SEQ ID NO: 39772 - protein, 493 aa, Anoxybacillus ayderensis
MDTSWLKPITEAKYLVVDNAYRYRAILRYFYTQHERMRQYLFPEEVYAFLKQFDEFQTYTEEEMQQDLEQLVKWKNLIARQETGHIRTIEEFKKKRFRYQCSPYTVEIERMIRTLEQLGETFGGSLEKTRFDRLYASLVRMESIIDNGFGEKREEMNQVWEETFDYFKKIIQNSADYIAYLNGENMEERMMSDSFLAYKEQFTAYLRDFIVALQKTSMQIEKLLEDLPEDGVRRFIEEVVAYQLAIPRFEGAVFSREQLTEEKLDTWRSLKEWFLGRNGHESELSFLQKQTNEAIRRMTRVVQRLGERHHHFRSRKKDYLHLAKWFSSLETVEEAHKLSAVVFGCFHTKHIVAENDATENMYRDIWEEQPTEWLVKPRVRHYREKKKPEAMIDRRKEKEETMTAYLAEKQQEEEALAQLITDGKIVLQELPIVAPHIRKTLLGWIAKAMGREDRIVQTENGWKVKVVQREGTITLEAEDGMLMMPNYEIHLLD

SEQ ID NO: 39773 - protein, 388 aa, Anoxybacillus ayderensis
MEKEFDEKAKEALTALFEHFWIVREKEPELFQKIREREKVLKRYVQEKFGYRLIIHRYFAKLEKIPAEPEAWMGIESFQEPLDYALFCCLLAYLEGKAVEEKFLLSDVCEEIKAMYPGETALDWTNYQHRRALIRVLKTAEQIGIVHHVDGELEAFANQEDEEALYEVPVLSRYFMRSYPKDFIQYETIEQLLEEEWKAAPDDYRRHFIYRQLFLSPVVYRRQKDDPNFYYLRNFRHRLRDDIEAHTDFRYELYKNAALLTISERQHVYTLFPNQKGTSDIILHFAAVVRAHLDNYPPDEYGQIRVTMPEFHQLLNRCMEQYGEGWSKTYREMTLAQLSSELLSALKEWKMAEHEQETGMVTLYPLLGRLVGRYPDDFLMKGRDDDDE

SEQ ID NO: 39774 - protein, 1378 aa, Anoxybacillus ayderensis; identical to SEQ ID NO: 39341

SEQ ID NO: 39775 - protein, 413 aa, Anoxybacillus ayderensis
MNRLDEAVQFFRGERSFHRLFCEMKKKYESLGRIGGTISVASFSMEEKDAIASFFGKEMSRVSLAAFEQQLANTKFAGISLVELLSSYFGEPLVTKKEQQQQAEQEKEAYFTRLIHTYRPQRDWLMEMANQRVVQLAYQQNPQALEAAISAVCRALEQLPSTYVRLPMFAQKVANDPHAFDLHTLAGKLLLSALQFYADTKYDLSSVEDVNELLQSYRLLREDVLNFVTCAGVMAEKEGRHPVFAAACETNTALNVPLREVMPLTRAYPSIGNIVFIVENAGVFSTLLDTNVPLISTNGQLNLATIWLLDLLVKEGVALYYSGDFDPEGLKMAQRLVERYGSSVRLWHYDRLDYLATKPTVPLPDERLAKLQSVTLHDLQPVKQEMLRRKKAGYQEALVEALRKEIKRNVDFV

SEQ ID NO: 39776 - protein, 503 aa, Rhodococcus sp. MEB064
MTAYPVAVTESADSYVVDDRLRLFSFATAEKRADYLRVLRAFDHARAGYVVLLHAGEVSDILARTEGADVLTGVEISPLLEQLHTWGVLERSYDGTRAATLAEYRNRHYVYQFGQVGYQAYRAVEDVLAARPEDASLSRLVLPELLGDLAELAAANSAGDADLVYRKLNRLDTALGDMATRAAHFYLSLGDLVRTTDVTPESFLAHKDALLSHMREFSLDLARFGPKLTAAIEKVDATGLEALLDRAAASDERVFLTPDERRADWAGRWTGLVHWFSSTDGDPTESDRLREGTMSAIAAVLSLLRRVTETRKGGVSRESQLRHLAGWFASAPTEDAAHALFGAVFGLGRPRHLSMVHPDDDIVPVSRSWWDAPPVEISRTLAETGRPPAAGAPARVQRNDSGVRRLREQQLSVQRRRADAARSLADHGVYDRDLTGEETDVLLGLLNAALTARVPVSGRVGSSTGSEGGVTLTLAPHERSTVVRTERGLLHLDRLSLTIGTRR

SEQ ID NO: 39777 - protein, 443 aa, Rhodococcus sp. MEB064
MRARTIPSLALDSYQRAARTVLSHHLITRTYPDRIALPLVRRWATELREDMLEMFGYRLEVTETTARLYPVLDRLDPTQPARTASDRVFDRRRYSFLALSLAALGRAGDQITLSELADHVAAEAGRVVGVDLDTERAADRDAFVDAVGWLSARGAITLADGDAGGWASNPDAGEALYDIDRSVVVALFRPPRAVQHLRSAAGLLADPTDDSRRARRALVERPVVYLTDATLDPASIDDVRLLTGLAVERRAEGVALIDTSGRLSDTRFPSTGTVAQVALLLAGEIADRVLDPDVEDGRTVEAPADRTAELIDALDSAIPDGSVFDSLADDLADDESEDDADDIEPGRHPFLADEWIDDTVGALVDAYGRTFAAQWQSDRLGVRRAAVRLLTDLSLVAPVRGGIVALPALARYRGVVVTVREHATIQLFPPSGIGQSEFQEFTP

SEQ ID NO: 39778 - protein, 1380 aa, Rhodococcus sp. MEB064
MTSSTRFKPTRAGIVNLWDYRDQEFSFADGRLVLRGPNGSGKTKALEVLFPFVLDGRIEPRRLNPFAGEERTMKSNLLYRGQDSAHSYVWMEFARGDRDDPEAVTVGIGMRATKSADKVTRWYFVAEGRVGVDFSLFGADDRPLTKKQLAELIGTDAIVDRPVDYRAAIDARMFGLGAERYDQLITLILTLRRPQLAKNLDPKGLSRALSDGLRPLDEHLVLEAARSFSDMEEVGRALEGLVQADLASKRFVGVYSTYLGVQAKTDVDQVTRRLEAVDHATVALFAAKELRERRRIERVEAETRFEAAERALDLAVADQQTLQRSTAYEGKQQLDDLADAVRKLEVSTGQQRDKASKALESVDVRRRESEAAAASLREATAAISRAEDELLAAAEDAGIAWTPLPHDARTDQITAAVRGHAEERDGDVRAVRAALAVVDRATTERTRTERAASRAHESHDASSAAVHEAEAAVEIARSTYAESLRAWWSQHSARLGVPGLIESVTDAVATVGQDDAPSPAEVLSDGVRDLLDTVRDRRSAALQTRDDAAGTIADLTAERASIAAEHDDAPAPPATRTGDRSGLSGAPFWTLVRFADDVPADEAAGVEAALEASGMLDAWVAETVPAGRESEQFLVPADAVDGPSLADVLLVETDISVPHDLVQRILTSVSLTADGDGVRVGRDGTFRHGVVLGRHHKPTAEYIGATARASRRAARIAEIDAALEAAESRRDDAERIAEDARAHIDGIRAAVGAMPRASAVTSALRTVSSAAGALRSTADAATAADRELDRAVADLTAAERRLRSDAVARRAPYTPRDLDALAAAIRHFENTGSSILRYRGDSDRSAERDREASGRLDEAQILAEEYAEEAAIAETEYEQQFTKLETLRDALGAGADKIDAELDAVRRRIEACKTEQRAATKADRESGEAIGKAEGAHETAVAGLTTALTEALSDAGRLAPYAHRDLLTVLGAARDCTWPASDAAWSTVEQLLYRIDSAAGPDDAPDVLPVEVRRLHLELSTATERVKAGDASRRSTRSALTAALQEFDAQLAASGQDFRLSWDAADGVTVVRVQDEQGHATIADFADRIDAARRDQETLLTDAERRILEDALLTGLAQQIHERTVDARELIARMGSEMKQRRMSSGNTIGVHWVLADTLDDSTRAVSKLLERDASALGPDELAEMRMHFAAQIRTAREQHPERSYPEILSTALDYRQWRVFAFTLIGSDGTEDRLTVARHSALSGGEQSVSLHLPLFAAAHVMLSSADPHSPRLLALDEAFAGVDDNGRSELLGLSVQFDLDLFMTGYDLWITYGDVPGCAHYDLAHSTAENTVSAALLVWENGELLAEHDGSDLAAALGSPLTRRVTAPAVGGLDFAEV

SEQ ID NO: 39779 - protein, 492 aa, Kitasatospora griseola
MGVFVRAKQEFTVHLRPEDVHLGLPPEDRPPLEGVATALERLARWGNLRADPDTSRVTALEDFYRARHIYQLTRAGEAAEEALTAYDAALGRRGELQAVALADITVQLRALLALAGQPGPDPAVVHLSLLALVDRFSGLAENARAFMNSLQRTVDLHEAEVEVFLAYKQRLIEYLERFIEDLVTRGAEIAGLLTELGTPEAGPVGPLLRLAAEREASDAAPDAASEALAGAERRWEGRWEGLRAWFLSVPGRNSQAKLLRSAARQAIPQLLAVVQALNERRAGRSDRSADFRELARWFAEAPDDESRHRLWRSAFGLYSARHLTIDQEALAERDAEPVPASASWYDAPGVRISPQLRRTGSYERRGRGRAVQDRAEAKAYLAELARKQAEQAAAARARLATRGEIRLSDLDELDRDSFRLFLQLLGDALAKWRPGTESVSTTTNDGAMEIRLTSLPGAGIAEIRTLDGVLRGPQHLVEILDLTTERAGAGRE

SEQ ID NO: 39780 - protein, 419 aa, Kitasatospora griseola
MGDVLAAQRAEEFRRAARALLRRPLLRTGGSHSEEFRLVRQHAAELRTWFERNTGWALLVDSEVARLRRIPGRDSDPAHPARDQRTGLPFSRRRYVVVCLCLAVLERAEHQIALGRLAEQVVLAAADPALETTGIDFTLSDREQRTDLVAVVRLLLEWGVLAKVAGDEDAFLKSAGDALYDVDRRVLAGLLVSRRGPSTVRADGFAQRLAELNAEVLPDSDELRNQALRHTLTRRLLDDPVLYADGLSEAESAYLTSQRGALTRRISELTGLVPEVRAEGIAMVDPDDDLTDLRMPEQGTDGHVALLLAEYLAGKGGTVPLAELHRQVAGWALEHAGFWRRSATVPGAETELTEQAVERLVALGLLERAATADGTPAVRPRPALDRYRVGETILLEPGQSAPRKSTQKSARNTKGKRTR

SEQ ID NO: 39781 - protein, 417 aa, Kitasatospora griseola
MDLPRLQRLLGPPELAWLLDRARRRLEAGRPLDGTVSLAEADDDARAAVARLLGRSPRPGRSLSVSLAAVDHTLRASGASPDGLAAAVVALTGPVTDKHAQGAALATAWQRALSELDHPAVTGRPELASWQAKVAATGLLRRLAGGVPATARRLAADAVRVLAQLPADGLTLPVLAARTLGDAHALDQGRPLAALVHSAVRALAATELPTGAEGRRAAWAAVGVALDELSSRVLVLGLLGSTTNTTARILAAAREGGEPCLLTLRQLTRQLPELGLNRRTVHICENPAVLAAAADELGSGCPPLVCVEGQLSVAARTLLGHLADQGCRLAYHGDFDWGGIRIASSVLRLPGALPWRYDSASYLTAVERGLGTPLTTGSPAPTPWDPDLALAITEHAVRIEEEHLLDQLLTDLRRQTA

SEQ ID NO: 39782 - protein, 495 aa, Lachnospiraceae bacterium TWA4
MQNLDKLMKPLVEVKYLTADNVDRYRSIMRIFFKNYERLKYWMYQEEVYDEMIKNPYFKEYRIEQCQQDLAALREWRNLEAIQDTKRAMSVEEFTNKKFRYRMSEYSVEIERLVLRLENLSVEGSSLEPTLLERIRIQMEQFSMISVKDAEQINAWWKDLNNDFIRLNQNYQDYIRDLNSVKAEEMMHTKEFLIFKDRLIEYLRSFIKSLQKNVGIIEELLIQLDENVLVAVLEKVIDYELSIPRIDVEITREQIKEKVYGSYNSIRNWFVSEKMTESEAAKLFDVTNDIIRRITRYAARLSEKNALGANRKEEYRKIASIFMDCENVEEAHKMAAMVFGLKSPHHLKGQLVRESGSMNQGVYEEKALQFKLTPRIRTYNEKTHRSGITESKRKKEEVRRQLIQTIKENQEKIANLEVDGVIDFSNLPVIESRVREILLKWLSNALEDSSYTAKTEDGRDYKLDMEEADKRCIVHCEDGNFTMPKIRLIFTKENL

SEQ ID NO: 39783 - protein, 380 aa, Lachnospiraceae bacterium TWA4
MMKELELLLNRRWILKSEDKELYYKIRDSIGEIRQYVTEKLGCQIIENSLLIKLEKIPAIPESYMGIEELLSKEEYAILCILLMFLEDKDAGDQFLLSQLTEFIEGQMPKGSIDWTIYSHRRRLVRVLRYAVDELILKVTDGSDEGFVDQEIGEVLYENTGASRYFVKNFSRDIMGYTKPEDFRESDWFDINEDRGIARRHRVYKSLLFSVGMYRGVHSDEDFDYLKRYGYRLNEEFEQNFDCDLHIHKGSAFLIMGENSKIGTSFPGRNAISDILLLCFSKIRQRIEDKEWNLQKNERVIVSQVEFEKLLCEVKNESSSGFTKSYREMTQGEFILAVTKEMMQWKFIEVNKEEHFVEIYPAVGKLGGYYPKDFKGDANE

SEQ ID NO: 39784 - protein, 317 aa, Lachnospiraceae bacterium TWA4
MNSRWQANKIGLINFWYYDEQEFSFIKGRMLLRGSNGSGKSVTMQSVVPLLLDGNMSPERLDPFGSRDRKMSSYLLEEDDEREERTGYLYLEFKRQESDTYLTVGMGIRARKGKPLDKWYFAIKDGSRIGKDFFLYKETSEKVTLSKRQLENQLKTGGEVFDRQVEYMEFINREIFGFETIEEYKEMIDLLIQLRTPKLSKDFKPSVINDILSNSLQPLYDEDLRPMSEAIENMDTMTSNLKSREEGRQAAGKIYRVYDKYNRLLLFEKAKNLDEGERELLTIKRQKSEAYTLLESCKEQVARLESEQMELDTKKKL

SEQ ID NO: 39785 - protein, 496 aa, Bacillus coagulans; identical to SEQ ID NO: 39661

SEQ ID NO: 39786 - protein, 387 aa, Bacillus coagulans; identical to SEQ ID NO: 38821

SEQ ID NO: 39787 - protein, 1371 aa, Bacillus coagulans
MTEGKWVMNRAGLLNFWYYDDEVFEFADGKLLLRGTNGSGKSVTMQSILPVLLDGKKTPDRLDPFGSKARKMEDYLLGEKEVSGHDERTGYLFLEYRKQGTKQYITTGIGMQAKRHKTLKSWYFVLTDNRRIGYNFELTHTRQSERIPLSAKELENRIGSGGHLVHSQKEYMELVNKYIFGFQSMEAFEDLIKLLIQLRSPKLSKDFKPTVIYEILESALPPLTDDELRHLSDTIESMDETEQQLEQLEREHESAKKLVRQYDLYNQYILAERAQKWQEAESRLQEAKQEAGTLAVRCESLRGVIENLTEDQKQNEQKRDVLKAEQERLQHHEVWRLEKEKGEQQARAEKLKSEAADLEKKWELKKSQLLNIRLEQDRLETENSKDEASMQETLDELALDAGEAAFPQHEINAGDFSRHEGEAFDFSVWKQEIKQHSGLLQKLQQLAGEAERLHEMHMKLQRQSSAKKQEIDELRKQLDHLENWFTEQKQELEDAVFLWIEQHPALPFTDERLRRIAVALDGLYEENRYEAVREEIVKAANDYILQVQKEISRAEQAQKAKEQELAEAEETLMYWKNLKLANPERPQDTEAFRAGLDGAGKRYLPFYAAVEFQDHVTEAQKARIEAALRQTGILDSLITEEPVTPVHDRVIRPNPHILGYTLADYLKPDPDNDSPVSAARIDEVLRSIPLEPSDSGFHIDADGSFSVGCLVGHAPDEGPSKFIGRTSRKRYQQEKIKETEQTIAEIRLALLQIENRLSEWARKVQEAEDWKAGIPDDKDLRDLEEQIEKTARSLKQEQEFLTEIDRDWKQVYQHLQNIRLQLHEQGAGLNLVLQSGPLDEALAAAKSYEEHLHSLELIFQRLFSGRKMLARLAADILEKEQELDEIRGEENIRRSEWEKTVANIEAIEQQLKLQGIDEVRARIQAVQHEYTSTEEKIREIYEEKPKKEAELEKCTTNLSLAKTRTTFWTNMAAEWEKLVKAELSLGFVESEHTEPESILTAFSGVLEKYDRAKLNENLTKVFFNEQSNLTEYRMSEFTKEADPPDWFAEKLDDYYETFKKEWEGLRGRRLIQMEYRGRRVSPYTVLESLEKELLNLQSYLDEQDRRLYEDIIVNTVGVILRNRIQRAAKWVKEMDAIMRNRDNSSGLTFSIAWKEKTAESEDELDTKDLVALLQRNSKFLNEDDLNRITKHFRSRIAAAKELIEIRNEGSTLHQVLKEVLDYRKWFQFVLSYKRAGEPKRELSNTAFFKFSGGEKAMAMYIPLFTAAYSRYLEAGSMAPYIISLDEAFAGVDENNIRDMFEVVEQLGFNYIMNSQALWGDYDTISSLAICDLVRPKNANYVTVIRYRWDGHKRSIVEKPKESLAGATPDLL

SEQ ID NO: 39788 - protein, 432 aa, Bacillus coagulans; identical to SEQ ID NO: 38823

SEQ ID NO: 39789 - protein, 500 aa, Bacillus subterraneus
MDVTMKKVVEASYLTADSAAHYRTILRYFYHQHERMRDFISPEELLDYLRTIPMFGDYQEEQLHQQLAQLVKWNNLIARQDMTNAKTVEEYKKKRFRYQSTPYTIEIERMLIVLEKKVGDTFQGSLERSQFDRLLQSLANLQKELTGDLSKKPEEYLRIWEDVFRYFQTIRTSTADYIAYINSEQTDQRMQTEAFLVYKNQFTTYLRDFIVSLQNTALQIRERLDELTLDKMSVFFEKLIEHRQSIPRLEDVRSSVEEWRMEYLEYWDSLRQWFLGSSLQQSELDVLQWQTNEMIRRMTRYVQRIGERQQHFRSRKNDYLHLAKWFVSTDTIAEAHKLSSVVFGAMTIKHLQLEEVSTDNIHSETWEEDPVLLPLKPRTNRYRERTKPGSMVSNTERKRQQREQYLAERKQERLLIERHIDEGVIRLSTLATVEPFVRKVLLSWIGKSMASKDGRVKTDYGMIVKVSIDREKSIHLHAEDGTLRMPDALFTFEGEGGSGA

SEQ ID NO: 39790 - protein, 388 aa, Bacillus subterraneus
MKPEQTLDFDEKAILGMDLLFHHYWILRSEQPEWYQLIREREKVLRRYINEKFGLRLIVHQHFIKLEKIPVEPERWMGVTEFQEPMDYAIFCCALSFLEGKSVDEQFLLSELSQEIQADYPGDLSLDWTMFIHRKSLIRAIKVLIDFQLIRTIDGDISRYDHNEEQEVLYEATVYSRYFMRTYPDDFTSYQHWEELLHEDWRLNQEDERRKRVYRKLFFSPGLHRLDQQDPDFLYIRNFRNRLSEDIENHSDYKLHVYKNTAFLSTDALRQYRQLYPDSKASTDLILQISKHLHDHPEKYKPRENGEIILTEGEMDAIILELRDQYERGWSKYFREKGNSSIRAELVEAMKDWMMAEVETESSLIKIKPLLGVLAGTFPSDFEGSEKE

SEQ ID NO: 39791 - protein, 1362 aa, Bacillus subterraneus
MNNTRWMMNRAGLLNFWYYDEEVFHFEKGKLLLRGSNGSGKSVTMQSFLPVLLDGKKSPDRLDPFGSKARRMDDYLLGEKEVVDRDERTGYLFMEYKKQGTEQYITTGIGMQAKRNKGIKSWYFLLTDNRRIGHDFQLAQQHTGEKIPLSAKELENRIGQGGYVVHSQREYMELVNKYVFGFQSIDAYEDLIKLLIQLRSPKLSKDFKPTVIYEILESALPPLTDDELRHLSDTIESMDQTQQQLEQLQREAESITRLESAYDTYNKYILAERTLQWEKALQKSKNAEAKMNEYNTQKQQLEQDIVRLRVELGRSQQQKQVAEQESHSLQQHEVWSLERKRTEKVEESSAAEKEILSLTKRIEDVNRKLRDELQKKQAAEDELFRYAEKEKELLGELLIDSDASGFLQHNVNVADFNRTKENGFDFTVWQKEAKGHLALIAELEKLAVESERLGQEQNRLQRNSSEKKKELDSLQKDLDHYQNWFEEEHQKLENDVFLWIENHPKLSYPNELRQEIARALQGLYDNNRFEVVRSQLFTAIQAYEAEVRKDEALTKDRIEQKEKAITEAEAELIRIKTQKMVEPARSSGTMEQRGKLSEEGVRFLPFYSAIEFQEHVTEQEKERLEAALMRTGILDSLLTDEPVSPREDAILMPEPRLMGYTLADYLVPDLEDDSSLTPEFVDQVLRSIPLQADGSGFHIDADGTYSIGCLVGHAPIEGPSKYIGRTSRKRHQRELIQQWMETIQELNEELADLKQELAILGSELVSIEMWKREMPEDAVLMDLHEQILNKQHQLKNERIMLSRIDEEWKLVYDKYTEVKRTIRDKGMQLNISMTLEDLGDALTSAQSYIDFLHELKNNDVKVFAAKKHLQTNVQRIAELEEDLDVLNGERGRKESQREKILALMESIDLQLQLKGIDEVRNRIREVQRVLNETEEAIDRVRSALPQKESDLERNEEKLADSQKDLFFWKQMSEEWGKMVEEEKRRNFFPFDETAEFGNILEKHERSKLSELLTKVFINEQVHLTEYRMFEYTEDAEMPLWFAEPQADKYEPFINEWQQLKGRRLIQMEYRGQRVSPYYVSAELKKELEEQQGWLDEQDRKLYEDIILNSVGIILRNRIQRAQQWVKEMDKIMADRDNSSGLIFSIAWKPLTAESEQELDTKDLVQLLQRNSKFLNEEDLQRITKHFQSRIGKAKELIQLRNEGSTLHQVLKEVLDYRKWFTFVLSFSRVNEPKRELSNNAFFKFSGGEKAMAMYIPLFTAAYSRYKEAGDMAPFIISLDEAFAGVDENNIRDMFEVVEQLGFNYIMNSQALWGDYDTISSLAICELVRPKNADYVTVIRYQWDGKQKSLVFEESIEEMMINE

SEQ ID NO: 39792 - protein, 426 aa, Bacillus subterraneus
MNSRFRVFKEEPGFMKLFSLFRDKYRSLGRSGGFVSLKGFEEPEIESIAGFLGLSAAVLHEKGRIGLAQFENELANTGYSDVKLIDLLEAIFEEPLLSKKEAAEKIRGRENDFLDSLKEVMPNADWWISWLGSRSSDSRWIWSLFHQNEQQLAETMKKVFFAFQSLPGEGKFERLPFFSQRSTGNPHYFDIANIGGRLLIHTLSVYKKIADPEFPFPKSTEEINDLLADFGLLRDDLWNFVTVNGFVAWTQKGVHPVWEAAVQTETVLNVPMKELGKLEKIQPASGSAVWIVENSSVASTIMDAVPYAPVVCTHGQLRAAGWRLLDKLTAVNCTLFYSGDLDPEGILIADRLKKRYQNQLVLWRMDATDYEKSISEEDVTERISKLASVDPQIWKEMIPLLTEKKKAGYQEALVDLLIGDIKKYRE

SEQ ID NO: 39793 - protein, 511 aa, Paenibacillus terrae
MDKIPNLQSLRGITELKYVNAENVTRYRAIMHYVYQQYQKLNYWLKPEQIYEGLLEWDLHKNYTLEQCQIDLTQLAEWGNLTAQHDGERAVTVEEYLRKKFRYLLTPYSIEIERMLESLESIRGYGGSLEPTLFDTISDTLFKIRENAGEYEPAKALEYWRVLFSSFQTLHEASVDYIASLQTGMAEDLMATDSFLLYKDSITHYLQDFIQALQRRSYKIEGNLHQITSGVRDLFLGAVVDDEWRIPKLEQLVTKEQYLNELLDKWNSLSRWFLGDHDSISDSVLLERATKEAIVKVVRSAVRIQERKRSNISRKQDLDYLGKWFYGIQDLDTAHKLSAYVFGLFSARHLQGEDSRESDSKEMSMWKERAIPRTIRPRNRKRSERHDIKAVIDNSTLKEQFRDAFLIKQKQELEFLIRMVDTGSISISEFETIRELTRLQLLAWISRCNASSTNSFQTSEGVKIELSHPPDKERALLHCEDGTLELINYRFRFVVINRKAWTDQVAWFNEL

SEQ ID NO: 39794 - protein, 393 aa, Paenibacillus terrae
MNRPDRNEIEERKQICMNALLNRPWIDKEKNAEIYYWIKDQYFEIKEWFMNYTGYSVIMNRNFIKLEKVPAEVFPWMGFQEFREPMDYALFTYSLWYLENKTEGDQFLLTQLVIEIRQYMVEQGLDVDWKNYYHRLSMARALKKLKNLNVVRSVDGEEANWASNHEHHDVLYECTLYSRYMLRSFPAELSSYTNMAELKETMTYGWEAAEIDIKKRHELYRRFLLEPILLDYQWHGDPSYLHREANFLMKNMKTMFGWEGSRYREGILLFETNTMSESEVFPTQLALSDLAMLLCGEVRKMAVNAELDLKVDLSGFVRLTKNEIERILIHLKSSFSEFWTNEHTKKKSTELAEQICDHLAEWGFGYWEDHMFFVLNGAAGRWEVKYGSTEQDD

SEQ ID NO: 39795 - protein, 1364 aa, Paenibacillus terrae
MNRAGILNFWYYDDEEFLFEEGRLILRGTNGSGKSVTMQSLIPLVLDGDKRPERLDPFGSRDRRIEYYLLGDGNQVHTDRTGYLWLEFYHPIKNLYKTIGIGIRARRGVTQLGFWGFLIEDNRRINEDFYLYDRNLWLEEGNKIPLNKKVLEEKIGSGGQVVQEQNAYRDMVNKAIFGFRETESYKDLLKLLLELRSPKLSKDLKPSSIYEILNKSLPPLMEEDLSSLSDVLEDMDQITDRLDELQLHVRELTNLEQSYARYNKFLLHQTSNNVVNKWKSCNQNLSQLKQAEKQIQLLEEKKDKVVQNLKDCKQRLGIVEGYLEVLTQGEAMGKQKELELYEEQLKEIHKQINILTEKITSNKAKIVQLIGEISKLSDSLSQNEKEQEGAIGDLEDLARVIEFHEHDIYHGIWSRGIPEENQWRRNWEQDLNSHKKRLLAARETARKEGETSRAAKEMEIQLGEVLQQRHQAEEEQNIQVKKFETIKEHMRENLVSWYQELKFLPVQGEQLRESLRALTELDVTDRQYEPVRQPALQVYEQQKESYIQQRVRLNQEAVSIENEKLKLEQELKEWKVAKEPEPRRTEKRKSARENRKPGSGAPLYAVCDFSETLTEIQQAQLEETLDQAGLLDAWILPGGQVSIIEQPNNEEVWIQIQPSSQINGKTLCSVLHATPTEKSGLSVEDINYALNSINWKDQSTLLDNCREQHGALITETGRFSLGPLSGSNNSKSRSEFIGEANRLRTKQLEMAKLEVEIQHLQKQLNNIDQQLHELTMKQQNMDLEIKSFPQDAELQNQLEMVLKATIRLEHSMEQEQKVEERYKLKISEWRAIQVELMEQTADWSLLKNESQINEAIDRCSVYYGYISELHSQWLQYRNTSEIKANREEQYSTLLMLVEDDQIELEDKLSRKVKRTEQVKLLREIVKKLGIEDIHRRISDFKEEKELLGKELSHLHEIREEQSTQLGKAEGHLENCYVKLSESQELLNDGIEKWKKEIHLGLLPLSKEINESITKEMLIEDIVNYCKQIVREYGEMFFNVTQERIVNDLTKEFHKSKANLQEYAIDMEYGATDSSRITILSKRDRVHPLTPNILLNELNQLMGEQEILLTAKDRELYEEIIIGSVGKTIRKRIHRAKAWVVQMDDLMKQRDTSSGLKLSLKWLPLQRKNEDELDTEKLVSLLMLEQHRMDDEQVEQVITHFRTRILQAKQEAYREDGVLRNYIYSQLDYRMWFEFKLEHIKGDRTNYTELTDSKFNVLSGGEKAMAMYIPLFAATYSRYSEANQDAPKIISLDEAFAGVDDANMRDMFHLLTDMGFDYIMTSQVLWGCYDTVPSLSIYEIYRPKDTEFVSLFHYRWNGESKVLVN

SEQ ID NO: 39796 - protein, 469 aa, Paenibacillus terrae
MELLNRKTAKQYYSDPSLENLLKAVFTKYKGQNGVKGNARIIVRSKTEAEKLQNYFGSRVTQLIFPGSEVEVHLAIFSEELERGYELTIPELYEVLYNSQLLTNREQKELKLSAWIQLFEKVEHDFINEFNITTVELEQFSQKTFNWFGRLKNGEGEGYRVLKNISNKGEDAYLDLFVCVSALWYLLMRKKEMLVKQGISTGKIRLPTFAAHVTEDPHAFDKKRAGGRLLWHALHDIDNHKSVFDKIQKNEKTVVPEYLFERQIYRNFDVLDDDLSSISHIFVPNLVRGTSPRTINLREVEEIQQLPKYSALYIIENPSIISYLADETIHFLNKNDLSLEQLPINFPVLLCTIGQARTASKLFIEKCLASNPNCAIYYSGDIDVPGIQMLYGMKEQFTAQFNAWRMDSFIYRKYVAPKSKTLSEEDLRLLRSDEGLLEREMVQIGAKVYQESFGKELGKDWIEVICGAI

SEQ ID NO: 39797 - protein, 513 aa, Frankia sp. CpI1-S
MSDAGTAGSSSTTGASRGEVHASVFAYVTESPDYRVILGIFAGTFFAELTPDDITARLAEAGVILPIETVTGRLEKLREWGNLDVSASVGTVGTVADYYRRRNRYLITRIGQEVHELVEGVLAQVDDVRDVSLGRLDALAAALDALLRLDLERADPAVLADHVRAVFDPHRAFSAEITQFFAAINQWQSRFDLDETEFAFFSEVLVGYVGERLEALERRARPIAALLAVLAPDVGVLVARARDGLAARVAEAGLTGVRVRAEHGSSAADWENLTAWFLGRPGTPSRVATLGHDAVNAVRTLTQNLTRLSRSGVGGTSRRADYLRLAAWFEQAGRDSPQESHRLAAAAFGLFGARHLAAAAGDETDPVPSATSWWNAPVARVPVSLRQRGDTTNRGRSGQILDRSRERAHLLARRRAAQEREAAARQELLAAAGPDGALGDGTPLSEAALARLQRLLGPAVAAMGPSRSKGESEADGLRCVVERRPGQPTTLRTPVGTLTVHDLALTLLPLREA

SEQ ID NO: 39798 - protein, 382 aa, Frankia sp. CpI1-S
MTRDDPQRPGELTAAARALLARPWRPAEADRSLFVLIRRHADVLDRWFTQRLGYRLVVGADTARLVKSGYVPPDRPLRTHTDHPFTTRQYVVLALVLAATAAGPDRISLRDLVLQVRSAAADAEITLDGAAGERRALVTALRFLIEHGVVRELDRSVSGYETDEGADALLEIRNDRLAMLPAPALVGARSAADLLERAGGEGRGRAALRRRLVEDPVLYADDVAPEDWAELRRRFGEEARYCEEMFGLLVEARAEGVAAIDIDGGCSDVVFPAGGTTAHAALLLVEALVARHRGGATTDDVDDELDDLLERYGRYWRKDAVAEPARLRDEAVALLASMGLVRWEPDGRLCPRPAAARFAARVTVSEPRSEPPADEPEQAMLL

SEQ ID NO: 39799 - protein, 1390 aa, Frankia sp. CpI1-S
MAPGPTQAPVAAARWRPSRAGILNVYQYGDETLHFAGGRLLLRGVNGSGKSTAMNMLLPFLLEADTRRIDAAGEQTGVLRSWMLADTEETQRTGYLWIEFARPDDEVPGGVRYHCFGCGIRANRSTDRVTSWWFSTPRRARIDFSLTADRTPLTIDALRAELGAEAVFARAADYQDEVSRRLFGGANPAGYLALLHQIRNPRVGDRIDADLPQRLREALPPVPQDAIADAAQPLEDLEDHRRNVTALEQTDRALGSLLDTYRHYGRRVLLAAATQAVTVVSAARSAAQQRGRLRTAAETAVETERRLGAQVDALVKEQSTTQARLTGLRNSAAYRDHQALLAREQHVADLRTQATRMAAQRTDAQRRVGVAATTVTARRARVDGDLDRIRLGLAEVARRALPAAVPLRLPDPPVLRVEPHAGGVEGPRSGVDPLAELSLRSAADALRRRRQDVREVSDLLRGAERADSAAATANGVAETAGVDADRAREHAAKARDEAATAGERHRAAVLDWAGRFAELLRAVPPAEPAGPAGWLPVPPAPDPGGDELRAVARARVDAAAALAADATEALAAAVAAAGVRVEAATFEATGLAAELAAVRAAAELPLPRGGWRAAEPADAALFASLVDFAPGLDDAARAGLEAACEAVGLLTARVLDDGSVLAATGELLVVPGPAVAPNLAAALVPALPVGAAVGADAVRRVLEHVGLGAAAGTALWVDVDGAFAAGPLRGRHAKTGAEHVGAGARAAARQRRIAELAAALDVAERRRDVQRETHGTLRRHAEALRTHARTVPSTAPVDDAAAAALGATGDARRAAGRAAEAREAAVSAERAAEQTWARAQTGAAAARLPLDDDALTSAAAAVTDAQAELDRMPGRVEAARRSLDDWAAAVAAFVAESDTLTRAAEEAAETGLAAETATEELAAARAALGEEPRRVAEQIIQLEARCGRIDGELAAARRAHTEAFGLSVSARERADSAADAADRAERACRDQRTELLAVATVDGLLAASARERPSGTENHSDAEDHSGPADQDEQAAQDGQVRPPSTPDTIEGTSRLVSWLRERVPEPERDVNEDALHRSLRAIRDGLGAGWDAESRRGADGAPLAVEVSGPYGRRVLPDATIQVAADLRRARGLLTAQQDQALRNLLHGRVAQEVARALFDARELIDRMNAVLTAVTTSQGIGVRLDWRTRGDLDPATATALRLLAKDPDARTAEEDAAVRAAVAGLVDEARAERPEASYRDVIGVVLDYRNWYELRIYLCRPGRADELLGRRTRLSEGEKKLVTYLPMAAAASASAAAHDPHGVGAPRLILLDDAFAKVSEDNHARLFGLLVSLDLDFVVTSERLFGTHADVPELSIIEVLRDPDLRTIALVHYHWDGRARTELAVASR

SEQ ID NO: 39800 - protein, 433 aa, Frankia sp. CpI1-S
MRPPTVPGNAETGAQTSDAHPFLADPALRPLWQSVAAALDRNGLDWRGRLALPALPAEGRRRLGVMVERPVPAGRRALPLTDVAAAVERLTGTGLVEALTALGYAPRGRHEAALVRREESRRRRAALDMAVETHLAALPRPDRDTGSATGWATGWRDAAWSDGLFAGRAPDEVAALVRTVAAVLAHTGSGLSRGEIAARECGDAHALDSSTRLTALVTRALVARDGPAGERAAWERAGIPLDLVSAPVLTWALPLLGDSAAALAARAMTAAGLPVHLTVLALRAAPIAVVAGTPVLVVENPRLVEAAARRRLPAAVLCTGGNPATAPSEAIARLRASGAQLRYHGDFDAAGLAMTARARAAGCTPFHMSAADYTAALAAARAENVDLPRDSAPAPPTPWDPDLATAFDDTRAIVHEERVMDEVLTAHGGTFPR

SEQ ID NO: 39801 - protein, 502 aa, Rhodococcus sp. AD45
MVNETHIAGVATAYADTHRLKLFSFTVAEKRAEYLWVLRAFDHARANYTVLLHAGTVAQILEKIGGSDPAAQLSSTEIAPLLDQLHVWEILERSYDGTRAASLAEYRNRHFVYQFGQAGYQVYRSVEDVLAARLDNSSLSRLALADLLADMSELAEANRTADGDLIFRKLKRLDSTLSDMADRAAHFYLTLGDLVRTTEVTPQAFLNHKDALLTHMREFSSDLARYAPKLKEAIEHVESTGVDRMIRLAAASDERVFVPIAEREDDWMARWRGLTAWFVSAETGISESERLREGTMSAIAAVLALLRRVTETRRGGVSRESQLRHLAGWFAATPSEDAAHALFQAVFDLGRPRHLSMVHPDADIISHHRSWWEAPPVEIARTLAETGRPPSPGLPGKVARNDGSIRRLREEQLAAQRTRSAAAQSLATNGVYQRELNEQETEVLLSLLNAALTARVPVVGRVKSSTGSENGVKLTLSPSDGSTTITTARGRMHLDGIEVSVR

SEQ ID NO: 39802 - protein, 476 aa, Rhodococcus sp. AD45
MRAREITPLALDSYQRAARVILSNHLVTTSYPDRAALPLLRRWATELRDDLLDLFGYRLEVTETTARLFTVSDRLNPSAPAQTATERTFDRTRYSYLALCLAALGRAGNQITLSELADHVAADAAQVDGVELSTDRGADRDAFVDAVGWLGVRGAIALADGDANGWASNPEAGEALYDIDRSVVVALFRPPRALQHLHSIRGLLAAETSQAAEEDGVPVDAKAIGRRVRRALVERPVVLAGELDQHELIALAQPKTASDVEMLTGLVAERRAEGIAMIDPTGRLSDVRFPSTGTIAQVALLLAGEIADRILDVDAPELPKLPLPPESDDHLIEQLDAAIPEAGIFEDLADEDAEPVEPAAEPADPEEPPTYPLIDDTWLADKITELVDQFGRTFAAQWQADHNGLRKQSLGLLQRLRLTHAVPGGVLVLPVLARYRDVVVNVRERDPLIDFAVDNSAPEPSSEFSGSTEEPEVENA

SEQ ID NO: 39803 - protein, 1391 aa, Rhodococcus sp. AD45
MNSARFRPTRAGIINLWDYRDQEFSFADGRLVLRGPNGSGKTKALEVLFPFVFDGRIEPRRLNPFAGEERTMKSNLLYRGQDTAHSYVWMEFCRGSLDDPEAVTVGIGMRASRTNDKVTRWYFVADGRVGVDFSLIGADDRPLTKKQLAEQLGSDAITDRPLDYRTAIDARMFGLGVQRYDQLINLILTLRRPQLAKNLDPKGLSQALTDGLRPLDDQLVLEAARSFSDMEEVGRALEGLAAADGAAQTFIGVYTKYLRQQSRGEIEQVGARLAAVTKGVAAMDESAVAQLRSREARTAAEERFNAAEQALDHARANVEALQRSSAYEGKQQLDDLAQAVATLKLSTEQQADKSRKAQATLAQRGDEAEKATASVRRGAEALSRAEDELRVAAEDAGIVWTPLPDGSRSDQITAAVRGHAEERDGDVRVVRAALATVEKATTERTRAENSSRRGQELLESAKAAVLEGEAAVELARSECATGLRSWWTGHSERYAAAGADTSLFEALDSALSAVGDEDAPTLAAVLAEHTEAGIEALRERRRSAEAEISAARASVTALKAERKAVSAEHDDAPPAFHARTDSRKDLPGAPFWSLVRFAESVEPDVATGIESALQAANMLDGWVVPGEQLPEFVSEQFLTALPTKQRPKGRTLADVLEVEGNSDVPDAQVRGILASISLVENADTTTAAVAIGVDGRFWQGVVHGRHVKTDAEYIGTTARARRRAARIAEIDVALDELATAIDTGTALVAHTNEQLAQLAAAAKELPKTGSILRALKAVAESAGALRTRSEATDSAQRELDAAIADLAAKEKQLRSTASTHRTPHAGRELDSLAAAIRHFEKQGDVALRCRREYAKEVELERESIDRLDESRTNAEEFAEEAAIAEESLLQQVQRLETLRDTLGASAEQIDLDLAKARAKIEECKVDQRAARKAYDAAVLHIGTAEGAYNTAVETLRHTLTETRSDAEQLAPYARPDLLELLGITEPLSWPASSAAWMSPDQLVYRIQNEDRTDDAPHPPVLPEDVDKLYRALDAATSTVRVTDGARKATRTALTSALQEFDAQLAAAGQDYRLQWDAPDGLTVVRVQDEQGHSSIGEFATRIHEARGDQEQLLTESERRILEDALLTGLAQQIHERTVDARELIAQMGTEMRERHMSSGNTIGVHWVLADNLDDSSRAISKLLDRDASALGVDELATLRAHFATQIRTARAAHPERSYPEILSSALDYRQWRFFSFTLISGEGKEDRLTVARHSALSGGEQSVSLHLPLFAAAHVMLDSADPHAPRLLALDEAFAGVDDNGRSELLGLSVQFDLDLFMTGYDLWITYADVPGCAHYDLAHSTAEQAVSAALLVWSNGELLAEHDGTDLARALGSPLRRRVPTPAEGALDYA

SEQ ID NO: 39804 - protein, 519 aa, Streptomyces lydicus A02
MHSGTAESFDLDAWTVGDRLRLFNFTQRDNHVAYLWLLRAMNVLRAGHQVQVHTDDVAKALSELAAAHDDVPNAAELNLRAMLDNLAADDEQVLYKVEDATRCGSLAAYRNRQSVYQFTEIGYRVYSAVEEVIGSRVQDANLSRLVFADILADFKALAAANRQGDQEEVHRKLARLDSVLEDMTQRAARFYLTLNDVVRTTDISPETFLRYKHALLAHMSEFTAELERYAPRLAEAVLDVEDTGVATLLERAAAADERPMMRPTVRLEDWRRRWTGLRQWFLADAAGGSRADQLQGATRTAISGVIALLRQVTESRRGGVSRTTQLRHLAAWVAAAPDEQAANALAAAAFDLRSVRHLSGAHDDSDEISPRSTWWDAPGVEVSVSLFKHGKRPAQGGPQPVRRSRGAHARLREAQLAERAGERSAAESLLEHGPHDRVLSHAEARAVLKLLTRALEARTMVAGRVRSGTGSSDVMTLRLVPDGRGSRLRTEAGTLHLPGFALEIAPHGVMRRRRGSENP

SEQ ID NO: 39805 - protein, 472 aa, Streptomyces lydicus A02
MAVHRVAAAVEPADLSSYQQAARLMLLHSVVTETHPHPKALALVLQWADELTNDFRYLFGYTLSTTARHARLLRRLDAFDGTQAFLTVKSKKPFDRRRLAYLCLILASLNRSRIEITLADLVKLLAPSANSIEHLGFDATAPGHKDAVVDVMDWLVDRGALRISDGSTEDWARDHNRGDALFDIDHDTCAALFRPNKPLQHLTSAAGLQDTPTAGVGRDPRRRLAAQRARRMLIEQPVVYFADTDAETAIALRQPTLAEDITRLTGLPVERRAEGIMLVDTTGRFTDKQFPGRGGAVNRTAGLMLAKIADLREDSERASSLQYLFPPDPGEEQADLLNRIDMGLPHAGMLDALAEDLPVGDGRRTYGEGTKSDEVEARACLPFVAQGVLEQLINELFEEFGPSSFTNKWQGDSRGLLAEALILLADLRLVHLAPGGILVRPAAARYRNITAVLPRPAQDGQFAFDFPVEDPH

SEQ ID NO: 39806 - protein, 1422 aa, Streptomyces lydicus A02
MIGLWDYVDEEFVFADGRLVLRGHNGSGKTKALEVLFPLVLDGVLDARRLDPFSGEERTMKSNLLYKKQESAYGYVWMEFARTAPDGDIIEAATVGIGMRITKAMPAPARFYFVTDGRVGRDFGLLDSSSRPLRESALKKLLGDDATHETAEAYRDAVDARLFGLGRERYSQLVNLLLQLRRPLLAKDLDPVKVSATLTAGLRPVDDDLIKQAARDFENLAEIQALLNALVGADSAVQNFLREYTSYLQVHARNRVDQIKERIGATAEECNKIIQAAIDQRTAEDLLAEARQRRETADRERKETSTRIATYRNHEAVTQQKDLQDLSDRVRDEGKTIRKSDDLLNSSWGHLARLKGEAKKVGEKCRELNAAASRHTQNLLDAARRSGIVLDDDALNPDSEPMVHIKSCMAVREAELDDVRSHLAAFERAADDQVREQKRVDAAADELKETEEKSAAAADQLSQARAVASRDLDEVIRRWTSEGETAVFQPADRAPLTAALAAAGEPAAAPLAEVFRSLTDERRTAALTRVEALKRQCGDIAKALHKVQGERDRVAAEQDEAPPLSDLRPAEREGRPGAPLWQLVRFADHVSDDQAAAVEGALYAAGLLTAWLHPDPKATDQALRDQVADAYLLPLPSAQRPAGRTLADLLVVEDQEHVDAGVVCAVLESISVIDGPPAADLGSGGETAPYITTASQFSLGVQIGAHPKGQPEYIGATARTARRQERLRHLGDSIAAFETQLAEADEQREHAEDVFVDFDRARSELPSTHAIDKAARDVAVIAGDLAGARRRLKEARGELDGAVARAHEKKRLLRHAATAVRLPTTREQLDDVAQAVTDFGAAGKELASCQKQIKEKEQDLAGREESIEGLMTSLMEQAEELQERKDALTALEEELRTRQETLEAPLQAILQKIKNAETQLDAAETAYRAADKDAEQQRERLMKAKHTLEFVGGALVTAVREQMRTAGALEPYARPDLLGLLNAPVDAIWVPHEVWPTAEETARTLMDTLTVRDISNIPLEAARSAIPAAVVTLVDALDEATQGRRITESLLKATTTKITTAITALEAALLDADQGYLFAWEPAGDLILAKVTDSEGPAPVADFGRRLAEQLADQQVLLEDKERTVLEDGLLTGLAQQIHSRTIAARDLVRSMDADTRARPMSSGTTVGIHWVASDDLSDSQKAVSKLLEKDASGLDPVSLAELRSHLRGQIRAKAAADKKQSYQQVITEVLDYRSWHKFELRLFRPGMGEEERKKGELLTKAKHSVMSGGEKSASIHLPLFAAAHAQYGSAYPTCPRLIALDEAFAGIDEKYRPDLLALTAKFDLDLFMTGYDLWITYPDVPQISHYDMKHDEASHTVSAMLLVWDGEQILDDVGYPGSEDLAAELLGFRPNRHVPSHAGLLPDLPDVVPADPEVEEDEEAQ

SEQ ID NO: 39807 - protein, 391 aa, Streptomyces lydicus A02
MERNGGQITGSIGVTKPTAEERKAIIGITGTYRSADVGRLSLPLAALDQSVRNVTGSSLRDLLEHIGPPLRFRADEKTALVQARQVLIAEGEASPLHDDHPWYKEWLRGLASDGSLTGLINKQSTRLLSQAIRVLEYLDTRPGGSPPVMLPALADATTGDTKALNSGQSTLPTLVLRALATARGIPLPADAEARRELWDAFDVIVDDLASRVLVLNLPATGRGLGEWLTDAALYGTPFHVTLHQLVTLPITVDLPLVYVCENPAVLRRAAGELGTSSPPLICAEGRPSTAFHRLARLVVNGGGRLLYHGDFDWPGIDMTNQLIGRYGAEPWRMSAEDYLEALRAEDDHVALSGKARSTPWDPGLSSAMRKYQSAVYEEGVADILLAEWSAL

SEQ ID NO: 39808 - protein, 491 aa, Rhodococcus sp. B7740
MEEDRLGLFSFAVAEKRSEYLAVLRAFDTARANYVVLLHSGDVADLIARSPGRHDALTTLDIAPLLDQLHAWGLLERSYDGTRAATLAEYRNRHFVYQFGQAGYKAYRAVEDVLGARLDDAALSRLVLPELLADMHELAEANRQADGDRIYRKLSRLDSTLSEMATRAAHFYLVLGDLVRTTEITPESFLVHKDALLTHMREFSSDLTRYAPKLAEAIALVESTGIEELVERAAISDERVFLTVAERRADWTDRWAGLSHWFVSAESELSESERLREGTMSAIAAVLSLLRRVTETRRGGVSRESQLRHLAGWFAATPTEDSAHALFHAVFGLGRPRHLSMVHPDADIISTSRSWWEAPPVEISRTLAETGRTPTPGVPGRVQRNDGGIRRLREQQLESQRSRSAAAQSLASTGIHDRILNEQETEVLLSLLNAALTARVRVSGRTSDSSGSDSGVRLTLSDSDRSTIVRTSRGRLHLDRLALEVSEVARR

SEQ ID NO: 39809 - protein, 483 aa, Rhodococcus sp. B7740
MRAREISTLALDSYQRAARVALSNHLVTTTYPDRIALPLLRRWATELREDLLELFGYRFEVTETTARLYPVIDRLDDSQPARTSTDRIFDRRRYAYLALALAALGRAGNQITLSELADHVAAEASQVDGVELTTDRASDRDAFVDAIGWLATRGAIALADGDATGWANNPSAGEALYDIDRPVVVAMFRPPRAVQHLRSIRGLLAGSDSPIDPEDSDPGQTDSGREADPKETLRAVRRALVEQPVVYHDDLDRNGRAALAASRTVADVELLTGLVAERRAEGVALIDTSGRLSDHRFPSTGTIAQVALLIAGEISDRVIDPDAPALATHPLPDGDALIEQLDGAIPDGGIFGDLAEFGFGSDATAFEDADEKKLYPLIEDSWLTTVVDDLVERFGRTFAAQWQTDRDGLRVRAIALLHRLRLIHSVSGGVLVLPVIARYRDVMVSVRDRTPQDSLFGTERITSTAEAPRTAQSVSNESSEVEA

SEQ ID NO: 39810 - protein, 1394 aa, Rhodococcus sp. B7740
MTAHSTRFRPTRAGIVNLWDYRDQEFSFADGRLVLRGPNGSGKTKALEVLFPFVLDGRIEPRRLNPFAGEERTMKSNLLYRGQESAHSYVWMEFGRGSREDPESVTVGIGMRASRHNDKVTRWYFVADGRVGVDFSLLGSDDRPLTKKQLGEQLGTDALTDRPVDYRAAIDARMFGLGAQRYDQLINLILTLRRPQLAKNLDPKGLSQALTDGLRPLDEQLVLEAARSFSDMEEVGRALEGLAQADHAARNFVSVYSKYLRVQTRSDIEQVSRRLEAVTHATTAHFAAAALKDRRLLERAAAETRFDEAERALDQAVADRETLQRSSAYEGKQQLDDLAESAAKLEISTAQQADRARKAHAELEQRTTEAARADAALRDSVAGVTRAEEELQTAAEDAGIAWTPLPGTARSDQIGTALRGHAEERDGDVRAVREALGTVEKASTERARAEKAASKAREMLEAASAAVTEAEATVDLEKAQFASGLRAWWSNNSALYSSAGITSAAFEALDAALAGIGDDDAPSLESVLADQTADAVDTLRARQAQAHVDVSTRTAELNSLRDELSLVRAEHDDAPPPFAARTDSRADLAGAPLWQLVRFADSVSPADAAGIESALQAANLLDGWIHPIADFPVDSSSEQYLSPLPEASRPAGTTLASVLEPEPGTAVSESRILDVLNSVALQQDRGADSSGAVSMSMDGRYRQGVQQGRHIKTDAEYIGATARARRREQRITELGAAIDTATAALDAAAADERTARESVQALAAAAKQLPRVSAIVKAQRAVTAAAGALRTSTQSSAAADREFDQAIADLSAKEKQLRTVAVAHRTPHIGRDIDALAAAIRHFEHQGSVVIRKRGDHTREAERAREATNRLEEASGLAEELAEEAAIADENYRQQVQRLELLSEKLGATAEQIDTDLENARERIEKCRAEQRAARKADKEAGEAIGKAEGACNTALESLRGAVTETLGDAVRLAPYARKDLLGILGVHEAYTWPASDSAWLSVEQILYRVQQAEGPDDEVPVLPPVVRALHSALDAATASVKVSDSSRKSTRTALTSALQEFDSQLAASGQDYRLQWDAPDGLTVVRVQDEQGYSSVGDFADRIGAARADQELLLTEQERRILEDALLTGLAQQIHERTADARELIAQMSAEMKQRRMSSGNTIGVHWVLADNLDDGARAVSKLLDRDASALNQDDLAAMRAHFASEIRIARAAHPERSYPEILSTTLDYRRWRVFAFTLISGDGNEDRLTVARHSALSGGEQSVSLHLPLFAAAHVMLSSADPHSPRLLALDEAFAGVDDNGRSELLGLSVQFDLDLFMTGYDLWITYGDVPGCAHYDLAHSAAENTVSAALLVWENGELFAEHDGTDLAAALGSPLTRRVPTRTEGGLEFDR

SEQ ID NO: 39811 - protein, 416 aa, Rhodococcus sp. B7740
MGWSLTGNSEWRGSAELAALLDAARKKLESNWLRVGGNITVDLSEAPELWRLCSAISRSNSSLHSRARSARLDLERFDAWLSHPLNGGLGLIDTLSRQAPLHDKKQIAADKARVRAEALERAREVLGGGTDREWVEYWIASLLNQDGTLGGRVAVDALAVATQVLALLPVDGMSLTELAELACGDTKALSGGGAPKLVLDALSLRENVPRPVDPVGIRALWETAGVSVDSVSSRVLVLGYRVDEAHTVARWLNDAADVGIPFPVTVDMLSRGPLTNSSSTVFVCENVAVLAAAARTLGSNCASLICTDGQPSAAVHRLLASRAPGTTIRWRADFDWAGVQMVTRAISRYDAVPWRMDVDSYRRALDARNSEPLKGHRTDSPWDPELAAALRDSGRAVTEDRLIPDLLTDLRLGRAT

SEQ ID NO: 39812 - protein, 452 aa, Lechevalieria aerocolonigenes
MFRFTTAEGAELHTAVLRAFGLANERLETSLALDDVQLRLKDVGWAEQVTDEELTKSLSALRQWGLVESTQHRYGLTKHGEAAYAGVQHAIQTLTSSGALQTAVLDAIADRLTELQTPTKRAFAALMELEGHVETLQTNTARFNADLQRLLKEEHDLATFQDVKRTTITYLKDFIAGLDARKHRIRDAIGKIPTNVHEQAKEGAGLFQDEDWLRQRTERWLNLKAWFHDTPSKADELQDVARKAIVQLLRVLDRISEQKKRPTNTAADFKALAHWFAKSTEDEAHELFNAAFGLWPARHAHLAHADGELIPSGEPWANTPPVEVSPQLRTTGKQEHIGSTGKIRDVEHIRRNRREQAEKERAELEHAWRQIQTDGPVRISTLTSLDHDTFHRLIDLVGRALGSDPDSTGTRVAGTTDGRMQINLRNARGWATITTQKGTLSGPDYVIDVQSR

SEQ ID NO: 39813 - protein, 359 aa, Lechevalieria aerocolonigenes
MSRTGNQLARLESEEVARGIRLLLARPLLSAANDPDGFDLIRRRREPIVKWFDYYCGWRVTVEPRAGYARLFKTTQNPDRTRPAPDFDRRRYILLCLTCAELLTAATTTIDALAKSVQQAATLENLPPFDPAKRSDRSAFADVLNYLQQQGALESDETELRSDPVVITRLLAAPNPPSTVDTIEDLTKESRYDQAHRSLHQRHSTMRRLIDDPVVYKEDLTESQRAFLTSPTGRKIVQTGVGLAGCTLEERAEGYLVVDADAIATDTRFPDDDSHAKVAALLLLDRLAQGPTRTEDLVEEARELLTRFRNWAKAYQSDGGASRLANDGLALLEAFGLARTENGTVRRLPAAARYEELHD

SEQ ID NO: 39814 - protein, 1260 aa, Lechevalieria aerocolonigenes
MTDRWQPSRAGIINVWRYYDEIFTFHQGRLLLRGPNGTGKSKALELLLPYLFDANLRPHRLSTFGSADRTMHWNLMGEGNQGSTRVGYVWLEFEHDDEWFTCGARLQATTNTSNVTATYFTTTQRIGDLQLVNEAGRPLTKTDLTAAIGEHGVVHASPADYRHTVRTTLFPGVSEQRYDSLITALLQLRTPKLSERLDPSVLSSLLSKALPPLDQSDLTEIAEGFERLDRQREELHRLDEEIATAERLADVQRTYAQRVLGASAWALSSSTEQLEDLTRAARMSERRYQRQVTLTDEAFEQLAALGREASAVDAEIAGISDLPAYQEGKQLDLLRQQHSAAVHRAAEAAAHAAKLRARAVADEEQAAQTKADAAARADEVRHSTHEAREAAERAGMPSVFEEIEEGTDARTGRQLLSAAVDSRTAEINAVLRAVALHERAVDARDAARLRLDETREELDLATDAETAAQQAFEQAFAKFGADFETWAHGCAELHVSEHGEVVEAAALAREEFAAIEARLHETRTALNGQLSQYNSIREKLANQVDVPPPAPYTRDANYRSSAVGAPLWRLVNFRPGTPPDVCTAVEAALEASGLLDAWLTPGNSFGLSDQDRFAEPLLAGPAPGRTLLEVLITDDDRAYRFLEGIAFGETATGHTAAIGADGTWRLANAHGRWTKPSPTYIGADSRKRARAGRIAELTGLIEQLATDLSGVDAALSQIAVRRATLAGELARQPSTDPLEIAEEQRTKAQLRCAARKDAVAAAARRVSEVDALVAETLRMAGSDVPVNLDAVAAFSTAGHRWLDDRHDAQAAEALAVEAMNRSSVSSALADEAEEAASARQQEAADVAITLETVERSAGSEFHALDQQLISLRTKALELAEQRETLQDKQTSLARTLGTLEEKRKVDTARAAEAAAVRETAEERHRHLSNSHLPADAGDLPDGPVDTRLIRDAESRLGLAVHEAQQKLAGRIDLSLDPDDNVTLLSATLDGARMGAHALLEALQAERDRMRTHITDAERDLFDQTLTGDTRRHIAQRIQGASELVDTMNQRLERVQTASNIRVQLDWQVDPQLPPGTREARDLLLRSDLDDAERTVLHQFFRERVEEARAHDTATGWEQQLAQVLDYTTWHQFVVKVDRGDGWVPVTKRVHGALSGGEKAIVLHLPLFAAAAAHYHATPHSPRLILLDEVFVGVDATNRGQLLELLVAFDLDLVLTSDHEWCDYRELTGIAIHQLTTGTDGDDAVTTVRFTWDGHSLKADD

SEQ ID NO: 39815 - protein, 521 aa, Saccharothrix sp. ST-888
MGAAARGNGSYQPFAHLTTEHSALYRQVMGAFVRAKQEFTVHLRPEDVHLGLPADGRPPVESVATALERLARWGNLRADPDTGRVTALEDFYRSRYIYQLTREGEAAEEALAAYDEALGRRGELQAVALADIAVQLRALLALAGQPVPDPGVAHLALLALVDRFSGLAENARAFMSSLQRTVDLHDAEVEVFLAYKQRLIEYLERFIEDLVTRGAEIAGLLERLGTPHEGSAGPLLRLAAAREASDTAPDASAEALTAAEQRWYGRWEGLRAWFLSVPGRSSQAKLLRSAARQAVPQLLGVVQALNERRSGRSDRSADFRELARWFAEAPDDQARHRLWRSAFGLYSARHLTIDPEALAVRGADPVPASASWYDAPGVRISPQLRRTGSYERRGRARAVQDRGEAKAYLAELARKQAEQTAAARARLATDGEVRLSDLGELDPAAFRLFLRLLGDALSAWRPGTDTVAVTISDGTMEIRLTRLPGGAAAEIHTLDGVLHGPEHLVEITDLAADRESAGSPR

SEQ ID NO: 39816 - protein, 1376 aa, Saccharothrix sp. ST-888
MSTNVSTPLPVPGRTRWQPLRTGLVDLFYYDVEEFHFRDGRLLLRGNNGTGKSKVLALTLPFLLDGDLSPHRVEPDADPKKRMEWNLLLGGEHPHPERLGYTWIEFGRLDEDGTARYTTLGCGLKAVAGRGIARHWYFVTDRRVGADPGDGGLGLLDSTGAAIGRDRLTEAMDGRGLVYDSARTYRRAVDEALFGLGEQRYAALVDLLVQLRQPQLSKRPSEKALSQALTESLPPMDQAVVADVAEAFRSLDEEKEQLAVMVAAERAATAFLQHYRRYAQVAARRKARAPRAQHSRYESLRAELNTAEVDFEAAGTALEDAEARLEELDRSRTGLRARDEALRAGPEMRSARELEQAAELAERTARDAERAEADRTRADGELARYAARLGAARSRADAAGRAQQTGLTRAGEAATKARLERQHHDLIADPLAAGDTLEAAGQAADEITDRRLRSVALVEGQLASAQEATRTLDRARRRLEDADAELARRADLGAEAVESAVQAGEDHLARARAHFASCTLLRPDDPEGMLDELAQWVETLDGPDPARIAAQQTAATTGSELARRRAALALGRTETRQGIDKLQAELAELRSGARRGPKPPYTRSAGDRRDRPGAPLWRLVDFTDDSGLTDSARAGLEAALEASGLLDAWVGPDGTVASADTGDTLLTAGAPVDGPSLAAVLHPAVDREDSAASFVPDEAVSRLLAGIGLLGPVEELPHSGSWIASDGRFRLGVLTGAWSKPAAEYLGEGAREQARRARIAAVEAELAEYAAQLGALADQDEALEADEHRLAAEQAGLPDDSALRAAHAASTAARVEYARTVERRQAADQEAADASAEVDQVVGELHSLADELVLPVTGGELREAREAVSAYREALAALWPAVREARAARSALAVEEADHERAAEHGAELAERSRAAARESVAAGERHQTLQATVGTAVAELQRQLAAVVVTLRDIDERERATRREQNTATGRQAAADALRTRVRAEIEDTAGTRAEAIDALRRFAATGLLGVALPDLDHPGDSWAPEPAVRLARAVERELESVDDSDPAWERVQRRITEELKDLSDALSRHGHTAAARMLEDGLVVDILFQGRERSVPELAGALAAEVADRQRLLSAREQEILENHLVTEVAGTLQELVGAAEHQVLRMNAELKDRPTSTGMLLRLVWRPARNAPGGLAAARDRLLRQSSDAWTASDRTALGEFLQAQIDRARTDNPAGTWLEHLTTALDYRSWHEFGIERHQHGKWQPATGPASGGERVLAVSLPLFAAASSHYASAGSPHAPRLVTLDEAFAGVDDDSRAKSLGLLAAFDLDVVMTSEREWGCYPQVPGLAIAQLSRVDEIAAVLVTRWEWDGRQRTRTPDPVVPAQRRDGPGE

SEQ ID NO: 39817 - protein, 416 aa, Saccharothrix sp. ST-888
MTADLPRLRRLLGTPETAWLVDRVRRRLEAGQPLDTTLTRSGADDAERAAVARLLGRAPRPGRSLSVPLPAVDGILRASGACSDGLAAAVVALTGPVTSRRGAAEELSRAWDHAFAALADAVAARPELADWYRELHATGLVRRLARTPEEAAPLLTALARILPRLPLSPPQSLSTFAARTIGDAHALDHGPLATLTLDAVRALTGALAGPGAGRRRDTWAAAGLLLDELSSQALVLNLPGGDHTATGRALTALAAAGQPAVLTLRQLLGDAPQPPRGGVAYVCENPAVMLAAANLLGARCPPLVCLQGQPSTAALHLLRLYADADWTLRYHGDFDWGGVRIATRLLAHVPWTPWRYTADDYRAALTAHPHTGPLAGSAAETPWDPALAAELSRAGRRIEEELVLAALLGDLADLAP

SEQ ID NO: 39818 - protein, 503 aa, Desulfosporosinus sp. I2
MNEQLLKPIQEATYLTVLNAWRYRSILRYIYLQHERLRYYIVLEEILQYLKQDPHFREYTEEQLLQDLDQLVSWKNLIPRQDTGRVASIEEFKKRKFRYQLTPYTIEIERMVLGLEQLGSGFGGSLERTLFDRLLGNLMDLTVAWVKSDAVFSKTNEEIYLLWQDLYENFHRLTDNAADYLAHLHSEKVEEQMMTDAFLVYKEALTEYLRNFMTSLQRTSFRIEGLLEEAPLTFSQKLTECVADYELSIPRLDVRPSKEQLMERFQNQWESLRTWFLGDGGSESDLLYLQNATNDTIRRLTRFAQRLGETHHNLRNRRLDYLHLAKWFSNLDTVQEAHELSACVFGVFHTRHLWVDRPKQTESFEVEIWDEPPSEIEIRPKVRNYREKGRPNAVVDQSERKKAALETYLREKEIEQQLLDNLIQNNCIVLRNLPELTTFIRKTLLTWISKCMANPNRQGKTETGRTFSLEKASDRQINLHCEDGLLAMPDYIFLFDDLAEAAR

SEQ ID NO: 39819 - protein, 407 aa, Desulfosporosinus sp. I2
MSEKRGFDEVAREALITLLENFWILREHDPEAYQIIRDRENALKDYVLDKLGYHLIVHRHFAKLEKIPAVPEAWMGIEHFQHPRDYALLCCVLAYLESITGYEQFLLSDLCSEVQALYPGELALDWRNYEHRKSLVRVLQFVTELKMLTVVDGELGTFGKNESSEVLYEVSVVSRYFMRSYPKDFFQFNSKEDILAAETFEGEDELLGARRRYRIYRQLLLSPSMYRSNSEDADFLYLRNYRARLQEDLERHTGLQLELYRNTALLIAPEPKSALTLFPNQKGISDIALQFGSALRQQLNEGHCKADSLGRVALTPLQFEQTVRHCKELYSYGWSKEFREGLIKHTADELLAFLMDWTFAQRSDEGDSIYFQPALGRLTGDYPQDYKNKQQTQADRDDGDWIREDNN

SEQ ID NO: 39820 - protein, 1406 aa, Desulfosporosinus sp. I2
MRWQLNRAGLFNFWYYDEEEFHFADGKLLLRGSNGSGKSVTMQSLIPVLLDGRKTPDRLDPFGSRARRMEDYLLGEKDVTDLDERTGYLYLEYHRPGTQEHITTGIGLKAKRQGALEFWGFILLDNRRIGIDIQLYKTERALDGKLEKIPLTRRELENRIAEGGEVVKTQKDYLERVNRYLFGFKTVDDYDDLIKLLIQLRSPKLSKDFRPTVVYEILNEALPSLSDDELRPLSDTIENMDQIKSQLDQLQKEEQALKRLLRYYDQYNQKVRAEKAEAFLRTHQRLLQTTKALERLHLERENAKIALVSQQETETILKREQQVLDVEREALGEHDVFKAEKERERLLKEQQKNQEILASKNKQLTNNVSKEGALKDQIGQLELKEQHALATIQEELEELDSLAEESAFLNHEMAADEFNREIDQTFSFALWKKEALDYQRLLENVMKLLRQESGAKERYQEADLALSETKKAWDEEQYQEKKWVDLLQEEQSSWVAQLFEWQPMNQELRFQDIELQTLALRARSFPESVNQSTLREPLLQATDRARDKIRRELLKVKHEQEQVLKEVKVKSEAIEVWRQRQDPEPARHDLTNQARKILQDIKVPFVSFYSAVEFHDHVPQATRERLESALKEMGILDALILPEHVVKTSEQEQALQNLPVHDRVLKPAPQILAHTLADYLYPTPVEGSKVQAGDIENILRTILVADSQGESNTSLNTCGSYRIGALKGHAPLAESALYIGKEARRQLRLREIKKLEDERELLNQQVLEQENRLKSLNQKSDKLEEEYQTFPSEQSMQEAWDIIYKARQKLEILGKDVQRKNEVLLKALEIWRNLKAQVKELSRTLTLPLDELSYGKAHAEISSYREGLTRIESLYQQVHSTRRERSAVLAHLENTSEAVDELRGEINELRDQAQTCQDLLIQVEQRLQDLGADEIRERIHNVIKRLNALPSEIETCIQQISTLTRDLKDYDQKMLENERDLRLATQLQQGWANVFQAEETLQTSFDHISEDERNSNSQPNPSTLASSPLPPSHQGILIQTAEGIISVQDSKETKSPDRETLRERINEAFTREMGNLVEYRLTQNTLFETLAGLNLPTEDSPELWLKLWEELRQKARRVQLMLEYDGKRVNPYYLRAQLEKNMALQRQLLNEKDRELYEEIIMNSVGRIIRGRIQRAEHWVEEMNRLMDERDTSSGLRFRIRWKPRTADHEDEIDTQDLVELLKSDPRLLKESDMSRITNHFRVKIERAKQQLEVKGFGESFHQIIKEMLDYRHWFEFRLLFQKEGQIWKELTDRAFFQFSGGEKAMAMYIPLFSAAYSRYSDAREDAPRIISLDEAFAGVDENNIRDMFDLLEKLGFNYIMNSQALWGDYDTVSHLAIAELVRPKNASYVTVIRYSWDGKVRRLIG

SEQ ID NO: 39821 - protein, 457 aa, Desulfosporosinus sp. I2
MKSDELQKLQKAKDYFSSTKGFARLFKAMAQKYQSLGRWAGSVTLTSFKDEERDALSTLFRADFSRRKSITISLERFAKALELTKFSGISALSLLEEIQGQSLLSNSDRLAHKERAKATFFNDLAVQYPEPYCQLWLEAISKKQPGTRSIQTTYDTRFDQLRVQMHHVLSALAAINKRHPNKIERLPMFARRITKDPHGFDPNSDTGRILLQALKILSSQLRASDPLTLALSGAEALTELYFSFGILRDDLWNFVTCTGITGSAADNQLLGYLTEAYRQQVTLNLPLREVVRIDKAYAAGQVVYVVENSGVYSALLDLCRDFCEEEGLMEMTPNPPLVCTHGQFKLASLLLLDKLAASGTLIYYSGDFDPEGLSMAERLLLRYPGQAKAWHYTLEDYQLSRSDQVLSPQRLKQLDRVSSPELAPLKEKLLKTGLAGYQEGILSDLWCDVKQSMQERI

SEQ ID NO: 39822 - protein, 491 aa, Clostridiaceae bacterium BRH_c20a
MDDQQLKPITEAAYLTANNAWRYRAVLRYFYLQHEKLRYYLFPDEIFQYLKEKLHFASYTEEQLQQDLDQLVEWKNLIPRQDTGKVTTIQEFKKKKFRYQCTPYTVEFERMVKRLELKGDSFGGSLEKNLFDRLLEVLVKFTDSEIANGDTENLYSLWDELFGYFKKLTENATDYLAHLESEKIEEMMMTEAFLVYKDALTEYLRNFMTALQRTSLKIEAVLEQTSLDYIHRTAQVLAQYYLSIPRLDQVATIEELTEKYSNQWQGLRAWFLGHEGRDSDLIFLQNTTNETVRRMTRFAQRLGEKHHNFKSRKKDYVHLAKIFSNCSDINEAHKLSACAFGLFHTRHLCALEKDTEDIYTEIWDLQPSEVILNPRVRTYREKTRPQAVISYPKEKAKMLQEYLLEKEAEQHLINEIIENRRIVLNKITMTDPYIRKTLLNWIAKSMGNKMGFAKTQTGHKFKLSKLDNQSIIINWEDGTLKLPNFIIEFLE

SEQ ID NO: 39823 - protein, 397 aa, Clostridiaceae bacterium BRH_c20a
MEEKSKVIFDEAAKESAQYILENFWILREKEPEIYQQIRQRENVLKNFFLEKMGLNLIVHRQFVKLEKFPIEPETWMGIEKFTQVRDYVLFSCLMAFLEGKNVDEQFLLSDLCEELSSIHPSIEGLDWTHYEHRKSLVRVLQAAADIYLVRTVDGDISDFNYSENNEVLYEVPIVARYFLRSFPKDLTTFKNAKDFLNIEDLNSEEQLGVKRRQRVYRKLFLTPVMYINENNDPDFLYLRNYRNRIREDVEKHTDFSFELYRNAALLTIEEKKAMYTLFPDNKAISDIVLQFANMVREEKNSNAISLQLDGTLHLTPVDFQKWVSKCKDYYGHGWSKQYRELIVSETARELIAVLVDWQMADILDETGVIRLKPLLVRVVGKYPVDFSKGGDSDEEN

SEQ ID NO: 39824 - protein, 1394 aa, Clostridiaceae bacterium BRH_c20a
MKKTKWQMHRAGLLNFWYYDDEEFNFADGKLLLRGNNGSGKSVTMQSFIPVLLDGRKSPDRLDPFGSRARKMEDYLLGEKGVVDRDERTGYLYLEYKRQGLEQYITTGIGLRAKRNSTMDFWGFVILDNRRIGQDIFLYKNEYSADLGKKQKIPFTRIELENRLADGGKVVRTSKEYMNLVNKHVFGFENIADYEELIKLLIQLRSPKLSKDFKPTVIYEILNESLPALSDDELRPLSDTIENMDQTKQQLEQLEKEQKSLNKLCKQYDLYNQLVLLEKAQGLLKTNDDLLKFFTQEKQLQADLINYEEAKTNLSKLKADLLLENEILQDEKSKLEKHKVFDIEKEKIALEQKAASEKSKLKVKEDSVSKQNTTELEHRQKIAKEEQKLSYLEAHITEILAELDYDGEEAEFTSHPLARQEFTKKYASGEFIFDLWKKETDDYHKKLERIFKIIEGLDKTRQDYKEADWELGQARKTADLKEKEVKKWYDFFEEEKENLLSAVYTWRQNTQELIVSDFDMQKIARICNNIFEDYALEDLNRIVNQAYMSSFKQLETMSVQLNQQIADKNEAINSKEVEISDWKNKKDPEPLRHKDTIMARQELDEKNIPCVPFYQAVEFKAQVTSEQRERLESAISQMGFLDALIVPGKYTKSIQKSDKVLIPNPQFFKHTLAELLYPTPVEGVGVTAEEIANVLQSILLEGSDDGLAVVNEDGTYQISLLQGHAPKEEASRYIGQEARKLYRQEMIAKLTKELRELEEKLAELIKAQEYMVKRQEVLNNESASFPLTNDVKTAYDTWQRLIMEVDILEKEVEIKNTKVKKLLELLNSIQDSLREHVKNITLPVNKEAYEAAVNNMHTYKKNLHQLELQYKDYCNSTISFGNYQQNLLNTIELIDELKGEINIINSELQKLELQLKNATERLNILGVEEVRRRINEVENRIGELPEELLNTQDQITQNINLINNTRTAVDQLNIKQNIYKKLVEYWQNTFQAEFKLGFVKEVEQINEVWEVFKKAKEIKDRLAVHFKDNIDREKLSEKLNQVFYQEQGALVEYRLSQETSGKIEIEIASLELGDESQVIDYLVKELEVKSRRIQVLLEYTGKRVSPFFVLEQLDRDIELQQTILNDKDRELYEEIIMNSVGRIIRARISRAEEWVEKIDKLMVQRNTSSGLTFSLRWRPLTAEWEDELDTKELVELLRLNPKFLKSQDMDKITQHFRSKITRAKEIMAEKGYGETFHQIIKEMLDYRKWFQFTLYYQRAGEKKKELTNNVFYTFSGGEKAMAMYIPLFSAAYSRYLEAREDAPYVISLDEAFAGVDENNIRDMFDLVEKLDFNYIMNSQALWGDYDTVSALSICELVRPQNAPFVTVVRYWWNGKQKELIIPKEHEYEILEVAK

SEQ ID NO: 39825 - protein, 446 aa, Clostridiaceae bacterium BRH_c20a
MSKDKLQEAADFFRKEPGFKRLFEKFINNYKSLGRFGGTAKLVKLTTLEKEALSGLMGKDYSKQSSVTISVKEFEKALEKTRFSSIDLKTLLFSYIGENILTKSEEEEKYVRIKETFFRELLAKYPENYCQHWLKYLQANEIGTRGVNSSYKENPVLLKEQLIKVLEAICKLPQRTNNKPNRYWRLPVFADLVTNDPHAFDLNSQQGRLLIFALGYIRTLEDTNYQLLNNTNSEEITELLSYFGIIRDDILNFVTFSGIIACDEAANKAPEWWQKCWEEGVVINVPLREILKRDSFYPANGKKVVFVVENSGVFSEILDKFPDRNLPPLICTNGQFKLAALILLDRLAKNDVIIYYSGDFDPEGLLMAQRLKTRYPAQVRLWHYTEEDYKKSQSEVALSENRLNKLKNLNLEELAKVKDYMEKSKIAGYQERLINELVKDIAGQRL

SEQ ID NO: 39826 - protein, 511 aa, Streptomyces albulus ZPM; identical to SEQ ID NO: 39248

SEQ ID NO: 39827 - protein, 437 aa, Streptomyces albulus ZPM; identical to SEQ ID NO: 39249

SEQ ID NO: 39828 - protein, 1385 aa, Streptomyces albulus ZPM; identical to SEQ ID NO: 39250

SEQ ID NO: 39829 - protein, 453 aa, Streptomyces albulus ZPM; identical to SEQ ID NO: 39251

SEQ ID NO: 39830 - protein, 507 aa, Rhodococcus sp. PML026
MTESGEDARLGAANAFVEEDRLGLFSFAVAEKRSEYLAVLRAFDTARANYVVLLHSGEVADLIARSPGRHDALTTLDIAPLLDQLHTWGLLERSYDGTRAATLAEYRNRHFVYQFGQAGYKAYRAVEDVLGARLDDASLSRLVLPELLADMHELAEANRQADGDRIYRKLSRLDSTLSEMATRAAHFYLVLGDLVRTTEITPESFLAHKDALLTHMREFSSDLTRYAPKLAEAIALVESTGIEELVDRAAISDERVFLSVDERRADWTDRWAGLSHWFVAAESELSESERLREGTMSAIAAVLSLLRRVTETRKGGVSRESQLRHLAGWFAAAPTEDSAHALFHAVFGLGRPRHLSMVHPDADIIPMSRSWWEAPPVEISRTLAETGRTPTPGVPGRVQRNDGGIRRLREQQLESQRSRSAAAQSLASAGIHDRILNEQETEVLLSLLNAALTARVRVSGRTSDSSGSDSGVRLTLSDSDRSTIVRTSRGRLHLDRLALDVSEVARR

SEQ ID NO: 39831 - protein, 471 aa, Rhodococcus sp. PML026
MRAREISSLALDSYQRAARVALSNHLVTATYPDRIALPLLRRWATELREDLLELFGYRFEVTETTARLFPVIDRLDDSQPARTPSERVFDRRRYAYLALALAALGRAGNQITLSELADHVATESSQVDGVELTTDRASDRDAFVDAIGWLATRGAISLADGDATGWANNPTAGEALYDIDRSVVVAMFRPPRAVQHLRSIRGLLAGSDAPIDPEDSDLGHIESGREADPKETLRAVRRALVEHPVVYLDDLDGDARTALTASRTVADVELLTGLVAERRAEGVALIDTSGRLSDHRFPSTGTIAQVALLIAGEISDRVVDPDAPALTTHPLPASDLLVEQLDDAIPGGGIFGDLADFGFPADPTTVENSAERTQYPLIEDSWLVSVVDDLVDRFGRTFAAQWQTDRDGLRIRAIALLHRLRLIHSVSGGVLVLPVIARYRDVMVSVRDRAPQDSLFGTEQAPSTDPSEVEA

SEQ ID NO: 39832 - protein, 1394 aa, Rhodococcus sp. PML026
MTAHSNRFRPTRAGIVNLWDYRDQEFSFADGRLVLRGPNGSGKTKALEVLFPFVLDGRIEPRRLNPFAGEERTMKSNLLYRGQESAHSYVWMEFGRGSREDPESVTVGIGMRASRHNDKVTRWYFVADGRVGVDFSLLGSDDRPLTKKQLAEQLGSDALTDRPVDYRAAIDARMFGLGAQRYDQLINLILTLRRPQLAKNLDPKGLSQALTDGLRPLDEQLVLEAARSFSDMEEVGRALEGLAQADQAARNFVSVYSKYLCVQTRSDVEQVSRRLEAVTHATTAHFAAAALKDRRLLERAAAETRFDEAERALDQAVADRETLQRSSAYEGKQQLDDLAESAAKLEVSTAQQADRARKAQAELEQRTAEAARADSALRDSVAGVTRAEDELQTAAEDAGIVWTPLPGTARSDQISTALRGHAEERDGDVRAVREALATVEKASTERARAEKAATKARELLEAAAAAVTEAEATVDLEKAQFASGLRAWWSSNSSLYSSAGITSAVFEALDAALAGIGDDDAPSLESVLAEQTSDGIDAIRARQAQARVDVAAREAEVKALRGELSLVRAEHDDAPPPFAARTDSRADLPGAPLWQLVRFADAVSSADAAGIESALQAANLLDGWIHPTADSPVDATSEQYLSPLPVAARPTGSTLASVLEPEPGTAVQESRILDVLNSIALQQDRNDPSDSSVSIGVDGRYWQGVQQGRHAKPDAEYIGATARARRREQRIAELGAAIDSATAELATATAAELAARELVQALNAAAKQLPRVSAIVKAQRAVTAAAGALRTSKDASAAADREFDQAIADLSAKEKQLRSVAVAHRTPYLGRDVDALAAAIRHFEHQGAAVIRKRSDHARETERAREATNRLEEATGLAEELAEEAAIADESYRQQLQRLELLSEKLGATAEQINTDLDNARDRIEKCRAEQRAARKADKEAGEAIGKAEGACNTALESLRAAVTETLGDAVRLAPYARKDLLHILGVHETYTWPASDSAWLTVEQILYRVQQAAGPDDDVPVLPPVVLALHSALDTATASVKVSDSSRKSTRTALTSALQEFDSQLAASGQDYRLQWDAPDGLTVVRVQDEQGYSSVGDFADRIGAARADQELLLTEQERRILEDALLTGLAQQIHERTVDARELIAQMSAEMKQRRMSSGNTIGVHWVLADNLDDGARAVSKLLDRDASALSQDDLAAMRAHFASEIRIARAAHPERSYPEILSATLDYRRWRVFAFTLISGDGNEDRLTVARHSALSGGEQSVSLHLPLFAAAHVMLSSADPHSPRLLALDEAFAGVDDNGRSELLGLSVQFDLDLFMTGYDLWITYADVPGCAHYDLAHSTAENTVSAALLVWENGELFAEHDGTDLAAALGSPLTRRVPTRTEGGLEFGR

SEQ ID NO: 39833 - protein, 412 aa, Rhodococcus sp. PML026
MAGNSEWRGSVELAALLDAARKKLESNWLRVGGNITVDLSDAPELWRLCSAISKSNSSLHSRARSTRLDLERFDAWLSHPLNGGIGLIDTLAGQAPLQDKKRIAADKAQVRADALDRAREALGGGTDREWIEHWIASLLNQDGTLGGRVAVDALGVATQVLALLPVDGMSLTELAELATGDTKALTGGGAAKLVLDALSLRENVPRPVDPVGIRALWETAGVSVDAVSSRVLVLGYRVVETHTVARWLNEAADEGVPFPVTVDMLARGPLTNSSSTVFVCENVAVLAAAARSLGSNCASLICTDGQPSAAVHRLLAARAPGTTIEWRADFDWAGMHMVTRALTRYDAVPWRMDVDSYRRALDARNSEPLKGHPTDTPWDPELAAALRDSGRAVMEERLIPDLLADLRLGPAD

SEQ ID NO: 39834 - protein, 542 aa, Streptomyces sp. MUSC164
MGASASGAGQDADEEAWRRLNAYTYLSAPERLEHVAIMRVFCGTLLADLAVPDIMAKLRQSGGSAAGLDADTLTVRLEQLVTWGNLLRSSHTVKASSISEYQRSRSRYQLSKLGERIQRDADGVLAKADAAREVSSELLAMVERGLRELADLVTAPGGIEPQDGLERISTLFVQFSEFADSIRDFYAYLGQVLSRYDLDSAEYQGFKELLLDYVEAITEDVAFRAPRISAALDTLWPHIPALLDRLDAHAQGLTGLSAQGEGRLEVRVQRSRGRELADWEGLRGWFRDTDGQGSQVEQLRDATLRALQSLLANAKRMLRSATGEMSRRKDLLRLARWFDEAAPQDAHDIAVAAFGLYGARHLGIPPATDQVVPAYTSWWTGPVVEVPVALRERGSRAQRGRASAVEDHSAQKERLREAARQRATARAAAADELRSASGRFADVRLTSAALGLLLELLATALGNAQLRRRAGADGEGTAGFDLDSASSEDAELGIRLTVRRTEGTRTVLDSADGDLLLDDLELKIGRTSAAADGEAEAEVSVS

SEQ ID NO: 39835 - protein, 441 aa, Streptomyces sp. MUSC164
MTLPSTHDVALAAERRTAARLLLAHPLVAADGPHADLFPLIRRHADWLGKRFQQVLGYRLLVDSSFARLFKAGLGAGSGHRLERSTGTPFTPHTYACLALALSVLVTAPEQMLLSHLVTDIRAAAADAGIELEETGRAAGKRTLVAALRQLVEWGVLIETEGQVTAIAQEAGGEALITVDRELARVVVAGPLAPARDGADLVRRAADPGFSGPRTYVRRMLVETPVVHLDELTDAERDWLRTRQRREGQAFSELLGLEMEIRAEGVALVDPEEELTDLHLPGTGTVAQAALLLVERLVERLRPQEPGHPATGGTLVIGVAVQDGLVDEVLAGLIAEYGQRSNWQRGYLEDLPALREAVLDMLVRMRLMAHAGRLRAEGEGLPEGYVEDVSEGRTVTDVHGARPSGDGWVLLAAAARYATLVTVRPAATACQGTDVQEELPL

SEQ ID NO: 39836 - protein, 1418 aa, Streptomyces sp. MUSC164
MTTDARGLVPLPRSGPATTAAPATTTGTRFRLHRAGIQNVWQYDTQDFSFGDGRLLLRGKNGAGKSKALEMLLPYLLDGDSRALDATGTGRTTLAWLMLDGFEQTNRLGYLWVEFRGTTDDGSHRFLTLGVAIRASKSTQKALPTFFVTSLRVGEDLHLVEGGKPLPVDRLKEIVGSDNTTERAVRHRSRVARDLFGITDATRYRNLTQLLHRLRRPTVGDRIEHGGLASLLSETLPGLDEDVVEQVARNLHDLDAVRDELGRLERTDTALRTFLTSYRGYLAGVLRASAQRVSHELGVLAQRRRAAGDAAQRTSDLRTQEHESKGRLETLRDEEQAARTDLAALHASHAYRSLRELSERRGTVEALHTAAVAAFTTLRNAHDTEESTAERLAEGVDHLGSRLAELGTEHRELLTHAEKAGLPTGHLGETVALSRTVLAPATETELTTPDGETRTVRHRSAARADTATTQEGLRSWQNQLEDAETVARNRARMVQEVTRLISRADAARAGAAQADAERERLEGEAEEAAGRLDVSRQKVAEESGTYARRVAEWAAHTRAALGPDCPPLDAVHSTVGHETSADAPFADRTLPPDIDSQAWRTAQAALEPYGEELTGRRDALALSVGRLDEELGRLTEQKRDWEQRTDPEPSAPHHRVAERTPGSGAPFYRLVDFADDLAPADRASLEGALEASGILDAWVSADGVLLDPRTRDTLLQPGPVLSDGPTLASALRPAPEPECGVTSARVERLLASIALTPAAHNSAHNAVYHDGSWRLGVLSGRHDKGDTEYVGAAVRAGTRRRILAELEERITQTEQRLADVREELAVTDAMRRALTLAERDFPRAQNLANAWSRTESAERTLRDLTTMATRAARQAEEARALAVSARAEADATATAHDLPSDPDALDRIRTALAALFSGVGHLRRAVGGTGERLGANQTDAERYERAREDRLAAEESYRVHLTGLRTAEQDLRTREEAIRSSEEEILTREQETKLRIANAVRALPGAQRALDDLHDLRVRAEEDEKRLRGTLADQETAVIDTGSALRGALGRPEVVLGAGLDRSSLPEYVSDDPSVDVRSRLRALRALAGAVEQALGRPKGEVSDSTLLNRHTDLRDQLAGGFDAQLEERDGIKVCRLVDDHGSHDVAAVGERIAVQAAEARGRLTEREREVFQRFLTGELGDHLSAQVITAANLVAALNDTLRTVRTSHGLGVELLWKLDADVDADVRAAVDLLRSPSSLRTREETEQLREVLQRRIEDARRADPSAGYAAHLRTALDYRDWFRFHTFVVEDAAPGRRRKLTGRTGLSQGEQRVLSYLVLFAAAAAHFTSLAESAPHAPRLILLDDAFAKVDEPTHGRLGRILVDLDLDFVLTSERLMGNWPEVPSLHIYECLRDPHVRGVATLHYTWNGRHRRLVSV

SEQ ID NO: 39837 - protein, 424 aa, Streptomyces sp. MUSC164
MNGLPPATRDWLTGPGLTRLWEGIRKRLESNGVQATGSLRLAALNIQERNDLSLLLGKPLTGGAVTVRLDVLDARLRASAAGLGLRDTLEELGPPLTDRRAVRADATARREQVWSSLASSLDASPLAGQEWPRRWYDLLRRAGVPRGVTHDAAIWTLQQAVQVLAVLLGPERSGNALGRGELAAMTTGSAHGLDDGTWLARLVQRGVSLAHGTEFPDDAAGRRTLWRLVSVTPDEVSSTVLTYGLRPAGEGWRECALRERAKHHAETHLTPRDLHSLRLRLPAATLIHICENPRVVEAAADAACVRPLVCTSGSAATVVVTLLDALAATGCRFAYHGDFDWPGIVLANRVIRLYDAVPWRMGTADYEHLAARSQAEGIPQLALDGQPVSADWDPDLAPAMTALGVALHEEATLDLLVDDLSRHT

SEQ ID NO: 39838 - protein, 517 aa, Streptomyces mangrovisoli
MRRVPPEMFRFTTVERSDLYGAVLDVFGVAGEHLETALGLDAVRERLRQVGWVAVVEDEDLHEALRKLVQWELLDVVHNHAEHYRTAEEYERRNLQYSLTRQGEAALAGVRHALEVLTSTGALQTAVLEAISDRLDELCVLSGEPAAADRRVFTTLRELEGHLDALVENTKAFNGELQRLLRAEGADLEVFREVKAATVAYLQEFLVNLDRRGQAVAGAVERVEERGIAVLRERALRGAELPPVTGADPAAGWLEGRRARWAGLRAWFLPDDGARPRIEQLHDIARRAIVSLLQVLERINESRRRSSSAVQDFRELARWFEAAPGEEDLHRLWSAAFGLGAARHAHLAHLDPELIPSSHSWRDAPPVEVSALLRTSGRTERFTRTAKVRDVAAVRAERAERARAERTELALAWQVLETGGPVRLSSFGSLDPAVFDRLLDLLGRALAARPDASGLRRATTGDGRVEIVLVPPPDTSSAVLHTTKGSLTGPDYVVQITAAGGPSAVPALRAASREVAG

SEQ ID NO: 39839 - protein, 450 aa, Streptomyces mangrovisoli
MSTLANQLAAAEREEVARAIRLLLAHPLLTDTVDPAGFELVRRRREPLAQWFDYTCGWSLVVEPRRGYARLGKVRADPDASRPARRVRSGRAPFDRRRYVLLCVTAAELLSLPMTTIGMLADRVVQATAADRALAAFDPVHRSERMAFVDVLKLLESYDVLRAVDGTTETYVESAEAKVLYRVDTTLLMRLPAAPVGASRLAVPPEEVPARFGELLTALVRERRYGGTNTALDATADGTHGERTATDAQRNLRLRHSVLRRLFDDPVLYRADLGEDELAYVTSLTGRQILRRSVEQAGFLLEERAEGFLLVDPDGIATDVRFPDDTSTARVAALLLLEPLCAAPAGLLPEQLAEAGTGLLRRFPRWAKAYQSDDGPLRLSADAVRVLRDVGLVRTVEGRVVACPAAYRYRLTEMKSREPDAGPQRERDGRPPDTAGEAAAGADVLEGDQR

SEQ ID NO: 39840 - protein, 1385 aa, Streptomyces mangrovisoli
MSVTELPFPRRPEPAQPPAAAAGTVDATGSRWQPHRAGILNVWRYYDETFTFHQGRLLLRGQNGSGKSKALELLLPFLFDASLRPNRLSTFGGSERTMHWNLLGEGASGKTRVGYVWMEFRRIDDDGAPRWFGCGARLQASVHTSGVHADYFTSGARIAHPTGVLLVNEAGQPLTRAALAESLRDRGEVHASAADYRTAVRRELFRGMGEQRYESLVSALLQLRQPKLSERLDPSLLSTLLSRALPPLGDGEIAELAEGFERLDRQREHLKRLDDEVAAAETVASRQRAYSRRVLRAGSAALISATTEMDDLTRAARQSAEDLQQALEERESARLRHEEQQLRAHALQETVDALRESDAYKQGEELDRLRRHTEEAVAAAGRQRGAARAARNGAGEDQRQADEAAGQARSLDAHARETAEEARRAARAAGMESIHREVTTLLDANRAAERADRAQEDAGGARPAGSSGARSAGEYGARQARSLLRGAVAARREQVGLITEAMDGHDRAVRDRGAAEGLLEEARGRLSEAITRRDEASGAWDAALADHTERLLAWADDCAELRIADLDELAASAGTESEVTALVEGAARPVEQEIATSAALATAARAQVRDERSRVEEEVRRLSGESDLPPVPPATRTTVRTATAGAPLWRLVAFREGVPLAVQAAVEAALEASGLLDAWVSPYDGITLPGHDTRAEATLALAAAGPSLLDVLQPEDDIPVPVDTVLRILAGVAYGSTLPGGHPAAVGADGAWRLALATGTWSKSEPAHIGAVARLRARRRRIGELSELISEANARIAALDDQLRGLDARREGLKADRQARPDHRELDARRRAWERAEEHVAARDDAVRDAAAHVARCESTVTDALRTLSRRAAEHGLPTDRVRLHELSRDVEGFRDRADLWVDARLAATAAAHRSRQITTQAERAHRTAEKETEKAAAAEAEAVGLTARLQAVEATAGEDYRQIVARVAEARAELTRCREEAGRASELLLRLEGRIGGLRATSGQDAERRERAVAERDRAAHRFRHLCLVGLAEDAGLPLEPDAGDGTKATLEAARATAARWPTVPHAPRNLGDAATRLSEAVHEARQRLGARADLDLEPDDDTQLFHATLDGLRVGATGLLTTLAQERDRSRDDITTAERSLFDQILTGDIRRHLAARIRQAGELVDRMNGHLERVRTASNVAVQLVWDVRPDLPDGTRTARQLLLKDPGRVGEADRAALHSFFRARIEEAKGSDTAASWEEQLGEVLDYTAWHRFTVRLDRAGGTGWQPLTKKLHGALSGGEKAIALHLPLFAAVAAHYEAVPLAPRPILLDEVFVGVDTVNRGQVFALLTALDLDLMITSDHEWCSYRELPGIAVHQLLTDGDDDAVTSARFVWNGTDLEAR

SEQ ID NO: 39841 - protein, 501 aa, Rhodococcus erythropolis; identical to SEQ ID NO: 38558

SEQ ID NO: 39842 - protein, 480 aa, Rhodococcus erythropolis; identical to SEQ ID NO: 38559

SEQ ID NO: 39843 - protein, 1391 aa, Rhodococcus erythropolis
MSNARFRPTRAGIINLWDYRDQEFSFADGRLVLRGPNGSGKTKALEVLFPFVFDGRIEPRRLNPFAGEERTMKSNLLYRGQDSAHSYVWMEFCRGSLEDPESVTVGIGMRATRTNDKVTRWYFVADGRVGVDFSLIGNDDRPLTKKQLAEQLGSDSITDRPLDYRTAIDARMFGLGVQRYDQLINLILTLRRPQLAKNLDPKGLSQALTDGLRPLDDQLVLEAARSFSDMEEVGRALEGLAAADQAAQSFIGVYTKYLRQQSRGEIEQVSTRLAAVTRGVAAMDESSLAQTRSREARAAAEERFNQAEQALENARANVEALQRSSAYEGKQQLDDLAQAVSTLKLSTEQQADKSRKAQAALAQRGDEADKAASSVKRAAEALSRAEDELQAAAEDAGIVWTPLPDGSRSDQITAAVRGHAEERDGDVRVVRTALATVEKAATERTRAENSSRRGQELLEASKAAVLEGEAAVELARSQCASGLRAWWTDHSSLFSAVGADTSLFEALDAALAEVGDEDAPALSAVLTEHTEAGTETLRERRREAEAEISASHASIAALKSERKAVSAEHDDAPPAFHARTDNRSDLGGAPLWQLVRFADSVEPDVATGIESALQAANLLDGWVCPDETIPDHVSEQFLTALPVKQRPKGRTLADVLEVEGNADVPDARVQDILASISLVEAPGDSDASVAIGVDGRFWQGVARGRHVKADAEYIGTTARARRREARITEIDAALEELAAAVDAAKALVTQTNEQLSRINSAAKELPKTGSILRALKTVTESAGALRTRSEATETAQRELDAAIADLAAKEKQLRATASQHRTPHVGRELDSLAAAIRHFEKQGELALRCRREHAKEVELERESRDRLDESRANAEEFAEEAAIAEESLLQQVQRLETLRDTLGASAEQIDLDLAKARAKIEECKVEQRAARKAYDAAVLQIGTAEGAYNTAVETLRHTLTETRSDAERLAPYARPDLLELLGVKEHLSWPASSAAWMSPDQLVYRIQNEDRSEDAAHPPVLPEDVDKLYRALEAATSAVRVTDGARKATRTALTSALQDFDAQLAAAGQDYRLQWDAPDGLTVVRVQDDQGYSSIGEFATRIHDARGDQEQLLTESERRILEDALLTGLAQQIHERTVDARVLIAQMGTEMRERRMSSGNTIGVHWVLADNLDDSSRAISKLLDRDASALGVDELATLRAHFATQIRTARAAHPERSYPEILSSALDYRQWRVFSFTLISGEGKEDRLTVARHSALSGGEQSVSLHLPLFAAAHVMLDSADPHAPRLLALDEAFAGVDDNGRSELLGLSVQFDLDLFMTGYDLWITYADVPGCAHYDLAHSTAEQAVSAALLVWSNGELLAEHDGTDLARALGSPLRRRVPTPAEGALDYA

SEQ ID NO: 39844 - protein, 488 aa, Rhodococcus aetherivorans; identical to SEQ ID NO: 39225

SEQ ID NO: 39845 - protein, 456 aa, Rhodococcus aetherivorans; identical to SEQ ID NO: 39226

SEQ ID NO: 39846 - protein, 1385 aa, Rhodococcus aetherivorans
MSSARFRPTRAGIINLWDYRDQEFSFADGRLVLRGPNGSGKTKALEVLFPFVFDGRIEPRRLNPFAGEERTMRSNLLYQGQDSAYSYVWMEFCRGRRDDPEAVTVGVGMRAARGNDKVTRWYFVVDGRVGVDFSLLDAADRPLTRRQLIEEVGADAVTDRPVDYRAAIDARLFGLGIERYDQLINLILTLRRPQLAKNLDPKGLSQALTDGLRPLDEQLVLEAARSFADMEEVSRALESLAAADEAAQRFVAVYATYLGQQARADVDRLGARLAAVESGSAEWTASVTAFDRAGAERAQAHERLELAERDLEQARATLEALQRSSAYEGKQQLDDLAQVVADLERTTAGQAEQAQRARAELAQRDEEARRAAAAATDAAAAVGRAEDALAAAARDAGVEWAPPAEDAPGEQIAATVAACAEERAADVRAVRAAVAAAEGAAAARVRAETTAERGRAQLESARAAVATADAVVELARAEASNLLREWWVGHRDTWSVLGLPEELVEALAAAIAAAGDDEAATPAAALAERTAPVVEELRFRGRGLEAEITHARERIAVLRAERDLVEAERDDAPPSFPMRPTGSSDPSGAPLWRLVRFADDVSAEAAAGLEAALEAANLLTGWVCGGAGDVPAGAVALMPVPPAQRPTGRTLADVLVVEPDTGVPAERVRAVLASVAVRDAVTDETGPAVDERGGYRQGVQLGRHTKAEVEYIGATARARRRRLRVTELDAEIAAAQNRMAGAEAERAELDGRLAQLERAAAAVPRTGAVLAALRKVSECAGALRTAGEAAAAADRDLDQVIAECAVKEQRVRSVAARHRAPHTARELEHLAAAIRFFESQGQAVLRARREHVAAAERAREAQVRRDDARLAAEESAERAVTAEESLGQQQQRLGTLREALGADAQQIDAQLAQARERIEAARVEQRAARRAHDDAVERLGKAEAAHVAAEQALRSALTETRADAAQLAPYARPDVLSLLGISEELRWPSAAAWPAPEQVVDRLARAGGDVPAVPAEVGALYAALAAATATATIKGGDGARKAARSALTSALQEFDGQLAAAGQDYRLQWDAPDGLTVVRVQDEQGFSSVAEFAVRISAARRDQELLLTDAERRILEDALLAGLAQQIHERTEDARDLIARMGAEMRQRRMSSGTTVGVRWVPADHLDDQARAVCRLLDREVSALGPVELASVRAHFAARIRAERAAHPERSYPEILATTLDYRRWRVFAFGLIGADGAEDRLTVARHSALSGGEQSVSLHLPLFAAAHVMLDSADPQAPRLLALDEAFAGVDDNGRAELLGLSVQFDLDLFMTGYDLWITYAGVPACAHYDLAHSVAEHTVGATLLVWSEGGLLAEHDGSDLAAALGSPGTRRVPVPVEGALEFA

SEQ ID NO: 39847 - protein, 496 aa, Clostridiales bacterium PH28_bin88
MAHRRAVTDEMPEANYLIGHQDGPYYRLLVRCFYERHRAHANYVRSDELLAFVRQYMPYEEADCRRHLEMMERWGLITLLPEQSKPTNLMELRQKPRVYQAERIALRLEALRVELEEGEKAAALDPAALDLLVERVKELLAWVEQGGLFRQESEAAHQTYRLWSAAYDAFTNFSRRVEEYLSDLPRHRPREVLDYTSFMNYRDLITRYLSDYARRLFDRREQLRVLLHPLAPHAELIAVTLASVEVEQVRADGSRPEFGRQKERYLRAVRGLIDYFAEEGDVDVLLERAQTWVAEITRHARRLSEQHLGGSVREQTLLDMACRFADAPSLAHAEALSQVVFAATLPLNWRGEAPPPEEVPAWQSEPVTVTLHSVKRGSRQRQRPEATADRSSLALQRMLSAAMERERDARKLAELFGPEGVVDLGNLAVQEPAQRQVLLHLLYKALSQQGRAGVGYKNWSVSVSIPDDAGLGQLQGPDGWTVLPHVRLCLHKGGGR

SEQ ID NO: 39848 - protein, 428 aa, Clostridiales bacterium PH28_bin88
MTIPGAAEQRQMALHDLLDRYLISREDEPEAYRRITLHEGYLKGWFAERPQWRILNGRGIYRLERMPSLVVPERGLPRLRSPLAYACLCWVLWFAETMTSTARDWFVISELAERVATAAKGRFTLAERSHREALVQALQLLVDLGGLLLRDGDADRWVAGQGSIGEEPEVMYEFAENAPRLLANFTYESLAVLAAGDPGAKTAMPTGETAPPLARAWRAVLLGPVFWRGDDPEAFALLEERQEQVQRDLEAALGWQLQLNPEYARIWRMTTARHAGSVLLNLYPDPGMPMEDQHTRYLYHPILLLLDRCRERVAAGRWRPDEAGAVPVPFGELHDLMADLRGEYRRYWGSELGAVSLTDLVRAVLTEMRRMALLRGPDQLQRCYLLPAGAGIRGRYGTQANGGAGDDAEESKEGTPGPVQSTLFQGLG

SEQ ID NO: 39849 - protein, 1388 aa, Clostridiales bacterium PH28_bin88
MELWQRFETELEQARRAIPGGPAGWRPERLILRDWWYWRNQEFGFAHGRLALTGQNAGGKSSILALTIPMLLDGRTDPVRLDPAQSRDRFIHYYLLGADDAEPGNPEAFRYEARTGYIALEFYHPVEERFLTIGMGLSASRTSPRRISDWWGFLLLRGQRLGRGFDVRGADDTCLARREFTRMLGDGGIVVTERAEYQRQVNNHLFGLESDDYHALIEMLLQARRPKLGEQSGPDKVCDLLRSALPGVPADRLSRVGEVVNNIEEYSRNMADVTTKAGAVGRIDAALAALAEVLVQESVQQYMETQGRLGSVAGGLKRARESMEAASRGLAMLDEQARRRGVEQAALQAEVDELRQGDGADLQARLEEAKGKLATAKSKVKDLEQRVADGREAAEAAQKEQEQAGEQFAAKRRALAGLMDRLTRDADRMAWKDAVRELREATRAVEVLAITDPPEVIEGAGLDLSLAAQARRLKEEFHAAAAARKSLDEAETAYSLVQDRVDVLRKTMSGLADQVEDAKDNAVDRAEDVVAALQAWQERCPVLQPSDVDLARVAAKVREMVEPPPAGFRELIEPLEELAERRRRELKDRLAAAAEKERTAQVRVDRLAERLAEVEADPGDPGRSVIRGKARAALPAGLQPLFRLARFRPGIPAETAALVEAAILEAGWLDLLIPAESHHVELADAYLAPEQVDGPSLLEVLEPEPGAPPEVTQALASIGWGEGTGSRWVTPDGRWRNAAAHGRVAPWAEEEAGYFGAGNRDRRKERRVAQAQAALREARVELDALAAERAGVATGIEDLAAEIRQLDRIPWQPLFDALGDIRTLEGQLALAKSQLEQEKPRLTQAESVLRTATRAFDDAVYGLPGAAGMGYAALNEREMDFALLAERVESLATPAAELAGLARSYRSRAESMRQGQKALADLERDEEMAVRDISAGEAAVAALERQLADPDVRERQKRLEQAVNRLKELDRADEEARGKKGDLEVQRRTADHQIQDLEPQELALRQELGRLLEWVRGRLQLHPQLLPFLEALDREGPVAVMRRLPRPATDDDCESLKTQRQADLISIVHTEQDLLRDYRPTWNAERTSLTFCDERLPLAAQQLRERLERRVQEYKGLMEEEQRKLFEDIIYEGILDELRRLIRQAQEFTRRTNEKLKALRLSNEEQLSLRFSPLSPEQMPGARIAHELTQMEQGSRWLEESKRDVLLSTIKEEVERVRLSASAAGEEIAYNEAVARALDYRNWYQYQLLSKMPGMSGPVPIRTRGFGRRSTSAKAWALAVPVLAAVAARYDASPKVDVPRLIGLDEAFAGLDPNNQENYLGFLTQLGFCWIITAPDELPYSHSLSAAMAYRMSLEGNFHTAFPILWNGQVAWEPMAEWSWETGEESRP

SEQ ID NO: 39850 - protein, 433 aa, Clostridiales bacterium PH28_bin88
MRVRDAFAELKRAGLEPLLVAARRKIYEQDGVRGKVAVRLGKTEREELANLLGRPAHSAEGIHVDLRELDAALGRSRFRTGLIDVLEAGYGPMVTRRQEREHADARWQAWLAGLGRAIPVDPAVSAWFDALAAGTSPSGRWARRAYAVDPDRAARAVTAVGRALAALPALKERHELLAIFAAEITGDPHAFDSGEPAGTLLDHALAERFEPPPAGLRRGEERALLLDQAGLGVDQVSSTVLAAYLATASVQGRFHPVIETMTEYGGGWPLTLGEVRRWSAVRARGHCAYVVENPPVFEYLLRRVAGEAPERRPTLICTGGFLSAAAVRLLDLLAAGGAELCYGGDFDRNGLVIASWLAARYQGRFRAWRLGPDDYRQAVTAGGKKLPAEDKEFLNGMEGPLADTARVVAQDGLTAYQERLVGMLTADILLARS

SEQ ID NO: 39851 - protein, 486 aa, Clostridiales bacterium PH28_bin88
MSESLLHPVVETSYLTVQNASRYRLIMRHFYRQHQRSRYWLRKEEVFEAVVATGFFPDYTIEQCEQDLEALRKWENLVAIHDGSNATSVEEYLRKRFRYEITQYSVEIERMLENLEKAKGYSGVLDPKRFDEIEWVLRELMGQGEWGPGTALELWERLVESFDRLVENGVDYLHHLQSARAEELMSTVQFLIYKDKLTEYLQKFVVQGLQRSGRRVQALLVKLDQSHVDKWIHAVARDYAEIPRLDEPLTMEDRLARVQDKWSAIVQWFLGSGYGEADIDLMEKEAKNTITRVVRYVARIQEKQRSGVSRRRELDYLGRWFLSLDSVEEAHKLAACVFGLYRTRHYQGADEKGSDNPDLSMWQVAPSIRVLSSRGRRRRESSGQPIISRKAEAAKADEVYLAKRAEEEQIVQSLVGRGRLIMSQLEYLPAPAMDYLLDWIGQCQSNESRHAHTPEGVLVKLFDPPASDSRRKSSSERGAKAKVRIS

SEQ ID NO: 39852 - protein, 175 aa, Clostridiales bacterium PH28_bin88
MVKSEDGELDMPDYTLEFVDISGILNFWFYEDEEIYFADGRLLLRGANGAGKTVTMQSLIPLVLDGDKRPWCLDPFGSKDRKIEYYLLGEGDGAHINRTGYLYLEFYHPQHRRYVTIGIGLRARKNARPLFWGFAVTDNRRVGKDFNLFDTDYEGKRLLSERAVAGIAWVWRVGG

SEQ ID NO: 39853 - protein, 437 aa, Clostridiales bacterium PH28_bin88
MAVDQSLINHLNRPALSRLWREVKKKYESLGRVGGRVRLSELTPVEQEAVSGLLKTNLTSGSVSISLETLDRALQQSRFGHGLEDFLKATYGSSLRTRQERSDYSKRRWENFFIHLHGYAVSEPVKAWLSELQSGRGSGYRSFIMLYNEDYHGALETMRVCLTVLNDLPVISSNNLRLPVFSAAVTGDPHAFDRDTPLGRLLYYGVCAVLKITPADYSAAELGDVLEKAGLKNDGISSTVVAYGLLCDPADLRAPMLFSAKENRIPLILPLRFFDREVPWLKEPAVYVVENPAVLSALLDMASGRSLPPVICVSGQPSLAAVELLDGLARREVAMYYSGDFDLAGLTIGLNLHERYKDLFRPWFFDSAAYLSAKPGSPIDEKDMRHISALEVPWDLHLPTTIVNNGYKVFQEVFVARMADKLKLASSKSDYGRLKLY

SEQ ID NO: 39854 - protein, 532 aa, Streptomyces sp. CNQ-509
MSAPESARHEAGRGPFAHLTVPHAARYRQVMAVFTAAKERFAVHLRPEDVHAALPPEERPAEVEAVAKALDSLVQWGNLRADPDTSRVTAVEDFYRKRFIYQLTPAGEAVELAIAAYDEALGRRGALQAVALHDIVTQLRALLVLAADDEPDAAKAHLALAALADRFAALAENARAFMGSLQRTIDLHGVEVEVFLAYKDRLIQYLERFIQDLIALGGRIARLIGELEQQGRVETLLRLAAARESADAAPEETETAQARAYERWAARWSGLASWFVSADGRESQARLLRGRALGAIPQLLAVVRQLNERRAGRTDRSADFRTLARWFAEAPDDAARHRLWRAAFGLYPARHLTIDADTLAARAAEPVPPATPWAAAEPLRISPQLRRTGSYERRGKPRRVRDRSAERRRLAEYAGRQAAEVAAARARLATGGEVRLSQVGELDPLAFGLFLRLLGDALATWRPDTLTTTVTSTDGTMEIRLTALRDGGRAEVRTPAGVFRGPDHLVEIITRAGTVQAVDMSADMPVDTGVRA

SEQ ID NO: 39855 - protein, 415 aa, Streptomyces sp. CNQ-509
MSSPLGEFLDAHRSAELQRAARALLKEPLLLARGPQADSFRLVRRHAAELREWFDRNTGWPLRVDAESARLLRTPGTLADPTHPAREVSRSRAPFTRRRYVLLCLALAALERSEAQIALGRLAEQVVLDAADEQLAAAGLEFTLERRDERLDLAAVVRLLLHLGVLRRVAGDEDAYVSGSGDVLYDVERRVLAGLLAARRGPSLVTAAGFAERLAELTAETALDSDELRFRAIRYRLTRRLLDDPVLYYDELTDEELAYLTRQRAFLTSRITELTGLVAEVRAEGIAMVDPPGDLRPGGATYDLTDVRMPEQGTYGHVTLLLAEHLAAADGPVTEAALGAKVRELARQHAGFWAKSARQPGAEAELTGQALNRLTALGLVVRTAEGVVPRPALARYAVGEPVVRPVPDPRKAPEQ

SEQ ID NO: 39856 - protein, 1387 aa, Streptomyces sp. CNQ-509
MTVLPHPAPGRWRPLRIGLVDLFYYDTEEFWFRDGRLLLRGNNGTGKSKVLALTLPFLLDGDLSARRVEPDADPGKRMEWNLLLGGEHPHPERLGYTWIEFGRRDTGTGQTHFVTLLCGLKAVAGRGIARHWYAVTDQRIGAELSLVDATGTALSRDRLTEAVAGRGMVYDQAKAYRRAVDEALFGLGERRYAALVDLLIQLRQPQLSKRPSEAALSRALTEALPPLDQAVIADVAEAFRSLDEEKEELRQAAEAERASSAFLDHYRRYARVAARRRARLPRTEHARYERLGRDLGAAREELAQAEADRQVAAARIAELEETAVRLKAQEEALRAGPEMRSARELEQAADDARRTEAELRRAEADREQAAQDHTRALGRLADAVARLGEAEDQLARIVEQEREVARTARLTGGLRTDGAPEAELRRAAEEAVDRRRRTVDHVADLAAQAEQAAAERRAAARRLDEAEREAGHTAERQAAAEAATTAAGSALVAAVRDHLRGCAELAVDDPEGLLDVLTDWTTHLTGPSPARERAAHAHRVRAARLADESAALGRRLADLGARREAAERELAGLEAGGQVGPPVPHTRTPGVREEAPGAPLWRLIDFREHVGTAERAGLEAALEASGLLDARVVPDGTALAADGHDVLLAPGAPLTGRPRLDGALRPAVDHGDARAAAVGEAAVVRLLGAIGLGDGPGDGPGTGHGDTWVAPDGRFRVGALTGSWAKEAAVYVGEGAREEARRTRIAELRGELGELAAAREALQAQRDAVAARRRALDGELATVPDQEEADLRHAHAQTAAAAEAAHRARSRRDEHAGTAREAARAEETAATELADTAAAVDLPADRPGLTAVRQALADYTAVLAALWPALRERAAAARAAAEDRGETERAGERVAELAVRAEESARTAAAAGERHATLGSTVGAAVAELQRRLAQTADARDACERGQRQARTDHTAAEKSAGRAEGRIEQLEKDTREATAARAEAIAALQRFTATGLLTVALPDVAVPAQDAGGWAAKPAIALARTVEAELAEAGVDDSDGAWERVQKRLGEEYKKLQDALSRGGHSASARMTDDGMAVDILYQGRERAVPELAEALAAEVAQLQRILSAHEREILETHLLTEVAGTLQELIAAAELQVRRMNDELEQRPTSTGMRLRLIWRPSRKAPAGLDRARTRLRQTADAWAPEDRAAVGEFLQAQIARQQTDEGEGGGKGSWLEVLTAALDYRSWHEFGVERHQQGRWVPATGPASGGERVLAMSVPLFAAASSHYATAAPDAPRLVALDEAFAGVDDDSRAKCLGLLHAFDLDVVMTSEREWACYPQVPGIAIAQLSRVDEIAAVLVTRWEWDGVALDQGAEPERTAASQGGIPVPRDGDAQESGAEPLWT

SEQ ID NO: 39857 - protein, 404 aa, Streptomyces sp. CNQ-509
MDPDRLTRLLGGPGLDWLVERARRRLARGEPLTGTVTLASATAAQRGAAERLLGRAPRPGRSLSVRLDEVDAVLRRSRVSPAGLAAAVTALTGPVVPLAEARERQARAWEEAYAPLAALPAELADWADDIRRDGLVRRLARSPDAARPLLAATVSALGALPAEPARPLPEFAAQTLGDAHALDDGTPLATLVRSGVRALTGFPDGEGAEWRRAAWASAGLLKDALSATVLALGVRGTAALDALADAGEPAVLTLRQLAHGAPRPPATAPAVYVCENPAVVAAAADAYGADCAPLVCLQGQPSAAALTLLRLLQSAGARLLYHGDFDWGGLRIAGGLLRRVPWRPWRYTAADYRAAAATMPLARPLRGTPASAPWDPALSAALTEVGVGVEEESVIDDLLSDLIR

SEQ ID NO: 39858 - protein, 513 aa, Frankia sp. BMG5.1
MTSTHRVPPEMFRFATEQNVDLYTAILHVFGEANERLETALGLDGISDRLASVGFFRELGPDELGRALAQLGKWRLLDVIQNHGADYTTAAEYERGNLQYSLTRRGEAAFAGVQHALAVLASAGALQTAVLDAIVDRLDALYALMADEASPNRRIFTTLSELEGHLEALRVNTKQFNGELQRLLRAENADLDTFHEVKRATVAYLQEFVTDLDHRSHEIREAIRRVESRGVGALRGRALLGAELSPMGGDDPAPAWLEHRRLRWEGLRLWFDPDGGARPRAEQLHTVARRAIVALLAALERIGESRRRSSSAARDFRVLARAFAAAPAEDDLHRLWGAAFGLAPARHAHLRHADPELVPTGVSWADAPSVEVSTLLRRAGRVERFSRTGRVRDVTAVRRAREERARRERAELEAIWRRLRTDGPIRLSAVAELGHEELSYLLDLLGHALDGPLDSSGARRATTSDGRVEIVARPTGDGRLAMIRTPRGVLTAPDHVVEIILVGQRARPSEAAR

SEQ ID NO: 39859 - protein, 439 aa, Frankia sp. BMG5.1
KPIADWFDYFCGWQLVVEPRAGYARLVKIRSEPDPSRPARRPRSTRAPFDRSRYVLFCVVAAELMAGPVTTIGLLADRAASACAADDALPPFDTASRAGRMAFVDALKLLESLGVVSAVDGVTDTYVQSEEAKVLYRVDTTRLVRLLAAPVAPSRVVTAGASVAPGVGDAPATPTADDTPDDAGKAGATPPPDQELIDIDVLIADMLVETRYGDAAAEAPTVSDSRRNLWLRHSVIRRLVDDPVVYRWQLSAAQLAYLATPTGRTMVRRAAELAGFELEERAEGYLFVDPDGIATDSRFPDDASSAKIAGLMLLDVLRAAPAGLTIEQLAIEAGRILAGLPSWAKSYRSEEGAHRLARDAVTELRMFGLAALDTGHTGASAVVRALPAAARYRDHREDRSRLTDVASSAAKAATGDVTGDAERGAARDAERDVASGGQA

SEQ ID NO: 39860 - protein, 1414 aa, Frankia sp. BMG5.1
MTRLPVRPAPADAQARVARWRPQRAGIVNVWRYYDETFHFHRGRLLLRGRNGTGKSKALELLLPYLLDANLQARRLSTFGGPERTMHWNLMGDGASGQTRVGYVWIEFRFGALPETGETGPTGQPSPVRPVGDGDGVGDGGREGGGPARPDDGTDGSDDGIDGSDERWFTCGARLQASVHTASATANYFTTTSRIGLPGGLSVVDEANAPLTRKRLEAELGDTGQLYPTAADYRAAIRAELFGGLSEQRYSGLITAMLQLRTPKLSERLDPSLLSTLLSRALPPLGGAEIAELAEGFERLDRQRESLRRLDEEVEAARVLADRQRAYASRVLRAAAADLISATSTLDALTRTARESQEEYDRVVAEREALDERITAAETDRGTLQARVEGLQVSDAYRAGGRLDELRGQVRAAQRRAADTREQATGAQERARVDKATATRTATGAARAEAELASARETARPAADRAGMTATYQQLAAVTERAAGAGEDREDAAASWSAAATRPRSLLRAAVEARGRQIGAVRRALGEHRSAVDTRTTAERNLERARQELTAATAARRDARVAYEDAREALGEALARWAASCAQLRFTDPGALRDAAESEPDVLRLVEETAGPLLEAIAARSAELAREHRDRDAERDAHTAERDRLLILTELPPSAPPTRTADRAGLPGAPLWRLVSFRDGVAPAVQAGIEAALEAAGLLDAWVFPTGGLTVPGHDTVIDVDRMAPAPAGGLGAVLTPEPDAKVPAERVLRLLAGIAVDTTVPDGHPVAVGADGTWRLAAARGSWSKPEPAHIGALARDRARRRRVDELTRLISQLDDVLAGIGRELGELGARRERIAAERRARPSHRALDTARGALEAADAAVAARDDVVSHRLEEVREGEDAVRAATRALTAAGAEHGLPTDTDALEAVQDAATAFHRLADGWLDCHQRATAARDAAVAAAGVATRSQESALGLAATAGDAAGETQRLRAKLDGIEAAIGPEYRQVLDEIAGARRRLEELAKQRVMMEQSGRALERRVGELDERRVVDADRREAAVAERDSRANRFRHLGAGSLAADTRLDIPLAGLDGVRPTLEAARAVAARLTTTPYARQNLKEAETRLTDAVHRSRQALADRAELVLEPDEDIQILTAAVDGIRVGAAHLHDAVRDERERSRAEITEGERELFDRTLTGNTRRHVADRIRQANALVADMNSRLERVRTASRTAVQIQWRVDPALPAATRGARDLLLRDPSQLTKADHEALHEFLRARVDDARDDDTATGWEEQLLRVFDYTAWHQFIVRVDRGNERGWQPLTKKLHGALSGGEKAIALHLPLFAALAAHYQSAPTAPRLILLDEVFVGVDTTNRGQVFELLASLDLDLMITSDHEWCMYRELDGIAIHSLITGDGSDDAVTTARFTWDGLRLTDADGQPL

SEQ ID NO: 39861 - protein, 501 aa, Rhodococcus erythropolis
MVEETSAPDYAAYADTNRLKLFSFTIAEKRAEYLWVLRAFDHARANYTVLLHAGAVAHILEKIGGSDPAADLSAAEVTPLLDQLHVWEILERSYDGTRAATLAEYRNRHFVYQFGQAGYQVYRSVEDVLAARLDSASLSRLALPDLLADMSELAEANRSSDGDLIFRKLKRLDSTLSDMADRAAHFYLTLGDLVRTTEITLQAFLTHKDALLTHMREFSSDLARYAPKLKEAIEHVEPTGVDRMIRLAAASDERVFVPITEREDDWAARWRGLTAWFVSAESGISESERLREGTMSAIAAVLALLRRVTETRRGGVSRESQLRHLAGWFAATPSEDAAHALFQAVFDLGRPRHLSMVHPDADIISHSRSWWEAPPVEIARTLAETGRPPSPGLPSKVARNDGSIRRLREEQLAAQRTRSAAAQSLASNGVYQRELNEQETEVLLSLLNAALTARVPVAGRVKSSTGSENGVKLTLSPSDGSTTIKTARGRMHLDGIEVSVR

SEQ ID NO: 39862 - protein, 480 aa, Rhodococcus erythropolis
MRAREITPLALDSYQRAARVILSNHLITSTYPDRIALPLLRRWATELRDDLLELFGYRLEVTETTARLFTVSDRLNPSAPARTASERTFDRTRYAYLAMCLAALGRAGNQITLSELADHVAADAGQVDGVELSTDRASDRDAFVDAVGWLGVRGAIALADGDANGWASNPEAGEALYDIDRSVVVALFRPPRALQHLHSIRGLLAVETSSASEDDGIPVDAKEIGRRVRRALVERPVVLAGELDQHELIALAQPKTASEVELLTGLVAERRAEGIAMIDPTGRLSDVRFPSTGTIAQVALLLAGEIADRVLDVDAPELPKLPIPHVSDDHLIEQLDAAIPEAGIFEDLADEDDDFVLPAGEPAEPPPPVTYPKIDDDWLADKVTELVDQFGRTFAAQWQADHNGLRKQALGLLQRLRLTHAVDGGVLVLPVLARYRDVVVSVRERDPQIDFAVDNSAPDPVDEFGPEPSPNGELSEVENV

SEQ ID NO: 39863 - protein, 1391 aa, Rhodococcus erythropolis
MSNARFRPTRAGIINLWDYRDQEFSFADGRLVLRGPNGSGKTKALEVLFPFVFDGRIEPRRLNPFAGEERTMKSNLLYRGQDSAHSYVWMEFCRGSLEDPESVTVGIGMRATRTNDKVTRWYFVADGRVGVDFSLIGNDDRPLTKKQLAEQLGSDSITDRPLDYRTAIDARMFGLGVQRYDQLINLILTLRRPQLAKNLDPKGLSQALTDGLRPLDDQLVLEAARSFSDMEEVGRALEGLAAADQAAQSFIGVYTKYLRQQSRGEIEQVSTRLAAVTRGVAAMDESSLAQTRSREARAAAEERFNQAEQALENARANVEALQRSSAYEGKQQLDDLAQAVATLKLSTEQQADKSRKAQAALAQRGDEADKAASSVKRAAEALSRAEDELQAAAEDAGIVWTPLPDGSRSDQITAAVRGHAEERDGDVRVVRTALATVEKAATERTRAENSSRRGQELLEASKAAVLEGEAAVELARSQCASGLRAWWTDHSSLFSAVGADTSLFEALDAALAEVGDEDAPALSAVLAEHTVAGTETLRERRREAEAEISASHASIAALKSERKAVSAEHDDAPPAFHARSDNRSELGGAPLWQLVRFADSVEPDVATGIESALQAANLLDGWVCPDEKIPEHVSEQFLTALPVKQRPKGRTLADVLEVEGNADVPDARVQDILASISLVEAPGDSDASVAIGVDGRFWQGVARGRHVKADAEYIGTTARARRREARITEIDAALEELAAAVDTAMALVAQTNEQLSRINSAAKELPKTGSILRALKTVTESAGALRTRSEATETAQRELDAAIADLAAKEKQLRATASQHRTPHIGRELDSLAAAIRHFEKQGELALRCRREHAKEVELERESRDRLDESRANAEEFAEEAAIAEESLLQQVQRLETLRDTLGASAEQIDLDLAKARAKIEECKVEQRAARKAYDAAVLQIGTAEGAYNTAVETLRHTLTETRSDAERLAPYARPDLLELLGVKEHLSWPASSAAWMSPDQLVYRIQNEDRSEDAAHPPVLPEDVDKLYRALEAATSAVRVTDGARKATRTALTSALQDFDAQLAAAGQDYRLQWDAPDGLTVVRVQDDQGYSSIGEFATRIHDARGDQEQLLTESERRILEDALLTGLAQQIHERTVDARELIAQMGTEMRERRMSSGNTIGVHWVLADNLDDSSRAISKLLDRDASALGVDELATLRAHFATQIRTARAAHPERSYPEILSSALDYRQWRVFSFTLISGEGKEDRLTVARHSALSGGEQSVSLHLPLFAAAHVMLDSADPHAPRLLALDEAFAGVDDNGRSELLGLSVQFDLDLFMTGYDLWITYADVPGCAHYDLAHSTAEQAVSAALLVWSNGELLAEHDGTDLARALGSPLRRRVPTPAEGALDYA

SEQ ID NO: 39864 - protein, 490 aa, Enterococcus cecorum
MENKILQASYLTAENVERYRAMMRIFYVRQKELRGILFRPDVLELMQQYYQPDYSMKELEQDIEQLVSWGNLTKQQIMVQPKSIEEYLNSNFQYHISPEGQLFEELAEKLINIQNEVRGELNQNDFMELYHKIQEFNALSDESQLLPSWQKVIESFEKISSNTTNYISYINNNAINTHLRLESFIIYKDQFVRYLQDFIIIVQNLYYKLLHEIERISQEKFVSVAKASYEKNQLRSFGQNEETEEEMLQRIKGQYQALLYWFKDTEEKASTYQNMMEQTQIMIGKITDFARYYGSELKQYRSRKKDYLKIAQWFMQESDLNQAHKMFAGIFGLQHTRHFYVPESLQSTSNRDDLRDLAPAVLSLGTRGRGARSERKSKPVKFDLELQKQQQKEYLEKQEAQKQQVLQYFDGNKLDLKAVKVMDKKTRGIILKWISRGYYSSNHLLQTEYGFMVRLHIQKEDSIVLKGEDGDLQMPHIVIERMERTESGNF

SEQ ID NO: 39865 - protein, 373 aa, Enterococcus cecorum
MNQETFSTCLNLLFENFWIIKTTQPEEYRLIKRYRKELDIELRKRFGLSLLVRPQFIQLFRRPFHLQEWMGIEDFKDVMDYVLLMHAMAYIEEQETNTYFLLNELIESIERDLPEDYHLEWTNYLHRKSLVRVLKKLIDLAILEVIQGEIELFEQNEDRNILYTITTQSRYLLGKTPNAFVKYEGFDDFWQEIQNNQLEDSNQALFTQLMCEPVLYRNAENEQDFIRLRNYQSVFARFVEEKTDYQFELTKDVAIFTLDKRDSSRDIFPSRKVLDEILVQLQTVLFDQEQQVDTYGVGLFTMSQWQLAVEKLKQDFQSFWSKEYKELKISELANRLLERAQEFQMVKVIDEVIYLQPVLTRMVAKMEDKRDEK

SEQ ID NO: 39866 - protein, 1352 aa, Enterococcus cecorum; identical to SEQ ID NO: 39270

SEQ ID NO: 39867 - protein, 413 aa, Enterococcus cecorum; identical to SEQ ID NO: 39271

SEQ ID NO: 39868 - protein, 490 aa, Enterococcus cecorum; identical to SEQ ID NO: 39268

SEQ ID NO: 39869 - protein, 373 aa, Enterococcus cecorum
MNQETFSTCLNLLFENFWIVKTTQPEEYRLIKRYRKELDIELRKRFGLSLLVRPQFIQLFRRPFHLQGWMGIEDFKDVMDYVLLMHAMAYIEEQETNTYFLLNELIESIERDLPEDYHLEWTNYLHRKSLVRVLKKLIDLAILEVIQGEIELFEQNEDRNILYTITTQSRYLLGKTPDAFVKYEGFDDFWQEIQNNQLEDSNQALFTQLMCEPVLYRNAENEQDFIRLRNYQSVFARFVEEKTDYQFELTKDVAMFTLDKRDSSRDIFPSRKVLDEILVQLQTVLFDQEQQVDTYGVGLFTMSQWQLAVEKLKQDFQSFWSKEYKELKISELANRLLERAQEFQMVKVIDEVIYLQPVLTRMVAKMEDKRDEK

SEQ ID NO: 39870 - protein, 1352 aa, Enterococcus cecorum
MKNKWQINRVGLQNFWYYQDQVFEFAQGKLLLRGSNGSGKSVTTQSLLPPLLDGITRANRLDSFGSTSRKIEDYLLGEEEVSGKDEATGYLFIEYKKTNSEEYFTSGMGLNFKRGGQLRKWFFAIDDHSRIGMDFNLYQSSVDGRIYLSRLQLKNLIVDGKHGKLFDDAKSYQRYINDRIFGFQSMEQYNDLIQLLIRLRAPKLSRDFKPSVIYEILQSSLPVLDSDTLLPLTQTIQNIDDNHDQLDTLLDETKQLSRFLRYYQQYQEELTAQIAENWLEKDAIVQDISAKLTQLEQSIDSLNQELSQKENQLKELKIRQPVLENTVSELKNHEGFQLIQRAKDLQDSFNKVRKRLEEIENQLHQKLEKKQKTSKKIDELQTTMYQTEKELNDYLESASQYIEDLSLEYIHQNICAKLFEKLTREDEQYLMKEVTKKEQFIQKIIQQMRNLSKLAIEEKEKSNELAELQIILDELKRDQSQWQQGFVDEVQKWKEQINAWRAKSPVMIADEVIQQVYYQLDQIQVTDEFVSEVFLLPLKSVFEQANEQILHHIQSTNVIIEQKESKLRGLQVEIETWKNERDPIPARSLIRQENRNHLNESQKQYAFFELIDFKSDITDEQKNILEGTLYSSGMLDALVAKEKLDLADDIQIVANPQLLCSTLADYCEVAADTPGELVELVAEFLQTILVDEGKEGCPSIYLDGHFELAGIYGKMVPNYQASFIGKLSRERYRQQKIAELTEEVNQLAKEISLLQQQLETYRLEQSRQREYLSLIPDTEQIREAMKQYRSVSEKINVRIEEIQRKNQIYLALKQKIADVNREIMLQTQKERITPKLESYEEALVFLKNYQADMQASFRQYDQLYVQKKHEKELSQQLADIHQDIAIIEQSNQQYLQEENTLQQQITENTAQQELQNISEIKQRINEKEEELTEVKDKIEETRNQKEQLNMQLALEKSQYLLQQENYEKNAPVNILWKKLIQTHLQIEDTERLQREAQKIARPKDFDLLFKNERKLEDEFRYLADNVREYQPKMSREVDVSTDLTQEDDSIQTFKNYSQRLIATFRLDQQSLGPNELLSFLENQIAIVKNTLKADDEKLFKQIIFDSVGKVLRALIERAFIWVEEIDQLLKSRKNSQGLKLSLRLKNIGAQNEHELGTKDLIALLRKDPITLNESDSRLLVEHFQSKIQDAKELIADESTEGNLSSAIAEVLDYRKWFTFELQFRRANENYPWRPLSDNQFNIFSGGEKAISMYLPLFAAVYARYEEASDYAPYIITLDEAFAGVDELNIEDLFATCEELGFNYIFNSQALYGEYASVSALATYELIRPQNAPVVSTIRYLWNGHQKQVSPIE

SEQ ID NO: 39871 - protein, 413 aa, Enterococcus cecorum
MSKLQAKKYFQEPIFVWLAQRLRKNYYHKKAFGSRVKLPNDVDLLPLYRFLGLGSVQSRSYQQLSIMQFEAALQQSKFELSLSEYVYLFDDTELIDKETEKQNYEASFQEFLQKLKPFSLDFEHLLSKKQLQEWFEKENLSAFQQVDIAFSQLPQDFTRLPFFAYQITGNPHAFDKSQPVGELFLQILSTKYLENIRQDSDFLAQAEIEQLLYQQVYLLKDDILNFVALHRISGYVNHQEVPVWRSIANSDMSWNASVRELLKVDELRPVNYPFVILVENSGVYSLLLERFPDLPLLCTSGQMKFAVWVALRKLTQQQKVQLYYAGDMDPEGLLMADKLSKVFLKRISFLAMDKEAFEQGKERKIYEMNRLKKMNQIENEGLKQLIPLIQQNQVCYQEGCIDYLIQQIEQILS

SEQ ID NO: 39872 - protein, 490 aa, Enterococcus cecorum; identical to SEQ ID NO: 39268

SEQ ID NO: 39873 - protein, 373 aa, Enterococcus cecorum
MNQETFSTCLNLLFENFWIIKTTQPEEYRLIKRYRKELDIELRKRFGLSLLVRPQFIQLFRRPFHLQEWMGIEDFKDVMDYVLLMHAMAYIEEQATNTYFLLNELIESIERDLPEDYHLEWTNYLHRKSLVRVLKKLIDLAILEVIQGEIELFEQNEDRNILYTITTQSRYLLGKTPNAFVKYEGFDDFWQEIQNNQLEDSNQALFTQLMCEPVLYRNAENEQDFIRLRNYQSVFARFVEEKTDYQFELTKDVAMFTLDKRDSSRDIFPSRKVLDEILVQLQTVLFDQEQQVDTYGVGLFTMSQWQLAVEKLKQDFQSFWSKEYKELKISELANRLLERAQEFQMVKVIDEVIYLQPVLTRMVAKMEDKRDEK

SEQ ID NO: 39874 - protein, 1352 aa, Enterococcus cecorum; identical to SEQ ID NO: 39270

SEQ ID NO: 39875 - protein, 413 aa, Enterococcus cecorum; identical to SEQ ID NO: 39271

SEQ ID NO: 39876 - protein, 490 aa, Enterococcus cecorum; identical to SEQ ID NO: 39268

SEQ ID NO: 39877 - protein, 373 aa, Enterococcus cecorum; identical to SEQ ID NO: 39269

SEQ ID NO: 39878 - protein, 1352 aa, Enterococcus cecorum; identical to SEQ ID NO: 39270

SEQ ID NO: 39879 - protein, 413 aa, Enterococcus cecorum
MSKLQAKKYFQEPIFVWLAQRLRKNYYHKKAFGSRVKLPNDVDLLPLYRFLGLGSVQSRSYQQLSIKQFEAALQQSKFELSLSEYVYLFDDTELIDKETEKQNYEASFQEFLQKLKPFSLDFEHLLSKKQLQEWFEKENLSAFQQVDIAFSQLPQDFTRLPFFAYQITGNPHTFDKSQPVGELFLQILSTKYLENIRQDSDFLAQAEIEQLLYQQVYLLKDDILNFVALHRISGYVNHQEVPVWRSIANSDMSWNASVRELLKVDELRPVNYPFVILVENSGVYSLLLERFPDLPLLCTSGQMKFAVWVALRKLTQQQKVQLYYAGDMDPEGLLMVDKLSKAFLKRISFLAMDKEAFEQGKERKIYEMNRLKKMNQIENEGLKQLIPLIQQNQVCYQEGCIDYLIQQIEQILS

SEQ ID NO: 39880 - protein, 496 aa, Geobacillus sp. T6; identical to SEQ ID NO: 38981

SEQ ID NO: 39881 - protein, 398 aa, Geobacillus sp. T6; identical to SEQ ID NO: 38982

SEQ ID NO: 39882 - protein, 1373 aa, Geobacillus sp. T6
MANPWVLHRAGLINFWYYDEQYFHFADGKLLLRGSNGAGKSVTMQSLIPVLLDGKKTPDRLDPFGSRARRMEDYLLGEKDVVNRDERTGYLFLEYKRKESDQYVTTGIGLRAKRQKSLDFWGFVLFDNRRIGYDLQLYKQEKTGEKIPLTKRELATALGAGGTVVETQKDYMELVNKHVFRFESLEAFQELIELLIQLRSPKLSKDFKPTVIYEILESSLPPLTDDELRHLSDTIENMDQAKQQLEQLERDERALKRLCDQYRLYNEYMIAEKATEYVKAVKQAEQLAAAQHRLHDEEEQARKTLDELDESITRLRREEDVLRSREIDLAGHEVFQQAEKYEQLKSERERLQERWERHEQTIAEKERLERQHRRRLDESEARLDDLERKLEDELAQLRADAEEGAFSLHETNEDDFHRHRQKQQEFSFAAWKQEADRHIEQLEELARLWRRHDDVKRRYEEASTEAGERRREMDEWRHQQQKWEELLEQEKERFEQAVLAWVEQGGIDVSEADIQAFLRQMGALYELYSLDDLKRPFVQAYYDAVGKKKDEKWRLEHDIRLLEEKRAEREAELRQWREQRDPEPERDEQTTAARLALEREGIPFVPFYAAVEFVDDVPDDVRERIESALSHAGLLDALIAARDVDVDCDRVLIPKPVHMVHTLADYLRPDADAPVSAERIDEVLRSIVITDAEQKGGMTIDETGRYSLGLVRGHAPRRARAMFIGRAARERWRLENIAALEAEIAAVGQEIDRLRREHQAVGAAIQALADWFVSFPSDRDVRTAFEEGQEARRQAESKEREWKRQEEKAALLAREWKQIKQQLHDESAELDLAFTLDGCEQAQLAMKSYVRHLHELEVLYRETRHTEAMIAQQRERLAALETEIDEAKGERNRIRDEKERISLEIVEMERTLAQMGADDIRAEIARIQERLAFLRQEIPRLVNERARTEQRLMRLVEEREKGAQREEFACQLAAMWERSFADEAALGLVDLDRSRSLLEQAREAKQRYETVLKETRSSLLARLNTVFFQESSNLTEYRATFERLAEQKESEWIAAAPDDEMAMKAADWREKQERHVIYLDYKGQRATPFAVLAEVERDIALQHEYMKEQDRELYEDVILKSVGRILRSRIQRAERWVSDMNKLMGGLDTSSGLVLSIQWKPKTAETEAELDTKELVRLLRIDSRLLKEEDLQRVTNHFRSKIARARELLEERGQGNTLHQIIKEVLDYRKWFAFTLYYEKTNEPKRELTNHRFYQFSGGEKAMAMYIPLFAAAYSRYQEAGDDAPYIISLDEAFAGVDENNIRNLFGLVEQLGFNYIMNSQALWGDYDTVPALSICELVRPRNASFVTVIHYRWNGRVKQLMVNDKEWETIET

SEQ ID NO: 39883 - protein, 406 aa, Geobacillus sp. T6
MSTAKEAAAFFRSEPGFRRLFIEMKHKYESLGRVGGAVSLEAFTDEEREAVAAFFGKDVSRVSLIAFEKQLGQTRFAGVGLVELLEQYFGAPLVSNKERRQAEEEERDRFFARLTEEHHWVESVRPQRFVQTAYETDRRSLEEALRLVSAALGRLPLPSYMRLPLFAQQVAGDPHAFDLSTLPGRLLLSALQATVPGDWDMASVESVNELLQSVGLLREDILNFVTCANILAETKDGPHPVFSAAWETNTALNMPLRDVLSLVRARPAHGGTVYIVENAGVFSTLLDTRAPLVSTNGQMNLATMKLLDLLAASGAKLYYSGDFDPEGLAMAERLQERYGQAVTLWRFSVEDYRAANPVVDLTPERLAKLASVTSTPLQPLKEEMAETKKAGYQEAIIGRLTEDING

SEQ ID NO: 39884 - protein, 495 aa, Bacillus vireti; identical to SEQ ID NO: 39442

SEQ ID NO: 39885 - protein, 386 aa, Bacillus vireti
MEQTQLFDEKAIQGMDILFHHYWILRAEQPEWYQLIREREKVLRRYLDEKFGLRLIVHQHFIKLEKIPVEPEGWMGIQDFQEPMDYAIFCCALAFLEGKAVDEQFLLSELCQEIQADYPGDFPLDWTLYTHRKSLIRAVKVLMEFQLIRTIDGDIGRFDQNEEQEVLYEASTYSRYFMRTYPDDFSSYQHWSELLKEDWKLNQEDERRKRVYRKLFFSPGLHRLDQQDPDFLYIRNYRNRLAEDIEKHSEYKLHVYKNTAFLSIAEPRQYQQVFPNSKASTDIILQLSKYIHGEPERFKANENGEILMTEGEFEQVVDDLRQQFGTGWAKYFRDMSTKGIRTELLRAMKDWMMAEVDSETSLIRIKSLTGVMTGEYPSDFQTGGTE

SEQ ID NO: 39886 - protein, 1369 aa, Bacillus vireti; identical to SEQ ID NO: 39444

SEQ ID NO: 39887 - protein, 431 aa, Bacillus vireti; identical to SEQ ID NO: 39445

SEQ ID NO: 39888 - protein, 496 aa, Geobacillus sp. 12AMOR1
MDATWLKPIVETKYLSTENAHRYRAILRYFYIQHERMRQYLFPEEVYAFLKQHEEFADYTEEELQQDLDQLVKWNNLIARQETSHVRTIEEFKKKRFRYQCSPYTVEIERMIRTLEQLGDSFGGSLEKTRFDRLYASLSRIEAIIASDFQEQPDEMHQVWEETFDYFKKIIQNSADYIAYLHGENLEERMTSESFLVYKEQFTAYLRDFIVALQKTSMQIEQLLEDLPEDGVRQFIGHVVDYERSIPRFADALPPRAVQIEEKWETWRSLCEWFLGRDGRESELSFLQYQTNEAIRRLTRVVQRLGERHHHFRSRKGDYLHLARWFSRLESIEEAHCLSAVVFGCFHTKHLVADAEATDNIYRDVWDEPPAEWVTKPRVRHYGEKKKPQAIEDKEWEKEEARLRYLEEKAREEAELKQFVTDGKIVLADLPEVTPYVRKTLLGWIAKAMGREGQAMKTENGWVVNVVNKEGTICLRAEDGELVMPNYEIHVLAGGE

SEQ ID NO: 39889 - protein, 398 aa, Geobacillus sp. 12AMOR1
METAFDDKAKEALAALFEQFWIIRDQEPDLYQLVREREHVLKKYVEEKFGYRLIVHRYFAKLEKIPADPEPWMGIESFQEPLDYALFCCLMAYLEGKAVEDKFLLSDVCEEIRAMYPGDLPVDWTNYAHRRALIRVLKTAEQIGLVRRMDGEIEAFAQHAEEEALYEVPVLARYFMRTYPKDLLQYESIDELLAEEWKASPQDYRRHRLYRKLFLSPAVHRTEGDEQDFYYLRNFRHRLRDDIEAHTPFRYELYKNAAMLTLPERQAPYTTFPDQKGTSEIILHFSALVRERLQDYPPDEYGRIRLTPEQFSAWLADCRRRYGAGWGKTYRDMSAAELVREVLAALCEWRMADIERATGMIVLYPLLGRVAGRYPDDFDAKEGEEHGESMDASSRGTD

SEQ ID NO: 39890 - protein, 1373 aa, Geobacillus sp. 12AMOR1
MANPWMLHRAGLINFWYYDEQYFHFADGKLLLRGSNGAGKSVTMQSLIPVLLDGKKTPDRLDPFGSRARRMEDYLLGEKDVVNRDERTGYLFLEYKRKASDQYVTTGIGLRAKRQKSLDFWGFVIFDNRRIGHHLTLYKKEKTGEKIPLTKRELAAALGAGGTVVDTQKEYMELVNKHVFRFESLESFQELIELLIQLRSPKLSKDFKPTVIYEILESSLPPLTDDELRHLSDTIENMDQAKQQLEQLERDERALKRLCDQYRLYNEYMIAEKAAEYVKAVKQAEQLAAEQQRLHDEEERARTMLDELEESITRLGREEDVLRAREIDLAGHEVFQQAEKYEQLKAEQQRLEERRKRHEQTIAEKERQERQHRRRLDEAEARLDDLERKLEDELEQLRMDADEGSFSLHETNEGDFHRHRQKEQEFLFAAWKQEADRHIERLEGLARLWRRHDEVKQRYEEASSEAGERQREMDEWRHQQRKWEELLEQEKERFEQAVLAWIGQGDVDISEADIQSFLQQMDALYEQYSLDDLKRPFVQAYYDAVGKKKDEKWRLEHDIRLLEEKRAEREAELRRWREQRDPEPERDEQTTAARLALEEKGIPFVPLYAAVEFVDDVPDDVRERIESALSHAGLLDALITAREIDVACDRVLIPKPVHMAHTLADYLRPDANAPVSMERIDEVLRSIVITDADQEGGMTIDETGRYSLGLVRGHAPRGSKAAFIGRAARERWRLENIAALEAEIAAMGQEIDRLRGAHEDVEAAIQALADWLASFPADRDVRTAFDEAQEARRQAESKEREWKRQEEKAALLAREWKQIKQQLRDESAELDLAFTLDGCEQAMLAMKSYVRHLHELEVLYRETRHTEAVIAQQREQLAVLEAEIDEAKGERNRLRDETERLALRIAEMERTLAQMGADDIRAEIARIQERLASLRREIPRLVNERARTEQQLMRLAEEREKEARREAFARELAAMWEKSFAREAALGLVDLDRSRSLLEQAKEAKQRYEAVLKETRSSLLARLNTVFFQESSNLTEYRASFEPLEEQTKPEWTAAAPDDEMAMKAADWREKQERHVIYLDYKGERATPFAVLAEVERDIVLQHEYMKEQDRELYEDVILKSVGRILRSRIQRAERWVNDMNKLMGGLDTSSGLVLSIQWKPKTAETEAELDTKELVRLLRLDPRLLREEDLQRVTNHFRSKIARARELLEERGQGSTLHQIIKEVLDYRKWFSFTLYYEKTNEPKRELTNHRFYQFSGGEKAMAMYIPLFAAAYSRYQEAGDDAPYIISLDEAFAGVDENNIRNLFGLVEQLGFNYIMNSQALWGDYDTVPALSICELVRPRNASFVTVIHYRWNGRVKQLMVNDKEWETIET

SEQ ID NO: 39891 - protein, 406 aa, Geobacillus sp. 12AMOR1; identical to SEQ ID NO: 39566

SEQ ID NO: 39892 - protein, 498 aa, Rhodococcus fascians
MGAANAFVEEDRLGLFSFAVAEKRSEYLAVLRAFDTARANYVVLLHSGDVADLIARSPGRHDALTTLDIAPLLDQLHAWGLLERSYDGTRAATLAEYRNRHFVYQFGQAGYKAYRAVEDVLGARLDDASLSRLVLPELLADMHELAEANRQADGDRIYRKLSRLDSTLSEMATRAAHFYLVLGDLVRTTEITPESFLAHKDALLTHMREFSSDLTRYAPKLAEAIALVESTGIEELVDRAAISDERVFLSVDERRADWTDRWAGLSHWFVAAESELSESERLREGTMSAIAAVLSLLRRVTETRKGGVSRESQLRHLAGWFAAAPTEDSAHALFHAVFGLGRPRHLSMVHPDADIIPMSRSWWEAPPVEISRTLAETGRTPTPGVPGRVQRNDGGIRRLREQQLESQRSRSAAAQSLASAGIHDRILNEQETEVLLSLLNAALTARVRVSGRTSDSSGSDSGVRLTLSDSDRSTIVRTSRGRLHLDRLALDVSEVARR

SEQ ID NO: 39893 - protein, 471 aa, Rhodococcus fascians
MRAREISSLALDSYQRAARVALSNHLVTATYPDRIALPLLRRWATELREDLLELFGYRFEVTETTARLFPVIDRLDDSQPARTPSERVFDRRRYAYLALALAALGRAGNQITLSELADHVATESSQVDGVELTTDRASDRDAFVDAIGWLATRGAISLADGDATGWANNPTAGEALYDIDRSVVVAMFRPPRAVQHLRSIRGLLAGSDAPIDPEDSDLGHIESGREADPKETLRAVRRALVEHPVVYLDDLDGDARTALTASRTVADVELLTGLVAERRAEGVALIDTSGRLSDHRFPSTGTIAQVALLIAGEISDRVVDPDAPALSTYPLPASDLLVEQLDDAIPGGGIFGDLADFGFPADPTTVENSAERTQYPLIEDSWLVSVVDDLVDRFGRTFAAQWQTDRDGLRIRAIALLHRLRLIHSVSGGVLVLPVIARYRDVMVNVRDRAPQDSLFGTEQAPSTDPSEVEA

SEQ ID NO: 39894 - protein, 1394 aa, Rhodococcus fascians
MTAHSNRFRPTRAGIVNLWDYRDQEFSFADGRLVLRGPNGSGKTKALEVLFPFVLDGRIEPRRLNPFAGEERTMKSNLLYRGQESAHSYVWMEFGRGSREDPESVTVGIGMRASRHNDKVTRWYFVADGRVGVDFSLLGSDDRPLTKKQLAEQLGSDALTDRPVDYRAAIDARMFGLGAQRYDQLINLILTLRRPQLAKNLDPKGLSQALTDGLRPLDEQLVLEAARSFSDMEEVGRALEGLAQADQAARNFVSVYSKYLRVQTRSDVEQVSRRLEAVTHATTAHFAAAALKDRRLLERAAAETRFDEAERALDQAVADRETLQRSSAYEGKQQLDDLAESAAKLEVSTAQQADRARKAQAELEQRTAEAARADSALRDSVAGVTRAEDELQTAAEDAGIVWTPLPGTARSDQISTALRGHAEERDGDVRAVREALTTVEKASTERARAEKAATKARELLEAAAAAVTEAEATVDLEKAQFASGLRAWWSSNSSLYSSAGITSAVFEALDAALAGIGDDDAPSLESVLAEQTSDGIDAIRARQAQARVDVAAREAEVKALRDELSLVRAEHDDAPPSFAARTDSRADLPGAPLWQLVRFADAVSSADAAGIESALQAANLLDGWIHPTADSPVDATSEQYLSPLPVAARPTGSTLASVLEPEPGTAVQESRILDVLNSIALQQDRNDSSDSSVSIGVDGRYWQGVQQGRHAKPDAEYIGATARARRREQRIAELGAAIDSATAELATATAAELAARELVQALNAAAKQLPRVSAIVKAQRAVTAAAGALRTSKDASAAADREFDQAIADLSAKEKQLRSVAVAHRTPHLGRDVDALAAAIRHFEHQGAAVIRKRSDHARETERAREATNRLEEATGLAEELAEEAAIADESYRQQLQRLELLSEKLGATAEQINTDLDNARDRIEKCRAEQRAARKADKEAGEAIGKAEGACNTALESLRAAVTETLGDAVRLAPYARKDLLHILGVHETYTWPASDSAWLTVEQILYRVQQAAGPDDDVPVLPPVVLALHSALDTATASVKVTDSSRKSTRTALTSALQEFDSQLAASGQDYRLQWDAPDGLTVVRVQDEQGYSSVGDFADRIGAARADQELLLTEQERRILEDALLTGLAQQIHERTVDARELIAQMSAEMKQRRMSSGNTIGVHWVLADNLDDGARAVSKLLDRDASALSQDDLAAMRAHFASEIRIARAAHPERSYPEILSATLDYRRWRVFAFTLISGDGNEDRLTVARHSALSGGEQSVSLHLPLFAAAHVMLSSADPHSPRLLALDEAFAGVDDNGRSELLGLSVQFDLDLFMTGYDLWITYADVPGCAHYDLAHSTAENTVSAALLVWENGELFAEHDGTDLAAALGSPLTRRVPTRTEGGLEFGR

SEQ ID NO: 39895 - protein, 416 aa, Rhodococcus fascians
MGWSLAGNSEWRGSVELAALLDAARKKLESNWLRVGGNIIVDLSDAPELWRLCSAISKSNSSLHSRARSTRLDLERFDAWLSHPLNGGIGLIDTLAGQAPLQDKKRIAADKAQVRADALDRAREALGGGTDREWIEHWIASLLNQDGTLGGRVAVDALGVATQVLALLPVDGMSLTELAELATGDTKALTGGGAAKLVLDALSLRENVPRPVDPVGVRALWETAGVSVDALSSRVLVLGYRVAETHTVARWLNDAADEGVPFPVTVDMLARGPLTNSSSTVFVCENVAVLAAAARSLGSNCASLICTDGQPSAAVHRLLAARAPGTTIEWRADFDWAGMHMVTRALTRYDAVPWRMDVDSYRRALDARNSEPLKGHPTDTPWDPELAAALRDSGRAVMEERLIPDLLADLRLGATD

SEQ ID NO: 39896 - protein, 497 aa, Bacillus pseudalcaliphilus
MEHYPTKRVKEATYLTAEKAWSYRAILRYFYIQHERMREFLFSEEIHAYLQRDYAFKKYEMEELHQDLDSLVRWGNLIARQELGKSKTIEEFKKKRFRYQCTPYTVEFERMIIQLEGIGESFGGSLEKKQFERLYQTFLRIERIIIGSHHESDEECAQVWNDALTYFRQITQNTSDYIAYINSEEVEERMQTEAFLIYKDQFTMYLRDFIIALQSTALQTQELLVSITNKELEAFFVQVTRHQQQTFRFNENKEGEGKEENPLQELYEKWSSITSWFLGNEHGESEFVMLELRTNEAIRRMTRIVQRLGERHQHFHSRKKDYMHLAKWFDGIDDIDLAHQLSSVVFGVFHSRHFQGNHVPSEDIYLDVWDEEPMIHETKPRIRNYREKTKAGAIINNQTKKQELKQRYLEEQKREKALIETYINNNEIDMEQLGKVEKSVRKVLLIWIGKAMGKKDRIIKTDFGREVEVVMSRNDNIEVVSEDGVLKMPKVIFRFLN

SEQ ID NO: 39897 - protein, 372 aa, Bacillus pseudalcaliphilus
MENFWVLRAVEPDVYQQVRHREHVIKRYVTEKLGFTLIIHQHFIKLEKIPVEPKQWMGIQAFQEPMDYAIFCCGLAFTERRSVDDQFLLSELTEDIADMYPGEFSLNWTNYQHRKSLVRALKQLVDLHLIKAVDGDIELFAMNEEQEVLYEVTVYARYFMRSYPDDLFQYETMDEILESEWQRHQGDERRKRVYRRLFLSPVIHRSEGEDSDFAYIRNYRNRLREDIEAHTPFRLEVFKNAAMLMLDEKKQRYTLFPDQKGVMDVVLHLSAILRENVQKDFINDLGEWKLMMSEWESLLEKLQKKYQRGWSKQYRDMTITQLRHELITYLVEWELMEYDRHSGVVVIKSALPRMVGEYPKDYQAREGEESVQ

SEQ ID NO: 39898 - protein, 1368 aa, Bacillus pseudalcaliphilus
MNRAGLLNFWYYDEEQFDFSDGKLLLRGSNGSGKSVTMQSFLPVLLDGKKSPDRLDPFGSKARRMEDYLLGEKEVVDRDERTGYLYIEYKKGNTDHYITTGIGLQAKRNKPMKFWGFVITDNRRIGEGIELFKYENSSDEKQKIPRSRVELETVIGEGGYIVQTQKEYMALVNKYIFGFDTLEAYEDLIKLLIQLRSPKLSKDFRPTVIYEILEAALPPLTEDDLRHLSDTIEQMDETRQQIEQLEREWHAIQSLNRAYDTYNQRRLAEQGQEWIKASKKLGAEQKLLTTFKEQETQLMTDIEALIGEQQVLKQKQAVNEKQKERLRSHKIWDLEKELQGEKDRRNEEELKRCKQEESLHKNEQKEHQLRLKNQESEMKAEQLEAEITDALEDMGHSASEASFQKHEMNVADYERKSETVFDYSIWNKEAKAHLEQLTVLVEQFREFDRVKELYESRNLDRAEEQKKLDQKRSEEKEWLHLFEEDKNKKRAELHEWVQEISWVHDQSEKLQQSSRLLEQLYESTQYEQVRVLYYDTYLAFQNEENQKLSRLTFERKQLEEQRQAKKEEWQVWKNQKDPEPPLAKESRQAREQLKKMGHSFMPFYAAVDFNDHISADVQSRIESVLMETGILNALVVDSEVQVEHDRVLTPTPVFFQQTLADFMKLDSDIASQNLREQVDAVLRSIVVTKSSRSTVVQDDGSYQIGLLQGHALPYEEVRYIGKTARARYRKEKMLELEQEIAVLTERIGQVAEQIGQVEQRLVDARGQMDGFPNDRDLQESYRQIKSTRFDIEQLKGYVEKLDHELQRIYISYQEKKYLINEQARHFNIEKKLSSYMLAKQEMANYKDQLSKLEKLHIKRIHELELLKRNKDELDEVKESVDELKGELNIADDLLIRLRQNIEKIEEQMRKEGAEDIRLQIRTVEEALTQIDHNLDRTKQELPKKENELEHVKEKITTQQHFCLFLEKAETAWATTFAMEYSYYFVWPKEGLEGLESRNIAEKAIKEYGHLVVEKDSSRVDSLLSSTFFSEGANLMEYRMSDYTKPAPLSDWMNEVPDEYRLYVEQWKSKASRRIVDLDYQGKRVSPYFVQDVIEQDREQREHLLNEQDQRLYEDILYKSVGSKLRSRIRRAKDWTRKMKSLMETRDTSSGLTFSIRWKPRTADLESELDTQDLVDLLMQDARLLKDEDLDRITGHFRSKIHNAKQLLEHKTQGQTLIQVLKEVLDYRKWFSFVLSYKRENEPRRELTNHAFYQFSGGEKAMAMYIPLFTACYSRYQEADEAAPYIISLDEAFAGVDENNIREMFEVVESLGFNYIMNSQVLWGDYDTVSSLSICELVRPKNADFVSVIQYEWDGASLLLSGEKEEILT

SEQ ID NO: 39899 - protein, 433 aa, Bacillus pseudalcaliphilus
MEEAYVFFHRYPVYRRLFHLFKDKYQSLGKIAGTVKVNHFSAEDLEELASFLAISSKELELKEKISLLTFQKQLARTRFGEIGLLELLEAFFHEKILTKKELDLQKQQAIEKTFHELRTHFSELSFWLWYVQEKTSDTYWIHRLLNEKKGIFHIYVKQLHDAYVGLSAEPERIAIFSQRVTGNPHAFDHNTELGKLFLHVLALDEKLKVGEAREVRLPTNTESINQLLETYGLFRDDITNYVTAVNLMAETIEGIEPVWQAAALRNLPAVLNIPIRELTSLEKAYPLSELDEKKVWIVENSGVFSTLLDQFPKAPLICTHGHFKLASLKLIDLLVRNGCKLMYAGDFDPEGLLMLQRLQERYGGQVKPWRMDVNHYVESNPRVKLSEERLSKLKHLHEPLQALKHEMQKRQKAGYQEAIMSAYLQDLSIYERG

SEQ ID NO: 39900 - protein, 493 aa, Clostridium carboxidivorans P7; identical to SEQ ID NO: 38786

SEQ ID NO: 39901 - protein, 376 aa, Clostridium carboxidivorans P7; identical to SEQ ID NO: 38848

SEQ ID NO: 39902 - protein, 1350 aa, Clostridium carboxidivorans P7; identical to SEQ ID NO: 38788

SEQ ID NO: 39903 - protein, 433 aa, Clostridium carboxidivorans P7; identical to SEQ ID NO: 38789

SEQ ID NO: 39904 - protein, 496 aa, Bacillus coagulans; identical to SEQ ID NO: 39661

SEQ ID NO: 39905 - protein, 387 aa, Bacillus coagulans; identical to SEQ ID NO: 38821

SEQ ID NO: 39906 - protein, 1371 aa, Bacillus coagulans; identical to SEQ ID NO: 39787

SEQ ID NO: 39907 - protein, 432 aa, Bacillus coagulans; identical to SEQ ID NO: 38823

SEQ ID NO: 39908 - protein, 507 aa, Rhodococcus sp. RD6.2
MSESGPAPNDEREGGLHQTDDPFVTADRLRMFAFATADKRTDYVTVLRAFDHARANYVVLLHAGDVADTLTRMGTRAMTAAEITPLLDQLHQWGVLERSYDGSRAATLAEYRNRHFVYQFSRLGYQAFRAVRDVLALRLDEAALSRLALPDLLSDLQQLAEANRRGDGELIYRTLRRLDSTLSDMATRASQFYLTLGDLVRTTEITPEAFLVRKDALLTHMREFSSDLARYAPKLASAISDVEESGVRDLLGRAAIADERLFLTVTEREADWTQRWSGLTQWFVASSDGPSESERLREGTMAAISAVLALLRRVTETRRGGVSRESQLRHLAGWFAGAPTEDAAHALFQAVFDLGRPRHLSTVHPDADLIPDSRSWWDAPPVEISRTLAETGKPAAAGAPGRVQRNEASIRRLRDAQLAAQRARAEAARSLAAGGAYDRVLGEEETDVLLGLLTAALTARVPVSGVVRDSTGSENGVRLTLSPHEESTTVETARGRLHLDRLRVSVQ

SEQ ID NO: 39909 - protein, 456 aa, Rhodococcus sp. RD6.2
MRAREISPLMLESYQRAARVILANHLVTTTYPDPLALPLLRRWTTELRDDLLELFGYRLEVTETTARLFTAADRLDPTAPATSGDRAFDRRRYAYLALALAALGRAGNQITLSELADHVAAEATQVPTVDLSTERFTDRSALVDAIGWLTARGAIRLADGDATGWASNPDAGEALYDIDRSVVIALFRPPRALQHLTSVRGLLTVVDETATTRETARRVRRALVQHPVVYADDLDEDERLQLALPRTAADVAMLTGLVVERRAEGIALIDQSGRLSDIRFPSTGTIAQVALLLAGEIADRVQDPDAPDPMRIPLPNNRTDDLVAQLDSAIPAAGLLLELADDSPESRPEARVDAPQETQATYPLVEDSWIDAVVTELGLRFGRTFAAQWQADPAGLRRRSVDLLDAQRLVRKVEGGVLVLPALARYRGVVVTVREREPQLDLSTELVNSDSSDPEE

SEQ ID NO: 39910 - protein, 1384 aa, Rhodococcus sp. RD6.2
MASARFRPTRAGIVNLWDYRDQEFSFADGRLVLRGPNGSGKTKALEVLFPFVLDGRIEPRRLNPFAGEERTMKSNLLYRGDESAHSYVWMEFARGNPDDPEAVTVGIGMRASRQNDKVTRWHFVADGRVGVDFSLIGAGDQPLTKKQLAEQIGGDAITDRPVDHRAAIDARLFGLGAQRYDQLITLILTLRRPQLAKNLDPKGLSQALTDGLRPVDDQLVLEAARSFSDMEEVGRALEGLTTADQATQDFVSVYTKYLRQQARTDVEQVARRFESVEAATAAVADAVAAQSNRQEERAAAEERLTAAERALDLARAELETLQRSSAYEGKQQLDDLGAVVADLRRSTDQQADKSVKAQATLAQRAEEAAQSLARVTRATEALARAEADLQEAAGDAGITWAALPDTARGDQITSAVRGHAEERSGDVRAVREALTVVERASAERVRADRAADRGREQLDTAAAAVKEAQAAAALARTECQGSLRRWWSTHSSLYARVGVSSAMFVAMHDAVSTVGTDDAPGFPEILADHTTEPLDTLRGRRRDAEVAAERSAAAAAEFTADRVRVAAEHDDAPPAHPARMGSRSGLAGAPLWRLVRFADDVDAATAARIEAALEAANLLDAWIPDGDVPQAESELFLMALPSDERPRGRTLADVLIVEPDAGVSENRVADLLASIALADDATTATIAIGMDGRFRQGVQVGVHTKSDAEFIGATARQRRRELRLAELDAAIEVAESERAAARAEQAAAADLLVELTAAGKSLPRPTGVLTALRGVAEAAGALRTRDEAASTAQRELDQAIAELSAQERTLREASVRHRIADPVRGIDALSAAIRHFEACGDHVVRCRRDREKDIERSREADDRHAEARDVAEEFAEESAAAQENLEQQVQRLATLREAIGAGADDIEADIDRARARIDAATTEQRAARKAGDGAVEAIGKAAGAYGAAVESLRAALTETRSDAGRLAPYAQRDLLDLLGVTDAHTWPASDAAWLTTEQLVYRIENEPGEPAPVVPDEVAALHAAIDAATTAVKVSEAAGKSTRSALTSALQEFDARLAAAGQDYRLRWDAADGVTTASVQHDQGQSSIADFAALIGRARDDQQQLLTDSERRILEDALLTGLAQQIHERTVDARDLITQMAAEMRGRRMSSGNTIGVHWVLADNLDDGSRAVSKLLDRDASALGPDELATIRAHFATRIRTLRAAHPERAYPEILTEALDYRRWRVFSFTLIGGDGSEDKLTVARHGALSGGEQSVSLHLPLFAAAHVMLSSADPHAPRLLGLDEAFAGVDDNGRSELLGMSVQFDLDLFMTGYDLWVTYGGVPGCAHYDLSHSTPEHSVSATLMVWDGGMLMQEHDGSDLAKALGSPGRRKTLEPGGLEFAEV

SEQ ID NO: 39911 - protein, 510 aa, Bacillus cereus
MFDISIIQTPIKEATYLNTDKTRVYRPIIKYCYTRYLQANRFVYPHEVLEFLQSKGGFTSYTLDDVKRDLESLEKWGNLVARQDVRGPEKLEDVLKKRYQYSVSEISIGFEQFLEKLDSKRSNITGSTDSSLVSRLLETTYALKDYAIPKVKDMKVNQEIYELWSDIFYRFEKLQFDSVSYLSHIDYQKIQTEVAKGEWAFLHYKDDFITYLQDFVLSLHRTVDLIISVFKEIEVTKLEKVILAAAEHKCYRDRFIFENVSVEEQIQEFEDSWLYMMQWFSSDSSNHNGGYESLLRQTQETIDQIVKFIRQIGEKYRQVKNRQHEYLHAAVLFEKMNKSNMDECHEMFAYLFGVQNTKHIKAHSISTDQQNNDLWEIKGDKLTLLSKYRERKERKKRKAVQENLEERYKLLKEYEKEREIKQQYIVRYLSSKVIRVRDLGPVPACIREEILEWLSRSSFEFSEKGILRYGFTDDGRTFEAIAVTENRIKLVCDDGTLEMEDLEFRFKEVR

SEQ ID NO: 39912 - protein, 400 aa, Bacillus cereus
MEEKNGITDHMKELVEYLFEYMFIDRKKNRDIYYEIRRLQKQITYYVSENFKYNLLVHPDFIKLEKVTTSPKPWMGIERFKGPRDYVILCCFMVFLEQQITNEFITEDLTKAIKNYFPGEEGLQWEGNGGYQNRLSLIRVVRALEEFGIIVILDQNIDDFKDDDKKQVLFQKQNQSHYFMRNLPFDITVCQSPRSLKLKRVLEKELTGILPKHELNRRLFIEPSIRKQDLDEGLYDYLKRNIEQVESFVEETSSYQLEFYKTGAMLTRTETYKPLTTFPNLKMESHLTMQLSFYVRELIKEKRVHKELEGEIQMTRSEFLQLIDSLKERNGNEWTASYRQMSAKQICKEFIPFLKSWGFCNELQDRENLVLYDSLGRVSGTYDMEMKQTEWESGGVEKTS

SEQ ID NO: 39913 - protein, 1400 aa, Bacillus cereus
MTKDTRWRPNQAGFLNFWFFKDDIFEFINGKLHLMGENMSGKSVTTQSLITILLDGKKDATRLDTFGSRSRTLRDTFLGSTGDKDKQERHNQDKLGYTYLEYKRGIHDEYITTGMGLQAKAGVQDLDYWFFIILDNSRIGKRPQDIKLYKEERIDGYVKKIPLSKEELREQLGEGGKIYTTNAEYMKAVNDHLFQFREIQVFEHLIKLLIALRSNKLGGGQKPKMVYEILTNSLSSLSSEELSPLSNTIESIDTIERELTELQFAYDYIEVITSVYEAYHEVYLAEVANGYLKAENRLQNLYERQRYNSNQLSITQSNVVKLTEEISHLEAKEKTLNERIEALRSKEAKDLSIQKGRLENQKVDITRLMKPKQEQKKTKETKIKEINQLFEATSTNSLKWINRMKDELSEMERCALESSFKQHSRHAGHFITRYEYFDYDFFLWNQDIQSYQTFIHDIQKQIFELEKLGHKKSVLTEEKNEATVLLNQKQEELRMMRKKLDELKKTFSNEMDEWLEDNEFLVMNEEEKEQLLKKLYHFPYSVTERELTEMIEQQYTDVKRKINDEIHQVDRLEGEIRQKQSSVEEELNEWIVGKMPKPFLSKEKESVLEAIKEWNIPHILFYDAVEFQDGLSEKEMASIESALEDTGLLTTVIADPKWDIQLSEHTKVPNKHGTPFMFNLTQYLKPSKKSGKLAVWVEELLSHVGISKDEECFILSNGNFKNGIIKGQASLKESPQYLGERVQIHYKKQIMSSLENMLDEISYELEKLQQEKSDLFLQLDLLDDEYHNLPDSNEILELYQASNGNEQSINDIFETKLDSVRKRLTTLQNEMDTMTRRIQVEADFTEIPLTSEAFLKVRDEMHCYDRHLNQIKMTYIELKSIQQSMDSYNTQKQSLLEDVDNLSAEISSHEKELQKIEVQISVIMEEMEHSGLLDNERQILEYMKELQSIPDKKDYLRKNLLKEESKSLQLSEKISFMLKEQGVREVIRDAWEKYFSSLFTLGENDTLRRVAEEYLEIARNYLVGKEDLRSLCTRSEKELLNEFYKSRQAIAQYSPILDEYVSNIEDNLEIPSELEELNLETEWNNLISLRKYKLVLDIQINGIIQRREPRYVLSVLKERMDLQRANLSDRDKRMYEEILLGSIGRTIKRKIVQTKEWVKNLNEIMMNINTGGGLQFGIKWVPLKATTEEELNTREIVRLLEIDAPLLKPEDREKLIDHFRSKIEIRKLEQGLDQYTGFDLKETFKEILDYRNWFEFQLISKYVNEEEFTLVDQDKFGKFSGGGRALALYIPILAAVSSCYGEAHYDSPRIISMDEVWAGIDNKNINEMYKLLEELEFDFISNSQFVSGCSPALKGLSIYELIRPKNSKEINFGRYIWNGRYKEYVENSLLSEDYPGSANM

SEQ ID NO: 39914 - protein, 453 aa, Bacillus cereus
MYSQIQETVNYFRSKGGYDRLFYLFREEVIRYGRVKGVVILKNATDQEKECLDGIMPNINFKDTDIKVRLLTFEKRLKEKTVYDSINLKDLLECYFSQKIVSKKEVDKRKRGRKFQFIEEVSKYTSHPYYQYYIDSIKRKGRGYKRFMNLYEESTTTLREYLSHLSQSIRILPLSKMTHVAMFAAKMTKNPHAYDIQTSLGDLFFDMLTIAYEKETTNTQLSSKLSIEDINDILNHCNLIRDDISSDVIFTGLYAKDIRGLPIEYIDLATKHDTVLKLPLCELIKIEKFYPMESFKVVYAFENPILYKVFIESVKEEVGCYPPSVCTSGHFSYALWKFFDKLIPYNSTVIIKTNFDMDPEGLKMNDKLYSRYGEVIQPIAYSKELHQEQQSDKKINLNRLKQLDNLTHGVLKEMGELLKETCQASYQENFLEACLEDAISQFKRRVRIISKKI

SEQ ID NO: 39915 - protein, 523 aa, Tetrasphaera jenkinsii Ben 74
MDPEETLAGLQGPALPTSPPVDRQRLEALRYAVNEESGQYIAIMRVFTTGLAGLLSDQSAVDVREALTAQGVSLDLDTVDARLSYLVEHGNIARSPRETEARTLADYLRNRARYQLTQRGELVHRQVEELLGHSESAREVSSQMLGGILAGLTALAALDATHLEGVEPDRLARDITTVFAQFDELVHSTREFYTYLTQVLSRFDLDRSEFQLFKVALIDYLQRFVDEISRHMPQIADILATLDPAVPDLVARANAGERLLDTGGRLARRSAGLDPLDWRSLRAWFTGEGGRGSDADGVRNLATSAMRSLLTNLRRIATSAEREHGRYADLVRVARWFDDADDDTAHALFASVFGLYSARHLGFISDDPEQPASPMTSWWTGPRADVPVMLREQGERTIAGRSGRREDFAVAKAARLAERTRAERDRAAAFAEIVAHEGRLGRVRVSDLARDLLLELYAGALAAAIDGDAPVVAVPGTAAVLFVHETPGDGTAVTSPAGRLTLVGRTLEVRAEQAVRTDHKVAQ

SEQ ID NO: 39916 - protein, 407 aa, Tetrasphaera jenkinsii Ben 74
MTTTADRIAATADPQDLAERRRAARALLKRPLLASGSTDPDDLRLVRRHQSELIQLFADGLGYRLQVDPTSARLFKTGLGPDSTRPLRRRSGASFTPRAYALLCLTIAALTRARTQLLVDELVAQVRAAAVDAGLDVDLDAIGDRRALHAAIVVLVDLGVLRERDGDLEHWADQRTQSLLDVRRDLLSLLVAAPLTAASSAADLLTLAALPSAVGGARIATRRALLERPLLTTDDLTAEHAEWWRRNRNRERDWYETHFGLELELRAEGAAVIDPDDDLSDERFPGTDKTRQLALLVLEALADEVHRTAPGGAGTAWRGLPLTTVERCAQDVHARWHDRLRRDQREDPDRALREALGVLARFGLIRREDGAVLVHAAATRYAPRVALLAQSATGETSLFDDLTDGED

SEQ ID NO: 39917 - protein, 1353 aa, Tetrasphaera jenkinsii Ben 74
MAIDGSRFRMRRAGVLNVWQYDEQVFDFADGRLLLRGANGAGKSKTMEMLLPFVIDGDKSRLTSSGRHHTSLLWLLLDGYDGSARTGYVWVEFGRDNADGTTDVITCGVGLRATEKARAATSWFFTTPRRVGHDLALENAAGPLSQPALAAALEDESGASRVFDNPRHYREHVGALLFGLPLDQYESLLRLLYWLRQPQVGEDIDPRRLAEQLVNALPTLDGDTLSAAGTTFDELEAFGEDIDRRERAAAALATFVETYAAYARSVVTDRTRVALEAAKAVGAARRRLRRSEGSLTEVTEGLSAAAMAIDAAEQAQREAASRIAALEQSPEAQARTDLAQSAELVQTLEKAASDLRAVAEKAHVRAQASAREASAASDRLMDRAGELHDATERAEAALAACGAEAAPGPTAAQVLRRPDWRDADAASAVESAVAHAGQTHAEWAETGARAAGQVGAAITVVEEARGTHVRAQETTRRAEAGVDRAEAAETAALADLETARTRTQTRERELTDALQTWQAAPGAVSVVLPTLDADGLAHLESIVAEAAAPDQERLATQVAEASARHTQIVAALARLTSERAAIEAERDPAPAVPAWLRDDRRNLPGAPLWLLVDFRSEVEAQVRAAVEAALEGSGLLDAWVTPDGTLLDPARHDVVLTANPVPVAADASLLAILGADPSAHEAVPARVVTDLLGSIAFASAGAGQHGARDEVAAVVAADGSWRLGPARGRTAKPVAQYVGASARAQERARRLAELDERIRQEEQARDTAKQAAAEAQQALTALMAWLRARPRHDAVLTAWATEAARTAVAERASAEAMGARDLARDARSQEAAALSDLTATAARHGLPITHEGLAARRELVARAGKDLDRVGSARRALDTALDLWRGVVARATDDAAEADLGGTRARIARSEAASRRAAHNELVAARGKSVEDLERRLAEQRTLRQEAVEAQRRHRGEHDHLLGRQGQLRQEADGHRAALAEAEPARDAAYDAVRALHAVPGLISAADVGADPARPPTERDEITSLHERAAAGTQAGANAVLAALTGLQTGPASIVEPRLAELDGTFAALGRDESAGDIALTELANRLAAQVAADRELLTDRERHLFETHVLGQLGDTLRGVRRQADELVAAMNVQLGRVSTSQGIRVRLRWRLRDDIPSDARRAVQLLGEASGALLPGERTELRDALHRLIDTSRVEAPEESYTEHLTRALDYRQWFAFTVQYQRPESGDWRDLHRKSPLSQGEQKVLCYLPLFAAAAAHFTSLAGAAPHAPRFVLLDDAFPKVDARTHPLLFGLLVDLDLDFVVTSERLWGTHATVPSLAIYEALRNPAERGIAQYEHRWDGRQLTAVGARA

SEQ ID NO: 39918 - protein, 408 aa, Tetrasphaera jenkinsii Ben 74
MPDGWWTAPALERSWLAVADRLERAGLVAQGRVRLRDLHRDEQQALSGLLGRSIVTSSVEVDLASLDDRLRSRAGIDLIDAAATVTGRVLVDRPARRADNRERHEAPTRAFAAWHQAHPDAGLPPLAEWLDGLRRDGLLGRRGGDPAALVTAALDVLAHRAEHLTGVGLSPPIARTELAARLFGDAHALDDDRLLTRAILRAVPDGGEGTTQRASWERLGVLSDRISSTCLTFGLRWAAGAAGARASAYTLERAVLHLTWRDLDEGLEPAPGQTVLVCENPRVLEAAAEIGVTVGVVCTSGRANLATIELLDRIQSAGGQLLYHGDFDWAGVAMANHLRARCGVQPWRMDVDDYLAAPASLALKGSRVDASWDPELAAAMAHRGRAVHEEALLPALLKGVHSKPWSTP

SEQ ID NO: 39919 - protein, 443 aa, Lactobacillus ginsenosidimutans
MADYTADQLDNDLNLLTEWGNLQAQQEMTHPKTIEEYRNKHFRYQITTVGIAIEEFIQSLPSEDENSGDLDSHLFERLLEVLNKLNSFDNQKLLDGWEDLHDRFDKIRRNATGYVAYLTSSKVEDLMQTTEFLVYKLKFIEYLREFIRKMQQTSVAIETALNGVSEDTIQKIIKLQTEHDEKKPTFTKQSSQETAGRITETWKHIRDWFIDQEGRDSEYTNLIAQTNEAMSRVTSIIQTITESNQQHRSRSKDYLQIASWYQSIVDSASDEEAKLSDANKLSSLLFSFGKTRHVQAAAMNVTNQLDELWKMEVPNAELTSKSRKNRARVVNKPFVKDPEKQAQVRLAYQKKQQETRAMWNKYLEGGSLQLSNIHELPIEMRHDLIRYFSSAMVASDHRVATKLGWVFEVKIDRKRLVTVQFSDGYLTMPDTEFKIVGGQEIEK

SEQ ID NO: 39920 - protein, 366 aa, Lactobacillus ginsenosidimutans
MKNDEDIRICLDALLENRVILDNKQSELFRLIKKNTSDLRKLCLNDLGMRLIVNAHFIKLEKIPEYPQSFMGIENFDEVEDYVMFACVMSFLEETGPDTPFLLPDLTDNLKRNMPVKIDWTEFQIRKRLVRVIKQLVELSVINVLDGNYDEFDRNENEEALFTATNYSRYLLRRFPENLQNLESWEQLKFSPDEHATRIKVIQSLFISPGICRTEETEELFRYMRNQQKFLIDYFERYSYYDFELSKDLGLLVSHNRRAQIKYIPDNSSAGDLLMIVGDKLRDGQFNTDEYGQIHLGISQWQSIVSEAVIDNQELLSKTYREKSLELLAKELLAQTNQTGLTKLNDTGIVVTPIFARLSGEFIKND

SEQ ID NO: 39921 - protein, 1358 aa, Lactobacillus ginsenosidimutans
MENQYVLNRLGLINFWYYQDQIFELSDGHLLLRGSNGAGKSVTMQSLMPVLLDGNTEASRLDSFGSRDRKMLDYLLGEKDVSGKDEAVGYLWAEYKLGDKYITTGIGMHGRRNSTNLDRWYFVIEDGRRIGADYDFSLLTNETENSATTLSKKQLKNQLVQGGNVFDKAKDYAKYVSNHIFGFNSIEDFEDTISLLIQLRNPKLNKDFKPDDLENILASSLPSLTDDNVQASAQTLDQIERANSNIQDSKNQEKALQPLLRAFNKYRRDQLLTLAHTSKKHSDAYLSLNKRLNDVENEKQNNLQLQDELTQSVDNLEIELTAQGDLRNKLSSNKLFGLAEKETKLEKDLENISKDYENKHNQVLQNQVNIDTQQDKQNGLNYKKAETENELKKLSEKMQNIADKLSFTIQHQLIISSTSEKTDIDFKHWITEAHEYQSNLRAIVNLFEKQSRVEENIDRLDRSLSVENDKLSKMQLEQRDWESSYNEYLFNLKQALMDYRDSLSFEITHEVIGTVQSNLDKIYTSEVSDFSVAVKPIIDEFTNKSAELKIQEKEVTAEIDQIDQEIGDLKAEQENIRSQKYPVPERLSRREKARDQQSDGVPFYQLLDWNPDISADVAGKLEGALLESGILDGLVTQDGKIVVGDSVLVAEPLLMQQTLADYLKADLDSDVNIEKSQITELLNSIAVDDTNHDVQTMITVDGEFRVGIISGKAQPDYVSQFIGATAQKKYRESQIEKIQGEINQKLSDRELTTKRLEETRQEIVRVVDDQAKLPTDDDLHQAHHQVEVCDHNIELQRNTVSQASVALEAEKESSQRIRLGINQKTQNIKIAKNEEAFVQATQSMESYLSGINEWKQFANNINNQNERINDVIERLAELENDLVERKTELTTLYEKKQQINFALASNKKLQGAAGDLADIRKQIKDIDDRIESIKHQQKGNNKRLHELAGKVGSYESDINLFSTQLEFEKPFSALLIQTFDKELSIEVGDDESDQDTLRTELLDEHMPEADKLSHDIEIVNRQFNTQSNDLLDFGPKQRSRSTLTEPDWINDFSDYQAEIDNWRRDLNIQQEVLVELSGVDSSVTQLDEKLKQQISINQEAMTQGEEELFRTIIFDSLGKIIRQRINKAQDWVDKINLVLRQQENNSNLKLNIKWEIKPSDELSDTDNQEGVNLLKKDPKALTDADLNKIKRFLNSKINARRAEYEDEGKSVQMTTVLRDALDYREWFQFRMFYTQNGKNKRQLTRAVFNRFSGGEKAITMYTPLFVAMSARYDNASDFAPRIITLDEAFAGIDESNISQLFKTINQLGFNYIMNSQQLQAEYSTVPSLNTYELLRAKGEAGDLVTTIKIHWNGKNREE

SEQ ID NO: 39922 - protein, 405 aa, Lactobacillus ginsenosidimutans
MAKEALDSAIKYFKSSPVFIKLMKEMAGKYYSYGEFKGTIDKELLGNNASLLAFLGVNKFRWEKTKRFKVSDFEEALEHSRFAGISIFELVQGVIGKKLVTKQSIDEENERAFQRFLTSVQVSNPKVCSILSESKIKSYYTRDAILDDFIQVEKCLNNIPAQPTRLPVFAFLILKNPHGLDKTTTVGKMFLECIKLLRPKLTDGNEIYLSVNIVKDDILNFVTVQNIDANDDLFHAASSQHMVWNVPLMKLLELDSAFPSKGNKVFLIENSSVYAIIVDKLKDIPIIMTSGQFKYSTWKLLSLLPKNVEIYHSSDLDPAGLIMSNNLMEKFGDRVHLFGMSSEIYLKKVDSGVKLTNENLSKVKGINNPTLQSLKQNLITHHKAVYQESEIEELIDEIQIISETD

SEQ ID NO: 39923 - protein, 505 aa, Thauera humireducens
MPYSDTSTDLFRHVSADKAGIYRNIMASFAAAKRQFRLHMRPDEVLAEARWSDGVPKLEEVQSALAQLTEWGNLEAQPDTARVASISDFYRARFLYRLSHGGEAVETALTAFAEALGRRAELQTVALEDIASRLKTLLALADAPALDAAKLHETLRDLVRVFESLADNAQAFMAGMARSIELQQADATAVVAYKQRLIDYLERFIGDLVGRSGAIAQHIALLHPRIDPLLWAAAQREARDAAPGDEQAQADALSQRQQAWRERWRGLRGWFVSTHHEPPQAEVLRSKARAAIPQLLAAVAALNERRSGRSDRSADFRVLAGWFATCGSDDDAHRLGRAAFALNPARHFSLNPGAGHELPATTPWAEAPPLSIHPRLREYGEAAPRGPLPKVRERSEERALLARQLREEHLQVEAARVRLATGRTTRLSEIGHLDPHAFSLFLSLLGEALTAQSSPDDVVERQTGDGLLRVRLEPLEAHTRAEVVTDAGVFAGRDHRITITATQAP

SEQ ID NO: 39924 - protein, 412 aa, Thauera humireducens
MTTDSTAIGQQQALHQREEFTAALRALLMTPLMTPAHAEFAAVRRHADALREWFVREAGWPLHIERDAARLYKRPADVHDATRGLPGYERRRYVLLCLACAVLERADPQITLRVLGDRLLALAADPALAALGFSFTLQAQHERRELVAVCRTLLELGVLHRVAGDEEGFVHGGSEGSDSLHDALYDVQRRVLAGVLAASRGPSTWPADDAPDTFEARLAALVAELVPDSDEGRRTALRHHLARRLLDDPVIYLDRLDADQRAYFMNQRGTMATRLCDATGLVTEQRAEGLALTDEDGELTDVAMPAEGTEAHVTLLVAEFLTARANSRASTDEVAAFIAGARQRFGKFWRKSAREAGSEHELAATALERLQRLQLLERDGAEVRPLPALARFAVGEAELRPAAPATTGTLFD

SEQ ID NO: 39925 - protein, 1387 aa, Thauera humireducens
MDTPDTLLDTPSDLATADARPALPQPTLARWQPLRLGLVELFHYDSEEFWFRDGHLLLRGNNGTGKSKVLSLTLPFLFDAQLKPSRIEPDGDAGKKMAWNLLLGKLDRRIGYAWIEFGRIADDGEPDYLTLGCGLSAAAARAQVDAWYFVLERRRIGEDLWLTSPARTVLTRERLKEALHEHGQVFDTAAAYRRAVDERLFQLGAVRYAALMDTLVQLRQPQLSKKPDEGNLSDALTEALPPLSAELLTDVADALNQLEEYRRELQDYEALAKAVGQFNQRYQRYAAINARRQARGLRSAQSGYDTASRNLNEARTELQTSQHAEARAKGRLDAAEAALLAGRTRLDQLQSDPGMKDANRLNQAERDSESRAADLVDATRMSDEATARLERERRALDERGTRRTQAEEALATAREGVAAAALASGIGEPWRDNPLAALPAAELATLGDLPLDTALQDLRQATQVRREQLALVQRRVAEVAQAEATHASRQQARDERQDEAEAAAARRSVADAAVETEGSRVVEAWQAHFANLQVLQVAEPPLSALATWVANLQGDNPARAALSSAQQRAADELAGQRAAQLAAQKTLHDEQATLRAEHERLAQGEDATPPPPYTRGTEARRQRAGAPLWQLVDFHEHADAAQRAGLEAALEAAGLLDAWVTPDGRLQAADGAPPLHDTQWLERPRCDASLAAWLTPSAAAATPAIDAALLTRLLEGIACSAQDDGRAEGWMAPDGRFRLGALAGAWAKPQATYIGYAARAAARARRLAEIDLRLGEIADASRRIDDALTELARRQERAAAEWKDAPSDESLRAAHADAAAREREFQTAKSRLDEAERQLRAACDALQSRRDALAADAADLRLPTDAAALEAVGAALLHFGETLHGLLRVAHELRLSATELARQQARTSEAEADARQRAEQFAERGRLAQEAQVRLATLRESIGAQVDELQRRLREARAAVSEGDHHLKAAGEALRTAGEARARGEQKVLDADATLQERADARQRAITQLQGFAATGLLSAALPEAELPDLRAPWTIEPALTLARRTEQALAQVADDDEAWTRIQSQISHDYGELGRALTALGQQAQADTSDYGMVVSVIYQNRPERPDQLTARLAAEIAQRRELLTARERTLLENHLQAEIAAEVQRLLQAAERQVDAINKELNKRPTSTGVKFRLLWQPLPEGGEGAPVGLEAARKRLLNTSTDLWSAEDRRVVGEMLHQRIAAERLKADAVDGSLLEQLAQALDYRRWHRFRVQRWQDGQWRPLSGPASSGERALGLTVPLFAAVSSFYSQASYAFAPRLVLLDEAFAGIDDAARAHCMGLIREFDLDFVITSEREWACYAELPGVAICQLQRREGIDAVHVSRWTWDGRARRREDDPDRRFPPE

SEQ ID NO: 39926 - protein, 397 aa, Thauera humireducens
MTVDARLQRLLGGEPLAALRKRLRQRYARGAPADVLRLGSLSEAEHAALAALSGRPARPVRSMQIDVAEIDAALARAGLASSLRDALEQLDGPIIDARAERLQVRWQWQQVVEGCAHPGLRSALQTSVGLGLLKRLCASQPEAGARLVLDADQVLRRLPAGGIPRAQLAVATLGNAHALDAGSPVATLVLSALRQGAAPDDDADRVRDLWAAAGVLVNELARPALTLNLPGPTGTEPGEPTYFSLRSLVRSPPAWAVTGRPVFVCENPNLLAIAADQLGLRCAPLVCTDGMPAAAQRVLLTQLRAAGATLHYHGDFDWPGLCIGNQMIREHDARPWRFSAADYRTAVIGAPRPGRLLDDAAVTALWDETLAGAMLAERLAIDEEGLADVLLDDLRHC

SEQ ID NO: 39927 - protein, 491 aa, Clostridium citroniae WAL-19142
MEYFEPINETSYLAVPNAPVYRKIMRCFYREYEKMHFQIYKEDIYQMLKQDKTFTDYTMEQLMTDLEALVKWKNLTPIQDPGRVYTIADYKNKQYRYTMSEYAVEIERLTVRLENLFLESGNLSTNFFVRLEKSLQKAEEIKDSSLKEINEWWGMLQEDFKRLNQNYQDYLRDFYSGKTEQLMKSVEFVVHKDKFIKYLNEFVQELQRHSKRIEQILTDNMSVIEENILERVIQSELDIPHAVLQLHGNAEPGIRENVMGKWNSLKNWFIDSQGNECECKKVLKITNDVIRSIIQNAALIVQFQNGGISRKDDYRKFLELFLKCEDLEEAQKLSAHVFGVQKIQHFKTLEPREGDGINESIYKDEPAVFLLKPHTRSYREKKDRRGFTDKSLEKYIQREKYLQKIKRQKEIVMHYIKADKITFSEIEEVISEETRITFLQWITQANMNSRKTGRTEYGQEYRLTRSKGKCVLKCEDGDLVMPAFVLEFKTL

SEQ ID NO: 39928 - protein, 378 aa, Clostridium citroniae WAL-19142
MNEFRTLLENFWICKDSDKETYYKVKRDISNFQRFVREQLGWKLVHTENLLKLEKRPAHAESFMGIGEFLEIRDYCILCVALMYLEDKEEQEQFLLSELIDYVETQLKSYISIDWTSFTQRKSLVRVLQYMEKLQMLRVYEGRSEAFGSEAGHEVLYENTGYSKYFATSFPTGISGFESWEDFEKTDFEEFQENRGALRINRVYRQLTVCPSMYWESSEDADSLYLKNQRQWVAKYINDNMGGNLDLYKNMACISLDGDDCYGSVHPRDAMLPEIVLLVCGKIQKEVAEGTLEKQENECIYMTRERISDVILSCRREWNSGWSKEYREMDEDLLLEHVLKYMKSWLMIRYDGTQIVIFPSVGRTAGVYPEDFEGGTGE

SEQ ID NO: 39929 - protein, 1356 aa, Clostridium citroniae WAL-19142
MKDRFKMNRIGFVNFWLYDEEDFEFVNGKLLLRGQNASGKSITTQSFIPFILDGDRTPSRLDPFGSSDRRMEYYFLGEEGKDESTGYLYLELKKEGAEEYRTIAIGQRAKKGKPIDFWGFVILDGRRIGYDLQLYKEIGSSKIPLDRREMKTELGEDNFFTTSQSEYKKAVNQYIFGFRKAEQYEQFIKLLVKVRAPKLSKEFKPTRVYEILNDSLQTLTDEDLRAMVDAMEKMDEIQDSLEILKRAFDDVKIIRNEYTRYNQYMLAKKAQAYMAMKQKIEAEQCQLNIQEQKSQETEAARNSKSQRLADLEEQKKLKGIERVGLLDADLEEIDRKLEQARGEKEEAAGKVTAWENKIRDYQEIIWREERRIKEIKDHLDQIQQEIGDAKSELGEQQEILQWNQHEEALQMIDGVDHEKSGEIAKSLDLLKKLLAECKREIREYEELSGQYDELAAQLEMLQTEKAEDQQKLKTAQEDVVRCMDQWITAVYEAEKKSAQWRPDSELLPKLEEKIREYQSAADAEMVQELLRTDYERQRQELMDQKSSLEYQKKIQKEELDQEKEKLTCLQNSGDLEPERDESAEGSRKALEKAGIKAVPFYKTVEFSENLDETGCARLEAQLQKMGILDALVVSADDFENIRKQCPGFLDTVLYVKEGGTSGFSKLTASEELEPALKETVQRILSNIYEEKEHGQGIHLGKDGSFQQGILAGKAGKTGSAEFVGVLARKRRKEQKIRELEGRISEITEAIVILEKEITAVREHLEKLQEEYQKLPGFSEINAALDQEKECEYKLQKICEECGKKEAQERQLILKKNRQYQTMLQKCKPFPYGRTEEAYEEADDALEEYSRIWQEIRQALLQFRTDQENLRAEKDRLIQSEQLMDDAFVEKRSWSTKEKESGIRIRQFEEYLNRPEIAEKANRLKQLKKELDEIGTECDALKRDLAILEERLRVILEDEPKQKESLRQKIIAETCLRNYFEEELALKLVFARESQGIFECAKRAVSVLRESDKNREPTDLLQALHQVYQRHNGSLVNYGTSLEECFDTPAEAALETEAAAGAIRKRVRVVSSWNGKKVYLEEFYGILKQAIDETELLIQKKDRELFEDILSQTISRQLTDRIAESRKWVSDMSQLMKEMDTSMGLIFSLDWKPCKAENDMELDTAELEQILLRDYTLLTIEDIEKVAAHFRSRIRTEKQKLEEKGDMINYMDLVRDALDYRKWFEFHMFFRRGEGERKFLTNAAFNRFSGGEKAMAMYVPLFAAVNAQYKKAEQEDHPRIIALDEAFAGVDDKNISSMFELVHKLDFDYIMNSQALWGCFETVKGLRIAELSRPQDSQVVSVIRYTWNGREKILDVQ

SEQ ID NO: 39930 - protein, 432 aa, Clostridium citroniae WAL-19142
MCNNKECAKYFKSQQAYHRCFEEFWKKWRSYGKAAGNITLKRTSEEERRAVGGIIGKVFYEETIRFSFLEFEQGLQKTRFAPVDMKEVLEEYFGETLITTQGRQKEELERKNKFLDRICGYFEKNAGSNSAALLWMREMISEKKYGYQLLMREYAKDEKQAEQLVQNVGNAVFKLKEPENGEEEYPLAVLAAEITDNPHYFDRGTTAGLLFIHAICWCEKMKLPESAHQWRKLLMQVSIVPDNISSMVHGYGLRLLTEQGWHLAYDTFCDRKETYVITMENMKGIIGVQAVGEKVYVVENEMVFSYLIHNLKSSDHTLLCTSGQPRSVAQILIPYILASGAEVYYNGDIDPDGICIADRLWLKFGDCIHIWRMTPADYEKSLSKEKIGDIGKSKLENISHPILKKTAECVKEKRLAGYQENMLKELLEDMKT

SEQ ID NO: 39931 - protein, 491 aa, Clostridium clostridioforme WAL-7855; identical to SEQ ID NO: 38974

SEQ ID NO: 39932 - protein, 378 aa, Clostridium clostridioforme WAL-7855; identical to SEQ ID NO: 38975

SEQ ID NO: 39933 - protein, 1355 aa, Clostridium clostridioforme WAL-7855; identical to SEQ ID NO: 39192

SEQ ID NO: 39934 - protein, 432 aa, Clostridium clostridioforme WAL-7855; identical to SEQ ID NO: 38977

SEQ ID NO: 39935 - protein, 389 aa, Mycobacterium tuberculosis
MSDDDLARRRAALRALLKRPLLTAESDPEDLVLVRRWQAELRDWLSRETGWRLQVDAETARLFKTAPTLDDGTHPARGKAGEAFGRRRYVVLCLALAVLERADAQTTLGRLAEEVLNAAAEPELAFPFTLDSRAERSDLVAVVRLLIGWGVLRRVSGDEESYLSASGDVLYDVRRAVLASLLTGVRGPSTVAAGGFEERLAELTDEPVPDTDELRNRALRRGLTRRLLDDPVVYYDDLTDAERAYLVSQRAAITRRIEEATGLVAEPRAEGIAMVDPDDELTDVRMPEQRTDGHVTLLVAEYLAGRAETGRDELEAFVRDAAARHRSFWRKGVTEPGAEVELVDIALGKLAALRLVEVPPGGGGVRPRPAIARYAVEEPTVREPRRTVQ

SEQ ID NO: 39936 - protein, 1362 aa, Mycobacterium tuberculosis
MTQAPVPKPVPTPMPTSERWKPLRAGLVDMFYYDVEEFRFHDGRLLLRGNNGTGKSKVLALTLPFLLDGELSPHRVEPDGDRQKRMEWNLLLGGKHPHPERLGYTWLEFGRLHPDGTPEYRTLGCGLKAVKDRGIVRHWFFVTTRRVGADLALVSETGVSLTREKLREAVDGHGLVYDRASDYRRAVDDALFGLGEHRYEALVNLLIQLRQPQLSKKPDERLLSRALTEALPPLSPALITTVAEAFRGLDEERDALRALEEAHKAATDFLGHYVRYSQIAAKRKAAGPRLTQSRYEHLNRDFTEAETRFTAAETELAAAARLLEELAGEKTRLEARRNALEASPEMRDAKRIEEIGEEARRRDTYATRLERDLSGLSGEITRKQARAGKARSGAAHAETSFASARDRSVALARLAGCGPAHNEAMERWEADLAGTRREVGALAENRSRALTRLDQLMSAVTAARTRLDAATAEAERLVGELQAAAQRIAAAEARTHAGTAELLNAYVTYLAGLVQIQVDDPDAVLAELEEWAQTAEGQNPATTAVDDAARAATASLGGREADARSRLRAERERETSLGEEIERLESGGHDVPPVPYTRSGSRAGLPGAPLWKVVDFAGAVPADHRAGLEAALEASGILDAWVTPQGALLGADDTFVLTGEAVEGPSCALVLRPAVDRADPQAAALSDDAVRAVLAGLGLGPGARTWVAVDGRWANGALGGSWHKDTAGFIGEGAREAARRARIAALRADLGETRARITAIGEELTELAARRESLAAEHRAVPRDTGLREAHVRLAGEHRRRRDLDTEHGHALTAVNLCRDEASEAQERAGEFAADVGLPTGEAELAEVRAAVTDYRLALAELWPAAQALLSARDAAREAAEDLALVRERLDEAAEEAAEARGQAESAAEQHRALVETAGAAVDELFRRLNEVKQSLRERDAAESAARDRERSALGERGEAKGACDRLRGEIHEAATVRDKAVGDFRAFAATGLLTVAVPGLSVPDPAQEWAANPAVQLARAVNTGLDAVDDGDGPWDRVQKKVSEEHKLLSDAMSRHGHSVGLTVHDGIMVVDVVFQGRARDVPGLADALETETEQRARLLSAREREILENHLLNEVAGTLQELIAAAEDEVREMNAELTSRPTSTGMRLRLVWKPAKDAPDGLDRVREKLRQTIDAWSVDDRAAVGRFLQEQIAREHADNPASGWTEQLTRALDYRSWHGFAIQRLQDGQWRPATGPASGGERVLAASVPLFAAASAHYKSAGNPHAPRLVALDEAFAGVDDDSRAKCLGLLATFDMDVVMTSEREWGCYPQVPGLSICQLSRRDGIDAVLVTPWRWDGRERTRADLPEPEPASGQTDIFG

SEQ ID NO: 39937 - protein, 407 aa, Mycobacterium tuberculosis
MTADLARLRRLLGGPDTAWLVQRVRSRLERGGALTGKVTLTEATLPQRRAIELLLGRRAGSGTSLSVSLTEVDGVLRTSGASPHGLAAAVELLDGPVRDLARENAETAAARASAFAPLDEALISRPELAEWRAWLDATGLVRRLTSGPAEAAQVLRCLAAVVRRLPSPDMPLGRFAAETCGHAHALDDGPLATLALSSARALAGLPFRADGGAESRRETWAAVGVHLDELSSTVLCLGLPGDAHTPTGRMLAAMKGEPMSLTLRQLRRHTSPIQAGLVRICENPVVVAAAADALGPSCPPLVCCNGRPSTAVWRLLELLADGGAEFAYHGDFDWGGAAIATAVHARIGWRPWRYDATAYRAATSTTPLTGRPVPTPWDPALATAMQDRAVRVEEEQVLGDLLTDLAS

SEQ ID NO: 39938 - protein, 523 aa, Nocardia farcinica
MRAVGAGGDRPATTLLPVTDSEDGPRGDELDERLRLFAFATAEKRADYLRVLRAFDSARAAYVVLLHADDVAEWIRRAGGAELPAAEIGPLLDQLHRWGVLERSYDGTRAATLAEYRNRHYVYQFTQPGFQAFRAVAGVLDARGEEASLSRLVLPELLADLGALAEANRRGDAELVYRTLRRLDAALTDMASRAAHFYLSLGDLVRTTEITPEAFLAHKDTLLAHMREFSMDLARFAPRLAAAIAEIEQTGVAAMLERAARCDERVLLSPADREADWRARWQGLRGWFVAGESGATEADRLREATMSAIAAVLALLRRVTETRRGGVSRESALRHLAAWFTAAPSTESAHALFDAVFGLGRPRHLAMEHPDADIVPASRSWWDAPPLEISRTLAETGRPPSAAAPGRIQRNDASMRRLRESQLAAQRSRAEAARSLAAADVYERVLDDRETDMLLRLLDAASTAWVPVSGRVAGTSGSDNGVTLTVSEHPGPTVVRTARGLLHLNNRKLEVRVRGPRTSGGAA

SEQ ID NO: 39939 - protein, 450 aa, Nocardia farcinica
MIHAHRIGSLELDNYQRAARVILANHVVTRSYPDRVALSLIRRWATELREDLAELFGYRLEVTETTARLFPVLDELDPGRPARTVTERVFDRRRYAYLALALAALGRAGDQITLSELAEQVSAYAAEIDGLELAPDRAADRDAFVDAVGWLATRGALTLADGDAGGWAADPEAGEALYDIDRPVVFALFRPPRALQHLHSVTGLFGEEPTTEAGTPAALARAVRRAVVERPVVYAADLGPDQRAVLAQERVIAEVEAFTGLRAERRAEGVALIDTSGRLSDVRFPGTGTVAQVALLLIAEIADLVLDIDNPLPQRAPGPDAGAELVAALDAAIPASTLFAPMVEDGDEPATEPEAGPEPVRYPFVAADRVRETVGMLADRYGATFAAHWLADVPALTAEVVELLRRLRLVRPVADGVLVLPALARYRGAVVTVRTRRTEELFVGTGREGI

SEQ ID NO: 39940 - protein, 1402 aa, Nocardia farcinica
MSVIHGGVRFIPTRAGIINLWDYRDQEFCFADGRLVLRGPNGSGKTKALEVLFPFVLDGRIEPRRLNPFAGEERTMKSNLLYRKLDSAYSYVWMEFARGRWADPEVVTVGIGMRATRSSDKVTRWYFVADGRVGVDFSLIGPDDRPLTRKQLAEQIGTDAIVDRPMEYRAAIDARMFGLGAQRYDQLINLILTLRRPQLAKNLDPRGLSQALTDGLRPLDDQLILDAARSFSDMEEVGRTLEGLVHADTATRAFVDVYRKYLAVQAKTEVDQVRARLDAVTHASTALFAASALRQRREAERAAAQDRADDADRAYEQALTDRETLQRSSAYEGKQQLDDLADAVRRLESSAAVHRAKAVEAQQTVAQRAQELDRVRADVREAAAALSRGEDELRSAAEAAGIAWTTPSRDDALTTAVLARAEERDADVRAVRAVLARVEAAQAERTRAERLAERAGADRERAAADVAHAEAAVELARGRAAAALREWWDAHGETYGALGAELFEAVDAALGQAGSDEAATPAEVVAERTEPLLEELREARLAARTRAAAATARIADLEAERDAIAAQRDDAPPARHTRTDAPDDGRGAPLWRLVRFADDVPAETAAGIEAALDAAGLLDARVGPGEPPAGYRSDQFLIPLPPDRRPTGRTLADVLVVEDDSPELAVPGTVVADILASIAVRDAAGSDEVPAHPALDVTGGYRHGVQVGRHHKPHAEYIGATARARRREERLAELDAALAAATEDRESAEAAAKQADATLAALTTAAKALPRATAVTGALRAVAEAAGVVRSRTEAAAQAERELDQAVTEVTALEKKLRAAAAEHRTPRTAADLDALAAAVRHFESTGTALARLRADHERALEREREGADRLDEARGLAEAFAEEAEAARAGYDEQQRKLATLREALGAGAAEIDAELARARERIDACRAEQKAARKAANAAIEAVGDAEAAYRTAHEALGTALTEVLAQVRALAPYAQPDLLALLGVSPELRWPSSDAAWSTPDQLLYRIAQSDPETEPRVLPDEVAALFEALSTATATVRAGEAARKSTRSAVTAALQEFDAALAASGRDYRLRWDAADGLTVVQVQDEHGLCPLADFATRVASARRDQELLLTDAERRILEDALLTGLAQQIHERTGDARELIAKMGAEMKQRRMSSGNTIGVHWVLADDLSDSARAMCKLLDRDAAALSPEDLAAIRAHFAAEIRAARAEHPERSYPEILAATLDYRRWRVFSFTLVGADGSEDKLTVARHSALSGGEQSVSLHLPLFAAAHVMLDSADPQAPRLLALDEAFAGVDDNGRSELLGLSVQFDLDLFMTGYDLWITYPHVPGCAHYDLAHSAAEHTVSATLLVWDSGDLLAEHSGSDLTAALGSPNRRRVPVGIEGGLTLDDMPGAPAPLA

SEQ ID NO: 39941 - protein, 496 aa, Geobacillus stearothermophilus
MDATWLKPIVETKYLSTENAHRYRAILRYFYIQHERMRQYLFPEEVYAFLKQHEEFADYTEDDLQQDLDQLVKWNNLIARQETSHVRTIEEFKKKRFRYQCSPYTVEIERMIRTLEQLGDSFGGSLEKTRFDRLYASLSRIEAIIASGFQEQRDEMYQVWEETFDYFKKIIQNSADYMAYLHSENVEERMTSESFLVYKEQFTAYLRDFIVALQKTSMQIEQLLEDLPEEGVRQFIGHVVDYERSIPRFADAPPPRAVQIEEKWETWRSLCEWFLGRNGRESELSFLQYQTNEAIRRLTRVVQRLGERHHHFRSRKGDYLHLARWFSRLESIEEAHCLSAVVFGCFHTKHLVADAEATDNIYRDVWDEPPAEWVTKPRVRHYGEKKKPQAIEDKEREKEEARLRYLEEKEREEAALRQLVTDGKIVLADLPEVTPYVRKTLLGWIAKAMGREGQAMKTENGWVVKVVNKEGTICLRAEDGELVMPNYEIHVLSGGE

SEQ ID NO: 39942 - protein, 398 aa, Geobacillus stearothermophilus
METAFDDKAKEALAALFEQFWIIRDQEPDLYQLVREREHVLKRYVEEKFGYRLIVHRYFAKLEKIPADPEPWMGIESFQEPLDYALFCCLMAYLEGKAVEDKFLLSDVCEEIRAMYPGDLPVDWTNYAHRRALIRVLKTAEQIGLVRRMDGEIEAFAQHVEEEALYEVPVLARYFMRTHPKDLLQYESIDELLAEEWKASPQDYRRHRLYRKLFLSPAVHRTEGDEQDFYYLRNFRHRLRDDIEAHTPFRYELYKNAAMLMLPERQAPYTVFPDQKGTSEIILHFAALVRERLGEYPPDEYGRIRLTSEQFSAWLADCRRRYGAGWGKTYRDMSAAELVREVLAALNEWRMADVEHDTGMIVLYPLLGRVSGRYPDDFDAKEGGEHGESMGASSCGAD

SEQ ID NO: 39943 - protein, 1373 aa, Geobacillus stearothermophilus
MANPWVLHRAGLINFWYYDEQYFHFADGKLLLRGSNGAGKSVTMQSLIPVLLDGKKTPDRLDPFGSRARRMEDYLLGEKDVVNRDERTGYLFLEYKRKASDQYVTTGIGLRAKRQKSLDFWGFVMFDNRRIGYDFQLYKQEKTGEKIPLTKRELAALLGAGGTVVETQKEYMELVNKHVFRFESLEAFQELIELLIQLRSPKLSKDFKPTVIYEILESSLPPLTDDELRHLSETIENMDQAKQQLEQLERDERALKRLCDQYRLYNEYMIAEKAAEYVKAVKQAEQLAAEQQRLHDEEEKTRKALDELEESITRLGREEDVLRAREIDLAGHEVFQQAEKYEQLKAERQRLEERRERHEQTIAEKERQERQHRRRLDEAEARLDDLERKLEDELEQLRMDADEGSFSLHETNEDDFHRHRQKQQEFSFAAWKQEADRHIEQLEELARLWRRHDEVKRRYEEASSEAGERRREMDEWRHQQWKWEELFEEEKERFEQAVLAWVEQGGIDVSETDIQAFLQQMGALYEQYSLDDLKRPFVQAYYDAVGKKKDEKWRLEHDIRMLEEKRAEREAELRQWREQRDPEPERDEQTTAARLALEEKGIPFVPLYAAVEFVDDVPDDVRERIESALSHAGLLDALITAREIDVACDRVLIPKPVHMAHTLADYLRPDANAPVSMERIDEVLRSIVITDADQEGGMTIDETGRYSLGLVRGHAPRRSKAMFIGRAARERWRLENIAALEAEIAAVGQEIDRLRGAHQAVEAAIQALADWLASFPSDRDVRTAFDEAQEARRQAESKEREWKRQEEKAALLAREWKQIKQQLHDESAELDLAFTLDGCEQAQLAMKSYVRHVHELEVLYRETCHTEAMIAQQRERLAALETEIDEAKGERNRLRDETERLALRIAEMERTLAQMGADDIRAEIARIQERLAFLRQEIPRLVNERARTEQRLMRLVEEREKGAQREAFARELAAMWEKSFAREAALGLVDLDRSRSLLEQAKEAKQRYEAVLKETRSSLLARLNTVFFQESSNLTEYRASFEPLEEQTKPEWTAAAPDDEMAMKAADWREKQERHVIYLDYKGERATPFAVLAEVERDIVLQHEYMKEQDRELYEDVILKSVGRILRSRIQRAERWVNEMNKLMGGLDTSSGLVLSIQWKPKTAETEAELDTKELVRLLRLDPRLLREEDLQRVTNHFRSKIARARELLEERGQGSTLHQIIKEVLDYRKWFSFTLYYEKTNEPKRELTNHRFYQFSGGEKAMAMYIPLFAAAYSRYQEAGDDAPYIISLDEAFAGVDENNIRNLFGLVEQLGFNYIMNSQALWGDYDTVPALSICELVRPRNASFVTVIHYRWNGRVKQLMVDDKEWEMIET

SEQ ID NO: 39944 - protein, 406 aa, Geobacillus stearothermophilus
MSTAKEAAAFFRSEPGFKRLFAEMKRKYESLGRVGGAVSLEVFTDEEREAVAAFFGKDVSRVSLIAFEKQLGQTRFAGVGLVELLEQYFGAPLVSNKERRQAEEEERDRFFARLTEEHHWVESVRPQRFVQTAYETDRRSLEEAIRLVSAALGRLPLPSYMRLPLFAQQVAGDPHAFDLSTLPGRLLLSALQATVPGDWDMASVESVNELLQSVGLLREDILNFVTCANILAETKDGPHPVFSAAWEANTALNMPLRDVLSLVRARPAHGGTVYIVENAGVFSTLLDTRAPLVSTNGQMNVATMKLLDLLASSGAKLYYSGDFDPEGLAMAERLQERYGQAVTLWRFSVEDYRAANPVVDLTPERLAKLASVTSTPLQPLKEEMAETKKAGYQEAIIGRLTEDING

SEQ ID NO: 39945 - protein, 496 aa, Geobacillus stearothermophilus; identical to SEQ ID NO: 39941

SEQ ID NO: 39946 - protein, 398 aa, Geobacillus stearothermophilus; identical to SEQ ID NO: 39942

SEQ ID NO: 39947 - protein, 1373 aa, Geobacillus stearothermophilus
MANPWVLHRAGLINFWYYDEQYFHFADGKLLLRGSNGAGKSVTMQSLIPVLLDGKKTPDRLDPFGSRARRMEDYLLGEKDVVNRDERTGYLFLEYKRKASDQYVTTGIGLRAKRQKSLDFWGFVMFDNRRIGYDLQLYKQEKTGEKIPLTKRELAALLGAGGTVVETQKEYMELVNKHVFRFESLEAFQELIELLIQLRSPKLSKDFKPTVIYEILESSLPPLTDDELRHLSETIENMDQAKQQLEQLERDERALKRLCDQYRLYNEYMIAEKAAEYVKAVKQAEQLAAEQQRLHDEEEKTRKALDELEESITRLGREEDVLRAREIDLAGHEVFQQAEKYEQLKAERQRLEERRERHEQTIAEKERQERQHRRRLDEAEARLDDLERKLEDELEQLRMDADEGSFSLHETNEDDFHRHRQKQQEFSFAAWKQEADRHIEQLEELARLWRRHDEVKRRYEEASSEAGERRREMDEWRHQQWKWEELFEEEKERFEQAVLAWVEQGGIDVSETDIQAFLQQMGALYEQYSLDDLKRPFVQAYYDAVGKKKDEKWRLEHDIRMLEEKRAEREAELRQWREQRDPEPERDEQTTAARLALEEKGIPFVPLYAAVEFVDDVPDDVRERIESALSHAGLLDALITAREIDVACDRVLIPKPVHMAHTLADYLRPDANAPVSMERIDEVLRSIVITDADQEGGMTIDETGRYSLGLVRGHAPRRSKAMFIGRAARERWRLENIAALEAEIAAVGQEIDRLRGAHQAVEAAIQALADWLASFPSDRDVRTAFDEAQEARRQAESKEREWKRQEEKAALLAREWKQIKQQLHDESAELDLAFTLDGCEQAQLAMKSYVRHVHELEVLYRETCHTEAMIAQQRERLAALETEIDEAKGERNRLRDETERLALRIAEMERTLAQMGADDIRAEIARIQERLAFLRQEIPRLVNERARTEQRLMRLVEEREKGAQREAFARELAAMWEKSFAREAALGLVDLDRSRSLLEQAKEAKQRYEAVLKETRSSLLARLNTVFFQESSNLTEYRASFEPLEEQTKPEWTAAAPDDEMAMKAADWREKQERHVIYLDYKGERATPFAVLAEVERDIVLQHEYMKEQDRELYEDVILKSVGRILRSRIQRAERWVNEMNKLMGGLDTSSGLVLSIQWKPKTAETEAELDTKELVRLLRLDPRLLREEDLQRVTNHFRSKIARARELLEERGQGSTLHQIIKEVLDYRKWFSFTLYYEKTNEPKRELTNHRFYQFSGGEKAMAMYIPLFAAAYSRYQEAGDDAPYIISLDEAFAGVDENNIRNLFGLVEQLGFNYIMNSQALWGDYDTVPALSICELVRPRNASFVTVIHYRWNGRVKQLMVDDKEWEMIET

SEQ ID NO: 39948 - protein, 406 aa, Geobacillus stearothermophilus; identical to SEQ ID NO: 39944

SEQ ID NO: 39949 - protein, 496 aa, Geobacillus stearothermophilus; identical to SEQ ID NO: 39941

SEQ ID NO: 39950 - protein, 398 aa, Geobacillus stearothermophilus; identical to SEQ ID NO: 39942

SEQ ID NO: 39951 - protein, 1373 aa, Geobacillus stearothermophilus; identical to SEQ ID NO: 39947

SEQ ID NO: 39952 - protein, 406 aa, Geobacillus stearothermophilus; identical to SEQ ID NO: 39944

SEQ ID NO: 39953 - protein, 513 aa, Streptomyces acidiscabies
MTSTPSEPTRAEYAPFAHLSAPNAALYRRVMRVFLTAKERFAVHLRPEDVHAALEPEHRPADQDTVAKALDSLVGWGNLRADPDTSRVTAVEDFYRKRFIYQLTRAGEATEQALSVYDEALGRRGALQAVALHDIVTQLRALLVLTGDPDAAKAHLALSALTARFEALAENARAFMGSLQRTIDLHEVDVEVFLAYKDRLIQYLERFIQDLITLGGRIALLIGELEERSRVDTLLRLAAAREAADAAPDEAVDAEARAYERWSAKWSGLAAWFVSADGRESQARLLRGRALGAIPQLLAVVRQLNERRAGRSDRSADFRALARWFAEAPDDAARHRLWRAAFGLYPARHLTVDAATLDRRTAHPVAASTPWAEAEPLRISPQLRRTGSYERRGKARRVQDRSEQRRRLAEIAAKQTQEIAAARARLATGGITRLSALGELDPLTFRLFLQLLGDALATWRPGMTTTVATSNDGTMEIRLTALADGTTAEIRTPGGVFRGPDHTVEIITGEGRP

SEQ ID NO: 39954 - protein, 404 aa, Streptomyces acidiscabies
MTTPLGEVLENRRTAEFHKAARALLKEPLLLAHGPHADEFRLVRRHAVDLRDWFDRNTGWPLRVDAEAARLGRTPGTLADPTHPAREASRARVPFTRRRYVLLCLALAALERGEAQIALGRLAEQVVLDAADPHLAAAGIAFTLERRDERLDLAAVVRLLMRYGVLRRVAGDEDAYVSGAGDVLYDVQRRVLAGLLAARRGPSLIGSGGFEDRLAELTAESALDSDELRFRAVRQRLTRRLLDDPVLYYAGLTDEELAYLTRQRAFIAARITELTGLVAEVRAEGIAMVDPLDDLTDVRMPEQGTHGHVTLLLAEHLAASNGAVSRAELERRVRELAVEHGGFWSKSARQPGAEGELVELALAKLTALGLAALVPGGVSPLPALARYAVGETVVKESPRKAQRS

SEQ ID NO: 39955 - protein, 412 aa, Streptomyces acidiscabies
MSASDGSGPHVDRDRLDRLLGDPGLGWLVERVRRRLERDEPLTGPVTLAAPSAAERAAAERLLGRAPRTGGSLTVRLDAVDAVLRRSGISPGGLTPAVTALTGPVPRLADVRAQEASAWRDAYAPLAALPSELAGWADRLRGDGLVRRLARTPPTAKSLLAGAATALRALPADPAMSLAAFAAGTLGDAHALDDGTPLATLVLSGVRALTGFPDGAGAEWRREAWASAGLLRDALSSTVLTVGLRGTPALDWMTDAGEPAVLTLRQLTRTPPRTAPAVVHVCENPAVLATAADTHGPACPPLVCLQGQPSAAALALLRHLHTRGSRLRYHGDFDWGGLRIAGALLSHVPWSPWRYTAAAYRAAAVAAPLAPPLTGTPTTAPWDPELAPALAELGLRVEEETVLDVLLADLAP

SEQ ID NO: 39956 - protein, 532 aa, Streptomyces stelliscabiei
MADAREVVGYLVRPEAGDYIAIMDVLEGSVTDLTVSEVATALAAGGLRLDARLVEKRLDVLKDIGAASVRSDTSHARRYAEILARNWRYTASPAGRHVQRFYRQVLAGTATVREIPIVSLNRIVSHLEQLATALGAAEPDAAHFDAAVLDAVSAVFTSHDDLDAALVGAEDALVGLADRFDLDEGRTNDLKGLLVDYATRVAAELDSGSARAAAALVVLQPWFGLLAQAAVDASQARDLITAGALSASRGGRAEDWEGLCAWFDARTGRAARFSLRLVRALPGMHANLRRLHSSAGTASTRSRALALARAVLTPEIGVQIFQAAVGDHSWRKLYGRADEDDTGRNPSWRGGPQVPVPTLLRTAGRSGPRGRGAAPRDDAAARAQVAEARARRQAEHEQAVVAVLASVPGQQLGEAAARAALAALMAAARSAPVGPRRTAASHGLACTLVHTGTGTGMLSAPTWHVLLPGRLPLFHQPGRRPTTAALEALAGLAVADDLSAYATLRITPAPSTGPRSLRSETAHADTRQEGAA

SEQ ID NO: 39957 - protein, 413 aa, Streptomyces stelliscabiei
MAATPWLVGGRHDELIAAVRRNEHALRSAVARLGWVLIIERDLVRLRKSPPPRGEAWACQGPSPAACSWFFLLLAAAESMPPRTALGHLVTQAHAAAAEAGLPTHHDIAERRATLAALRMLDERGVIERLDGDFDSYLHDEQAPVLLAVHHTRLAYVIANPGTLDPAADPPAWLEQAQREPDVARRMRRALVDDTCVHTALLDEAEAQWLSQRVRGDDGGPLADAFGLVLERRAEGAAFVVPDEAFRHMNELGPMPFPAPGTVAHAALLLLDHAALHGTTDNGPGPGWRGLAEGQVVDALAAFAGTKASGRGGWGAEYAQDPLLLADKVRDLLAGTHLARLTHAAPSDGDKTTPMWWFAPTGGRWAGEGTADSQATRIRSPRGTPPRQRPRTPVQQGLFNDMETEENMEDHTP

SEQ ID NO: 39958 - protein, 1416 aa, Streptomyces stelliscabiei
MSDILDLDFALPPVPAPSGDTGRFGGRWRLVGAGLSNVWRYGDLDLSAVSGRLLLRGPNGTGKTTALEALWPYLLDLNPAKLAAGKARPTTLKLLMSEGAPAKGRRYGYLWLSFAAPDGEPAASPAQETVAGDGIVSFGVRLQYSPSSTPAVRVVPFTVPGRPLKNLLLRASNGGALEHEEFSARVETVGGRVFAEPEDYIEDLARRVWSTTSGELRLLASRLREVRNPTLLGDVSPAAAADALRQSLPGVAGDVLTATAEALAESDTTREAFERDEYAAALLQEFARVWTGHVVDVTRAAHTAARQAHTDAGTRRGRVRQCTGLLETAKAAADRAGSDVQRLDDAHQEAQAAARAIETSDAYRSHGRVMDLRKRLRAEQSAAASSYDNLHAAAEQARTQTKDGRDALDDIIGDLEETVADAEAAGAQPVALETLLAHHPRARVTRPVADRVSDPGPGMTLTHDHSGLEQLATGWTDRAQKYCSTADKAALILRDHDPVATADKTATTAHRKAADAEGVYDEASQAHDRATAEARSAARQALADVARWALAHPDLRGLHDTAAPGGDEQQVWDIDDVEALTHTEPAAVRDQLNAWADQALHIGEALAAGHESAAKEHLATAASLDAAAVQHRTKARQLRSGRLLPLPRPSWAGQGDDDTALGALLEWHPALHHMDDQKALLELALADSGILGAHLHPGGATTHTWHISPTGAVQEQNLTTVLDIAPGHPHADLARTVLQRIALADTATASSHPGTPALLIGRDGTFTAGPLTADPATALRATGSQIPTASHIGARTRLAKARAKADELDAAARELETGASDERRRAADRCKHRDAVRCEGRAFPPRDKLTTAESDRARTAKTAHDRLSTARTLRGRADDAAAEHTRLRTAWEDRARSLSMPTDPGDLPRLIDKSRSCAEKLNDCASQLAARLLPRLDRIVRTLPDETALTERLAGLQHTAQDMHAAVLETRAELAETQSHGDADDAARRYEQATTQAKELHKQLESAREKGVVAEKQLSTCEGDLTVAQERLDEALPLQKTTRAHLTALLAWPPLAQALGTEPASRDADSTDGAVLFDTVEALLARRPTASKKTLGERYDAVRADLAQTWTIARDDPPVGIEELDAFVLTHAETHYDPLGAAVRAQTLADRAKAALDTAEAAALRDFVIGRLPAAIGTAWTALTDWKKTVNRKMRAAQASSGVGVQVHIALRDDLDAATRTVYELSCTVGDALRTDAQKEQVGKALQSLLAAADGSTMAERLAGAVDIRNWVEVRYLVERPGPDGTPVTRQWGSRTGLSGGERRLVVLAPMLAAIAANYDRLTSTGLRLVPLDEVPAEVDERGREGLARYLAELDLDILCTSYLWDGAPGAWDGIDAHDLEAGTDGTVVAFPMLIRAGQTLPGDTDPALFLGKGSA

SEQ ID NO: 39959 - protein, 194 aa, Streptomyces stelliscabiei
MDCDDLLGGLIVTGITPRGWRIPSGATFTLPPRELTSIAWEPPPAVGAWVFITENPSVLAAASNRALAQETMVTPRVICTAGTPSQLECEAVGALSHAGWRIAVRADFDQAGLAHVRALLSAAPAAVPWRMGAADYLASAPEGADTLHLKESDAPWDTDLVPVMLEHSVPVYEEDLLHQLLGDITVGAPGASMA

SEQ ID NO: 39960 - protein, 518 aa, Streptomyces stelliscabiei
MRRVPPEMFRFTTVERSDLYGAVLEAFGAAGEQLETALGPEAVRERLRGVGWAAAVEDDDLHETLSGLVRWELLDVVHHHAETDYRTTEEYERRNLRYSLTRRGEAALAGVRHALEVLASTGALQTAVLEAIADRLDELGLLSGEPASADRRIFTTLRELEGHLEALVENTKAFNGELQRLLRAESADPEVFHEVKAATVTYLQEFLVGLDRRGRTVAAAVVRVEEAGIAGLHERALRGAELSPVAGEDPAAGWLESRRARWAGLRSWFLPDDGARPRVEQLHDIARRAVVSLLQALERINESRRRPSSAVRDFRELARWFAAAPAEEDLHRLWSAAFGLGPARHAHLAHPDPELIPSSRSWAETPPVEVSALLRTSGRTERFTRTARVRDVAAVRAERAARARVERAELALAWRMLETRGPVRLSAFGELEPAVLDRLLDLLGRALSARPDAGGLRRATTGDGRMEIALAPPPDGRTALLRTAKGTLAAPDYLVHITEAGGAATLPAPPAARREATG

SEQ ID NO: 39961 - protein, 430 aa, Streptomyces stelliscabiei
MSTFANQLAAAEREEVARAVRLLLARPLLTETSDPAGFELVRRRREPLAQWFDYTCGWSLVVEPRRGYARLAKVRVDPDGSRPARTARSGRAPFDRRRYVLLCVTAAELLSMPMTTIGLLADRVVRATTTDPALPGFDPVHRAERTAFVDVLKLLESYGVLRAVDGSTAAYVASVDAEVLYRVDTALLTRLPTAPVGASRLAVPPDEVPARFEDLLAGLVRERRYGAVSGDGPADDEHGGTAATDAQRNLRLRHSVLRRLFDDPVLYRSDLTDDELAYVTSLHGRQILRRSVEQAGFLLEDRAEGFLLVDPDALATDVRFPDDTSIARVAALLLLEPLCAAPAGLLPEQLAEAGTGLLRRFPRWAKAYRSEDGAARLAEDAFGVLRDMGLAHRAGGRVVARPAAHRYRLTGTTSSAPEALATEDTEEDRQ

SEQ ID NO: 39962 - protein, 1381 aa, Streptomyces stelliscabiei
MSVTELPVPRRPESPEPARTPARAAEAPRGRWQPYRAGILNVWRYYDETFTFHQGRLLLRGQNGSGKSKALELLLPFLFDASLRPNRLSTFGGSERTMHWNLLGEGATGKTRVGYVWMEFRRVDDDGTERWFGCGARLQASVHTTGVHADYFTTGARIAHPDGVLLVNEAGQPLTRAALAEALGDRGDVHASAADHRTAVRRALFAGMGEQRYESLLSALLQLRQPKLSERLDPSLLSTLLSRALPPLGEGEIAELAEGFEQLDRRREHLRRLDDEVAAAETVAARQRGYARRVLRAGAAALIAAATETDDLARAARTSAAEFEQALAQRESARTLREEQELRAHALEETVEGLRESDAYQRGQELDRLRRRAGDGAAAAARERALARTAGETARKDRRHADETADRARALDEHAREAAEEARRSARSLGLESLHHEANTVLGAAPDGPGRAAHGGAGREDSGAASPAGDGGARLARRLLRGAVTARRQQLTVVTEALDEHDRAVRDRGAAEDLLDGARARFAEAVARRDAASKAWDDAVAAQAERLLVWAGDRAELRIADPQELAARAASEAEVTALVDAAVRPLEREIATAEATARAARPGLWDERGRLVEEVQRLGAETDRPPPTPATRTTVRTATAGAPLWRLIAFREGVPLPVQAAVEAALEASGLLDAWVGPYGGITLPGHDTRAEAALAVAAPGHSLLAVLRPEEGIPVPVDTVTRILAGVAFGSGLPDGHAAAVSAAGAWRLALATGSWSKPEPVYIGAPARQRARQRAVGELTDRIAGANASLVALDDRSRDLAARRARLEADLAARPGHRELDARRRDLDRAEETVAARDDAVRDAAGRLARCEAEVAGALRALGRRAAEHALPTDRGRLRALADDLDGFRDTADGWVDARLCANAAADTARQSAARADRSRRAAEERTGDAAAAEGEAAGLRARVEAAGATVGADHRQIVARVAEVREELRRCRDAAARAADLLLRLEGRVGGLRAVSGQDAARREQAVLARDRAAHRLRHLCQVGLAEDAGLAPEPEAADGSRAVLETARAIVAHWPGIPHAPHDLGDAATRLSEAVHEARRHLGARADLDLEPDDDVQVFSATLDGVRLGATGLLGALARQRDGSRDDITGGERRLFDQILTGDIRRHLAVRIRRAGELVDRMNGHLERVRTASDVAVQLAWDVRPDLPDSTRTARQLLLREPDRVTESDRETLHAFLRARIAEAEGSDTAATWEEQLGEVLDYTAWHRFTVRLDRAGGTGWQPLTKKLHGALSGGEKAIALHLPLFAAVAAHYEAVPLAPRPILLDEVFVGVDTVNRGQVFALLTALDLDLMVTSDHEWCTYGELPGIAVHQLLTDEHDDAVTSARFVWNGTDLETG

SEQ ID NO: 39963 - protein, 499 aa, Virgibacillus pantothenticus
MMQTFKKVIEASYLTAEKAWSYRAILRYFYIQHERMREFLFPEEILAHLKGSSDFKDYTEEQLHQDLEQLVRWNNLLARQEMGRAHTIEEFKKKRFRYQCTPYTVEFERMLSEMEKGGDVFGGSLEKKEFERLYQTLVDMEKALQQPALPQADDCSQLWNDIFTYFRSITKNTSDYIAHINSEQAEERMHTEAFLVFKDQFTSYLRDFIVGLQHTAQKIQQLLRSIDMEKLRPFIQQVIVHQQHVPRFEEVMDDTALMEDMEGKWQTLTVWFLGDAYRESELDSLQTRTNEQIRRITRVVQRLGERHHYFRSRKKDYLHLANWFASMENVDEAHELSAVAFGVLHTRHLFSDHIPSEDIYTDTWQEQPIKHETNPRIRNYREKTKAGAIINQREAKETVRKQYLQEKLAEQNTIEKYIEGNTITIENLPIIETNVRKMLLSWIGKAMAKQDRTFKTEHGRVVKVHLTPERRVPLRAEDGTMEMPAVTFEFLDEVSNHGA

SEQ ID NO: 39964 - protein, 391 aa, Virgibacillus pantothenticus
MEHNQFDDKAQTAMRMLFEHFWILRAKQPEAYQFIREREKVIKRYVTDKLGFDLIVHQHFIKLEKIPVETKSWMGMQEFQEPRDYAIFCCALAFTENRTVDEQFLLTEICEDIKDLYPGDLPLDWTNYHHRKSLVRVIKQLEKLSILSVVEGEVEHFALNEEHEVLYEVTVYARYFMRSYPKDLMDYHSKEDIMQGEWDRHEAVDGRRKRVYRKLLLSPAVQRMGEDDPDFAYIRNYRNRLRDDLEEHTLFRFEIFKNVALLVAEEKKQELTLFPDQKAIMDVALHLATYIRDHQADYKPDTFGNIRISAVAFEQIITSLHEQYGAGWSKQYREGSIKQTQKELTETLKSWEMLQQDDFTKDYIIRPLLGRVVGKYPRKFVEEGMSQHEQK

SEQ ID NO: 39965 - protein, 433 aa, Virgibacillus pantothenticus
METEDLLKEATLFFKSEQAYDKLFKQFRKKYESLGRIGGTISVQLFSERELEVIASFYGTTKETLMKKGTIHVAQFASQLQETKYYGIELKQLLDYYFGEEIISKKQRKEIAQHRLESHLQQLASSYPLLFDWLLYVLSTPSDMRWVVRLAEKDVTYFDQLVGKLAKAREHLPTKPERLPMFSQRITADPHAFDINTDLGKLFIDVLAFYHPEWSKHEVPQTTESINELLRVHHIYRDDLLNFVTCSGLLAETMEDVLHPVWSAAVKMNTVQNVPLRELFVINRIFPAIGSHVWVVENSGVCSALLDELPNTPIVSTNGQFKLAAWILLDLLAKEGCTIYYASDFDPEGLGMAERLLYRYPQHVRVWQMSIRAYKKSNPVKSIDEERLKKLERIEHPDLLTLAQEIKRTKKVGYQEALVKDMLHDIQQKLLRA

SEQ ID NO: 39966 - protein, 496 aa, Geobacillus sp. LC300
MDATWLKPIVETKYLSTENAHRYRAILRYFYIQHERMRQYLFPEEVYAFLKQHEEFADYTEDDLQQDLDQLVKWNNLIARQETSHVRTIEEFKKKRFRYQCSPYTVEIERMIRTLEQLGDSFGGSLEKTRFDRLYASLSRIEAIIASGFQEQRDEMYQVWEETFDYFKKIIQNSADYMAYLHSENVEERMTSESFLVYKEQFTAYLRDFIVALQKTSMQIEQLLEDLPEEGVRQFIGHVVDYERSIPRFADAPPPRAVQIEEKWETWRSLCEWFLGRNGRESELSFLQYQTNEAIRRLTRVVQRLGERHHHFRSRKGDYLHLARWFSRLESIEEAHCLSAVVFGCFHTKHLVADAEATDNIYRDVWDEPPAEWVTKPRVRHYGEKKKPQAIEDKEREKEEARLRYLEEKAREEAALRQLVTDGKIVMADLPEVTPYVRKTLLGWIAKAMGREGQAMKTENGWVVKVVNKEGTICLRAEDGELVMPNYEIHVLAGGE

SEQ ID NO: 39967 - protein, 398 aa, Geobacillus sp. LC300
METAFDDKAKEALAALFEQFWIIRDQEPDLYQLVREREHVLKRYVEEKFGYRLIVHRYFAKLEKIPADPEPWMGIESFQEPLDYALFCCLMAYLEGKAVEEKFLLSDVCEEIRAMYPGDLPVDWTNYAHRRALIRVLKTAEQIGLVRRMDGEIEAFAQHAEEEALYEVPVLARYFMRTHPKDLLQYESIDELLAEEWKASPQDYRRHRLYRKLFLSPAVHRTEGDEQDFYYLRNFRHRLRDDIEAHTPFRYELYKNAAMLTLPERQAPYTVFPDQKGTSEIILHFAALVRERLQDYPPDEYGRIRLTSEQFSAWLADCRRRYGAGWGKTYRDMSAAELVREVLAALCEWRMADVEHDTGMIVLYPLLGRVSGRYPDDFDAKEGGEHGESMGASSCGAD

SEQ ID NO: 39968 - protein, 1373 aa, Geobacillus sp. LC300
MANPWVLHRAGLINFWYYDEQYFHFADGKLLLRGSNGAGKSVTMQSLIPVLLDGKKTPDRLDPFGSRARRMEDYLLGEKDVVNRDERTGYLFLEYKRKASDQYVTTGIGLRAKRQKSLDFWGFVMFDNRRIGYDLQLYKQEKTGEKIPLTKRELAALLGAGGTVVETQKEYMELVNKHVFRFESLEAFQELIELLIQLRSPKLSKDFKPTVIYEILESSLPPLTDDELRHLSETIENMDQAKQQLEQLERDERALKRLCDQYRLYNEYMIAEKAAEYVKAVKQAEQLAAEQHRLHDEEEKTRKALDELEESITRLGREEDVLRAREIDLAGHEVFQQAEKYEQLKAERQRLEERRERHEQTIAEKERQERQHRRRLDEAEARLDDLERKLEDELEQLRMDADEGSFSLHETNEGDFHRHRQKQQEFSFAAWKQEADRHIEQLEELARLWRRHDEVKRRYEEASSEAGERRREMDEWRHQQWKWEELFEEEKERFEQAVLAWVEQGGIDVSETDIQAFLQQMDALYEQYSLDDLKRPFVQAYYDAVGKKKDEKWRLEHDIRLLEEKRAEREAELRQWREQRDPEPERDEQTTAARLALEEKGIPFVPLYAAVEFVDDVPDDVRERIESALSHAGLLDALITAREIDVACDRVLIPKPVHMAHTLADYLRPDANAPVSMERIDEVLRSIVITDADQEGGMTIDETGRYSLGLVRGHAPRGSKAAFIGRAARERWRLENIAALEAEIAAMGQEIDRLCGAHAAVEAAIQALADWLASFPADRDVRTAFDEAQEARRQAESKEREWKRQEEKAALLAREWKQIKQQLHDESAELDLAFTLDGCEQAMLAMKSYVRHVHELEVLYRETRHTEAVIAQQREQLAALEAEIDEAKGERNRLRDETERLTLRIAEMERTLAQMGADDIRAEIARIQERLASLRREIPRLVNERARTEQQLMRLAEEREKEARREAFARELAAMWEKSFAREAALGLVDLDRSRSLLEQAKEAKQRYEAVLKETRSSLLARLNTVFFQESSNLTEYRASFEPLEEQTKPEWTAAAPDDEMAMKAADWREKQERHVIYLDYKGERATPFAVLAEVERDIVLQHEYMKEQDRELYEDVILKSVGRILRSRIQRAERWVNEMNKLMGGLDTSSGLVLSIQWKPKTAETEAELDTKELVRLLRLDPRLLREEDLQRVTNHFRSKIARARELLEERGQGSTLHQIIKEVLDYRKWFSFTLYYEKTNEPKRELTNHRFYQFSGGEKAMAMYIPLFAAAYSRYQEAGDDAPYIISLDEAFAGVDENNIRNLFGLVEQLGFNYIMNSQALWGDYDTVPALSICELVRPRNASFVTVIHYRWNGRVKQLMVNDKEWETIET

SEQ ID NO: 39969 - protein, 406 aa, Geobacillus sp. LC300
MSTAKEAAAFFRSEPGFRRLFIEMKHKYESLGRVGGAVSLEAFTDEEREAVAAFFGKDVSRVSLIAFEKQLGQTRFAGVGLVELLEQYFGAPLVSNKERRQAEEEERDRFFARLTEEHHWVESVRPQRFVQTAYETDRRSLKEAIRLVSAALGRLPLPSYMRLPLFAQQVAGDPHAFDLSTLPGRLLLSALQATVPGDWDMASVESVNELLQSVGLLREDILNFVTCANILAETEGGPHPVFSAAWEANTALNMPLRDVLSLVRARPAHGGTVYIVENAGVFSTLLDTRAPLVSTNGQMNLATMKLLDLLAASGAKLYYSGDFDPEGLAMAERLLERYGQAVTLWRFSVEDYRAANPVVDLTPERLAKLASVTSTPLQPLKEEMAETKKAGYQEAIIGRLTEDING

SEQ ID NO: 39970 - protein, 322 aa, Nocardia seriolae; identical to SEQ ID NO: 39509

SEQ ID NO: 39971 - protein, 479 aa, Nocardia seriolae; identical to SEQ ID NO: 39510

SEQ ID NO: 39972 - protein, 1487 aa, Nocardia seriolae; identical to SEQ ID NO: 39511

SEQ ID NO: 39973 - protein, 511 aa, Nocardia seriolae; identical to SEQ ID NO: 39512

SEQ ID NO: 39974 - protein, 435 aa, Nocardia seriolae; identical to SEQ ID NO: 39513

SEQ ID NO: 39975 - protein, 1307 aa, Nocardia seriolae
MTITELPVTAVDLVDGRNSRWIPVRAGILNVWRYYDEVFEFHDGRLLLRGPNGSGKSKALELLLPFLFDASLRANRLSTFGTGERTMHWNMMGEGASGVTRVGYVWLEFGVRGAPGQWFTCGARLQASAHTSTVHPDYFTTDLHIASESGSTGTGFAALTAEGRPLTRAALEQLLGDHGTVYDNASDYRDAVRTTLFPAMTEQRYDALIMALLQLRTPKLSQRLDPALLSTLLSKALPPLDQDEIADLAEGFERLDAQRERLARAEAEVQATKALARQQRAYAQRVLRSSAAALLTTTSELDKLSATAKQSAEAFARAESDIAAAAVCLESLRREYRDAEARRDGLLESDAYKQGRELDTLRGNTVLAERRAEESRALADRSLADAALDTQRHREAVEAADAQQRAVTECASDAEQAAVRAGMPGVFAELADTVESAHVRALLRGAVKGRRSQIDEVERVLGRHEQAVEARGRAERDLDAARTVYATAADSRSTAHAARDNALEELRNRLEHWASRCTVLRLEDLDQLTARAPSEPAVLELVNAAAAVLRDEITRSETRCESEIGAVRAERAELVADRERLRGEEDIPPTPPPWRTADRSVMTGAPLWRLVDFLSGVPDSTRAGVEAALEASGLLDAWIGADGSVTGHDVFASPSALPPVAGRSLTEVLVPVPVAPVAPEPVHRLLSAIAFGDGLPEGAVAADGLPESVAVVAADGHWRMGSLSGSWIKPQPMFVGALTRQRVRERRIGELDAAITALDGTLATFAQRLRGLADRRATVATEIAARPTHDAVLAAQSALTEAESDLRAADGVVRDRIADVATCEQAVRSALLALTALAAQSGLPADSTALQRISAALDAFENAAETWLDACRDWRGLTDVTAERADRLERSTELSDQRQAQAISAEDEHRALAAKLTEIEATVGLDYRQVLTRLSEVRDRLAELDTQRSAEQRSLTELSGLRGELKSRHETDIQSRDATAISRDQLTHRFRHLAAGTLAPDSEIPDLAAFRATLAGSEGVRAARDAARLVAAAWPSIPHAEHNIGDALNRLAAAVHECRTALAARADLDLETDGGAQILTAVIDGVRIGAAELLRILRTEADQAQQEITDGEHRLFDRTLTGDTRRHLAARIRQANDLVDAMNSRLTQVRTASDVSVRLVWEIASDLPPGTRAARELLLKDPIRLTDADRESLHRFLRDRIEAAKADDTATTWEQQLSQVFDYTSWHRFVVKVDRGKGNGWQLLTKKLHGALSGGEKAIALHLPLFAAVAAHYQSVPTAARLILLDEVFVGVDTTNRGQIFALLSAL

SEQ ID NO: 39976 - protein, 407 aa, Nocardia seriolae; identical to SEQ ID NO: 39514

SEQ ID NO: 39977 - protein, 514 aa, Xanthomonas arboricola pv. juglandis
MTLPATAQADLFRHVSAEKAALYRCVMDCFAAAKRQFRLHLRPDEVLEDGDWSTLVSSATPRMEEIQAALAQLAEWGNLESQPDTARVASISDFYRARFVYRLSLGGEAVEAALAAFSRVLRRRAELQSVALEDIALRLKALLALADSAEPDAVKVHETLRDLVRVFESLADNAQAFMAGVGRGIELQQADAAAVLAYKKRLIDYLERFIGDLVARSGGIAQHILSLQPRIESLLWLAAQRQARDSAPGDEAEQLDAVTRGWQAWRERWTGLRRWFLATGHAPAQSELLRAKARAAIPQLLSAVATINERRSGRSDRSADFRMLAGWFAACEDDAQAHRLARAAFALNPARHFSLNPELASGAQDLPASTPWADAPPLRIHPRLREYGQASPRGALPRVQARDAERQLLAARLHEEHAQIEAARQRLANGRSTRLSEFGTLDPHAFALFLGLLGEALTAQSSPDAEVDVPSGDGLLRIRMQPLAADSRASIHTATGTFSGRDHLITITRTDAAP

SEQ ID NO: 39978 - protein, 422 aa, Xanthomonas arboricola pv. juglandis
MSPSDSRANSRSIGRQQARHRDDERRQALRALLMSPLMNPAHEGFAAVRRHADELRAWFARETGWTLHIERDCARLYKRPADLRDASRGLPGYDYRRYVLLCMACAVLERADPQITLRVLGERLLTLAADPALESRGFRFTLSAAHERRELVAVCRSLLEIGVLQRVAGDEEGYVRSSGEAAEGADALYDVRRRVLAAVLSAVRGPSTWPAEQAPVDLDARLASLVTEHQPDSEEGRRTALRHHLARRLLDDPVVYLDTLDAELRAYFVNQRGAMASRLCEATGLVAEQRAEGLALADEDAELTDIAMPAEGTEAHATLLVAEFLSRSRETTDAINRDDVIAFLATAREAHGSYWRKSAREPGAERELADLALERLQKLQLAACDETHVQPLPALARFALGEADIRQPAAPATAAAHPSLFE

SEQ ID NO: 39979 - protein, 1375 aa, Xanthomonas arboricola pv. juglandis
MTDTTSPSLPIPTLARWQPLRLGLVELFHYDSEEFWFRDGHLLLRGNNGTGKSKVLSLTLPFLFDAQLKPSRIEPDGDASKKMAWNLLLGRLDRRMGYAWLELGRLGADGQPHYLSLGCGLLAVAARPQVDSWFFVLEQQRIGQDIWLMSPARAVLTRERLRDALHDHGQVFDTATAYRRAVDERLFHLGPQRYTALMDTLIQLRQPQLSKKPDEANLSNALTEALPPISTDLLADVADALNQLEEYRRELEEYEALERAVGQFNQRYQRYAATQARRRARSLRSAQTGFDNASRDLNDGRLALGAARAAETGATQAQQRAENALAGHRSRLDELQNDPAMTDAKALDKAAADAERQQRDAGAARTERQRRQTRFEQEQQATRQRAQRAEDAGHALAEARTQASAAAETAGLVSNYGASPLAHGEAATLTPAALASAQQDLRHTAAARREQVAHLQRRCDEAEQAAHERARAQDLRDERADEAEAAAARREEADAAVERQGQHLFEAWQSHLDAAQQLQVPDSGDVLETLAAWTASLHGDNPARAALHRAQQAASLRLAQRQAMLQTEQQALEQEQATLHAERTRLQSGEDALPPPPAWRAPSAREGRGGAPLWQLVEFAPAVPADLQPGLEAALQASGLLDAWVTPDGQLLDAGGAPLPHDAQWLGRPARPDSLAAWLQPAPPAEATPMVAPAVLQRLFEGVACGEQDDPGAEAWIGPGGRFRLGALAGAWHKPRAEFIGYAARAAARARRLAEIAQRLEELDLAHAQLQAGSAQLAADQRQAASEWQSAPTDDTLRAAHLQASTRVRELDAARLRLDQAEHALRSAIQQWEAASQTLEQDARDLALPPARDALHTIDRALLAFGDRLHALTSAARACHDALAEHRQQVEREQQARTDAEHATEQAAERDLLAEEARIRLQTLRESVGAKVEELQQRIRDARQAVSSADLELKSSNEALRLAGETRARAEQKVEAADAILSERIASRQQAIEHWQGFAATGLLEIALPDAELPPQAAPWTIEPALALARRAEQALLQVKDDDDAWNRVQNQVSQDYTELGRALAALSHRAQAETSDFGLIVSIVYQNRPERPDQLGTRLASEIAQRRELLTAGEREVLENHLQAEIASAIHKLLRDAEQQVLAINAELAKRPTSTGVRFRLLWETLPESGEGGAPVGLKAARQRLLNTSTDLWSAEDRRVVGEMLQQRIAAERSRADADQGGSLHEQLARALDYRRWHRFRVQRWDGQWRPLSGPASSGERALGLTVPLFAAVSSYYSQAGHAHAPRLVLLDEVFAGIDDAARHHCWALIREFDLDFVVTSEREWACSAELPGVAIAQLQRHEGIDAVHVSRWTWDGLAKRQEPDPDRRFPPAA

SEQ ID NO: 39980 - protein, 432 aa, Xanthomonas arboricola pv. juglandis
MRADATLPSDPRLQRLLGDDALAPLRQRLRRYFERIGPNATASTLRLDRLAPDAHQALCQMTGRPLRPARSITLDIRQLDTALREAGLANSLRDALERLDGPIVDKTRQRLELQARWAAATDSIDACPLLQDWLNTSSAPPLLKRLSRAPENAMPLLNAADSVLRALPAQGQPRAQLAASLLGDAHALDAGRPVATLVLAAWRHYERQHPTNHETGEDPEDAPKGEGTEERQRDIWARAGILVNELARPALFLNLPVATSQGALGHPGEPSYISLRQLLRASKIWSVADRVVHVCENPNVLAIAADQLGASCAPLVCTDGMPSAAQRILLDQLQAAGAKLLYHGDFDWPGIGIANFVIRTWNANPWRMSTQDYEAAASSTTRVRHELGAIPVNADWDIHLATAMQNCGTAIAEEAVATILIEDLRIPGPAEN

SEQ ID NO: 39981 - protein, 504 aa, Acetobacterium bakii
MKFEITGKLTKQIDEMRYLTVDNAWRYRSILRYFYMQYEKMKYWLYKEDIFEALKENDEFKAYTMDMCRQDLDVLLSWKNLSAIQDTAKVATVEEFKNKQFRYQLSEYSVEIERLTLRLENLFVESASLEPTLLERLREELKKLPQVAKQGEKEVGSWWSSLNSDFKRLNQNYQDYIRDLYSIKAEEMMKTKEFMIFKDKFIEYLRDFVKGLQNHANAIEHILKNLNAADIDRVLKKAIAYEVSIPRIDAEIDEVGISENIVGRWDSLNAWFLGSKGNESEAAKLMDITNDIIRKITRYASQISESRNNAINRKEEYRKLAELFDQCRDIKEAHQLSSMSFGIFQMKHIKSDHFRETESINSQIFEESPGVLALKPRVRGYQEKAQRTTIRSNREKKEAMRNRIRLERQIEEKTMENYVIDYCIDFASLPVIERHVRTTLLKWLSKGIGADKKGKTEDGRVFQVELPKERNRRCVLRCEDGNLEMPAYVIRFLDNTKESENERA

SEQ ID NO: 39982 - protein, 381 aa, Acetobacterium bakii
MKELEILLDQYWVVKDNDKDLFYRVKDSIPQFKTFLSDKLGYGIVINQHLIKLEKIPGSAESFMGIQEFNHPMQYILLCLLLMFLEDRSRDEQFVLSEITEFIAGNNIGKEKIDWTQYSHRKHFIKVLRFAQRLGLMKVNDGDDQKFAYHDDAEVLYESTGLSRYFVRHFTADIMGFANYQDIENAEWGDLNADRGVIRRQRVYRKLLMEPVVYSQGADDVDYDYIKKQRGLMEGDFLKYLEYPLHVHKNGAMLVVPAEKNIQDGFPNTRAICDITLLLVAQMREALAEKKLKINPTGGVSLSRVAFDEWVVELKAKAGRNWSKEFREMSAAGLAANLAEYMEDFKMLRQLYDGREIEILPLAGKLMGTYPEDMAERKGEK

SEQ ID NO: 39983 - protein, 1361 aa, Acetobacterium bakii
MDNRWVINRAGLVNFWYYDEETFDFSQGRLLLRGSNGSGKSVTMQSFIPLLLDGNKSPERLDPFGSKARKIENYILGDDENGKDESIGYLFMEFKKKHSNNRATIGMGFKANRGKPMKSWGFSITDGRRIGEDFFLYKQMGEKIPLTRKELENRIGDGGQVVEGQKNYMKLVNDLVFGFDDLDEYDELVKLLVQLRSPKLSKDFKPTVIYEIMENSLQPLSEDDLRPMSEAIENMDNIKSRLEVLKDCKGAADRIRQAFDRYNQFIVLDKARQFYDHHLRLEQQKNLKNKKTREIDKAGKEIASLKEKIIKLEIVLQTQQEKKRELESHDSVKIREKIMQTEKEIQELATQRFEKDNQHETKRQQERDLDNQVSGYRQNIEAGERGIIKQLTEMDDLAETFVFDEHDFMRDEVKKDVTEPFDFGYVTTILKKHTEILSQAVKALEKEKQISEAYEKCVMELDLLKKELAEKERLREQANRQMTEIQDEMLEKLYQKNQDNQEYIISVDGLSQLARVIRQFGPESNFNDIAQILRGEQIGLEELKRERLFIEQSEWAKINKEKSEKQAELDYWKKMKDPEPARAEKVKKNREKLVALGIPHIPLYKALDYVDGVDAATQAAIEEAMADMGILDALIIPETFRGQLGSMPELSGDKYIFPAPQFMVHSMNQYLQVETSLAEISPEEVANVLTSILIDENHHTHMDEKGNYSLGILRGKASGRDTPKFIGSSARKKYREEQQKALELELAAITDRLIGQEKVLNQVKQEIEILKREFTEGLNQEDLVTAANVVKQAMFEHVMVSKAVAKKSGEEKILYEAVKKIKEEIYRITGRITLPVNLETYEEAQIAATTYLDELHKLEKQKLHLDNFQISLRGAENRYEEVLQEIDDVLYEISGLNTKRATLALILTNLSEQLKLTDYEAIKAELEQCLLALKELPQEKEETVIQLERVRLGSERLTEDIGNLEQTLKQHEKIYSIMKEAFKEELQLGYAVKSVKDDLFSVAGDLLAKNPVRDKQNKDQVTTRIVENLNSNSQYLRDFSVNSQYIFEKEWSEDEDEAVEKAHEIRRRLNITAKVTGKVVNFYDLSDYLKDSLEETEKLLRESDRELFEDILVKNISKKISARIFHSEKWVDNMNQLMAKMDTSMGLSFSLRWTNKKAETEEQLDTRKLVNLLKMDGNLLRDEDLNALSEHFRSKITLARRALEEKDVNLTFHSIVKDILDYRKWFEFKLFFKKTGHLSKELTNNGFFKFSGGEKAMAMYVPLFSAVNARYEAAGKESARILSLDEAFAGVDEQNIRDMFRLLNDLDLSYIINSQILWGDYDTVDSLAISELIRPDNADFVTVLRYHWNGKVRKLVVDDAS

SEQ ID NO: 39984 - protein, 424 aa, Acetobacterium bakii
MPHEFAAYLKANPGYHRIMKQIGEKYESLGHLGGTIRLDKMTDAEREVLRSLFKKNYLQKSASFAVEKFISAFAATRYEGVDFEEMLASYFGEKLSWKKDVKSQYDDEKSRCFGEIIEVFKESPGALWLTDLLKNRNNAYPILSMKYNEDPEHLRRLLTQVCIGLNQCVAKPQKVRLALFASQMTRDPHAFDMNREGGRLLLYALSAYYRLNYPKNAEAQMELLYKAGLIYDEVSNYTIGRGLQAFAGDKIHSGWVGFAELGEPLHLSLWNIGMIDRVACVKNRVFVFENPTVFSEIAGLMEDRPCSLICSVGNVKVATLLLLDKIVQSGGMIYYGGDFDPEGLIIADKLKKRYGEKLVLWHFTPEDYERIKSKKKISESRLKKMDGLLSPELKKLAKVIRSSGFSAYQELLVDVYLNDIEKLN

SEQ ID NO: 39985 - protein, 514 aa, Xanthomonas campestris; identical to SEQ ID NO: 39977

SEQ ID NO: 39986 - protein, 422 aa, Xanthomonas campestris; identical to SEQ ID NO: 39978

SEQ ID NO: 39987 - protein, 1375 aa, Xanthomonas campestris; identical to SEQ ID NO: 39979

SEQ ID NO: 39988 - protein, 432 aa, Xanthomonas campestris; identical to SEQ ID NO: 39980

SEQ ID NO: 39989 - protein, 514 aa, Xanthomonas campestris; identical to SEQ ID NO: 39977

SEQ ID NO: 39990 - protein, 422 aa, Xanthomonas campestris; identical to SEQ ID NO: 39978

SEQ ID NO: 39991 - protein, 1375 aa, Xanthomonas campestris; identical to SEQ ID NO: 39979

SEQ ID NO: 39992 - protein, 432 aa, Xanthomonas campestris; identical to SEQ ID NO: 39980

SEQ ID NO: 39993 - protein, 514 aa, Xanthomonas campestris; identical to SEQ ID NO: 39977

SEQ ID NO: 39994 - protein, 422 aa, Xanthomonas campestris; identical to SEQ ID NO: 39978

SEQ ID NO: 39995 - protein, 1375 aa, Xanthomonas campestris; identical to SEQ ID NO: 39979

SEQ ID NO: 39996 - protein, 432 aa, Xanthomonas campestris; identical to SEQ ID NO: 39980

SEQ ID NO: 39997 - protein, 514 aa, Xanthomonas campestris; identical to SEQ ID NO: 39977

SEQ ID NO: 39998 - protein, 422 aa, Xanthomonas campestris; identical to SEQ ID NO: 39978

SEQ ID NO: 39999 - protein, 1375 aa, Xanthomonas campestris; identical to SEQ ID NO: 39979

SEQ ID NO: 40000 - protein, 432 aa, Xanthomonas campestris; identical to SEQ ID NO: 39980

SEQ ID NO: 40001 - protein, 514 aa, Xanthomonas campestris; identical to SEQ ID NO: 39977

SEQ ID NO: 40002 - protein, 422 aa, Xanthomonas campestris; identical to SEQ ID NO: 39978

SEQ ID NO: 40003 - protein, 1375 aa, Xanthomonas campestris; identical to SEQ ID NO: 39979

SEQ ID NO: 40004 - protein, 432 aa, Xanthomonas campestris; identical to SEQ ID NO: 39980

SEQ ID NO: 40005 - protein, 514 aa, Xanthomonas campestris; identical to SEQ ID NO: 39977

SEQ ID NO: 40006 - protein, 422 aa, Xanthomonas campestris; identical to SEQ ID NO: 39978

SEQ ID NO: 40007 - protein, 1375 aa, Xanthomonas campestris; identical to SEQ ID NO: 39979

SEQ ID NO: 40008 - protein, 432 aa, Xanthomonas campestris; identical to SEQ ID NO: 39980

SEQ ID NO: 40009 - protein, 514 aa, Xanthomonas campestris; identical to SEQ ID NO: 39977

SEQ ID NO: 40010 - protein, 422 aa, Xanthomonas campestris; identical to SEQ ID NO: 39978

SEQ ID NO: 40011 - protein, 1375 aa, Xanthomonas campestris; identical to SEQ ID NO: 39979

SEQ ID NO: 40012 - protein, 432 aa, Xanthomonas campestris; identical to SEQ ID NO: 39980

SEQ ID NO: 40013 - protein, 514 aa, Xanthomonas campestris; identical to SEQ ID NO: 39977

SEQ ID NO: 40014 - protein, 422 aa, Xanthomonas campestris; identical to SEQ ID NO: 39978

SEQ ID NO: 40015 - protein, 1375 aa, Xanthomonas campestris; identical to SEQ ID NO: 39979

SEQ ID NO: 40016 - protein, 432 aa, Xanthomonas campestris; identical to SEQ ID NO: 39980

SEQ ID NO: 40017 - protein, 514 aa, Xanthomonas campestris; identical to SEQ ID NO: 39977

SEQ ID NO: 40018 - protein, 422 aa, Xanthomonas campestris; identical to SEQ ID NO: 39978

SEQ ID NO: 40019 - protein, 1375 aa, Xanthomonas campestris; identical to SEQ ID NO: 39979

SEQ ID NO: 40020 - protein, 432 aa, Xanthomonas campestris; identical to SEQ ID NO: 39980

SEQ ID NO: 40021 - protein, 514 aa, Xanthomonas campestris; identical to SEQ ID NO: 39977

SEQ ID NO: 40022 - protein, 422 aa, Xanthomonas campestris; identical to SEQ ID NO: 39978

SEQ ID NO: 40023 - protein, 1375 aa, Xanthomonas campestris; identical to SEQ ID NO: 39979

SEQ ID NO: 40024 - protein, 432 aa, Xanthomonas campestris; identical to SEQ ID NO: 39980

SEQ ID NO: 40025 - protein, 514 aa, Xanthomonas campestris; identical to SEQ ID NO: 39977

SEQ ID NO: 40026 - protein, 422 aa, Xanthomonas campestris; identical to SEQ ID NO: 39978

SEQ ID NO: 40027 - protein, 1375 aa, Xanthomonas campestris; identical to SEQ ID NO: 39979

SEQ ID NO: 40028 - protein, 432 aa, Xanthomonas campestris; identical to SEQ ID NO: 39980

SEQ ID NO: 40029 - protein, 514 aa, Xanthomonas campestris; identical to SEQ ID NO: 39977

SEQ ID NO: 40030 - protein, 422 aa, Xanthomonas campestris; identical to SEQ ID NO: 39978

SEQ ID NO: 40031 - protein, 1375 aa, Xanthomonas campestris; identical to SEQ ID NO: 39979

SEQ ID NO: 40032 - protein, 432 aa, Xanthomonas campestris; identical to SEQ ID NO: 39980

SEQ ID NO: 40033 - protein, 514 aa, Xanthomonas campestris; identical to SEQ ID NO: 39977

SEQ ID NO: 40034 - protein, 422 aa, Xanthomonas campestris; identical to SEQ ID NO: 39978

SEQ ID NO: 40035 - protein, 1375 aa, Xanthomonas campestris; identical to SEQ ID NO: 39979

SEQ ID NO: 40036 - protein, 432 aa, Xanthomonas campestris; identical to SEQ ID NO: 39980

SEQ ID NO: 40037 - protein, 517 aa, Ralstonia solanacearum
MHDIKLQRDTPADLFRHISAEKAVLYRCVMDCFAAAKRQFRLHLRPDEILNEGNWDRIPEHAQPRIEEVQAALAQLTEWGNLESQPDTTRVASISDFYRARFLYRLSQGGEAVEAALTTFERTLRRRAELQTVALEDISNRLQTLLSLADSANPDAAKIHETLRDLVRVFESLADNAQAFMAGIGRSIELQQAEVTAVLAYKKRLIDYLERFIGDLVGRSGDIAQRLVALSPRVDSLLWLAAQREARDSAPDDDPEQLDAVARGWQAWRERWKGLRGWFVTTGHEPPQAELLRSKARAAIPQLLTAVSALNERRSGRSDRSADFRMLAGWFAACEDDSQAHRLARAAFALNPARHFSLNPALAPGVQDLPASTPWAEAPPLRIHPRLREYGEAAPRGALPRVQARDEQRRLLAAQLEQEHAEIEAARLRLATGRATLLSELGALGTHDFALFLKLLGEALTAQMSPDAPVETQSGDGLLHIRLQPLASGTQAMITTPTGVFRGRDHTVTITRMEDLP

SEQ ID NO: 40038 - protein, 416 aa, Ralstonia solanacearum; identical to SEQ ID NO: 39284

SEQ ID NO: 40039 - protein, 1376 aa, Ralstonia solanacearum
MTDTRSPALPIPTLTRWQPLRLGLVELFHYDSEEFWFRDGRLLLRGNNGTGKSKVLSLTLPFLFDAYLKPSRIEPDGDASKKMAWNLLLGRHERRIGYAWVEFGRVDEDGRHHYLTLGSGLSAVAARGQVDTWFFMLDERRINQDFWLMSPTRVVLTRDRLREALQDCGQFFDTAAPYRRAVDERLFRLGSTRYAALIDTLIQLRQPQLSKKPDEASLSNALTEALPPISNDLLADVADALNQLEEYRRELEEYEALERAVGQFNQRYQRYAATQARRQARNLRTAQTGFDNASRELNAAREALETTQAEEQHADQAWRQADTVLTTNRTRLEELQNDPAMADAKTLEKADADSRQRRKEANTARQTCYDMQTRLERERQATRTRAQRAEHAGRALAESREDAVQAAERAGLAPAYSANPLACADAHTLQPLALDTARQDLRRASIERREQVALLLRRCDETDHAEQTHARAQTQHDERADEAETAAAQREEADTAVDRQGHTLLDAWQRYLDGLRQLHCPDGADALEALAPWTVSLQGDNPARTALHRAQQAASLRLARRQAALQNDRHALEQERDTLRDERARLEQGEDTMPQPPHWRAPDIRAVRAGAPLWQLVDFRPGTPAADCAGLEAALQASGLLDAWVTPNGMLQDSDGGHAQLPHDAQWLTRERQPQSLAAWLRPTEAASDAPPRVDPTVVQRLLEGVACGAEDNPAAEAWIAPTGRFRLGALAGVWHKPGAEFIGYAARCAARERRQHEIDARLEAIDAALTLLAQDFAQLDADQREAADEWQCAPSDDSLRAAHVEAVSRAREFDMARQRLEHTDRLLRAAAEQWEQARTILERDAEDLTLPPARDALRAIDQALQMFGDCLHTLAVVVRELRDAQTEHAEQLQREQQAESDARHALEQSAEREALADEAGIRLETLRASVGARVEELQRRLSDARGAVTSGETELRQRNDARRLAGEARARAEQKAEAADATLVERTAARQHAVGQLQGFSATGLLVTALPDAELPSMHAPWTIEPALALARRTEQALLHVKDDDEAWNRVQNQVSQDYTELGRALAALSHQAQAETNDFGLVVSIIYQNRPERPDQLSARLAGEISQRRELLTAGERQVLENHLQAEIASAVQKLLRDAERQVKAINDELDKRPTSTGVRFRLQWETLPEGADGAPVGLEAARRRLLNTSTDLWSAEDRRVVGEMLQQRVAAERSRADADQGGSLLDQLARALDYRRWHRFRVQRWDGQWRPLSGPASSGERALGLTVPLFAAVSSYYTQESYAHAPRLVLLDEVFAGIDDAARAHCWALIREFDLDFVVTSEREWACSAELPGVAIAQLQRHEGIDAVHVSRWTWDGRNRRREDDPNRRFPNA

SEQ ID NO: 40040 - protein, 517 aa, Streptomyces resistomycificus
MRRVPPEMFRFTTVDRSDLYGAVLDAFGVAGEHLETALGLDAVRERLRGVGWAAVVEDGELHEVLKKLVQWELLDVVHNHAENYRTAEEYERRNLQYSLTRRGEAALAGVRHALEVLASTGALQTAVLEAIADRLDELCLLSSEPSSADRRIFSTLRELEGHLDALMENTKAFNGELQRLLRAEGADLDVFREVKAATVAYLQEFLVNLDRRGQAVAAAVARVEERGIAVLRERALRGAELPPVAGADPAAGWLEGRRARWAGLRAWFLPDGGARPRIEQLYDIARRAIVSLLQVLERINESRRRSSSAVQDFRELARWFAAAPAEEDLHRLWSAAFGLGPARHAHLGHPDPELIPSSHSWSEAPPVEVSALLRTSGRTERFTRTGKVRDVAAVRAERAERARAERAELARAWQELETDGPVRLSSFGALDPAVFDRLLDLLGRALSATPDAGGLRRATTGDGRVEIALAPPPDARTAVLRTTKGSLTGPDYVVHITEAGGARVSPALRSAPEEAAG

SEQ ID NO: 40041 - protein, 428 aa, Streptomyces resistomycificus
MSTLANQLAAAEREEVARAIRLLLAHPLLTATADPAGFELVRRRREPLAQWFDYTCGWSLVVEPRRGYARLAKVRANPDGSRPPRRARSGRAPFDRRRYVLLCLTAAELLSMPMTTIGMLADRVVQATAADPALAAFDPVHRPERMAFVDVLKLLESYDVLGAVDGTTETYVESAEAKVLYRVDTTLLMRLPAAPVGASQLATPLDEVPARFEELLTGLVRERRYGGALGDQLSDETAATDAQRNLRLRHSVLRRLFDDPVLYRADLAEDELAYVTSLTGRQILRRSVEQAGFLLEERAEGFLLVDPDGIATDVRLPDDTSTARVAALLLLEPLCAAPAGLLPEQLAKAGADLLRRFPRWAKAYQSEEGAARLTDDAVRVLRDVGLARRTSGRVVACPAAYRYRLTQTMSSDPAFDAVAVEVVEGDQQ

SEQ ID NO: 40042 - protein, 1382 aa, Streptomyces resistomycificus
MSVTELPLPRRPEPTGSTRTAATAASAGDTGGHRWQPYRAGILNVWRYYDETFTFHQGRLLLRGQNGSGKSKALELLLPFLFDASLRPNRLSTFGGSERTMHWNLLGEGASGKTRVGYVWMEFRRVGDDGTEHWFGCGARLQASVHTSGAHADYFTTGSRIGHADGVQLVNEAGQPLTRAALADALGDRGHMHSSATDYRAAVRRELFGGMTEQRYESLLSALLQLRQPKLSERLDPSLLSTLLSRALPPLGEGEIAELAEGFERLDRQREHLKRLDDEVTAAETVASRQRAYARRVLRAGSAALISATTEMDNLTRVARQSADDLEQALAQRESARTQREELELRAHSLDETVEGLRERDAYKQGAELDRLRRRTEGAAAAAGRQRASAQAAQVGAEEDQRHAEEAAGRARTLDGHAREAAEEARRPARAAGMESIHHEVRVILDEELGVALPDRAGPGKDSGVTRAAGENGARRARRLLRGAVTARRQQVTLVNEAIDEHDRAVRARGAAEDLLDDARTRLAEAIARRDEASGAWEDVLAVQAERLLTWAEGCMELRIADPGELAARAAAEAEVTALIEAAARPLEREIGTAEATARAVRQDLRDERSRLEAEVRRLSGETDLPPLSPPTRTTVRTTTAGAPLWRLVAFREDVPPPVQAAVEAALEASGLLDAWVSPYDGIKLPGHDTRAEAALAVTAQGPSLLDVLRPEEDIPVPANTVTRILAGVAYGTTLPGGHPAAVSADGAWRLALATGTWSKPEPAHIGALARQRARQRRIGELTDLITETNASLAGLDDQLRGLDARRAQLDADRAARPDHRELDARRRGWDLAEAKAAARDDAVRDAAGHLARCESAAAGALRTLSRRAAEHGLATDRERLRALSADIDRFRDAADSWVDALLATTAAADGAHQLAAQADRSRRAAEKQANEAAAAEAEAAGLTARLAAVEATVGEDYRQIVARVAEARAELRRCREEAGRAADLLLRLEGRIGGLRATSAQDAAIREQAVATRDGAAHRFRHLCLVGLAEDAGITPELDAEGGTKATLEAARATAATWPAVPHASRNLGDAATRLSEAVHEARQRLGARADLEMEPDDDIQLFTATLDGVRVGATGLLTTLTQERDRGRDDITTAERRLFDQILTGDIRRHLAARIRQAGELVDRMNGHLERVRTASNVAVQLVWDVRPDLPDGTRTARQLLLKDPGRVNETDREALHAFFRARIEEAKGSDTAASWEEQLGEVLDYTAWHRFTVRLDRANGSGWQPLTKKLHGALSGGEKAIALHLPLFAAVAAHYEAVPRAPRPILLDEVFVGVDTVNRGQVFGLLAALDLDLMVTSDHEWCTYGELPGIAVHQLLTDGGDDAVTSARFVWNGTELEAG

SEQ ID NO: 40043 - protein, 420 aa, Streptomyces resistomycificus
MTHPEPVPGERALRRPELGPLWQTVHIRLSSGRPVTRVRLGPLDDAQREALADLLGLDRLPSSHPWVPLAHLEEAVTELSGRTVRDIVTELVGPLGDRAGELRRQEGERAELWTWLAGHATVRAQPVLSDWAASCRATGLIAGSAGRTRSLLTDALTVLAELPAQAEPLPVFAARVLGGHAHALDDGTPLSHYVLRALTILYDTAPPQSSADRRALWTRAGVADDDLSATVLVGGLRPVGDGTVACVARVCAEAGQAASLTLAQLRSPGEFSLAAHPAPVVHVTENPSILALAVRRFGADSPPLVCTSGWPNSAAIQLLRMLADHGAALRYHGDFDGEGIRIAAYVLDKTPAHPWRMTAADYRTAVVRHPLGPQAGRITEAPWDAELAQAMTDHGSAVVEELVAAELLEDLAAEAVATLL

SEQ ID NO: 40044 - protein, 496 aa, Geobacillus stearothermophilus 10
MDATWLKPIVETKYLSTENAHRYRAILRYFYIQHERMRQYLFPEEVYAFLKQHEEFADYTEEELQQDLDQLVKWNNLIARQETAHVRTIEEFKKKRFRYQCSPYTVEIERMIRTLEQLGDSFGGSLEKTRFDRLYASLSRIETIIASDFQEQPDEMHQVWEETFDYFKKIIQNSADYIAYLHGENLEERMTSESFLVYKEQFTAYLRDFIVALQKTSMQIEQLLEDLPEEGVRQFIEHVVDYERSIPRFADALPPRAVQIEEKWETWRSLCEWFLGRDGRESELSFLQYQTNEAIRRLTRVVQRLGERHHHFRSRKGDYLHLARWFSQLPSIEEAHCLSAVVFGCFHTKHLVADFGATDNIYRDVWDEPPAEWVTKPRVRHYGEKKKPQAIEDKEREKEEALLRYLEEKAREEAELKQLVTDGKIVLAHLPEVTPYVRKTLLGWIAKAMGREGQTAKTENGWKVKVVQREGTICLRSEDGELVMPNYEIHVLSGGE

SEQ ID NO: 40045 - protein, 398 aa, Geobacillus stearothermophilus 10
METAFDDKAKEALAALFEQFWIIRDKEPDLYQLVREREHVLKRYVEEKFGYRLIVHRYFAKLEKIPAEPEPWMGIESFQEPLDYALFCCLMAYLEGKAVEEKFLLSDVCEEIRAMYPGDLPVDWTNYSHRRALIRVLKTAEQIGLVRRMDGEIEAFAQHVEEEALYEVPVLARYFMRTYPKDLLQYESIDELLAEEWKASPQDYRRHRLYRKLFLSPAVHRTEGDEQDFYYLRNFRHRLRDDIEAHTPFRYELYKNAAMLTLPERQAPYTVFPDQKGTSEIILHFAALVRERLGEYPPDEYGRIRLTPEQFSAWLADCRRRYGAGWGKTYRDMSAAELVREMLAALNEWRMADVEHDTGMIVLYPLLGRLCGRYPDDFDAKEGEEHGESMGASSRGAD

SEQ ID NO: 40046 - protein, 1373 aa, Geobacillus stearothermophilus 10
MANPWVLHRAGLINFWYYDEQYFHFADGKLLLRGSNGAGKSVTMQSLIPVLLDGKKTPDRLDPFGSRARRMEDYLLGEKDVVNRDERTGYLFLEYKRKESDQYVTTGIGLRAKRQKSLDFWGFVLFDNRRIGYDLQLYKQEKTGEKIPLTKRELAALLGPGGTVVETQKEYMELVNKHVFRFESLEAFQELIELLIQLRSPKLSKDFKPTVIYEILESSLPPLTDDELRHLSETIENMDQAKQQLEQLERDERALKRLCDQYRLYNEYMIAEKAAEYVKAVKQAEQLAAEQHRLHDEEEQARKALDELDESIIRLRREEDVLRSREIDLAGHEVFQQAEKYEQLKAERERLQERRERHEQTIAEKERLERQHRRRLDESEARLDDLERKLEDELAQLRADAEEGAFSLHETNEDDFHRHRQKQQEFSFAAWKQEADRHIERLEELARLWRRHDDVKRRYEEASNEAGERRREMDEWRHQQRKWEELFEQEKERFEQAVLAWVEQGGIDVSETDIQAFLQQMGSLYEQYSLDDLKRPFVQAYYDAVGKKKDEKWRLEHDIRLLEEKQAEREAELRQWREQRDPEPERDEQTTAARLALEQEGIPFVPFYAAVEFVDDVPDDVRERIESALSHAGLLDALIAARDVDVDCDRVLIPKPVHMAHTLADYLRPDADAPVSAERIDEVLRSIVITDAEQEGGMTIDETGRYSLGLVRGHAPRRARAMFIGRAARERWRLENIAALEAEIAALGQEIDRLSGEHQAVEAAIRALADWFASFPSDRDVRTAFEEGQEARRQAESKEREWKRQEEKAALLAREWKQIKQQLHDESAELDLAFTLDGCEQAQLAMKSYVRHLHELEVLYRETRHTEAMIAQQRERLAALETEIDEAKGERNRLRDDEERISLEIAEMERTLAQMGADDIRAEIARIQERLAFLRQEIPRLVNERARTEQRLMRLVEEREKGAQREAFACQLAAMWERSFADEAALGLVDLDRSRSLLEQAKEAKQRYEAVLKETRSSLLARLNTVFFQESSNLTEYRATFERLAEQKEPEWIAAAPDDEMAMKAADWREKQERHVIYLDYKGQRATPFAVRAEVERDIALQHEYMKEQDRELYEDVILKSVGRILRSRIQRAERWVSDMNKLMGGLDTSSGLVLSIQWKPKTAETEAELDTKELVRLLRIDSRLLREEDLQRVTNHFRSKIARARELLEERGQGNTLHQIIKEVLDYRKWFAFTLYYEKTNEPKRELTNHRFYQFSGGEKAMAMYIPLFAAAYSRYQEAGDDAPYIISLDEAFAGVDENNIRNLFGLVEQLGFNYIMNSQALWGDYDTVSALSICELVRPRNASFVTVIHYRWNGRVKQLMVDDKEWEMIET

SEQ ID NO: 40047 - protein, 406 aa, Geobacillus stearothermophilus 10
MSTVKEAAAFFRSEPGFKRLFVEMKRKYESLGRVGGAVSLQSFSKEEREAVAAFFGKDVSRVFLSDFEKQLGQTRFAGVGLVELLEHYFGVPLMSNKERRQAEAEERERFFARLAEEHHWFAAVRGQRFVQTAYEADRDGLEAAVRLVGAALCRLPLSSYMRLPLFAQQVASDPHAFDLSTLPGRLLLSALQATTPGQWDVTSVESVNELLQSVGLLREDILNFVTCANILAETEGGPHPVFSAASETNTALNMPLRDVLSLVSVRPARGGTVYIVENAGVFSTLLDTRAPLVSTNGQMNLATMKLLDLLAASGAKLYYSGDFDPEGLAMAERLLERYGQSVTLWRFSLDDYAAANPVVALSSERLAKLASVTSAPLQPLKEEMKRKKKAGYQEAIIGRLTGDING

SEQ ID NO: 40048 - protein, 496 aa, Geobacillus stearothermophilus ATCC 12980; identical to SEQ ID NO: 39941

SEQ ID NO: 40049 - protein, 398 aa, Geobacillus stearothermophilus ATCC 12980; identical to SEQ ID NO: 39942

SEQ ID NO: 40050 - protein, 1373 aa, Geobacillus stearothermophilus ATCC 12980
MANPWVLHRAGLINFWYYDEQYFHFADGKLLLRGSNGAGKSVTMQSLIPVLLDGKKTPDRLDPFGSRARRMEDYLLGEKDVVNRDERTGYLFLEYKRKASDQYVTTGIGLRAKRQKSLDFWGFVMFDNRRIGYDLQLYKQEKTGEKIPLTKRELAALLGAGGTVVETQKEYMELVNKHVFRFESLEAFQELIELLIQLRSPKLSKDFKPTVIYEILESSLPPLTDDELRHLSETIENMDQAKQQLEQLERDERALKRLCDQYRLYNEYMIAEKAAEYVKAVKQAEQLAAEQQRLHDEEEKTRKALDELEESITRLGREEDVLRAREIDLAGHEVFQQAEKYEQLKAERQRLEERRERHEQTIAEKERQERQHRRRLDEAEARLDDLERKLEDELEQLRMDADEGSFSLHETNEDDFHRHRQKQQEFSFAAWKQEADRHIEQLEELARLWRRHDEVKRRYEEASSEAGERRREMDEWRHQQWKWEELFEEEKERFEQAVLAWVEQGGIDVSETDIQAFLQQMGALYEQYSLDDLKRPFVQAYYDAVGKKKDEKWRLEHDIRLLEEKRAEREAELRQWREQRDPEPERDEQTTAARLALEEKGIPFVPLYAAVEFVDDVPDDVRERIESALSHAGLLDALITAREIDVACDRVLIPKPVHMAHTLADYLRPDANAPVSMERIDEVLRSIVITDADQEGGMTIDETGRYSLGLVRGHAPRRSKAMFIGRAARERWRLENIAALEAEIAAVGQEIDRLRGAHQAVEAAIQALADWLASFPSDRDVRTAFDEAQEARRQAESKEREWKRQEEKAALLAREWKQIKQQLHDESAELDLAFTLDGCEQAQLAMKSYVRHVHELEVLYRETCHTEAMIAQQRERLAALETEIDEAKGERNRLRDETERLALRIAEMERTLAQMGADDIRAEIARIQERLAFLRQEIPRLVNERARTEQRLMRLVEEREKGAQREAFARELAAMWEKSFAREAALGLVDLDRSRSLLEQAKEAKQRYEAVLKETRSSLLARLNTVFFQESSNLTEYRASFEPLEEQTKPEWTAAAPDDEMAMKAADWREKQERHVIYLDYKGERATPFAVLAEVERDIVLQHEYMKEQDRELYEDVILKSVGRILRSRIQRAERWVNEMNKLMGGLDTSSGLVLSIQWKPKTAETEAELDTKELVRLLRLDPRLLREEDLQRVTNHFRSKIARARELLEERGQGSTLHQIIKEVLDYRKWFSFTLYYEKTNEPKRELTNHRFYQFSGGEKAMAMYIPLFAAAYSRYQEAGDDAPYIISLDEAFAGVDENNIRNLFGLVEQLGFNYIMNSQALWGDYDTVPALSICELVRPRNASFVTVIHYRWNGRVKQLMVDDKEWEMIET

SEQ ID NO: 40051 - protein, 406 aa, Geobacillus stearothermophilus ATCC 12980; identical to SEQ ID NO: 39944

SEQ ID NO: 40052 - protein, 560 aa, Streptomyces sp. CFMR 7
MPGTPPEPGNAPSAPDADEMRRRLDAYAYLSAPERLEYLAIMRVFCGTLLADLAVPDVMAKLREGGGPASGLDADPLTARLEQLVKWGNLLRGSHTVKASSITEYQRSRARYQLSRLGERVQRDTDGVLAEADAAREVSNELLALVERGLRELAELVAEPGGIAPQDGLERISTLFVQFAGFADSVRDFYAYLGQVLARYDLDGGEYQGFKELLLDYVEAITEDVSFRAPRISAALDALWPHLPGLLEQLDAHAQGLAGLPTRSESRTETRVQRSRGRQLADWEGLRGWFRDTDGQGSQVDQLRDATLRALQSLLANAKRMLRSATGEMSRRRDLLRLARWFDEAAPQDAHDIAVAAFGLYGARHLGIPPASDEVVPAYTSWWTGPVVEVPVALRERGSRAQRGRTASVEDHSAQKERLREAARQRAAERSAAADELCSASGRFDGVRITSAALSLLLELLATALGNAQLRRHAPVNGQEERGFGLDAAWSEDVDLGIRLTVHRTAGARTLLRSAEGDLLLDDLELAVRRTAVSVEGAEPTGSEALPTRSHGASVGGSGR

SEQ ID NO: 40053 - protein, 442 aa, Streptomyces sp. CFMR 7
MTLPSAHDVALATERRTAARLLLAHPLVTSDGPHADLFPLVRRHADWLDSRFQQVLGYRLLVDSSYARLFKAGLGARSGHRLVRSTGTPFTPHTYACLALALSVLVTAPEQVLLSQLVADIRAAAADADIELEETGRAAGKRTLVAALRQLVEWGVLIETHGHVGVIAQEADGEALITVDRELARVIVAGPLAQSRDGADLVRRAADPGFGGPRTYVRRMLVETPVVHLDELTDTERDWLRTRQRREAQAFLELLGLETEIRAEGVALVDPEEELTDLHLPGTGTVAQAALLLVERLVQRLRPVEPGHPATGGVLVVGVAVPDGVVDELLAELITEYGQRSNWQRGYLEDPGALREAVLDLLSRMRLIAPAGPLRSEGAGLPEEYADELPEGRQVTDVRAARPGGGEGWVLLAPAARYATQVTVPTTGGRNKSTDAQQELPL

SEQ ID NO: 40054 - protein, 1420 aa, Streptomyces sp. CFMR 7
MTADARGLVPLPRSGHTEAARTRFRLHRAGIQDVWQYDEQEFAFGDGRLLLRGKNGAGKSKALEMLLPYLLDGDSRALDATGTGRTTLAWLMLDGFEQTNRLGYLWVEFRGTDEAGDHHCLTIGAAIRASKSAQKAVPTFFVTSLRVGEDLHLVEAGKPLAVDRLKEIVGSGNTTDRAVEHRARVARDLFGITDATRYRNLTQLLHRLRRPTVGDRIEHGGLAVLLSETLPGLDEDVVEKVARNLHDLDTVRAELGRLERTDAALRTFLSDYRRYLAGVLRSAARDVSRELDTLSERRRNAGDAAQQTSVLREREKESEEGLRTLREEEESARTELAALHDSHAYRSLRELSERRSTVEALHTAAVTAFAALRGAHEAEESSAERLDEGGQELGARLTELATEHRELLVQAERAVLPAAHLGEAVALPHTVRSPSTQTELTGPDGESPTVRHRPVVRVDLATAEAGLRSWQQQLGAAETVVRNRQRTVQDVTRLSSLADEARGSAMRADEVRERLEGEAEEAADRLEASRQKVAEESREYADEVAAWVRETRNATGPSCPPLDAVLSEVACAADSDAAFSSRTLPAGIDTHAQQTAHLVLEPYADALTRHRDTLAVGVGRLGEEMDRLAEERRAWERRTDPEPPAPYHRSTGRNPASGTPFYRLVDFAEHLNSAERTGLEAALEASGLLDAWVSTGGALLDPLSGDTLLDAAPAHDPLPVAQTLASALRPVAQPDSGITSDQVEHLLSAIVLTPATWTTDGGTATASTVHFDGSWRLGALRGQHHKSAAEYVGAAVRAETRRRALAELEDRLGQTERQLAEARTELAAADSRRRALAQAERDFPRAQRLSGAWSTHASEERAARALSAKAAEAARQAEEARALAVSTRSEADATATAHDLPTDTVALDRVRTALASLFTGVGHLRRAVNGTVARLGGSQADDRRYAEAREKRTEVEEGYRLRHRQLLAAQQDLRTREAAVGSSEEKILADEQAAKDRIAHAVRAIPSREREHNGLRDQRVRAEEKEERLREELADQEATVIETGRALRGALSRPEIVIGAGLDRTTLPDQLQDDPGTSARDRLRALRTLAEAVDRGLGRHREEVSDSLLLKRHTTLRDQLAGGYDAQLDEHDGIKVCRLLDDHGSHDVAVVGERIAVEAAEARGRLTERESDVFQRFLTGELGDHLSTQVITAANLVAALNDTLKTVRTSHGLGVELLWKLNDDAEADVRVAVELLRSPSSLRTREQTEQLRDVLQRRIEDARRADPSAGYTAHLRTALDYRSWFTFHTFVVEDAAPGRRRKLTGRTGLSQGEQRVLSYLVLFAAAAAHFTSLAGSAPHAPRLILLDDAFAKVDEPTHGRLGRILVDLDLDFVLTSERLMGNWAEVPSLHIYECLRDPHVRGVATLHYTWNGRHRRLVSG

SEQ ID NO: 40055 - protein, 422 aa, Streptomyces sp. CFMR 7
MSTLPPATRDWLAAPGLVRLWSAARKRLESNGVQSTGSLRLTAVSSQERNDLSLLLGKPLTGTAVTVRLDVLDKRLRTSAAGLGLRQVLEELGPPLVDRRAAREQNAAERQRVWAALASSLDASPLAGLAWVEQWSDVLRRTGVPKGVAPETAVRTLQQAVQVLGVLLDPHRTGTLGRGELAASVTGSAHGLDDGTWLARLVQRGIALAHDTDLPGDAVGRRALWRLVAVTPDEVSSTVLTYGLRPLGEDWRARSLRERADHHAETHLTSRDLRDVPLCLRAGSVVHICENPRVVEAAADAGCSQALVCTSGSAATVVLTLLDALASGDCRFAYHGDFDWPGIALANRIMRRYGARPWRMGADDYEHLATRSQAEGIPPLPLVGEPVSAVWDAGLAPAMAALGVALHEEATLDLLVDDLGIP

SEQ ID NO: 40056 - protein, 488 aa, Rhodococcus rhodochrous KG-21
MADDRLRLFSFATAEKRAEYLWVLRAFDIARANYVVLLHAAEVVAILERTGSTDPAAALSAQDVAPLLEQLHAWGVLERSYDGTRAASLAEYRNRHYVYQFGRAGYHAFRAVEEVLSARGEDASLSRLALADLLADLTELAAANDAGDGELVYRKLSRLDTTLSDMAERAAGFYLMLGDLVRTTEVTPESFLAHKDAVLAHMREFSTDLARYGPKLAAALARVRETGIDRMLGFAAAHDERVLMPVPERHADWRARWRGLERWFVGVADVPSESERLREGTMSAIAAVLALLRRLTETRRGGVSRESQLRHLAGWFAAAPDEQSAHALFDAVFDLGRPRHFSVVHPDPETVPVTTSWWDAPPVPIARTLAETGRTPSAGAPARVQRNESGIRRLRERQLATQRARAEAARSLAAGGVDERELSEPETEVLLGLLDAALSARVPVSGTVPGATGTQNGVRLTLSPAPEGTVVRTARGRLHLDGLRVSVQ

SEQ ID NO: 40057 - protein, 454 aa, Rhodococcus rhodochrous KG-21
MRARRISPLDRDSYQRAARLILSHHLVTTRYPDRAALPLLRRWATELREDLLELFGYRLEVTETTARLFTVADRLDPGGGARSVTDRPFDRRRYAYLALALAALGRAGGQITLSELAEQVASEAGQVPGVELAPERATDRDAFVDAVAWLAARGAIALADGDAGGWVSDPDRGEALYDIDRPVVAALFRPPRALQHLHSVRGLLTAGDRPDGGRSVGTAEVARRVRRALVQRPVVYAEELDDEERLQLALPRTTTGIELLTGLVAERRAEGVALVDSSGRMSDLRFPGVGTVPQVALLLAGEICARVSEPGSEPVRWPRPADPEAELEAGLDAAIPAAGVFASLAGDAAPAEAPPVPQPAPTHPLVEDSWLAETAAKLADEFGRTFAAQWQADPAGLLDTALTVLERQRLVARVPGGVLALPALARFRGVVVTVRERDPRLALAGEDSNEAEMS

SEQ ID NO: 40058 - protein, 1381 aa, Rhodococcus rhodochrous KG-21
MSSARFRPTRAGIINLWDYRDQEFSFADGRLVLRGPNGSGKTKALEVLFPFVFDGRIEPRRLNPFAGEERTMRSNLLYQGQDSAYSYVWMEFCRGRRDDPEAVTVGVGMRAARGNDKVTRWYFVVDGRVGVDFSLLDEADRPLTRRQLIEEVGADTVTDRPVDYRAAIDARLFGLGIERYEQLINLILTLRRPQLAKNLDPKGLSQALTDGLRPLDEQLVLEAARSFADMEEVSRTLESLAAADDAAQRFVAVYTTYLGQQARADVDRLGARLAAVDAGTSEWTASVAEFDRAGAERALTLERLEVAERDLEQARATLEALQRSSAYEGKQQLDDLAQVVADLERTTAGQAEQAQRAQAELAQREEEARRAAEAAVDAAAAAHRAEDALAAAARDAGIEWTVPAEDTRGEQIAARVAACAEERAADVRAVRTAVAAADGASAARVRAEAAAERARAQLESARMAVDAADAAVESARAEASNLLREWWTGHRHAWSAVDGPEELFEALGAAIAAAGDDEAATPAAVLAERTAPMVEELRFRRRGLDAEITDEQERIALLQAERDMIEAERDDAPPAFPASTTPTGTPGAPLWRLVRFADAVSAEAAAGLEAALEAANLLTGWVCGAAEDAPAGTAVLVPAPPAQRPAGRTLADVLVVEPDTGVPAERVREVLASVAVPDAVTDETGPGVDERGGYRQGVQLGRHTKAQAEYIGATARARRRHLRSSELEAEIAAGRARMADAESARVAVGERLARLDRAASAVPRTGAVLAALRKVSECAGALRTAGEAAAAADRDLDQVIAECSVKERQVRSVAARHRAPHTTRELEQLAAAIRFFESQGQAVLRTRREQVAAAERAREAQVRRDDTRAAAGASAERAVTAEESLRQQQQRLATLREALGADAQQIDAQLAQARERIEAARTEQRAARRAHDDAVEQLGKAEAAHAAAEQALRSALTETRVDAAQLAPYARPDVLALLGISEELRWPSAAVEWPAPEQARLTRAAGDVPAVPAAVGALYAALAAATATVKGGDGARKAARSALTAALQEFDGQLAAAGQDYRLQWDAPEGLTVVRVQDEQGFSSVAEFAVRIGAARREQELLLTDAERRILEDALLAGLAQQIHERTEDARELIARMGTEMRQRRMSSGTTVGVRWVLADHLDDQARAVCRLLDREVSALGPEELARVRAHFAARIRAERAAHPEWSYPEILATTLDYRRWRVFSFGLIGADGTEDRLTVARHSALSGGEQSVSLHLPLFAAAHVMLDSADPQAPRLLALDEAFAGVDDNGRAELLGLSVQFDLDLFMTGYDLWITYAGVPACAHYDLAHSVAEHTVGATLLVWSEGGLLAEHDGSDLAAALGSPGTRRVPAVVEGALEFA

SEQ ID NO: 40059 - protein, 512 aa, Nocardia sp. NRRL S-836
MRVPSEMFRFTTGERAELYVAILNAFGEANERLETALGLDDVRSRLRAVGWLDPLDDQDLIDALGSLRGWGLLDVTQNHAENYRTADEYERRNIQYSLTRRGEAALAGVVHAMGVLASTGALQTAVLDAIADRLAELAVHLSDHGAPDRRVFSTLVELEGHLEALRGNTKQFNGELQRLLRAEGADQDTFREVKSATVAYLQEFTTNLEQRTHAIANRIAVVEGYGVPLLHHRALLGAELPPTGNDGADVAWLELRRARWEGLRSWFLPVDGSTPRAEQLFTVARRAIIALLQVLDRITESRRRSTSAAADFRELARWFAAAPSEEDLHLLWATAFGFGSARHAHLAHADPELVSSSAGWSEAPPVEVSALLRSAGRTERFSRTGRVRDVAAVKAVRAERARAERAALKAAWDRLDTGGGIRLSRFAQLEHEVLERLLELLGRALATAPDPHGVHRATTGDGRVEILLTPPREHREHAVIRSPRGVFISPDYDVEIRTAGGRTTRPREAEAG

SEQ ID NO: 40060 - protein, 410 aa, Nocardia sp. NRRL S-836
MSNLANQLVIAEREEVSRAIRLLLAAPLISARTAPEAFDLVRRRRDPVEKWFDYYCGWSLVVEPRLGYARLAKVRLATDPTRPARRHRAGRAPFDRRRYTLMCVVAAELLAIPVTTIGLLADRVVQACAADPALPRFDTSSRAERMAFVDALRLLESFGAVEVVDGVTDAYVDSAAAKVLYQVDATLLMRLPAAPVGASQVAVPADEVPLLFPELLTRLSRERRYGDTDDEVSDVRRNLRLRHSVFRRLVEDPVVHRDELTPAELAYLESPTGGQLLRRAADQAGFLVEERAEGFMLVDPDGLATDSRFPDDSSNAKVAALLLLDGIASAPGPVAVEQLHGEADALLNRFPKWAKGYRGENGSGRLVADALEVLTAFGLVRVGGGVVRARPAAARYAVTRTSTDDVEDEP

SEQ ID NO: 40061 - protein, 1354 aa, Nocardia sp. NRRL S-836
MTVTELPSASTGTEPAAVIRWVPERAGILNVWRYYDEVFRFHKGRLLLRGPNGTGKSKALELLLPFLFDANLRANRLSTFGTSERTMHWNLMGDGASGATRVGYVWLEFRFPGANGSLDRWFSCGARLAATKHTTTVHPDYFTTDLRIGVPNGLSLTDQHGAPLTTKALEAALGEQGVLHQNAADYRSTVRSTLFHGLSEQRYDALITALLQLRTPKLSQRLDPVLLSTLLSKALPPLGEAEISDLAEGFERLDRQREQLNRMDAEVEAAQRLGARQRAYAQRVLRAAAAKLISATTELGNLAEAAKRSAEEHERAALRKEEAEALEDQLERRIVDTDGRVQGLIGSEAYRKGEQLDRLRTQVRQARTAATTRRADATRHRETARADVEAADTAARHVEARTRTAAALAEVASTDATRVGLASVHAEITRALDDPSRSRGLLRAAVQARGQQVEAVRAALSEHGVAVAGRKETEQALDEAREALADAVERRAVLSARRDEALAKLQDAIVTWAAGCRELVFPEPGALAGLAAAETALLSQVDAVARRVLDAVTREETLVETAREDTERERGALREEVRRLLAEQDLPPLPAHTRTTDRTTMNGAPLWRLVRFADAVPEEVRASVEAALQASGLLDAWVGHDGAITGHDTFAVPGSVPTAPGRSLAEVLVPEVDTPVTTGVVTRLLGEVAYGEHPPKGHPAAIGADGGWRLGTLRGTWQKDEAAHIGAFARQRARQRRLTELRERITTSEELIETHNAALRTLASRRSAVQVDLDARPGHADADAALEALTRAEAAVSTVDGVVRRSLDTLSKQEQRVDRALRELTAAAAEHSLPTERKALNAVAEAVNAFRAAADAWIDEHTTLVATRREADRTAEQAQRSRLVAEQREAEADEAEAVASRLDSELDAVEGTIGVDFRSVLDQLGALRVELDELKQQVGRTRKEISGLAQRLGELTTRRATDAEVRDSAIGVRDQAATRFRHLANGSFPADSGLPDLAAFTEALTTSTGVRATLDAARTVAASWPTLPHSPKNIGDAAHRLAEEVHASREVLGGRADLELDSDEGVQVFSAMVDGMRIGALALFDRLRSDAERSREDITAQERELFDRTLTGDTRRHLAARIRQAHELVDGMNARLERVRTASKVAVRLVWEVSPDLPAGTRAARDLLLKDPVRLSEADRESLHRFFRERVEQAKADESAAGWEQQLGQVFDYTAWHRFVVKLDRMNGTGWQPLTKKLHGALSGGEKAIALHLPLFAAVAAHYQAVARAPRVILLDEVFVGVDAVNRGQVFELLSALDLDLVLTSDHEWCTYRELDGIAIHQLITGGDGEEAVTTARFVWNGTEILDEREEEVG

SEQ ID NO: 40062 - protein, 406 aa, Nocardia sp. NRRL S-836
MRALDRLGSPALMPLWKAVHDRISSGRQVSRVKAGPLDEEQRSAVADLLGTDRLPGEYATVSMAALDELLMSAVGAGAREVVVALLGPLDDRAGQRALADASRSELWAWLDSHVVVTSQPALKGWVESIRRAGLVAGSVERTRRELDRALRILAALPAAGVPLPVLAENLLGDPHALDEGTRGAGMVLRALAELHDVELPGNAQERRALWESAGVVEDELSSVVLAAGLRLSGVGGQVLRVCADEGHVAALTLAQVRATSFVGAPQEVWAFENPSVLAVAVARLGPSCPPMVCTSGWPNSAVIALLRGLATEGSSLRYHGDFDGEGVRIAAHVIARTGATPWRMATEDYLRALGDGTPVGRVTEAPWDDGLASAMREHGSAVPEERVTARLLDEIQERGRVVGGLP

SEQ ID NO: 40063 - protein, 457 aa, Nocardia sp. NRRL S-836
MFRFTTAPNAELHTAVLHAFGEANERLEIALTFDDVHRELRRHHRPVSDEELTGALAGLRQWGLVDTVQRHATHHTTAADYERENLRHVLTRSGEAAVAATRHALKVMNSTGSLDTATLDAIADRLEELHTAETRTYAALMELEGHLDAFQTGVRLFHGELTRLHDQADRDTVAHLQTFVSDLDTRKHRIREALAKLSPDDLHERALKNAGVRDERQWRQERADRWRTLQAWFDGPRIDRLEEIARTAIVDLLRTLDRISEQRRKPTNTAADFRALAGWFARTSSDDEAHELFNAAFGLWPARHAHLQHADGELIPSAEPWHNTPAVPVSPQLRRTGRQEHIGATGKVRDVEQIRRARREQAQRERHELELAWQQLQTDGPIRISSLQQLDHDTFDRLLDLVGRALGAMPDSTGTRAASTSDGRVHIRLRNARGWAKITTQRGTLSGPDYVIEVQRR

SEQ ID NO: 40064 - protein, 384 aa, Nocardia sp. NRRL S-836
MSRTGNQLARLESEEVARGIRMLLASPLLTAAREPDGFDLVRRRREPITKWFDYYCGWRLHVEPRAGYARLTKTTDRPDPTRPARRTRSGNAPFDRRRYTLLCVVCAELLAGPATTIGLLADRVRRSTAVEGLPAFDPSRRDERSAFVDVLLFLEHHGATKPVDGATESFLDHPGAKVLYRVDTTLVTRLLAAPTAPSTVDSMADLTRENRYDDSSTAQRTLWTRHSVLRRLVDDPVVYRDELTEDQRAFLASPSGRKLVHTAVGIAGCTLEERAEGFLVVDADAIATDTRFPDDDSFAKVAALILLDRLAHGDATEDDLVAETDQLLTRFPNWAKAYRSDGGAARLAQDGLALLRAFGLARTENGNVSRLPAAARYAVEEPHD

SEQ ID NO: 40065 - protein, 1289 aa, Nocardia sp. NRRL S-836
MTDRWQPSRAGIINVWRYYDEIFTFHEGRLLLRGPNGTGKSKALELLLPYLFDANLRPHRLSTFGSADRTMHWNLMGEGVHGSTRVGYVWLEFRHGERWFTCGARLQATTNTDNVTTHYFTTDQRVGDLALVNEAGRPLTSSDLATAIGDHGAVHASPAEYRDTVRTTLFPGVSEQRYDSLITALLQLRTPKLSERLDPSVLSTLLSKALPPLDAEELGEIAEGFELLDGQREELRRLDEEIATAEVLASRQRTYAQRVLRAAATALTTAEAELAERTRAAEESENRYRQQVVHVEQTADQLSALSAEVSGVDAEITGLTELPAYQKGKQVDRLRRQLDTASSWAADAAAHAEKLRARATEDAELAARARSAAADLAEHVRKSATEAEHAADRAGMPSVFAELDRGTDVRVQRQLLDAAVDTRIAQVAEIRRVLLSHAQAVHAQKAAQQRLEETREELAQAEQAEVQAQQAQEQAFARYAEDFATWARGCTELSLADPTEILPAAVVEAAALAREEFSRAEATLHESRNALNRQLVQYNAIREKLANQVDVPPPAPYTRDLDHRITAAGTPLWRLVEFYDDVPTSLRGTVEAALEASGLLDAWITPGNSFGLSDEDRFAEPLLAAPAPGRTLLEVLATEDERVHQLLEGIAFGETATGHTAAIGADGTWRLAAAHGRWTKPEPTYIGVAARERGRARRIAELTASIEELATDLAGLDAALSLLSVRRATLAGEIARQPSHDPLELAGEHRTRAQLRCAARKDAVAAAAARCAEADLAVTEALRAVTALATDLPTTEQGLDAVLAAVSAFRTTGHRWLDDRLDAAAAETQAAQALARAATSGELADEASESAGTQQQEAEGLAIVLETVERSSGTEYRELDQRLISLRAQARSLLDSQDALRHKQISLARVLGTWEERRKADSARAFEAATAREAAHARFGHLVTSHLPADAEVSAVDATALVEELADIPFEQRLIRDAEAHLNNTVHDARHQLAGRVDLSLEPDDDVTVLTATVNGVRTGASGLLTTLRADRDRMLAHISDSERALFDQLLTGDTRRHLAQRISSTIDLVSTMNQRLERVQTASNIRVRLVWQVDPQLPLGTHEARDLLLRDPSGLTDDERAALHQFFRERVEEARAHGTATGWEQQLAQVLDYTTWHQFVVKVDRGDGWIPVTKRVHGALSGGEKAIVLHLPLFAAAAAHYQATPTAPRLILLDEVFVGVDATNRGQLLELLVAFDLDLVLTSDHEWCDYRELSGIAIHQLTTGTDGDDAVTTVRFTWDGHSLQPDES

SEQ ID NO: 40066 - protein, 485 aa, Nocardia sp. NRRL S-836
MKLYAYLDARDHQRTYLAIMRLFTSTLLADLSAGEVAGALAGQEREGRVDQGESRIENVINRLRQLVEWGNLVQGRREVVATSIAEFQHGSVRYQVSKLAVRVQRDVDELLRVPEGAREVSRELLPAIERGLNELGGSLSVALLNEGDRTRELLAERVTTLFLQHAELAATVRDFYAYLGQVVTRNHLAPDEIAGFRNLLVEYIQRVVEDVLKYTPPIATALAGIARARSELLRLLGTDLGTNVERARGRTPEDWQELTDWFVDRPGRPSQVTALREATARAIGSLLASVKRATSGGGLVPGRRAELLKLASWFDNSTREQAHEIYAAAFGLYSARHLSPAPEHDSDNERTPWRDGPVCDVTVSVRSRGDRGGRGRPSRILDDPMTEQSLLAEAREAEEIRARHVAELTQAAGKLDDTTLSHGALEVFCELLTLAMAQRDSPRDSGAASDPVRGLKLEITPGTTTRISSAAGTLTLHDATVALKR

SEQ ID NO: 40067 - protein, 396 aa, Nocardia sp. NRRL S-836
MNHFDTLSEIDAANVVRCARTLLRRPLLRSDGPDGELLSLVYRHRAVLQDLFAGLLGYRLVVERRFARLYKSGPGNDDTRGVLSMSPRAYAYLALTLAVLTGTGRQTLLSRLVADIRSAAGEAGIDAPDDVSERRALTAALRHLVSLGVLQETEGSVAQDVVPQEALLTIDTDLLGQLVTGPVGEASSPERLVELAARPGPRGVEHAVRRRLVETPLVLYADLPDDQAEWLRRNQRKETALLEQAFGLYTECRVEGVLAADPEDYLTDLSFPGVSTVARLALLALPDLLDDPAEDAPARHVVSVERLREVCARLVEDYPAAWSKQFTDDLDRLVAEVTELLRRMGLAVPCAEGWSISAAAHRWLPSPDGDPEREQPEPVAVPQVPSWSLFDEENVS

SEQ ID NO: 40068 - protein, 1437 aa, Nocardia sp. NRRL S-836
MSRWRLHRGGVVNIWQYTEQTFDFSGGRAIFQGTNGSGKSRTLELLLPLCLDGDLRQLGSKGFDTVSIRRLMLDDYDGGPNRIGYAWVELVREAADHSGNEYLTCGLGVKASKTSQAITDSWRFVTPLRVGTELQLAGPERVPHGPAQLRDLVGADCMFEEPAFRAKVAETVYGVPAARYGDLLHLQRTLRNPDVGLKVLEGQLEQILSDALPPLDQVMVEQLATSFDDLESIRENIVRLSSADSALSTFLKTYSDYAFGGLRSASERLDAADRSLTRLQREQSKLTSELDVTRVERASAEQALVDMETGEQQAEETIAALKELPAFRDLQDLKTRENLVAEKRSSAVAALETAHRQRAQEDAAVDNVLRLLRRLAEDLSAADALSPPLRENLRLAGMDPDLAPVVPQVPAAEATVTTATVRAKPDPEAAPLPIERRIPPAAAGEEVLTDLAAVVDQAVAIASLARQRGALALSLHEQALALDAQQREVESLRGKARDAQLAATESTALRNQEAQELAEVVQSWLAQVETWTTSGPLVDERPGFTRSSESRSAGSSVSLIGNARGGDREDADGPVFGRSTSDGSGSGGSGSGGSGSGGSGSGGSGSGLGSGGSGSGGPAFGRPAFDQDDRPAFPLPATVTPASAKALSTAAREWVGPLVRAARDAAHAHGLQRTELRARLDTLDEELIGLRSGDERVPVPGQYVSADRDPATGAPFYRLVDFAPSLTDAERAGLEAALQASGLLDAWVTLADTELNDVLAVASPPVEGRTLAHVLVPAVEGSPVPEGFVADLLRAVSLDDREGLSLTTDGEWRAGVLTGHWTKPQAEFIGAGAREAARGRRIAALEEELAELRQRLGTAEDELARAHEHVATWEAHVAAFPGEGELIAKHSRVQAAEESAARAAQRTFELREALEDASARLEAARGELTRQAGDAGLPSDTEALRQAQAAAADARRTADLLGDAVRRRCQGTISDLTDASHRYHEAVADRQSAEADADARCVDHAAQAGTLAELTDAVGGEAKEISEQLTQLERSRKRMRADLKGVRESITTAREQAAKLEALLETNSTQVGEAAEARQRASANFTATVRAPGLVAAAFPDWDGETDDAAVRQAIAAAGDRRGGTEATVIAKLQALQTSLAGSHDIAAEQHAGLLTVTVTGEEGAKPVAVAARQVTTKLGEQRGFLDERYQGIFADYLIRDLAEWLRGQVSVAEDLTKRMNEVLSQARSSQGVHVKLAWKSSAALDDQTRQALALVRLPFGERTPEQDATLRRVFTERIENERDTHSGGYAEILSRALDYRTWHQFTVTVADTGPDGNPRERRLRQLSSGETRLISYVTLFAAAASFYDAVSDEFDPLRLVLLDEAFERLDDPTIARMLGLLVDLDMDWVITWPSGWGVSDKIPRMHIYDVLRPKNGRGVACTQTTWDGAVLDRIDP

SEQ ID NO: 40069 - protein, 334 aa, Nocardia sp. NRRL S-836
MDQPALEELWRLARETLEGGGRSAFSIRVEDEQTARALSELLRKPVAHPARRQISLARLDEHVRAHGSTLPEVLESVHGKPIGLSTDAEASTADAVLRYALREHGLLARPWADEWIEHVRRYGKIPQPALPMIANQAAEILARLDPDRPTTRFALAGNDLDDGRPLTRIVHKALQLAGTDWERAGVLPDAYSNPVLTSQGYLTLNDTLEAREITVVRSTRLLESGVEGPLMVLPDGLTPQARHHLDGKTVRCHNDFTPDGIRTANEVLAWTGGTAWRMSANDYRAAVATLIARGVELPTLNSRPPEASWDADLAETMATTGLMVTEEHVLPSLL

SEQ ID NO: 40070 - protein, 505 aa, Nocardiopsis sp. NRRL B-16309
MAERRALDLDALAVSDRFQLFNFTRRDDHITYLWILRALDRLREVHQVQAGAEDVATALRELAAAHPGAPVPGHGLRHRLDELSADGVVHRFDDASRAGDLASYRNRQSVYQFSELGYWAYQAVENVLGARVEDVNLSRLVFSDVLEDLTALAEANRTGQAESVYRRLSRLDAVMEDMGRRSAQFHVTLGEILRSTEASPEVFLRHKNALLVHMSDFMAELDRYLPRLDQAVHDVEGTGLATLLSRAAEADERLFMARGERVEDWRRRWRAVRGWFASEGGAPTRAAELGAATRSAVSGVIALLRQLTEAQRGGVNRSTQLRHLAEWVFNTPDDGAAHALMGAAFNVRSARHLGTAHEDDEQIPPTTTWWDAPGVELSVTLFRSDRAPTTGVPKPVKRNAGARSALRRQQAQQRAAERVAAARLADEGAHDRVLDEADTRVLLRLVTKALESRSVVAGRLGPATGADGGTAVRLVPSDRGSTVRTSRGTLHLPGFRLELTTGKGK

SEQ ID NO: 40071 - protein, 472 aa, Nocardiopsis sp. NRRL B-16309
MAGRRGPARTVDPADLGSYQQAVRRVLTCDLITATRPRPGALDQVLRWADQMAEDLRGLFGYTLIATTDHVRLVRELDELDPTQRQVFARRGRPFDRRRLAYLCLLLACFQRSQIEISLGDLVRQFTPAANAVEGLGYDPTDSTHKAALVDVAHWLLDRGALHLSDGSLEAWARGGEQADALFDVDHDVCEILFRPARPVQHLGSVTGLLSDTEAGGARRERTAQRARRLLLEHPAVYYADLDADTAAALRARGLAEEVARITGLTVERRAEGVLLADPGGLFTDRPFPGRGGAVTRTAGLLLAQLADLFETSWAALVHMEAPSRADEHADLVRLVDAGLPRHGVVGELAWTDTGDRAPAPAADSQRVPLVERGRLEDMVADLFAEFGAASFTNAWQQDPHGLLDAALALLADLRLVRPVPGGVLVMPAALRYRNIQGALPEREDTGHLPFGSLDEHAPAAATAPDTEGTPA

SEQ ID NO: 40072 - protein, 1458 aa, Nocardiopsis sp. NRRL B-16309
MTRRSDRFRPSRAGVINVWDYVDEEFAFADGRLILRGHNGSGKTKALEVLFPFILDGYTDARRLDPFSGQNRTMKSNLLYRGDESAYGYVWMEFARPASTADGRSPAADALSSSAVTADGRSPAEGGAGAFTEGASAAGAAGETETGGAAGGTGSVPSGPGVGTGSAAETVTLVIGLRAHKHRDGVAPSFFVTDQRLGVDFGLLAADNRPLTERQLKAVLGEGAHHGTAAEYRRAVDARLFGLRDRYIQLLDLLLALRRPLLAKDLDPEKVSDTLTSGLSPVDEALVDQAARDFANLAAVQVRFDNATAADEAVRAFTGEYADYLTTNARHRLATVTAAVEQAAAHADTVQGAAAEHRRATLARDAARTREQDLDTRIGTLAAEVKALEADEALRSHESLRTRREHHEERSRHLATQAARVDHQVREITHLRTEAARVADRIDRDRATARRLSGELAEAADAAGIGHDAEGPVDTGEDLPTTARARAAAREDDVRAVREHLDALDTAQAARQRADADSARSVADLDEAQDGCARADEELTELRAATAQAVGAWADRWSVLDAQGRDALAEAVARFGEPGTATLTEVFNEHVHDAQLEVAARVQGLETEASAIDGELTALRRERDDIAAERDDAPPADHHRTAPRGGRLGAPLWRLVRFADDLPEGEAAAVEGALQAAGLLTAWIHPDSELTRTALDDGDADAYLLPADEPVAGRTLADVLVPERQDHVPAETVSRVLRSLPYHGEDGGAVRGGVDARARFGLGVLVGAHPKPAAEFIGATNRAHRRRDRLAACDRRVDELTERRTAVGDRLGQARELLKDFARARADLPDPTPVAQAVRTVERRSTLLASARTTADRLRRALDTAVAEVDAHRRQVRAVAAERAMPADRAGTEAVASALAGFLETAGALHAARTGAAEFERDLAGRRETIDRLTGALESDQEDLAEQRAAHEEEAAELAALEAAIDAPVKEILIRLDGLRGDLHRTTAERDGARGEAASEHEAVIRSDTQREQGREALVTALGALHERVESLGEFTQPAVRAVLGIDLAAAWPDRRSWPGPEEAADALLSGTAATVHDTLPEGVGALLAALTEAVGAAPRVGEGDIKRSATRMSNALRTFQETLGGDSEGYRVDHEVGPTGVITVFVNDEGGRSPVSAFARTIADRVEEQGALMRDEEHRVLEDELLGGIAQQIHERVAAARDLVRRMDRDTRARPMSSGTQIGIRWARSEALNDRERTAAQLVKRDGTGLGPSGLAELRAVLREMIREYHAAHPRASYKQVLSAVLDYRTWYRFELRLAVPGQEEVRLTKNKHEQMSGGEKSAAIHLPLFAAANALYSSAAPTCPRVVALDEAFAGIDDRYKPELMGLTVTFDLDMFMTGHDLWVHYDSVPMAAHYDMHHDKGSHTVSAMLMLWDGSQTIDADAGFSGNEELAAELLGITPSRFVPQSTAGTLLAEQ
